United States Patent Application Publication US 2024/0093182 A1 - sequence listing, part 3

SEQ ID NO: 4534 - DNA, 1114 bp, Artificial sequence
  DNA replication origin
tttctcaatcttttccccacctttcccccctttgtattccacaaaaccgccattgtcatcatggcccgttctcaatgagctgttgggcacacctcccagacggggtggtggctgggcagaggggctcctcacttcccagtaggggcggctgggcagaggcgcccctcacctcccggacggggcggctggctgggcggggggctgaacccccacctccctcccggatggggcggctggctgggcagaggggctcctcacttcctagtaggggcagccgggcagaggcgcccctcacctcccgggcggggcggctgccgggcggagacgctcctcacttcccagacggggtggctgccgggcggaggggctcctcacttcccagacagggcggctgccgggcggagggactcctcacttctcagacggggcggccggtcagagacgctcctcacctcccagacggggtcccggccgggtagaggtgctcctcacatcccagacggggcggcagggcagaggcgctccccacatctcagatgatgggaggccgggcagagacactcctcacttcctagatgggatggcggccgggaagaggcgctcctcatttcctagatgggatggcggccgggcagagacgctcctcactttccagactgggcagccaggcagaggggctcctcatgtcccagacgatgggcggccaggcagagacgctcctcacttcccaaacggggtggcggccaggcagaggctgcaatctcggcactttgggaggccaaggcaggcggctgggaggtggaggttgtagcgagccgagatcacgccactgcactccagcctgggcaccattgagcactaagtgaacgagactccgtctgcaatcccggcacctcgggaggccgaggctggtggatcactggcggttaggagctggagaccagcccggccaacacagcgaaaccccgtctccaccaaaaaaacacgaaaaccagtcaggcgtggcagcgcgtgcccgcaatcgcaggcattcggcaggctgaggcaggagaatcaggcagggaggctgcagtgagccgagatggcagcagtacagtccagcttcggctcggca

SEQ ID NO: 4535 - DNA, 913 bp, Artificial sequence
  DNA replication origin
tgtctctgcccggcctcccatcatctgagatgtggggagcgcctctgccctgccgccccgtctgggatgtgaggagcacctctacccggccgggaccccgtctgggaggtgaggagcgtctctgaccggccgccccgtctgagaagtgaggagtccctccgcccggcagccgccctgtctgggaagtgaggagcccctccgcccggcagccaccccgtctgggaagtgaggagcgtctccgcccggcagccgccccgcccgggaggtgaggggcgcctctgcccggctgcccctactaggaagtgaggagcccctctgcccagccagccgccccatccgggagggaggtgggggttcagccccccgcccagccagccgccccgtccgggaggtgaggggcgcctctgcccagccgcccctactgggaagtgaggagcccctctgcccagccaccaccccgtctgggaggtgtgcccaacagctcattgagaacgggccatgatgacaatggcggttttgtggaatacaaaggggggaaaggtggggaaaagattgagaaatcggatggttgccgtgtctgtgtagaaagaagtagacatgggagacttttcattttgttctgtaccaagaaaaattcttctgccttgggatcctgttgatctgtgaccttacccccaaccctgtgctctctgaaacatgtgctgtgtccactcagggttaaatggattaagggcggtgcaagatgtgctttgttaaacagatgcttgaaggcagcatgctcgttaagagtcatcaccactccctaatctcaaggacccagggacacaaacactgcggaaggccgcagggtcctctgcctaggaaaaccagagacctttgttcacttgtttatctgctgaccttccctccactg

SEQ ID NO: 4536 - DNA, 965 bp, Artificial sequence
  DNA replication origin
ggccgggcccgagcccgggttcccgcccccgccccgcgcccgctggccagtcggcccggggagcacagggccgccctctcgagcccagcttcactcaggggtgagaggtggcagcggcggctccctcacgtctctcccgggtgtcctgtcagccagcagtttcccccgggtccgcagcgccgcctccgccgctgctgccaccgcctctcccacatccccggcctccaggggagccgccgccgccgcgccacgaccactgcctctagcgcttctgctcccgactccactgctttccctcaccccgccggcccagccggctcggcccggtcgggtgcggggagacagcgccggaggccgccgcagcccccagcccacaatccaccgcgcggctccgccggggcgggagggccgcggcccgggccggggggagcgcccgccgcctggggaaagcggccttggcgcaggccggcgtgcccgtcgcaggcgcagccagagttctctcggggcggggaatacaccgcgtggctcccctgcgcctcctctaatagtcctacacgcagacaaatccacgctgaattccactttccccaccacccttccccccaactcccagttttcaggaacacccagaaaacctcctgccgccttccccgggactgggacgcgacccctccagcgtagccctcgccacccccaagaccaaccgactcgaaacatccctaaatcacccgggacctattaaagcaaatacttccacgagattcctcctctcccccaccccctcgaagtaaatgcttttcagctgttccctagtaaatgcccttccaaaggttaaaggtcacccctccgcaacaacccagttctctctattgaggccttttccccatccagtcctcccctccaagtcttccccaagttccaggccttcctcccagacactgtaatcagttattcctgttacttga

SEQ ID NO: 4537 - DNA, 1183 bp, Artificial sequence
  DNA replication origin
tctcccatttccctctcctccccgccacccgcagagctcccctctcgcagccggagcgcgcggccagccaggcgcggggctcggagttggccgccgcgcgccccgctcccgggcggagggggaggccgcgtagggccggttcctgacaaaggcgcttcctcgagccagggcgcgggatgcaggcgccgcaaactccgctccccgccgcagcgggggcgcgcaggcgggcggggagagccggctgctggccgccggggaagccgccgaggaagttgcgcgcccgccctccccgcgcccctcggcggccccgccgccatccatcccgcggcgccccgcggtcacacttaccggacaattgctggtggccgggatcccagagcggcccccgagacccgaggcgagagggtgaagtgttgtgcgcggggagcgcgagcagacagcccgccgttccgccgctgccctccgcgcccgccagccgagcccagcgaggggaagttgaccacggagccgagcgctgaggagccgcggacgcagggagaggcgttggggctgctttgtggtgcgctcccggagggctggggaccaattcgaccgcaccgcgggactagggctgctgccgctgctgctagtggaggcggcggcggcgccccccgacggtccctccgcctcacaccgcctctgggtcactgacatacactcgcaaggaggggaggggtctagccggggggcggggcctgagggaggggaccgggcagggccacagcggaaggcggtgtcgccgcaccgagaaggctcttgggaattgtagttctccggttgaagaaaaaagggattcattgttgtccagcaccctaccaggctcgctctgcactgagcatgctcgagggcgaggtttggaccgccccctcccaccgttaccatggtcaccgacacacttagcgaacgtgttcagtgctgctgttggctgaacaaggacggtcttgtattatggtgttgttggggatccaacccttagacggtccttcctacttttctccacctccaactcctagccttaccagtcataagtacccagtgaggtctgactttctctccatatttcagtcttccctgctgcgtaatttatcttccacaaaccctaaatcacaaatacctctgtccctcacttccctcaattgaatct

SEQ ID NO: 4538 - DNA, 1234 bp, Artificial sequence
  DNA replication origin
ccggcgcggcggggtacgtgggacgcggcgcgcgggcggggatcccggggctgtcctgcgcggggcgggggcgggggcgcgggtccgagctggcggcgggcgcgcgcacacacgagggggcgcgcgcgcgcgcgcccggggcccggcgccgacctggcaggcagagcctgggaggaggggaggggagggaggcagcgcgagctgggagggcgaaggtgcttgccgcggcccagaacggccccggacccgggccgacggggctgcttgctgccgctgccgctgccgctgcccgaccaagaaaagtggcgagggccgtgccgcgtcggccctgggcagcatttaaaggcctccggggcccggctcgggaaccgggaacagggcggggacccggcggggctgccgcggcttgctcagcgggccctgcccctcggccattggacggtggcggaggccggggcgggagggacgggcctgtccgggtccgggagggcgggggccctgtcggctctcaccggccagagggtgggcagggccggggctggagaagtgagggcccgagccggtcaggtgacaggtgctcgtgccacccgcgcccctccctccagcctccttcctcctgccacgtcctgggcgctggtggggcgatgggaggcgaggtcgagggaagattgggtgctgggggtggtattccagagtgggagacttggcaggatttctttcagagaattccaacaaaatcgggggaaggattcattctgctctctagggcagaaagagaatggaaggtctgaaggcttgcagaaataaatgtgtgacctgaaagaacgaagcagagaggactcaaggtagggacctttctatcccaggaggctagatacagaaaggtcgctcttccctgtggaaggacaggcaggtctaggggtccctggactctctcgagcaggagtcaaagccttaccaaatcaaagtgggcgcagtcactgtcctcagagagcctccattgagccctgtttttaacaagtcacttgcccagtctggggtagtcagcttctcactgaaaatctcctcataccctttgtggagtacttcccaggggatacacacctcttttattcaagccagaaattcctttatggcatttccacactaggacgattatgtaacttctcagataaagctgtatcaacatatcctctattaggtgacatccttggctgaaacattccattgcatg

SEQ ID NO: 4539 - DNA, 1594 bp, Artificial sequence
  DNA replication origin
ggcagcaagcagccccgtcggcccgggtccggggccgttctgggccgcggcaagcaccttcgccctcccagctcgcgctgcctccctcccctcccctcctcccaggctctgcctgccaggtcggcgccgggccccgggcgcgcgcgcgcgcgccccctcgtgtgtgcgcgcgcccgccgccagctcggacccgcgcccccgcccccgccccgcgcaggacagccccgggatccccgcccgcgcgccgcgtcccacgtaccccgccgcgccgggcaagaagatggcgggatcagtggccgacagcgatgccgtggtggtgagtgtggcagggcgcgcgcgaggcgcccctccccgccgtcccgcactccgccgccgcctgctccagcagtgctggggtgctgagcagccgcaggcccggccggcgcccggcgcgtgggaaggcgcccggtacctgttagcagccgctggctgcgcgcggccggtgttaggggctggagaggctcccgggctgcggggctctgggctggggagggagtttggggaggatggcgggtagggacgcccgacagccccctctgtgccgtgcaaccgccagccaggtgtgcgcgtgggtgagtgtgtccggggcgcgcgccccgccaccgcccccgacgtaccggggattcccccttggaaatgggtcggcgcccggggctcccgagagaagttgagcacggccgctgcacttcagtcacgtcccgaaggacaggcctggcccaccgcgcttccagaagcgtttacggttggagaggggcctgccctcctccggcgtggggctctggctcttcggtggacctcgaccttgattttgatctggatctgaagggtctgcggatcttcagaggcttaactaccgggtggaaaggatgggttttgttcgggggtgatgagattatctaagagacggtgaagaggcatcatctgcagacactgtgtgcatgtggaaggctgctggattccaccacatctgtgtgggttcttcctccagccccccaaaaaagagcccatggaaagccaatctgtgtacttctatttttagaaactagatgatggccatttaaacaactctttgagctctccagttcaagcggacgtgtacttcccacgactggtaaatgattttgctctgtgtctctgcctgtaccttcctcctttctcattgctttttaaaattttattcatttgtttattgcattttccagtgggtcaggccttcagggtctgaggtcttggcttttccctaacaggctgtaaaattcatttttcttctcccacccttttcagatagttccattttgtgggcacattaaaggtggcatgagaccaggcaagaaggtgttagtgatgggcatcgtagacctcaacccagagaggtaaggcagagtctttgtcaggacagaactatcaggctgtggctgagccctgcccacttctgttgtggtttagcactcctcttcctctccttgtggacagtgttgctagttgccagtgccaagaaagtaccatgttcccatgaaacgaatatgtatgaatcccagccatcatttctccagac

SEQ ID NO: 4540 - DNA, 956 bp, Artificial sequence
  DNA replication origin
ggaggtgggggtgtcagccccacgcccggccagccgcctcgtccgggagggaggtgggggggtcagccccccacccgcacagccgccccgtccgggagggaggtggggggggtcagccccctgcccggccagtggccccgtccgggaggtgaggggcgcctctgcccggccgcccctactgggaagtgaggagcccctctgcccggccagccgccccgtccgggagggaggtgggggggtcagcccccccgcccggccagccgccccgtccgggaggtgaggggcgcctctgcccggccgcccctactgggaagtgaggagcccctctgcccggccagccgccctgtccgggagggaggtgggggtgtcagccccccgcccggccagctgccccgtccgggagggaggtgggggggggccagcccccaccgcccagccagccgccccgtccgggaggtgaggggcgcctctgcccagccaccaccccgtctgggaggtgtgcccaacagctcattgagaacgggccaggatgacaatggcggctttgtggaatagaaaggcgggaaaggcggggaaaagattgagaaatcggatggttgccgtgtctgtgtagaaagaagtagacatgggagacttttcattttgttctgcactaagaaaaattcctctgtcttgggatcctgttgatctgtgaccttacccccaaccctgtgctctctgaaacatgtgctgtgtccactcagggttaaatggattaagggcggtgcaagatgtgctttgttaaacagatgcttgaaggcagcatgctcgttaagagtcatcaccaatccctaatctcaagtaatcagggacacaaacactgcggaaggccgcagggtcctctgcctaggaaaaccagagacctttgttcacttgtttatctgctgaccttccctccactattgtcccatgaccct

SEQ ID NO: 4541 - DNA, 1352 bp, Artificial sequence
  DNA replication origin
cccccccacctccctcccggacggggcggctgtgcgggtggggggctgacccccccacctccctcccggacgaggcggctggccgggcgtggggctgacacccccacctccctcctggacagggcggctggccgggcggggggcttacccccccacctccctcccggatggggcggctggccgggcggggggccgacccccccacctccctcccggacggggcggctggccgggcagaggggctcctcacttcccagtagggcggccgggcagaggcgccctcaaactcccagacggggcggctggcgggcggagggctgacctccctcctccctcacggacaggacggctgaccgggcggggggctgatcccccctcctccctcccggacttggcggctggccgggcggggggctgacccccccacctccctcccggatggggcggctggccgggccgggggctgaccccccccacctccctcccggacggggtggctgccgggcggagatgctcctcacttcccagatggggtggctgccgggcggagaggctcctcacttctcagacggggcagctgccgggcggaggggctcctcacttctcagacggggtggttgccaggcagagggtctcctcacttctcagacggggcggccgggcagagacgctcctcacctcccagacggggtctcggccgggcagaggcgctcctcacatcccagatggggcggcggggcagaggcgctccccacatctcagacgatgggcggccgggcagagaggctcttcacttcctagatgtgatggcggctgggaagaggcgctcctcacttcctagatgggatggcggccgggcagagacgctcctcactttccagactgggcagccaggcagaggggctcctcacatcccagacgatgggcggccaggcagagacactcctcacttcccagacggggtggcggccgggcagaggctgcaatctcggcactttgggaggccaaggcaggcggctgggaggtgtaggttgtagtgagccgagatcacgccactgcactccagcctgggcaccattgagcactgagtgaacgagactccgtctgcaatcccggcacctcgggaggccgaggttggcggatcactcgcggttaggggctggagaccggcccggccaacacagcgaaaccccgtctccaccaaaaccagtcaggcgtggcggcgcgtgcctgcaatcgcaggcattcggcagactgaggcaggagaatcaggcagggaggttgcagtgagccgagatggcagcagtacagtccagcttcggctccgcatgagagggagaccgtggggagag

SEQ ID NO: 4542 - DNA, 2263 bp, Artificial sequence
  DNA replication origin
tacttaaattatgattacaagtttgtaaaaagtacgcacaggaaaaaaaaactagaagtaaatacaacaaatgttaactggtaatttttttcttcttcttttcttgatgccaaatcttaggtaatgcagttatggccataatttttaaaaggtaaataaaaacaatactatcattgactccaaatgaaatggactttatatttcccacagatttatcaccttaaaaacactcaaatactttccctttgtaataaaatgtcatgagcattagggcactgtcttcggaattacatgtaagattaccaattacaagttagttggccaaataggtactcaatttccctattacaaaattgtaagctgatggggggtgtgcaatttaatttaatttttttttagacagggtttcactctgtcgcgcaggctggagtgcagtttaaattcatttagtttaaacatgttcttagtgtagggtctgctttaaggtctagtcatatgttcttattttgatatttctgtttagtagagctgtaaaatgaaaacaagcatgtgttcgtttaaaatcaatttctagtttctacacacacacaaattcaagcttgcacacgagctaaaccagcagggggcgaaatacaataggcataaatttgacaagccatatagatttttcttactttagtgactgagcaataacacaaaatccagcataaccacaaagcaattgatactcccatttaaagtgatgcagtctccgtatatcttacagcgattgaatagtaaagagacaaatgcgggtccattggagcgctccgagttaatttgtctagaacattgcagaggcgggataaatcgtgatgaactgctattgtccttatctttctcctgatttgtataattcctccacccaaaggggtggacacttctctgtgcctgaggggatgttttccattcttgtttctttgcgtaactgctgagctttgctgttttggaactattttaaattattcaaattactgatgcagacgtttggcaaatatgggcagaatgaggggccggcgggggtcatgatttgtaggaccccgggctcatcatccgagacagtaatcataatcctgtagccttgtagtctgattgttacactggcaggtgttctaacagatattcattgtaaaggaggaggaaaggtaatatttttattacctttatataaataacagttgattatataaataatcaactgttcaggactgatgatggaaacaaaatcggttacgacctctgttccagaaatgcgtttgaatgcataagtttatggtgatctctttagcttcactagatattctccgtaagggtctatgaaaaacgaccaccttctccatccattagccaaattccggactactattttcttgtcggtctcgaagacgatttgtcagtttggcggctgctttcccaccttaaattctatttatcgcaacctcttgttatttgttaaatatcagcttcttcctctgtcggcataaatttaaaaagaggaagagacaggctgtgaatgaaaaagtcgtttttcggggcgaaaagggcaagctgacgaatgctctctagtaggtttttggtaaaaatgtggttctatatttccaaacctttacaattttatttggagagcaagagacttaatccggtcttgagctgaacgttaaccggctgaaaggagcacctgtccttcgccaggagcgcagcctcaaccggcgcctgagtgcgggaagacgtctatccccctacagctctatgactcgcaaggaagtaaaaggaaagggcagcttgcccgcacccaaaatggcggtcggcgctctgcacgacagcgcctgcgcagggataagcgttctgtgacaccaattcccctggagtgtcctcccccaccccacagcacccaccagcgcccggtcccgacctagccacctgcgcccggaagtgacgtgtcggcggcagcggttcccccgctgcatgatgggagagtgtgtggagtgggcggggggtctccgcggaggaggtggaggaggcggcggcggcggcggaagagggcggagggtagtgggatgggggtcccgcggcagcggtgaaactccgggtgggcgtccatggtgctgctgcgctgacagggctgtgagcagccggccttccgctctcaccagttccgcgtcggaatagacggtccttccccggggagtcagttcctccccgggcccctgagccatgcccatcg

SEQ ID NO: 4543 - DNA, 1095 bp, Artificial sequence
  DNA replication origin
gggtcaggagggggtcgggagctcggagagccgagcggcgggcgggggcgcctggagctgtcgcctctacagctgggatgtgtgtgcgcgttgtggcggttgtgttgttgtgaacgtgcgagactttttttaaggctcggattgctggcgcgaaggctgcttcacttttgagttccgtggccgggtttgcatccaacttactgtagtgcgtttttgtgaatttcccggtgttttttttaataatgttgaaaaccttcctctccaccctcttttctttcgtccatgcccaaatgaattgatttgggatctacatgtatattaaacttaacgtctcgttggtttttaagttagaaatctacaagtcatcttcgtggtaaccgcctatgactgaaagggagggggctgaggggagccagctgtcccaagccctagactttgtaccagtaagagagggggtgtcgtcacagggccactacatggacagaaaatcgtattttgttttgttttcttggctataagttacctttagcagaagtggtagtaatagattgcgatgggagtcgagttttaggtttagtttctaagtttcacgaaaatatcaggtatagtttgcattggaataactttttgcttgcaagccgagtcgtttcaggaggtagaaagtaagttttcacagacactgaatggggaggacagtcagcagagtgagacagccagcctcagaccacagcagtttttatttgaatcgaattgggcagcctcagttgggcttagggtagagagtacatgttttcaagctttgttcatgaaatacgctttttgatttcccaatgtatgttaagaaatatccataatgtgtgtaaagaggctagaagttgtagtcaccaggattcctgaggccctaagtgttcacagtagctttttgtagttagagactagtccctgacaagagtgaagtgggctttgggcttcgctccgcccctgaaggaccgtccacctgagagcgtctgggctgcttggccgatgggggttgggggtagttgctcagctcagcagaaggcatgtctcaccctggcagctcccatccctccccct

SEQ ID NO: 4544 - DNA, 766 bp, Artificial sequence
  DNA replication origin
ccgcctcctgcttcctcctccgctgcctgccgccgccgcctccaccattgtataatgctcggggcgcgcaggcagagaacggcggagtcttagcttcagcctcgcctgctgcccgctccccggcgccaccctcgggcccctggagcggggcactccgcatggagcgggagtagctgaggagtgggcggaaacccctcctgatgcgttagttcccaggtggagctgcatgtggtaagttctcccggcgtcgggctggaggggatccgcgggcgcggggggctccgggtggatggggggccggtgttgggactcggccagggctgggagagcccggagggcggaggaggggccgggcgccgccgcgggagggagccggggacggagcaggtacgggaggagcgctccctcccgcggccccggtccgggccccgcgctctcggacccccggcgcctgcgggctgagccgctggggggcagggccggggtcaggagggggtcgggagctcggagagccgagcggcgggcgggggcgcctggagctgtcgcctctacagctgggatgtgtgtgcgcgttgtggcggttgtgttgttgtgaacgtgcgagactttttttaaggctcggattgctggcgcgaaggctgcttcacttttgagttccgtggccgggtttgcatccaacttactgtagtgcgtttttgtgaatttcccggtgttttttttaataatgttgaaaaccttcctctccaccctcttttctttcgtccat

SEQ ID NO: 4545 - DNA, 1147 bp, Artificial sequence
  DNA replication origin
cccgaccccgcccccgccggccccgccccggcccgcctctccccggcggtcccgggaggcgcgataaaggccggggccggccgcggccggccgcggccgcaggaggagcaggaaggggcggcggggcgcagtgggcgcctggtggcagcgccgcccccagctccctgccgggccggcgcgcccctgattttctcgtaaggacgggctgaaagaggaggggagacagaaggagacactccggcccgaggaccaccactgccactagtaacgccccctacacactctagaagtgctcaggcgaatgacgaagcggctggtgacaaaggcggcggcgagtgcagcgcgtgcacagcccgcggagccgcgcgaccgcaaatatgacaagcatttgagctatttggcaacgtggggccggtcagcggggcgggcagggtccccgcggggggcgaggggcagagagctggcccgggcgcccgtctcgctgcctgcaggggttcctgggcgggggtccgctgcgggacactcctccgaggcccgcactggtccgaacggcaggatgggggctccagccgtgagccggggacagaaaaagtcccttgcccgcgtggcctcagcccgacacgagaagtgggtcaccaagtccacggcactttgggagccggaccgaacgagttgcatccttcggggccggccggggctcggtgcagacccggcaggagggaagccaagctaggagacgcagccaggtcggaggcgcagtcctctgcccacaagtttcacattgatagcctttccctcccgtggagtaagcttatgcttggaactacttaaatttaccagggaaatttatactagttggaagagaatgtgtgtatgcccaaatggtgagaatttaagagcactagggaaagaggccagatagatggttccactggaaaattaatgattattttaaaaattacacgtgcattcagcgtcaagatgtaaaaggcaatgcaggcaggcaccttaaaattttggctgccaccccaatcaatatcatttcagatcactttggagtttaatggtccactatactagttgtatttaagaataataaagctttaagacctaacataaaggcgattgtaagtcgttaacatcaaga

SEQ ID NO: 4546 - DNA, 957 bp, Artificial sequence
  DNA replication origin
ctttctgccttgcctttattgaataaaagtttaactttgaattagaagaaaacgtacccatcgtcccttttacactttttgcaggtgatagaatctatcagatcacattggtggctatcactgctctctaagcatcctaaagacagaaagcatgccattaccaaatgttttataagcgttataatgccccgatggtggaagtctggcaatacctagatatacagcaaggctggtgaataaggagctgaggggcggaggaagcgggagcgagggagggaggaaaggagggagtcgccaccttaaatccacgccggaccgggaacctgcagcccacaacctgatccctgccctccccaacagtggaccggccaccacattttttcagatcctcctcacccaacccagcacagcactcacccttctgcgaagaagtcggcacccagtccagctccgagacgggtcggggtggcagcgagggagggggcgtctgggctgtgggcggggggtgtctgtgcgtcactcgagtacaggacggtgagttcgaggggtgggagcgcagaggagcggggaaatcaagtcacggccgaaaagggagaaggagaaacggaggggtggggtgatggagcgccccctccctaaaataaacccaccggcccctacgatctctgccccagagagggaaaataaaatcaggggaaataatagaccaaccaataaatctctaaaacgacgaggagcgaggaacagactttaatttaaaggggggaaaattgagcgagggctggaggggagacagagggaagcggctctgggtctatcccatgcctttgcagtccccaggcagaggaggaggctggctgaggggaagttgcagcggctcccgaggaggaggaggagaaggaggaggaggatgttacaccgtaacaagtacagacagacagccatggatcagagggg

SEQ ID NO: 4547 - DNA, 1040 bp, Artificial sequence
  DNA replication origin
agtggagtggggggtggggagaggtgggtggacgttcaagtgtggggtggagggaaggaggaggcgccggagacccgcggagtcactcggccctcctcgctccagaagtgcgccttctgccaatccgagcgcctcgcgggagtgatggacgcgagcgtgtggccaatggggaggagagggcttccgcagccggccagaggggaaggagcgggcgggcccggcctcctcctctccaccagctcctctccgggccagccctcccctcccgcgcggctcgggtcagtcacgcaaataacagtgtgagggccggggctgcgcgggggggcggcggcccgctgctggctgcgtgacagcgatggggactggctgtgctgcctactctgatccggcaggaggaggcggcggcggaggctggctcctaactctgcgtgcaggcggcggctgctgctcagactctgcctggcgctgccggggagcccctacggccaaaccccactcccgggggacagccagatttggagtgaatcagatcacgcagtgcccactcttggagaccgctccgggggaagtccggcggggctgtgtgctgggatctgaggaggctggaagccgtaggcgggaggcttggccgtgacatttgccccttgcttgcttgcctgttttctgggaaagtcagggtagggtgtgggcaggtcgaaacagctcctgaatacgtcctgttgctttactgagtttctggaaaaggcacttcttaacctggtatgagcgaagctgtaaatgcatgtcgatacctcagcttcctccaaccctccctcccgcacggatcttcctcccactggctcaccttgaaccctgacgtcggtgctccgcagcacccactactagatcttctcctccctgctgattcccaggagttatggcttttcacagtttcttggctactgtccagcaatcattttacagaccttaaccctttacacacccttgtacttgaaagtactgtaactgtaaccaccaataaacctgaatggagatgttca

SEQ ID NO: 4548 - DNA, 1421 bp, Artificial sequence
  DNA replication origin
agagcatccagggcgaagacgacgacgtgaaagaaggctctaggggctgggcattgtgactcacgcctgtaatcccagcagtttgggaggctgaggtgggtggatcacttgaagtcaggagttcgtgaacagcctggccaacatggtgaaaccctgtctctactaaaaaaagaaaaattagccgggtgtggtgggcgcctgtaaccccagcactttgggaggctgaggtgggtggatcacttgaagtcaggagttcgtgaacagcctgatcaacatggtgaaaccctgtctctactaaaaacacaaaaattagccgggtgtggtggtgggtgcctgtaatcccagctactcaggagactgaggcaggaggatcacttgaaccggggaggcagaggttgcagagagttgagatcgcgccactgcactccagcctgggcaaagagagcgagattccatctcaaaaaaaaaaaaaaaaaaagaaaaaaaagaaaagaaaagaagggaaagggaggaaagggaaaggaaaaggaagcaggctctagggacatgacagccctggagggtgggtctgacggtcgggagtgcatgtggaggctgggagcaagctgggcagagtgccctgggtgaatctgctctccaggggttcctgggagctttggcttctgcctgacttctgggtttagcaggagcccacactgacggtccccggacgcacacacaggcctccagcacacttcctctccatttattatataaagcagaactggcactgcacactcagactatgctgtaggtacccagggatgccatcctggagcaggctttagttaatgtttacattttgtccacattcccctccaacccattctactctcctcttcttcccgctaaccctcggcttttcttattcttccccattttttttttttttttttttagaatcaacacctccctctgtcacccaggctggaagtgcaatggtgtgatcatagctcactgcaacctcaaactcctggcctcaagccatccgcctacctcagctcccaagtagcttgggattacaggtgtgagccacatcactgtgctccccattgttaatatgttgagactcttactctgggaggaggagtggcaactaaaggaccccaaatctctacttcttgggacctgtatttgacactccatccagcagcttctgaatttcacacctgataaaagcaggggttctggatgttctcacggcaaccccaatttacacccaagaaggggccttctgggtggccacctggatcctgggtgcttttccctgggcagtgtttatgccaaaggcctgcttgcagcctggatctgctgtgccctgagcccgccctcctcccctccgcgccccaccccaccccagaagagcctctgctcttcctgcc

SEQ ID NO: 4549 - DNA, 1825 bp, Artificial sequence
  DNA replication origin
gccacgccggggcctctcccagcccgggagccaagacacttggctctggcctctctccaccgtttgatctgcccagagaccttgggcggtccgagagcctccgagcctcagtctcctcatctgtagctggggctgggccctgcgcacctctgagtggagtgatgcaagggtgaagggtgtgaaagtctccctgtgttgcccaggggtcaaggtcaaacccaagacacagtgccgccagcagctgccccgcccgcagcagctgcagaaccgcagctcctcctgccaccatccagggaactccctagctccagaggaggagcctatcaagggcacttggctttcctccacgtccccggcacggcacgaggcgtttcctgcagctcctaacttccaatgtagaaatcagctccgggtttcagcaaccctgggagaggaggctggaaatagacgctgggccagcaggaaggtgcacaggcgggacacctttcagctgcctgtttcatctcccgtacatgatacttgctagagtgtaataagtgtaccagaggaaacactcactgacaaagcctattttctccccagatggttacaaatgcacattcttgagtgaccttctacaggctacaaatactgacgtatttatactgtaccttgggtcatggtacccaaaagaaaagcaaagcaaaggagagctcagaaaatacattctagtctcaaagaggaaggaagacaaaagaggatgtctttgtcagtctgcattatgttaacattcatagcctcccgtcaccccccatgatggcagggcacaggtcacctatggtgatggggacatatgaagttccctgagttcttcacttctgtgtcatgtcctgaacggaatcccaagttagctcctggaacccgcagccttggctcacaccagcaatgtcacagaggtaaactgctctcgcttccctgagcttggacttcagggcctggcagccccaccaggccctcaccctggatgaatccaacagtaggaagtgactggggagtccctgagcagacagagggagaggtgcccaccggcccaggcctgatgttcttatgaattcttttggttccagacctttttggccttgccaagccctacaggaaagatcagagcagctggaaatttctagcaggaaagtgccaggttctgaacaggtcctagtctgacttagaaacagttaggggctggggctgctggcggttggcattcttgtctgcttggtctcacagacaggcaggaattgcttgctctcagaagggagtgctgcccctgacgctgggctggagccgaagtaaacccaggacacggggctggggacgataattagaagcctcacttccactccagcaccaagacagcgacacaaagggcctcctctgctggccaagcaggaggggacgggctgccctggggagggctgagactgtcacccagtgtagggccaggcagctgcaaatgaaacacaggcccagaaggctcagacaggcattcaatctttcccagagccaagaaatcctggctagaaacttgactacagagcgaggaaaggcaccgggaaatacttgaaaccaggcaagacccctggtaatgctggacttctgacaagcaaggagtcgggccaagtgcttcttcccgcctggcccaaacacaaaagctgagctggccagagaggtcccaggggagatgggagagcagcttgggaggaacccagcaggaagaggaaagcaggcagcagagtgatttttaccctgctcagaccccagagttttcgcaccgcaagtctgcagagca

SEQ ID NO: 4550 - DNA, 1106 bp, Artificial sequence
  DNA replication origin
ccagctacagatgaggagactgaggctcggaggctctcggaccgcccaaggtctctgggcagatcaaacggtggagagaggccagagccaagtgtcttggctcccgggctgggagaggccccggcgtggccctctggaggccgccgtctgcgactgcccgggcgccctggggcggcagcctggcctcctgggctcgaggcagggggcagaggtgtcccggcggggccggggccgggacacgaagagggaggcgagcaggggctaggaactggagccggtttgtgctcgcgcgcctgcaggccctttgcctcgggcacccccgctccagcccagcgggggcggcgccgagaggggcccatggcccagacggaggctcgggctgcgtccattggcggccgcagccccggggcgggagggggagcggcccggcgtcgggttaccggggaccagcacggcagctggccccgggaggcagccgcggggtgagggtgcattcttggattcctggccgggaagggaaaccaaaccgcacttgtatccaacgcaatcaacaaacatgatgtgtcaagtgctgtattgcacttgagcgggtgtaaaatggtagagctggggttcctgcccaaacgttcgtctaattgaggaaataagaaatccacagagaagaagaacgctggagataccgggaaggacataataaaccccgagaaccacgaccaaccgaatttagaggggttcctggaaagggaagtctgtttttccccaaagtcttctggaaagcttccacaacagggcgaggtgagggtatccgacctgccacctccctccagggcctgccacctgccccagccgcccccactcaccacagcacacatgcccgaccccacactgctgagcacccagcagccaaccctgcctccaccctgcctgcgctccccagtcttaccccaggcctctactctcaagctcctccaaaactaggaccctcactttcttcttccagaagcccacctgcccccaggacactgctgccctatagccctctccagtagaggctcttttctccctccagctatgcagctcagggcctgaagatgtactccgcattg

SEQ ID NO: 4551 - DNA, 1335 bp, Artificial sequence
  DNA replication origin
aggttcagagccggtgcccaaggaggggaaggacgacgcggcacagaacctggcgcgcccacggagggggcctagcctgggcttctggccttgcccgggcactgccggcactcccggggagcagagaggcggagggggcactgtccgtgcgccgggggcagccaccgggcacagggcggggtgggggaggtgcgggaggagaggagagccagagtccggtctgatgggggtcgggggggacgtgggaagcaacaagcctgacgcctgcaaatagaagtcatcaggaaagagacctcaaggcccatttgactgctgggaggtctccggggtggggtcctggggggaggagtgtctgattggcggctaggttctgtttttcagaccagattaaaaaaaaaaaaaattcccctgtcgcctggggagatgtctcagtcacttttctccagcaggaagctgcttcatgttggagcctcctgggattggcagagttaaaaatcctttaacccaggatgccttgggccttttgttcagccctgacaatagaattgggtggagggggctgggaaggcaagtagctgggttagagatgcatccgtggggtgggggtatggggaagcttgtgttcagccactgggtacatgaaagcaactgtgtgtgtgtgtgtgtgtgtgtgtgtgtgtgtgtgtgtgtgtgtgtgtgtgtcgggggagggtataagggagcccagggacactggggcaccagctcgttaacacgtgtgtatgaatgccggctgtgcgcttggcaaatccttaattacacagggagaacttcctgaaccgggaactcagtatcggtccctgaaaggttgggtaatggcttcttcttgcatctggaatccaaggggaccaatctctctggctcccctgggctctcagattcttctagatgtctttgtcttctaaaattctgggatcccaagggaagacacatagttaaggacactcagaaatgcatacctttcaaccctactaatcatcctaaaacctgtgctttcaacatatcacgtccttgatctgtaaccctcaggggcacccacgatctccaatgactgggagtgatggcatttaagtctttccaccatgcagaagtttcttccctcattccccatgaattctctcctgtagccagcctggcccctcataaccccttggatatactgtatcttgaattctccagcctttctgcagttgccttcctgggacattcattcccatgttcacaatctagccaattgtatcccttctctattcagttctagcatcagtcagtcaatcaacaagcatttattgaaag

SEQ ID NO: 4552 - DNA, 1080 bp, Artificial sequence
  DNA replication origin
ggcggccgggttcgggcgtgtgcgtttccaggcgcctctgtccccagcgggaggagcggctgtggagggggcctgctggcggctcaccccaggcccggagggttcgggaactaaacctgcatctggtgtcaaaacccctttttgcccaccctggcactgacgttaagcatgcatcttttttccctgaagttttttttccgtagaagacatactgggtaaattagaaacatgtttgagaaaggagtgagcggcgaacgctggcatctaaacaacacaaaagtgcccacgccaggccacacgcccaggcggccgcggcctcggcggcggcgcagcgccccctggcggccgcgcggggcccctaccgagccgcccccggccgtgtcccctcacctcccctcacctcccacgctcctgagccgggagcagccgggagggccagggagacccctgctcccccaagtcagagcaacagtgggacactttgggaggaagggaatgaaaggagtccaacgccaaggtcctgggggatgctttctgtggtttcgtggctggcgccgaagtcaagaacctagggaaggagccaacataaaagaaaacccttgatccattttcaatgaatgcctgaaattctaccaatccagcatcatcccttcacctgcaggctttgattccttttaaaatgcaaatgcctcaaggaaggggaacccttaaaacaagggcagatggcaggctacatcaagaaatcaccaacgtcaccaaagagacatgattacgccatgatgtgtacatactatatggtaatggcgtttaataagcagcgtttaatcttttttttattcctgttgttggttgtccaggcatccttttgtactctgacaagcagtgtttcttcaggatgccccgcccgcagtggccagaccctctagttcagttgctccaagttttcttaccctttgcatcctaaacctttctccaatcattctacttcccattctcacaatcctgcttgattggaggttcacagcatcttatcgctagtcccaatcattgcagtagcccagtgggagtatctggatccct

SEQ ID NO: 4553 - DNA, 1336 bp, Artificial sequence
  DNA replication origin
ggcaggaccgagcgccaaccacgcccttcggccgcgctgaccacgcccttcttcccgccccttctccctccgcgggagggctttcggcaatttcgcgcagcgaatcgcagctctaagtccgcggctccaccaatacgtggacgctcctgcaagatgagcccgccccctacttcgtcctggcctatgggaagccgggacttcttcagcggctgtcctccctcgcttttggagctccgacctcagcttcgcctgcgagctgggttgtgtaaaggctggtcattttggggcgcttaggggtgggtgccggggggcgcgctttccctcgtgaaggtcgctccaggagtcatgcgtacattcgttcattttgctctggacgcactgatgttcccggctcgccgccgtgccgcagtcacgaggctctccgaacgcctttcactgtgtttctgtttacattcgcgtctgcaagacccggcggcgcgaccgaggcccgaacaggtgctgcgaggcggggcggggagccagtgctgaggggagctccccaggccgggtggttgaagacagcttctggggggaggtggagctctggctcgtggagaatgggaagggtgtggaaaatgaactggtagctacttagccactctgagcagcctgctctgatgggaaatcggtgatggagtcggagggaagtgggaggcagcttgtgggaggccagggtgctcactctctcccctgccagcatgggacctagtaactttcatacatctctatctatctatctattttgcaaagatggggtcttgctgtgttgcccaggctgggcttgaactcctggactcagacgatcctcccgcctcggcctcccaaagtgctggaattacaggtgtgagccactgcatcccatcccctaggagcttaatgacactgccctttagcttttactgcttagcagaatccggaggcatagaggaactaccaccagggtggcgtggggaagaggccctcccttctgatgattttctctcagcagcactttcagcaatctggcttcaactgaatatctccccagttcataaaacaggcgtctgtaaatgtcaaccccagctgggtgcagggtacaaattttttcctacagagctcttgagtcccaggtagtttaggagacaaggacttgtttggttttcccagacctgtcaggacagctcagaggttttgtctaacccaggggccacaaactttggacaacagcagcagctagcccacagatggttttatttgggcatcgcatagcttttctttgtttgtttgcttttgttttttaataagaatttgaatccca

SEQ ID NO: 4554 - DNA, 1266 bp, Artificial sequence
  DNA replication origin
ggcggtggcccgggctagatccgcgcgcgcgcccggccccctcccccgcgtctcttcggtgcctgcggggcccttgcggtgcgggccgtctggcctcgcgtccccgccggcaagggcacaaaggctccctggggggcgggggcgcctcgtgccttcgcctccatcttgcgagcggaacggcgtgtgctgtggcggccgaggggtcggggccgaggcgggcggctgggcttgggaatgcccgggcgcggcgagggagtgcgcgagtccgcgcatctggcggccgagcagctgcgccgctggtcggcctgggccccgggggaggtcactttccctcaggcctctcccgggcgtgggctgtttacccagctccccagtcggggctaatgcagctcgggcctttccccctggaaagatggagaccagtgatgtcttcttatcgccgcgcccagatgcggagagaaaaaatcaagatgtctcattttttttgcctcggagggctaccctttctaactgtcatcactagaacagttctcagcagcctggggacgaatgtccaaaacctgttccaggcccttgatgattagtaggttgggtttagtgtattgtttgtaacaaaaatgagcggaagcctgccagggcagattggacctcactgggaattcatcaggaccacgaagggaggtagcgtttgtaaataatctaacagttctcagatctagggtatgaagagtgttgtgttaaagtgtgtaacaaaggttgttgggtcagtttgccttgggtttagttgaaagatctagaagtcaccactttttactttgttccctccattcccctttcccaccctctgttgagtcaattctggcccacttagaaaacaacaacaacaaaaaacccaaggaattcagtttaacctcttttgcgcaaagctttttaaagcacttccccaccctgcgactgataactcctcccttttttgggctaccttctgcagcctctgtttttactcatcacactgtattgtggtttccccagcccctagcacaatgcttggaacataaaaggcactcaatgatggaaggaagccaaaaggaaacaaaatcagcgtggtagtctaaaggtgacacaacagaaacatttatttaacttcttgagcgagttattcttacaggttaggaaggcagctaagctcaggctctctaagtcaaacaggctttagctctgccatgttactaactctgattaattttttttttaatggtgatgggg

SEQ ID NO: 4555 - DNA, 920 bp, Artificial sequence
  DNA replication origin
atttcctggttcgccggcggccattttgggtggaagcgatagctgagtggcggcggctgctgattgtgttctaggggacggagtaggggaagacgtttgctctcccggaacagcctatctcattcctttctttcgattacccgtggcgcggagagtcagggcggcggctgcggcagcaagggcggcggtggcggcggcggcagctgcagtgacatgtccagcatgaatcccgaatagtgagttcaggagagcaccggtcggctgggtccgtgggccagcttgggggatcttaaaggggtcgaggagggttggggcagaagtcggggcatcggctggggtgaggcgagggtgatgggtcaggagaggctggcggccgggagtcgggccccattgtctgacgcggaggggcggccgcgcgggggaggggtcgggccggaggggtgagccgcccgggcctggaccgggtcaggttagagggcctgactgcggggcgggtgctgaggaagcctgccgaggggcctggggcggtgtgaaggggtatcttctctcggaggcagtgacttttgaaggaggacttgtctctaaggggaggggatggggtgggagagcccttctagagggcactgtcagaccctgcgcccgcactctgcggagctgtcaggatcttcggggtagaaaccagctttacttgtaaatcctgagcttgttggctctctctccttccatcctccccgccaggtttcaggtaatatggatgcttttcgggactgcgtgggattgaggggaatgagtagatggtgagaagcaactgaacatttattagttctctttttgagttgtgtcttggaggagttgtttaagagctcgccgggtccattgccctcctataaaaacctgggcatttgtgagaattttgtttt

SEQ ID NO: 4556 - DNA, 844 bp, Artificial sequence
  DNA replication origin
ccccgcacccccggcagtccctccggtttgaccactccccccggtcccttgcctcccccgacccccagcctccgtcggccgccggcaccaccctccgcccctctccgccccctcccccgtggggcgctgactcgcccggctgccacgtctcactgatgacatcactagggcagctcggccttagccaatccgccagggggagtccgagcgaagtcctagccagcgagtcagaggggaggggagcagggaggggccgagggtggggaggtgagggagtggggaatggggcgggcgacaacccttcaggtacgcatgccccagaggcgcggcgcttggcgggaagctgagtcctggccttgcgtcgcactgtctgtcctcagctcgcgtagccgcgctcgcgactccctttcccggcatgccaggcggtgcggccgccctctgggccgtgtaaaggcccctcggtctaaggcttccctatttcctggttcgccggcggccattttgggtggaagcgatagctgagtggcggcggctgctgattgtgttctaggggacggagtaggggaagacgtttgctctcccggaacagcctatctcattcctttctttcgattacccgtggcgcggagagtcagggcggcggctgcggcagcaagggcggcggtggcggcggcggcagctgcagtgacatgtccagcatgaatcccgaatagtgagttcaggagagcaccggtcggctgggtccgtgggccagcttgggggatcttaaaggggtcgaggagggttggggcagaagtcggggcatcggctggggtgaggcgagggtgatgggtcaggagaggct

SEQ ID NO: 4557 - DNA, 976 bp, Artificial sequence
  DNA replication origin
ccgcctggcatgccgggaaagggagtcgcgagcgcggctacgcgagctgaggacagacagtgcgacgcaaggccaggactcagcttcccgccaagcgccgcgcctctggggcatgcgtacctgaagggttgtcgcccgccccattccccactccctcacctccccaccctcggcccctccctgctcccctcccctctgactcgctggctaggacttcgctcggactccccctggcggattggctaaggccgagctgccctagtgatgtcatcagtgagacgtggcagccgggcgagtcagcgccccacgggggagggggcggagaggggcggagggtggtgccggcggccgacggaggctgggggtcgggggaggcaagggaccggggggagtggtcaaaccggagggactgccgggggtgcgggggcggggagggggccggggtacgagcgtgtcggctcctgcctccgttgcggctgttgctgacctgaccagcttgaggcttgcgccaccctggtggcgctggttgggggctggtaggaggacgtccgctctaagaacagaagggaagtcaaggggctccctggacggcacggagcggttcttctcgtcactcacccatccccacctgggttcggtcatcgtccattgttggccccgcgcactaccattttcttcttagatttcttcccattcttactgtgccccgctcttaactcgtcagcctggctattgcagtagtctccaaatggactctacctctctctctcctctccgccccagcccatttgcacacacagtcggatgtatctttctgagacagcacctgcatcgtgaccccacaaccttcaatggctccacatcccatggatgggagggacacagcccagagccagcctaaaatccaattcctaccttcgtcccggccttcaggttgaattgtaatgtattatcttttagttgctactaaccctga

SEQ ID NO: 4558 - DNA, 1097 bp, Artificial sequence
  DNA replication origin
gcgctgcctgcccgtcccacccttttcgtgcaggcattcagctaaatgacgggcggagcccggcggcggcttccggtcgggggaaaaaagttgggccgaaggaggggccgggaagacgcaagaggaagaagagaaaacggccgggcggcggtggctgtaggttgtgcggctgcagcggctcttccctgggcggacgatggacagccagggcaggaaggtggtggtgtgcgacaacggcaccggggtaagggccgcgcgaggaggccttggcggccacagacgccggcggggacgagcagctggcgcacgggccctcggcccccagggctgcacctccgggccctcggggcgaaggggcgcggggcggtgcctcccacctccgcgggcgtgggagcgagccggccgttccctggtctcccttgagcctgccacccatttagcctgccaccccctcacccttccgggtgggggcggcgggcgagaccggcactggacatggagcctactgaccgcccggcagggacctgctccgcgctaatgcgggggcaattgggctaaagcggacggaagcgtaaaaggctcggtttgtgtgttccgagaagggctcttttccccagggccaccggtttgtaaaaaggagaaagacctagaggccttcctcttcctgtatagttgaagatacaccaaacgagaagcaggaagcgggtttacttaaaaaaaaaaaaaaaaaaagggaagtgctgtcatggagtgtggacctcagccctttcgctgtgtttgttgggctttttattagttttttcgagggaaggggtccagatcggcagcgcatcgttcactttttgttttacatactagtatttggcccaggagtaggcccacggagaccagcatgttccattgagtggttttgggtgacctaggatcccgcaagactcaagtgttaattccactagccttaggggaagttaattagtgttgattatcccacccccagcccccttttttcccttcgtttcagtatacaggtaatgttagcctttaagattcaaaaattgtaaaatctgactaaagcactgatttagaaactatttgaa

SEQ ID NO: 4559 - DNA, 1216 bp, Artificial sequence
  DNA replication origin
atgtattacagagtactgtatgttacatctttcatatatgactcattgttgaaattaaattgagtatgggctcacatacattaaacagattaacagactggaaaggagccatactgtctaagtacttcacttatttttctgattttattgagttttacatataatttataattaatctcaggtgatcatttattcagcaaacatttcttgaactcctgggtgccagacataggtctaggtgccggggacaaacaaaacaatgaaaacagaatccctgcttttagtctaaataatgtattagtggtaataagtgatatgaagaaaagtaaggtgaagagctggaaaatgttagtggttggggaggtagtgtgctccttcataaactgtgatcaggaaaggccttttggatgaagtgacttttgatcagagacctaagttgagcgtgagaggagtgagccttgtgactgtctgggggaagaatcttccaggcaggaaaaatgcaaaagccccaggttggtgggagtgtgccagtgtggctggagcagagtgagcaagggaggggggcaggtgggatatgaggtcagaagggtagcaggagggcaggtcttgttcagccatggtaaagggtttggcttgactcctggtgaaatggaaagtcttgggtgtgggggcggtttaagcagagaaatgataggatctgatgtatatttttaaaggatcattaagtctggtgtggtgaatagactcttgggggaagagggaacaaaggtgggcatagagagaccagttaggaggcactgagaggaggggagggatggtagagttttagaatagaggaggaggttgaaatggttgttttggagaatggaagcgagaatagagaaatgtaataggattgccatgcagcaggaagggctcagttgaggttagtgatacattatagcaagatgttttgtttctttcctatcttgttcagctgcttgacagcaggtgcaatttgtctgtaggaatctgtagatgagttcagcaaggagggagtggtagatggaatgatctgatagaatgagtttcagtggggctatggagttttagggatgagcgagatagaagcagcaatgaagagcaataactcatattaccaaacctccagggttaaggtagtgtgtgagagagaaacagtaaagcagttgaggtatttacagaagcagtgtcttca

SEQ ID NO: 4560 - DNA, 1126 bp, Artificial sequence
  DNA replication origin
cacagcacatgtttcagagagcacagggttgggggtaaggtcatagatcaacaggatcccaaggcagaagaatttttcttggtacaaaacaaaatgaaaagtcgcccatgtctacttctttctacacagacacggcaaccatccgatttctcaatcctttccccaccctgcccccccttccattccagaaaaccgccatcgtcatcatggcccattctcaatgagctgttgggcacacctcccagacggggtggtggctgggcagaggggctccccacctcccagtaggggcggccgggcagaggcgcccctcagctcctggaccgggcggctggccgggagggggcgctgaccccccgcccaacctccctcccggacggagcggctggcccggcggggggctgagccccccacctccctcccggacggggcggctggccggccagaggggctcctcacttcccagtaggggccgccgggcagaggcgcccctcacctcccggacggggcggcggggcagaggcgctccccacatctcagacgatgggctgccgggcagagacgctcctcacttcctagatgggatggcggccgggaggaggcgctcctcacttcccaggtgggatggcggccgggcagagacgctcctcactttccagactgggcagccaggcagaggggctcctcacatcccagacgatgggcagccaggcagagacgctcctcacttcccagacggggtggcggccgggcagaggctgcaatctccgcactttggggggccaaggcaggcggctgggaggtggaggccgtagcgagccgagatcacgccactgcactccagcctgggcaccattgagcactgagtgaatgagactccgtctgcaatcccggcacctcgggaggccgaggctggcggatcactcgcggctaggagctggagaccagtccggccaacacagcgaaaccccgtccccaccaaaaaaacacaaaaaccagtcaggcgtggcggcgcgcgcctgcaatcgcaggcactcggcaggctgaggcaggagaatcaggcagggaggctgcagcgagccgagatggcagcagtacagtccagctttggcccggcatgagaggg

SEQ ID NO: 4561 - DNA, 944 bp, Artificial sequence
  DNA replication origin
ctgggaagtgaggagcgtctctgcctggctgcccatcgtctgggatgtgaggagcccctctgcctggctgcccagtctggaaagtgaggagcgtctctgcccggccgccatcccacctgggaagtgaggagcgcctcctcccggccgccatcccatctaggaagtgaggagcgtctctgcccggcagcccatcgtctgagatgtggggagcgcctctgccccgccgccccgtccgggaggtgaggggcgcctctgcccggcggcccctactgggaagtgaggagcccctctggccggccagccgccccgtccgggagggaggtggggggctcagccccccgccgggccagccgctccgtccgggagggaggttgggcggggggtcagcgccccctcccggccagccgcccggtccaggagctgaggggcgcctctgcccggccgcccctactgggaggtggggagcccctctgcccagccaccaccccgtctgggaggtgtgcccaacagctcattgagaatgggccatgatgacgatggcggttttctggaatggaagggggggcagggtggggaaaggattgagaaatcggatggttgccgtgtctgtgtagaaagaagtagacatgggcgacttttcattttgttttgtaccaagaaaaattcttctgccttgggatcctgttgatctatgaccttacccccaaccctgtgctctctgaaacatgtgctgtgtccactcagggttaaatggattaagggcggtgcaagatgtgctttgttaaacagatgcttgaaggcagcatgctcgttaagagtcatcaccactccctaatctcaagtacccagggacacaaacactctgcctaggaaaaccagagacctttgttcacttgtttgtctgctgaccttccctccactagtgtcctatgaccctgccaaat

SEQ ID NO: 4562 - DNA, 867 bp, Artificial sequence
  DNA replication origin
ccgcgggcccgaggggaacaatgctcggggcgctccgccggagggatcctgggccgccccgcgcgggacccgtgactgtcgccagcccggggcggaggtgcagctgcctcctgcctcgcggtccaggggtccagtttggcattttccctccctggtctgaggcgttttcagtctcgggtgcgacgggggcggggccgcggggcccgacgcctcaagtcttatgcctggggtttgagcggtcaccgcgcggcggccgccgctgctgctcagtggctgtgcccgccaccagccacttttttttttttgtgaataagacgcgctcctttattgtcacatgatatccctcccctcctcccctgcacattcataaatccggagcctgcatccgttcctttcattcagtgctgccattagccaaggtagcggcggcgcgggcttgggcgcaaagagctggttggcagccgcggggacgcgccctggagggaggccccgcgcgcgtctttgcaggggagtgtgggcttcggaaggcgtgctccggaggccccaggtcttttgccccccgcaggcattgagcctcaagagtgctgggaggggaagtgactcagggctgggcgactgggaggcttgtctcttgcagcaggtgacagtgctgtgccctactctaggaaatctactcactttattaaatataccccctttatcctttggcgtctgctgttgccagtccgggcgggagtggggctggtgtttgggaaagggaatttcagtttccttcctgtgagtccccagggaactttgactgcagtaacccctgatcttccagacagccgtcacaggagaggatccctgctgctgtgcctgtcgcag

SEQ ID NO: 4563 - DNA, 2055 bp, Artificial sequence
  DNA replication origin
ggtgtgtttcttcggtcattttcttgttcacctagacgcctgtcccgcggcgggcagctttgctcccttcatcttcctgtccgctcgccccccttcttcacatctccggagatcgcctgatttggggagggggggcggctagagatgaagagggcgccgcagcagaaggggaagcagggcgcgggatagggtttgggggaaggggtgcaaaggcaggctgcgcggggagtgaacgccgcagcgccgtggggagaggcgggcggaggctccgggggctcgggagcgggcagagggggcgagatttgggaaggggacggcggtgggggagagcaggagaaaaacaagcgcgcctcggagcggcagggactgctgcgaggaggaggagagcgccggccgcgggtgggggggctcagtccggggtcgcccccggggggccgggccaatcacggttccggggagcggtcggcggccgggggaggtgcgcctgggaggcggtgcagggcgccccgtccgagccccatctctcgactccaccgatttactccatattggattctcaccgccgccaacaggaggaggaagtagggcggaagcgatgacgtcttcccagcggccagaggtggtggagtgcaaaaagcttcctacttgcgaccgaaaaaaagggagaagaaaaaaaaaaaaactttgtcccgcctactgagcacgccccgcttcctctccccctccctcctggcttccactcccgggggagccgcggagccgagttgtttgcttgcgccgcgaccgtctggctccgaatcctccttgattagggctccgggttttaggaagcccgagaggagggaggaggcgggagcggaggactcgtacacatctggctcccgtttttgccccctccctccttccaaacaccaagattaaaaatcggggggttgggcgggggcagagatgggaaactcaagggaggggagggagtaaaacagctgaagaggtgctcaggctcagaggcacaactacccccaccgcggggtgggaaggtaggggcggcgcaggtgccaggggctggcttctccagcccaacccaaccagagaggggagggggttcgactttgccaaggttctgaaaggcagaggcttttccgtttcacgtgaatcttgtgattttttttcttttttgtctcaatagaggaatggatttttgttttgttttgttttgagatggagtctcgctctgtcctcaggctggagtgcagtggcgcgatctaggctcactgcaacctccacctcctgggttcaagtgattctcctgcctcagcctcccgagtagctgcgactacaggcgcgcgccaccacgcccagctaatttttgtatttttagtagggagggggtttcatcatgttggccaggatggtctcgatttcttgacctcgtgatccgcctgcctcggcatcccaaagtgctgggattataggcatgggccaccgcacccggccaaggaacggatgtttttaagaatcattactcatgcaaagaaaaaggtcaacccagcacagcccagaaacgtttgcatttccgtagaaattatggaatttctcgcgttaagaagcagccccggccgggcgcggtggcacacgcctgtaatcccagcactttggaaggccgaggcgggcagatcacctgaggtcgggagttcgagaccagcctgaccaacatggtgaaacatcgtctgtactaaaaatacagaattagccgggcgtggtggcgcgtgcctgtaatcccagctactcgggagctgaggcaggagaatcgcttgaccccaggaggtgaaggtggcggtgagccaagattgtgccactgcaccccagcctgggcaacaagagcaaaactccatctcaaaaaaaaaaaaaaagaagaagaaagaaagaaagaaaaagaaacaagagacatagtccctatcccttgctgctctccaaacacagtagacttttccatcctcttgaatgtccatgggacaatccagatacgatgttaactaaatagcaaccactgaacag

SEQ ID NO: 4564 - DNA, 1126 bp, Artificial sequence
  DNA replication origin
gaaataccgaaggggcagagtgggggtgaagcgaggacaggcccgggcgcagctgcgcgcgcctcgcggggcggggagcgggggcgccgcggcagcggggggcttctgcaggctgggccgcggcggggcggtgcgaacctttgggccccgtggagtcctccctaaatcaccccctccccgcccctgggaggggggagggcgagtgattgctcagatcccacccccgcccctggggaaatctacactgccggccctaccggacgagaggggggagaaggacacgaacgagagagcggattgcagaggaggctaaaatgtccgcttctcctggcgcccgagccaggcgggaggggtgggggccgcggacggcttcccagtgaaacaggacctgcggggctactgagcatgcccgtccccggccgcggagggtcgctccggctccgcgctccggactttccgggcagcccgcgggaagggccggggtgggggtgctccctcgcccaggactcggaactgagaagcctgtaggtgggggacctgctgggggccccgctgggtttgcgtgaagttgtgagcagatcgatattacttttgaagctttacgatcctactctgactgagcactattgatttgatcgtgttcagagattcccgcagccccctgttctgccggttgtggggagagacagggatgtgggtccttagctctttcagcagtgacatcaattaaagccctaaatctgtgatatcccctattccagcaacaatccaatggactttgataacaccttgatgttcagatcaacagacatatctgagttattcgcccaatgtcctcatttattctatggagctgcaggagtcagacttgcctcaaccacagtaattgatggggaggaccaagaagtgacctgctagtaatgtttccatcaaaaggccccttttgggtgttgaacaagacagaagagaactggcaggcttcatttaaaggaacatgaaggacagagtggaggggggcatttggtaaaccagctggccagagagaggaaagggctatcaggaatctgtatagcccatttaagattcccagcaaccctatgttgtgggtactattccgacccaacag

SEQ ID NO: 4565 - DNA, 905 bp, Artificial sequence
  DNA replication origin
ggtgggggggtcagccccccacctggccagccgccccgtccgggagggaggtgggggggtcagccccccgcccggccagccgccccgtccgggagggaggtgggggggcagccccccgcccggccagccaccccatccgggaggtgaggggtgcctctgcccggccgcccctactgggaagtgaggagcccctctgcccggccagccgccccgtccgggaaggaggtgggggggtcagccccccgcccggccagccgccccgtccgggagggaggtgggggggtcagccctccacctggccagccgccccgtccgggagggaggtgggggggtcagcgccccgcccggccagccgccccgtccgggagggaggtggggggtcagccccccgcccggccagccaccccatccgggaggtgaggggtgcctctgcccggccgcccctactgggaagtgaggagcccctctgcccggccagccgccccgtctgggaggtgtactcaacagctcattgagaacgggccatgatgacaatggcggttttgtggaatagaaaggggggaaaggtggggaaaagattgagaaatcggatggttgccgtgtctgtgtagaaagaggtagacatgggagacttttcattttgttctgtactaagaaaaattcttctgccttgggatcctgttgatctgtgaccttacccccaaccctgtgctctctgaaacatgtgctgtgtccactcagggttgaatggattaagggtggtgcaagatgtcctttgttaaacagatgcttgaaggcagcatgctcgttaagagtcatcaccactccctaatctcaagtacccagggacacaaacactctgcctaggaaaaccagagacctttgttcacttgtttatctgctga

SEQ ID NO: 4566 - DNA, 1218 bp, Artificial sequence
  DNA replication origin
gggcggctggccgggcggggcgctgacccccccacctccctcccggacggggcggctggccaggtggagggctgacccccccacctccctcccggacggggcggctggccgggcggggggctgacccccccacctccttcccggacggggcggctggccgggcagaggggctcctcacttcccagtaggggcggccgggcagaggcacccctcacctcccggatggggtggctggccgggcggggggctgcccccccacctccctcccggacggggcggctggccgggcggggggctgacccccccacctccctcccggacggggcggctggccaggtggggggctgacccccccacctccctcccggacggggcggctgtccgggcggggggctgaccccccacctccctcccggacggggcggctggccaggcggggggctgacccccccaccttcctcccggacgggcggctggccgggcggggggctgacccccccacctccctcccggacagggtggctgctgggcggagacgctcctcacttctcagacggggcggttgccaggcagagggtctcctcacttctcagacgggtcagccgggcagagacgctcctcacatcccagacggggcggcagggcagaggcgctccccacatctcagacgatgggcggcctggcagagacgctcctcacttcctagatgggatggcggccgggcagagacgctcctcactttccagactgggcagccagtcagagaggctcctcacatcccagacgatgggcggccaggcagagacgctcctcacttcccagacggggtggtggccaggcagaggctgcaatctcggcactttggggggccaaggcaggcagctgggaggtggaggttgtagcgagccgagatcatgccactgcactccagcctgggcaccattgagcactgagtgaacgcgactccgtctgccatcctggcacctcgggaggccaaggctggcggatcactcgcggttaggagctggagaccagcctggccaacacagcgaaaccccgtctccaccaaaaaaatacgaaaaccagtcaggcgtggcggcgcgcacctgcaatcgcaggcactgggcaggctgaggcaggagaatcaggcagggaggctgcagtgagccgagatggcagcagtacagtccagcttcggctcggcatcagagggagacc

SEQ ID NO: 4567 - DNA, 1556 bp, Artificial sequence
  DNA replication origin
tggggctcacccagtggacatgtctgcttcactccaaacatcagccagcattcactcgtccggaccactgagacactcttagtgtaatgggttctctcataattaaactgttcattagtggacccataccaacagctccacttctcgtgggctgaactctcatcgctggggctgtttatgcagggacaaactatttcttcagtgtggaattttaaaaacaagaaattcttgaaagcccaatgaaattaagaaagcgggaaaaagagaaagagaagagacaaaaccagaaactgggcaaaaggaaaggaaagacagtaggaagggagagggaagagaggaaggaagggaggagagaaggaaggaaaggaggagggaaggaaggaagggtggagggagggagggaaggaaggaagcaaggaaggagaaggagaaggggaaggggaaggagaagggagggaaggaaggaaggagggaaggaaggaaggggaagggagggagggaagaaaggaaggaaggaaggaaggagaaggggaagggaagtagaaaggaagggaaggaagggaaggaagggaaggagagaaggaaggaaaggaggagggaaggaagggaggaggcaggaaggaaggaaaggaggagaggaaggaagagaggagggaagaaaggagaggaggaaggggagaaacaaaaggaaaaaagaattccaatactttggtcatagtgttcatatgatcttggaagtctccatgggggaggtgtggcctgagttgagcagaaattgacagcaagaaccaagaagcagaacgacactgagggacacagtccttctcatggccactctaaggccctaggcttgaatggcttcctcaaatccaaatcatgtctctcccagtgtttattggtttcttgagctgctgccagagcactacctctgtctgcaaggtctttagagtggatgtggttcagtctgcctggggtgctgaaaattaacacaattctaacagtagtccatgttttaacataaaccagaattatctgtgaattctgacttccctgtcaaagcaggatcctgtgtaaaatactaaatatatgtggctatgtcagatcccttccaaagaaagccagagtaagtgaagaattctgcaaatgtagaaacatggaacctctaagggtcctttctgtggggaaaatctcctgggggatgaggaagaactgagtctttaaaattacctttatttatgtacatacaaggagttctaactggactaatctttaattgtatgaatttctacaactcttgtccttaaaactgttccttcacattctactagtcatgatcgagcatatatattctaaagtatgaggcctagaaattaacagaaaaattgagaaaacgaattgtgatgctcattttatctagaagccatcatccacatggacacacaatgacgcagtcccatgaacaggctttagggtcattagagggtgtcaaagtccaggctctataatccaccagctgtgtgacaaagggagagttctataagatcgctaaacctcag

SEQ ID NO: 4568 - DNA, 1012 bp, Artificial sequence
  DNA replication origin
gtctggggtggtgagggcagggcttcgctggagaaagagctagtggggcgcgaggttcttacaggcccgggagaggtcgaggctggagcccctcggcgcctctaagacaaaggcagcggtggctgcagccggagcctagcactccggcagcgtcgcgccgcgccgcgccgcgccctgggcgcacggccgcctcaccccgagcgggtcggagaaagagcctccctcccagcggctccccggccccggctccgcccgcgaggtctgggctgctgcgagcccgcgccgggtttcgctttccgacgatcataaatagcttggtgtttgtaaacaggcgctgggggcacattccccgcgctcagctcattgttccctcccttcctctctacttcgcgcaggacgcctgggctggggctgggagccgccggggctaggaggtgggggagtccagacccgaagtgacaaaatgctagcattttctttcccccggccgggcgtccacctctaacagcaaagaaacctctaagctgggtctgcagaaagcccgagccacctcaaccccatgttctcaggactccttagcagaggctttcccaacctggcttctccctccttttcctccacgatcccgctttgacttttctccttgcagtgtttagttctgagaattcagtactttgcgcatcaccccctgccccgaaaaacactggcagaccccaataatttcgaggaaagtcatgaagtctatgcgcggagccctgtgcaaaataactcccgctgctgcctgcccggcgttgattcccaatttatttcaagagagtcggctttggggagagagtctgcagggggagggagagaaaagaatactgaaaataaagctggcggccgcgggctactgcctgcgtttgtgtgcgtgtgccctgggtgtgtggtgtttgtgcctgggcgtgcgatttaatggagcgcctctctgcctctccagtgcggccagagctcgcttcgcgcacccacccct

SEQ ID NO: 4569 - DNA, 1066 bp, Artificial sequence
  DNA replication origin
gagtattaaccttgactatgcctttggctccagccacctttttaagagtaaattgctgggcaggtgggggagggctagtcacagcacgaaactgtaagcaggaccaggtgtgaggaggggaggtgataaaaggattatagggtggaggagcagaggctgaggaagaattgggacctagcttggcctggcgaggaggggagaggtcagatgggtctgtagaaaaagaagattagaaagactcagcgatgcttggggttgggactgaggggacaggcaggagggaaagaaggaagatttgggaggagttgcattgagaacagagactacagagggactgatgtgtaaaagagtgcctggacgtcaggcacctcagaccatttgcctattttacgacaagatttatttagatcttgtaggatggaaaaaatggaagtgctgttttctggctatttggaactcctgtcgagtttgtatagggtcaagcagcattgtagaagaaaataaggcatttaggttttaggtcaggtgtgagttgaagaggttttaagttcttgagaacacaggctaagggaggaggaggaggaatggagggtggaaggttgcctatagtgaaggaagcaagcctagagaaaagagagtagagacatagaaggaaggggttcgggggttcttaaattccagaaaagtgggaaaggggtcggggtgtggaaataaggggttggggcacagagataagaggtcagggcgtggaaataagggattggggtgcagagataggtcggggtgtggaaataagggattggggtgcagagataagaggttggggcatggaaataagggattggggtgcagagataagaggtcaggtatggaaataagggattggggtgcagagataagaggtcggggtgcggaaataagggattgggggttcttgcccgctagaaaagctggacttgccactaagggtgaaggagaaggggttgaggggttcttgcccctcctccagaaaagcagagaaggggtagagatatggagagaatggattgggatatttgcccctcct

SEQ ID NO: 4570 - DNA, 1233 bp, Artificial sequence
  DNA replication origin
atgtgtgtgatgtgtgtatgtgctgtgtgtgtgtgtgtgtgtgtgcgctgtggcagtatgtgtatatgccatgtgtctgagtgtgtatttgtatgtgctgtatgtgtgtggtgtgggagtatgtgtatatgtatgtgaggtggtgtgtgtagcatgtatgtgtgctgtgtgtgggtgtatatgtatgtgattgtgtgtgcatgtgctttatatgtgttttgtgggggtatgcatgtatgtatgtgaagtggtgtgtgtgtagtgtgtgtgctgtgtgtggtgtgggtatatgtgctgtatgtgtgctgtgggggtgtgtgtatgtatgtgatgtgtgcgtgtagtgtgtgtggtgtgtgtgtgtatgtgaggttgtgtgtgtagtgtgtgtgtggtgtgtgtgtgtatgtgttgtgtatgtatgtgatatgctatgtgtgtaacatgtgtggtatgtgtacatactgcatgtgctgtatgtgcatgtatgtatgtgaggtggtgtgtgtgtatgcactgtgtgtgtgctgtgtgtgtgtatgtatgtgaggtggtatgtgtatggtgtgtgtatgctgtgtgtgtagtgtgggtgtgtgtgtatgtatgcgaggtggtgtgtgtagtgtgtatgctgtgtgtggtgtgggtgtgtgtagtgtgggtgtgtgtatgcgaggtggtgtgtgtagtgtgtgtatgccgtgtgtgtggtgtgtatagtgtatggtgtatagtgtatggtggtgtgtttgtatgtgctgtgtgtgtgtgctgtgtgtagtgtatgtgctgtgtgtgtgttgtggttgtgtgtgtatgtgaggtagtgtgtgtgtggtgggtatgtgtatgtgaggtggtgtgtgtatgtggtgtggatgtgtggtgtgtgtagtgttcatatgtggtgtatgtgcagtgtgtatcgtgtgtatgtgctgtgtgtgtgtggtgtgtgtgtatgtgctgtgtgtgtattgtgtgtgtgtatgtgaggtggtctgtgtggtgtgtgtaatgtgtgtatgtgctgtgtgtgtgtgaatatgaggtgggtgtgtggtgtgtgtactgtgttcctatgtgcgatgtgtgcagtgtgtgttgtatgtgctgtgtgtgtgtggcatgtgtgtatgtgctgtgtgtgtattgtgtgtgtggtgtgtatctatgtgtccctccctaaagagccacttttggtgttcacaggcttagtgctgtggcccc

SEQ ID NO: 4571 - DNA, 1123 bp, Artificial sequence
  DNA replication origin
gcgcgtgggggaggggaggcggcgccgcggggcccgcgccggccgggcgattgggcacgcgagggagcgggcagggtagggggaaataaattaaggtcgagattcagagccggagagcgcgggaggagcagcggcgagaggcaggagaggcagagaagaagaaaggagggggagagggggcgaagacggccgggaaactcgggggctgcagcctcgcgctcgcgccggagccgtgacggactcactgcagcggctcgcgctgacccgcaacctcaaggcacgaaaaaaggggagggcggagagggaggggaaagcggagtgctgcagcgcgcggggcgggggcggggcttccgcgagcgccgcacatccgggaacctgcgcgccccgctgggcggcgagtgccgcggcgctctggcgagctctggttggggaacgctgagcgcgcggaccacgttcgcccctcagccggccgccccttgcgtgcagggtggggggaggccaggggcgggggcgcggacgtcggtgacgtcgcgtggcggagcccttccggtcatgtggctggaggcgggcggggaagaaggcaaggctgggaggggaaggaggaaatgcgagggttccccggcgggaggaagcgcgaggggtgcgcgagtgctagcgaaagggggacaggggccctggagtggaagccttgcgggagaggaggagcagaggagcagtcttagggtgtcagaaccacccggatgccgcaccaaaaaacaggaaaaatccaagtcctgcgagaggcagtcaaaggtatctgtgcatccgtgtaccgacttggatccactacagaattgcacggcccatcaggactgctgtcaccccggtgcagcacccgcaggcccatctgtaatatgaattggcagagtcaggaaccaggttgcaaagacagagaagcgagccaaagctggccgcagcccgaggcgtggggagaacctgggcaaacgaggagaagggatacttcccactcgcagaaagactttccacccagctctgcattcccataaaccgtccagactcccctttggcggagtccatcagtttttgtttaaaaaaagaaaaaaactcgaatgtagattgcccg

SEQ ID NO: 4572 - DNA, 1351 bp, Artificial sequence
  DNA replication origin
taatcttcacctcaaccttgtaggaggagccggtgagcagcttgatggtgcggttctggccgaagcgctgcccgtccaccttgtaaaagaccgggccgtcattaggctggatgcgcagcgcgatggagaggcgcacgaggcccggcaggtcccccatgtctgggcgagggtctggcgcggcggctccggggggcggaggacagcgccggctgcggccgagtggctggagcgcgaggggcggagaggaagcgcggggagggtgagggaggtggtggagctgaggctgccgctaggaacccgcgccgtcgccgccgtccgcccgggcttttgaggagcagctccttaggctgtggcccccctccccactcggcgaggaagcgggcccaagagacggctccaaggccgcgcgcttccccatcccccgctccagtgctgcgccctccacgcacccgaaggctcgctctggcccgcaggccgccgcgcagatccgcgcagctgggggcgagggagttaatcctgtttacgcaccacaatccccttcagctggggaagcggacatttaggctcctcctagaacagccccgggcaggaggaggagaggtttgggaggcactgggaaggcgctggagttaagcgaccactatgccaaggagcgagacccccggaatctggataccgcctcggccagctacgtgaggtggacactgctgctcgcggatccggcgccagccaggcgggaggaggctgagggggggtaaagggaggcgggaaggggggacaggaaaccgctagccggtgatttaaatttcaggaaatatgagtctttccaaagcttaggggaaatggccgaggaaaggcgcaattccacgtgatggagccacgctggatgaggaatggatgcaagaggaagaaaataaccatattcaaggagctacatcttcttgtgggtgtacatttccattatacgtatgctcgtcccaaaaatgacacatacataaatatatgtaatgaatcacatatatttacacagattttgaagggtgagctattaaccctgtaaaaggcaactgacatgagcctaaggcattctggtgacaaaatggccaagaggtgggatgggtcaaaggattattggcagggggccatatgcgacaccgcagagtttagatttgcatattaagcgtgattagacagttttcgtggcagaggtcggtagacagctgacttttggaagcgaggggagactcagggggtgaggactatactgggaatggcttcccggagcagagagagcacctgcttcagcaccacccagatggatagtaccagagccagggagcacacctgggaa

SEQ ID NO: 4573 - DNA, 1388 bp, Artificial sequence
  DNA replication origin
gagggctttcagacaagcctgtctgctctccttgctcttctggcagaacatggctctaaaatcacagagccatagagcagccaccttcctcactatttgctggacttcctgttcccacattagaacctgctatgaccctagaagctgggaacagcatttatgaaggcctgtccccagacagaggctgtagggtaaagtcacagcctgtgactaaccaagtgatgagaatggggacgctagagcaaaatttttccttggctggttgagtgtccaggggtaaatagcttaaacactcagaggttcaacttctgccaggcaggagatcaataatgtctgcacagcctggagctccctggaggagagtgttacaccctagaactgcaaggagttactactgcgctctcaggcctcctctgtcagctgcaaggaaggggagcgaaatcctgatacagggactccaccacaccacataatggggctggggtgaggggtctaggggggtgtcagctgccctggtggggacagggaggcagccagagtccccctgtcccctgctctctccctgcagtccctcccaaaccctgaagacatcagaccagggagtgggacgtagaaggagggctgaggtctggagagcaccctaaaacaaatgtcaggagaacagagggaagaatgcaagccagagttttcctgggaaaggaagatgaggaagatgcccaggaccccacctccccacccccaggaaagcctgctctccatattcctccgaggcaaaacatctggagcctgtcttcttggggccaagtttaaagtccctctgcgccccagtgaggctcagccccattgctgcctctctgtcctaactccttaccctgattttttccttcctccgagctctcaattctgtctggctcagcccttgccctctgcccactcagggaggagaggcagaactcagctgaaaagaaggaggggggcaggcttggaacccaggcgggacaagccccactccttgcaggtcccgtgggtcgcagaggcatgccactcctggaggggtacccctacaagcatgctacctgaagggtcaaagtagtgtttaaaagcaaagaatacagaagcttcgggggtggagaggagggcgtcacgagattaaggatgattgtccagaggtcttttctcctttattctcaccgttcagaggggaaccccaatcctacccccacctggtgacctctcgatcgctagaagcctctctcacaaacccctgctggcaagtcccccgcctgctcccaactttctccctggagcctgggcagcttcccctaaggacagaggaggggaagcctggctctcctgaagaaactcacaggagtgaatccctggcaaag

SEQ ID NO: 4574 - DNA, 1590 bp, Artificial sequence
  DNA replication origin
acccagcaatgtatttcttatccaactctgcatttcaccttcagataaatgattttcttactggtctccatgagacataatcctgttgagagcatcttgcagtttcactgtctctggaaccttctagaggtgatagatggctggctataaatctgactgtagttgcctcatcatttgttttctggcaatttaaaatatctgtttctttcagctgatcatgattgttggtatactggcattgccaaccaatttttagaatgtgtgaaggtcagtgggctttatcaccactcctcttctctaactggaaagacttgttctaacatctcctgaagtttctgagagagcccagagcaggaactttgggctctagacagaaggccttggaggagggcgggagggaggaggtgccctgttgggaggtggagcctggggaggagggggaagggtggaaggtggggacgggatgggaggggtaggggcgctggggggcgggggagggcagtggggcgcaggaggtgggggagtgtagatgggggcaggaggcggcgaggaggtgtggtaggcgttgttgagtgggtacttggctggctggttgttcttgaccctggtgaagttgatgcagcgcccctagaaaagaattggagagaaggaaacgtgagcggacggcctcacatcagggcctgtggtgctgtggtgggcggcttgcaagcaatatgtggaaagctggcccctgttggtgacaactctctagtggcacatagtagaacttgaggacaagtgagctccccacttccttttcctggactgtgttgcaaaactgttaaaattcatcttttcctggagtctaactctctcaagtgggagaaagggaatgagactgaccttaactgggtgctgtgtacagaggtcattaaactgaatctcctcaacagccctgctaaccgggtattattagctgttccactgcacagatgaggaagcagaggttcagaaaagcggagttactttttcaaggccacacaactaggaagagatggggttggtgattctaacccaaaatagactccagaattattcttcctgctgctactttgccttctggaagggatcctcatatttcataaacaaaagtaatttattttgattagttcagttacatgcctggaaatggcagaaggttaacaccacgagcttctcctatattgtaattcaaggatgtagctagattctgtgattggagttgtcatggaggccctgatgcatttacctcgtctgtgccccctcaaacacttgttcccggtaatgaatgaaggaggcagctatctctactgatgtgatcaatacagcttcctcatccacgccttgccttctccaaagtgctagtaaataataaacagtttgtcctgcccttgttctggctgtgggaatccctcttctacacgcggctgcacctgtgcaggtagccttagttgttgtcacaggaactgacaacctgtgtaccttaagaaatacaacctggggacattctattgccaagcaggcatctgccctgaattctgcttttctcctacccttcttgggtactcaact

SEQ ID NO: 4575 - DNA, 1323 bp, Artificial sequence
  DNA replication origin
gggcccggggacaaagtaaaggctgtcccaaaggtgaatggaagtcctcatcctctctcctgaatatagagagcaggtagaaccctctctctgggggagagatgatggcagctacaactctgcggggggtccccatctccccaaggatgctcctatggccctagtagccaccaccctgggaggtggactgcacctcactgccctgtgcttgtccaagcctccaggacggtcctgctaaaaatttcagcctgatctcagctgcgttacagggccttggagaaaagcctcctcatccccttgcccagaataccagaagggacagcagcgtccctcttccagcccagggcagccacgtgctgacacgatgcagaggccagagcccagagccctggaccacacacgaccagttcttctaagacagcaggctgagcaaggcctggggagttgaggcatgctgcagcaaggggtggggggggggggggcgttggaggtgagggtcctgaatgggcaggtggcatgtgaagtggattgaaatgggagcttatattagcaggtggctgctgagggtcacatgtactggtcaagtcattgcaagctggtcaggcactggggtgggcaatgggtggggcagtcaagactgaggcatggtcaacccatttctgcctgcagttttgtgtggctgggacatcccactggcatctcctagcccagctcctttcggacagctctgcagtcagacctcagacaagctgccagtgggggttagcgggagacctggccacctgagaggctgcgcgacttccctttctctaccagggccgtcgctcctggagcaagaagccggcataagtgggacctcgaggtccaaagcgacctcaacatcaaagaattcagcactgttttgaatagcctgaaccagcttccaaatcaatgcaaaatccactcacctaggggcctcgtcttagcttagcccttgtcacccccagcccgggaccctgaggcgacagcagctcaccttagagacaccaacattcttttctggtccctaatgcgctgtggacagggaaacaacccagcctcgctgacctcagccatcttcctgtgccaaaaaaaaggaaaggagccaaaaggaagagaggcgggagagaccacattttaaggagaaagatatttacagataggctccctctcctgccttcaacccctgagctataaagccttgaaacgttgcaatttgcaatcaaatgtcagacacaaaaccttctggctggagatgcagccgtgccagcttcctgaattctctcctcaatgtcggctgcgtgg

SEQ ID NO: 4576 - DNA, 1353 bp, Artificial sequence
  DNA replication origin
ttctctttccgtcattccctgccaggtgctgagtttctccctccctctcggctcggtccctcccgcggctcgccccggggcgggcgtctccaggaactccaggcggacgcggccacgagccactgccacgtcgccgccgccagcagtccagcgcctgcgtgggctcggggggcggggcagcgctgggaggcgggacttgcgcgtgagcggcgcgtgagcggttcaatggagcctacgggcggcggcgcgctgcgcgccgaggggcggggcccggcggcggttgctggcggagcccgggaggcggagaaggctgtcgttgccttggccgtcgcatccccgagggagtcgtgtcggcgccaccccggcccccgagcccgcagattgcccaccgaagctcgtgtgtgcacccccgatcccgccagccactcgcccctggcctcgcgggccgtgtctccggcatcatgtgtggtaagggggccgggagcggggggcgtgttgccgggtggcgctggggtgcggtgcgggtgccgctaaggcccaaggcgacgggcggaagcgggagtgtggagggtgcgaagtctgggtgatgggcaaggggcgcccagtggtggctgcgggggcgggggccggcatccacgggcgggagagggggtggcggccgggagaaaggcacctgagaggaaggcgggccccctttgccgggggctagcgggcgccttggcgcggagaaggaaccgaaaggggagagaaacgcctttattgaaaaaggaggagagagctgagggaattgaggtgtggagggggttgccttcaaaagggcccaccaggtgagtgaggaaacctgtggaacctcgggcgaggtctcttgaacttaccttgcatttttctaaaaatctttaaaaaaatattttacttgtttctggggaggcccaatagaaaacagaccctagctagagccacggtagtgccattaaacgtgatacttcctgccatcccttgtctcaacagaaaccattgctaatcaataacttggttcatgggcttagacctgatcctctggtggaagaggccttcaaatgtctgtggcgataggttatacataatttatcatttgcgtgtgcacccattaaaaatgccagctctgaaaaatatcagttataccttggatgtatacccctttagaataccaactatgaaaaatatcatttatcccttgcatgtgcatccattaaaaatactagctatggaaagttgagcaaatatctttcctagagccttaaaaaattaaggttaggcccttttattccatgttttgagagtcgtttattatgacctaagtgttagtgaaagaga

SEQ ID NO: 4577 - DNA, 1175 bp, Artificial sequence
  DNA replication origin
agaggaagctccagagagtccgcccggattaggccacagaagcgccgagctcccgcacagacagcctcagggctcacccccaactacggcgacagggcggacccgccggctccatcagatgcactacccacccgcctcgagagagggtctgcaaggcggcgaccgctccgctggctaagcccagcggcacacctattcggagctccaggctcgtcacctaccgcctgcgcagcccggcggcaacagccgcagctccccagccccgcctggccgtcgccgccatcttagtccggagtgcctaagggtctccctgacagaaccacgaaagatctgcgcagccgcaggctggccggtagctgggcgggcactgggaagagcccaccctaccggctgcgggcggtcctgctgcggataagtgcggtggcctacgcgccgaggtttgcaggctactgcgtcaccctgaccaagagaggccggggaacctttcccgtttgcgccaacgcttggttaattcacgcagcactgtgaacgcatgcgtgtttccgtactttgttttccctgttggctaggtttttagctggtgctggtgctgccttgcgaatgctgtttccagcccctaaacctgacccattccctcctctaggaccctactcagcctccaggcccagctcagtgactgcccccaaagactccctggagcattccttctaaaaggttctcgcatttctcctgcccttttcccatgggtctgatgtggaactgtgtctaacccttcctcatagctgtgcttgtcagctgccacttggtcatcttggaccaacccgcacagaggatgtatctggtacagtgctgcccttctccgattaacatgagacttgactagtttccagggcagagtgccaaagcccattacctattcttccagaaccttcctggagtattccgttttctctaggacaacggttctcaaagtgcggactaggggccaaaaaaaagcaggagaacacgttagaaatgcacgttagaacatgttagaaatcctgggccccactttatacttactgaggcacaatctctgtaggtggggactagaaatctttgttacttgctttttttttttttctttttccagagacagggtctatctctgttgcccaggctggagagcaggagtg

SEQ ID NO: 4578 - DNA, 920 bp, Artificial sequence
  DNA replication origin
tcttgcaccagggccgcaggtggagctgcttgccggtcccgtgccgtgcacctgcactcctcagcccttgggcagttgatgggaccgggcgctgtggagcagggggtggcgctcgtcggggaggctccggctgcgcaggagcccaccgccgggcgggggaggggggaaggctcaggcatggcgggctgcaggtcccaagccctgccccgcggggaggcagctaaggcccggccagaaatcgagggcagcagctgctggctcaggtggtaagcccctcactgcctggggcccgctgtctgctctgagtgcggggcccaccaagcccacgcccacctggaactggcgctggcccacaggcgccctgcgcagccccggttcccgcccgcacctctccctccacacctccctgcaagctgagggagccagctctggccttggccagcccagaaaggggctcccacagtgcagcggcgggctgaagggctcctcaagcacggccagagtgggcgccaaggccgaggaggcgtcgaaagcgagtgagggctaggagggctgccagcacgctgtcacctctcagtaacatcaggccttggtgcccggttggattcggagttggaggggaggtgtggaatcaagagtgattccaggctttcagtttgagtgcctaactaagggtgagatggaagtggcacccactgagcagtgttacacagcagagagggaaggttgaaagagggaagatacaggtttaatgagaggaggcagcgtgttcgtagttggccatgatcagtttgcagtgtgcttgggttgtgttttagtcatctattgctgtataacaaaccaccccaaaaccttgtggcctaaaccaacaacagcttataattgctcatgattctgtgggttgactgagggttcagctg

SEQ ID NO: 4579 - DNA, 1138 bp, Artificial sequence
  DNA replication origin
ggctcatgcctgtaatcccagcactttgggaggctaaggcaggtggatcacctgaggtcaggagttcaagaccagcctgaccaacatgttaaaaccccatctctactaaaaatacaaaaattagccaggcgtgttggcacacgcctgtagtcccagctactcgggaggctgaggcaggagaatctcttgaacccagaaggcggaggttgcagtgagcagagatcatatcactgcgctccagcctgggcaacagagcaagactccatctcaaaaaaaaaaatctagggtttggttatcaatagagttaccagttacctcctgaatagctgagactataggcacgtggtggcatgcacctgtagtctcagctactcaggaggttgaggtgggtgaaacacctgagcctgggaggcagagtgaactgtatccagccactgcactccagcctgggctacaggagtgagacctcgtctcaaaacaaaacaaaacaaaaaattaaagggcaaacagtagggagtggaagggggtggtggggtgtcatggactggtgggcaggagaatggataacttggagagggacaccttatctatccttcccactgtcagcaggagagagcagatgcccagttccatgtaaagcacgagttatgcaggacccactctgctctgtcagctcagaagacttgcattgccccgggggtcacttctgccggtaaatggttgagaagccttcctccttggcaccaaagtctccagctggtcaaagtcatgacaaaatgctgagactgcgccaccagccaactcaagtcatggaccctataataatcagactccgatgtgccgggcactgtgccgagggcattagacacacgagaaggtaagaaagtggtaaggatctaggagaaaggagtaagtttcttaaatggagtaaagaattaaaaagtaaactgtaagaggtgttaggaggagttagctacaggcaagattatctcggtcctttctttttgatgcaaagcctagcacatggactgaataaataactgccgtggtctctgacccgcgtcctgagccgtgtaagcggccctggatgtcctggatggtgccagcggttaagcaccgcgctcgcctccctctcgcc

SEQ ID NO: 4580 - DNA, 779 bp, Artificial sequence
  DNA replication origin
gagacagggtttcaccatgttggccaggctggtctcgaactcctgacctcaggtgatctgcccgcctcggccttccaaagtgttgggattacaggcatgagccactgtgcccggccaaaaaaaggcaactttgaatgctgctcatctgcagttaaagagcactgccaggcctgatattcaaagccatcgaggcagaagcaattgctgaggaagatcaggcaatgcttcatgggaaaaaggtgaggacagcctgggctggaggatgtgcaggttgtggatgagaccaaaggccaagaaacaccgggactttcatgtttagactgtaccagtgctgcaactcagagaggagctgggcctggcagtcccttatgatagcaccttagaggagggagaccctgagtttgctagggaaatcaaaggagacttcctggaggtggtagtgtcttagttgacttctcagtgtttgccaggagaacaggggtgtcagagggctcatctggctgagtggcttgtgaaaaggtatgagaaagcccgtcctgtttggggagctacacgccattttgtataggtagagcatgaactagggagggggacttcgtgagtcttgttgggtgtcaagattttattttgggatgaagagccatggaggaattttgagcagaatggcatgagcagacttacatctttggaagatgactctggtggcctgaggagggtggattaatggagaggaggcaggaggcaaggagtcctgtaggatgactaccgacctcagcagg

SEQ ID NO: 4581 - DNA, 1072 bp, Artificial sequence
  DNA replication origin
gaggtcaggacagtatctgttatgtcctatgttgtattcccacagcctgcacagagcctggtatggtaagtactcgatatgtatttacttaatgaaaaacacattatccttagcaaactaatgcaggaacagaaaaccaactaccacatgttctcacttacaagtgggagctaaatgatgagaactcatgaacacagaggggagcaatacacactgggacctccttgagggtggagggtggggggtgtgggaaaagggaaaggagcaaaaaaaataactcttgggtactaggcttagtacctgagtgatgaaataatctgtacaacaaacccctgtgacacgagtttaactatataacaaacttgcacatgtacccctgaacctaaattaaaagttaaaaaaaaaaagtgtgagaagataactcttgtggtttccaaccagaactgtagagtacaggttgaaaacagggggcagggggccagggagaagacccttgcaatcgtttaggtgagaagggatgagcgcctgagctgaggcagtggtggtggggctggagagcagggagagattgggaaaatgtttaggaggcagaactgataggccaggtgagcagatgagggaagggagggagccagataaggggaggaggactcctgggattctggcttaagcatttgagcagatgatggattaaccaagactgtctattctggaagaggaagcaatgtgtaggggaagacgaagaaaccagtttagacatgctgactttgacttgcctgtaaagcatataggtggaaaggtctcaggtggaaccacaaaactggagcccgggacagacatctggattgaagatagagatttgggagctgtcagcctgcaggtgatggttaaagaccagggaggaaataagatcatccagggaaaggaggaggagacgaaacaagaagaatgccaacctgtaaagagtgaggggaagaggagccacggagagaaagggaggcatgagagagggaggaaaagcaggagctgaaagcagcatcaccgctaagggagaagcagcttcgggggctag

SEQ ID NO: 4582 - DNA, 1345 bp, Artificial sequence
  DNA replication origin
actcttacatttcttatcgacaaacagaaataaaattcatgagccaaaaaacccaaaacaaaactaaaaacagggaaaagcttataaaactaaatatggatcccagcattaacagctgaacagagaatgtgatttttaaattcttagcggatgataaagttgtgtagaaactgaacacttacaaattatttaaaacctggaatcactgaccagaaattacacagttggatcatgggagaacagcagaaaggggttattgagggaacctacactgttctagctgcaccccatgcccttctcagaggaaagcctggcattgattagatactgggccagactaatactggcagcagagccagtgatagtaacctgcctaccagaggagccttccactgggttggcaattttgatctgggccccggacatctggcggatctcattaatgttggcgccttggcgcccgattatgcagccaattaagttatttggaatggtgagttcatgggtggtttgagtagatgcatccaaacttgcccaatagcctttcacctctggagagctggagtcaattccggcgaatccggtcccgccgtgcatcatggcaaagtgagactgttgtcttgccacctggttcagcttggccagatcgagcggagaaatggtgtgttgtccttgaatcgagtaggcatctagaggtggtccctccaggtcatgggtggcatgggggtagcccgcagcgtcgctgcaccgatcttggccgcccgcgcagatgactggggagctggccggcatgggctggtacggaatggtcatgactctcccttgcggagactgggagagcgtctccagcatgaccaggcaaatctgcttgacacactcggtgacagactgcggcacgccagcgatggtgatggcccgctcggtggagttgggcagcatatcccccgccacctggacctgcgcccccgtactctcgcggatctctttgatcttacacccgcctttcccaatcagggagccgcactgggtggccggcaccaccagcctcagggtgaccgggggcctgctggccgcggtactgttggtcatggagctgttgatatcttcctccagcttgtcgatgatcatagcgaaagccttaaagatggcattggtggggccggtcagagtgatgattctctccggacaattcccctccgagatgttgatccgcgcgccactctcctcgcggatcctcttaaccgactcccctttcttcccaatgatgcttcctacttcctttccgtgcataagaagccgaatggtgagagtcacatttagtccactttcagtcacaccggcatcc

SEQ ID NO: 4583 - DNA, 985 bp, Artificial sequence
  DNA replication origin
gaggctgaggtgagaggatcccttgagcctaggggttcgagaccagcctgggcaacatagcgagaccctgtggttaaaaaaaaattaaaattagccaatagtggtggcacgcgcctgtagtaccagcttcttgggaagctgaggcaggaggatcacctgtgcccagagagggcgaggctgcagtgagccatcatcgtgccactgtactccagcctgggcgacagttcgagaccttttctcaaaaaaagaaaaaaaaaagttgttcaagttgtgtagtgcacgggaggaaagaagtatgacaataacataggacagcagccggctctttttttcatcaggatgtggagagtgggcgccttgggaagacgaaattgagtatgtgcgggggaggggtcatatgaaacaaggtcgggaagggggcggggagagctggggctctggaggagcttggggctcgcgctgcgggggaggaagcgccttccgcggtcgctggggggaagtggttaggaggaagcacgggcagtggaggggactgctggagggtcccatctgggaaagcaggcacggatgcggggacatttccgcccgtcaccctggcaaagcgctcgcagggctggagggacagagttctcagatccaagtagagaaaaccgggaacggttccggctctggggactgacattcatcgcggcagtttctggtggcaaaacagaggaaacaaaggaatgatgaaatgaactgagctgccttcatgccccggatgaatgttcagccattagaaaagagtgaatcccagctgggatttggggttccacggtgtactagaaaagcaaaacaaagagaagcgcctactagatgccatcttggaaaacaaaagcaaacgtgtgtgtgtgtgtgtgtgtgtgtgtgtgtgatgttacatgggcatggggaaattacggaagtaaatactaatgcttgtggccgggcgcgtggctgacgcctg

SEQ ID NO: 4584 - DNA, 1000 bp, Artificial sequence
  DNA replication origin
gggggaggggaaggagggggaggggaaaccagcgggacggggaggggcgaggtgggtggtgccgatgcctagtctagccagggctgaccgggccgcgcccgcctcgtgaccactgtggggctgcgctgcgggaaaggtgctgacgaggcgggcgcgcgagctcggcggggaggggtgcggccggtcggcggctggccggtccccgacttcccggcaccctgggcgaccgctccctcgtgcgagcgggaccacgcctggaccggggcccgcaggttttacagggcagcgggggggatttggggcacgtggggtcgggccgcaccccgacctcgagacggcgcggcgctgcgagcaaagagccgtcgcgcccggagccaggccccgccctacctgggatcccgtcgccctcccgtccccgggcctacacccgccccacctgggatccagtagccctcccgcccccgggcctacacccgccccggtcagctccggccaggtcggggaggaggagggcacgcgccgggaggaccgcgactggccgcctggagcccgtggctcaggctttcccagccgctgttttcccctttgtacatcgggatccgcttcgcacacttagtttctgcctagcacatgctgggtgttgtgtccagatacactaattctttttccccttcttccccgccagtcactagagccggtctggaagggcactaacgcctgggtagtccttcaaacaaaaagcgttgtgtgtcttgcttactggccgttaatagaagtttccccttgagagtggctttggttaggaaaaaggtggcaaagggcccatccctgaactgattagttgagcctgggacctgatcagaattgaggggaggagtgttaccagaattttctctgtgccccgcacttgcataagtgcttatggctaggagccctgtgtagggcacacattaccttggggcgcccttcgcttctttctcctcttgctgccccttcccgg

SEQ ID NO: 4585 - DNA, 1282 bp, Artificial sequence
  DNA replication origin
tgtgggagcccctttctgggctggccaaggctgggaggtgtggagggagaggcacgagcgggaacctgggctgtgtgcggcgcttgcgggccagctggagttcccggtgggcggggacttggtgggccccgcactcggagcagccagccagccctgctggccccgggcaatggggcacttagcacctgggtcagtggctgcggagggtgtactgggtcccccagcagtgctggcccaccagcgctgcgctcgatttttcgccgggccttagctgccttcctgcggggcagggcttaggacctgcggcccgccatgcctgagccttccacccactccatgggctcctgtgcggcccgagcctccctgacgagcaccaccccctgctccacagtgcccagtcccatcgaccacccaagggctgaggaatgtgagcgcatggcgcaggactggcaggcagctccacctgcagccccagtgtgggatccactgggtgaagccagctgggctcctgagtctgggggggaatgtggagtctttatatctagctcagggattgtaaatacaccaatcagcaccctgtgtttagctcaaggtttgtgagtgcaccagtcgacactctgtatctagctgctctggtggggacgtggagagtctttatatctagctcagggattgtaactacaccaatcagcaccctgtgtttagctcaaggtttgtgagtgcaccaatcaacactccgtatctagctgctctggtgaggatgtggagaacctttatgtctagctcaaggattgtaaatacaccagtcggcactctgtatctagctcaaggtttgtaaacacaccaatcagcaccctgtgtttagctcaaggtttgtgagtgcaccaatcgacactctgtatctagctgctatggtggggccttggagaacctgtgtgtggaaactctgtatctaactaatctgatggggacgtggagaacctttgtatctagctcaaggattgtaaacgcaccaatcagcaccctgacaaaacaggccactcggctctaccaatcagcaggatgtgggtggggccagataagagcataaaagcaggctgccagagccagcattgacaacccgctcgggtccccttccacactgtggaagctttgttctttcgctctttgcaataaatcttgctactgctctcactctttgggtccatgctgcttttatgagctgtaacactcaccgcgaagatctgcagcttcactccttagcccagcgagaccacgagcc

SEQ ID NO: 4586 - DNA, 865 bp, Artificial sequence
  DNA replication origin
tgtccacctctttctacacagacacagtaacaatccgatctctccttcctttccccacatttcccccacttctattcgacaaaactgccatcgtcatcatggcccgttctcaatgagctattgggtacacctcccagacggggtggcggctgggcagaggggctcctcacttcccagacagggcggctgctgggcggaggggctcctcacttctcagagagggcggctggtcagagaggctcctcacctcccagacgggatggcggcggggcagagacactcctcagttcccagacggcgtcgcggccgggcagaggcgctcttcacatctcagacggggcggcggggcagaggcgctccccacatcccagacgatgggcagccgggcagagacgctcctcacttcctagacgggatgacggccgggaagaggcgctcctcacttcccagactgggcggccgggcagaggagttcctcacatcccagacgatgggcggccaggcaaagacactcctcacttcctagacggggtggcggctgggcagaggctgcaatctcagcacttttgggaggtcaaggcaggcggctgggaggtggaggttgtagcgagccgagatcacgccactgcactccagcctgggcaacattgagcactgagtgagcgacactccgtctgcaatcctggcacctcgggaggccgaggctggcagatcactcatggtcaggaactggagaccagcccggccaacacggtgaaaccccgtctccaccaaaaaatacgaaaaccagtcaggcgtggcggcgcgcgcctgcaatcccaggcacttggcaggctgaagcaggagaatcaggcagggaggttgc

SEQ ID NO: 4587 - DNA, 1640 bp, Artificial sequence
  DNA replication origin
gtgcccggctcgcgccgccaggctctgggatcccaggtcgccccgcccagcagcccgcgccctgctcggtgcgctcagcgtccccgccccttaccccaaacccccaccctctgtgccctcaggggggcacccccatcggggcgggaggggggggtcagctgtgccccggtcgccgagtggcgaggaggtgacggtagccgccttcctatttccgcccggcgggcagcgctgcggggcgagtgccagcagagaggcgctcggtcctccctccgccctcccgcgccgggggcaggccctgcctagtctgcgtctttttcccccgcaccgcggcgccgctccgccactcgggcaccgcaggtagggcaggaggctggagagcctgctgcccgcccgcccgtaaaatggtcccctcggctggacagctcgccctgttcgctctgggtacgtacgccggctgcggcgccccctgcgccgcgcgacaccctgcttcccccggtccccgccgagttcccctttccgggggtttctgcgcccgcctgggagagtggagagaagcgagtagtctcaatgggttggcgcctgggaggcaaggggagtcattaagaatgacaaagaggggactgtccggtcgagcgccgaggcttccccgggaaagtggctgcctgggccgtgcgtgagaacacctgggaaggggaagcggagtgtgaacgggcttgaactttaatccgccgcagctgtgtgtctgctcagacacatgcctacacctacctgcttacctggctgcctccaagcccggctcagccggcgtcgctggcgtgtagactgggccgcctcggaacgggggccggcgtctaaccctctggccgggtcttgcctgcgcccctttggcaccccctgcccacctctaagccccagcgacgagcagagatgttcaagatcggcagaggcgccctcgatctcttttcagagctcttgagctttgggggtaggttttggatttttgggcggattaatggttcctttaattaacttccctgggagaagtggtttcggtgtccgccgagggcaggagcgaaaccctagaccgagtgttgccagtttcctttgagtatgtccttggaaatgaaggagggatgggaaaggtgaggggaagttaaacccctctcccgggtcgggtctgcggagcggtgcgttttttggcggtgaagttcaagggtctgtctggacgcggtgagggcgcagcgccgcgcgcctcctggccaattcttgccccttgtgctggtgggtctctctggtgttgagatagctgatcaatagcgcaggtgtcctggttattgctagtcttccgtgaagtgaattgttcgttcgatatgccccgagtttaacccgtatagcatgcggctcgctgcagggtggttagagtctgtggaaagccatggaactcctccccagaaatgcccagagccgcagcctcacccagctccgtgtacaactacagggggttcgcggccccgcctgcaagcctgccctagaaacgctgattaaaaaccgcagcagaaggggaggcatcctgtaagagaaatacaaggcagtcttggaaccggatgctcccagctacacccttacctgaaactcaccag

SEQ ID NO: 4588 - DNA, 1446 bp, Artificial sequence
  DNA replication origin
gcagactaggcagggcctgcccccggcgcgggagggcggagggaggaccgagcgcctctctgctggcactcgccccgcagcgctgcccgccgggcggaaataggaaggcggctaccgtcacctcctcgccactcggcgaccggggcacagctgacccccccctcccgccccgatgggggtgcccccctgagggcacagagggtgggggtttggggtaaggggcggggacgctgagcgcaccgagcagggcgcgggctgctgggcggggcgacctgggatcccagagcctggcggcgcgagccgggcacccgggccgacgaaaaggcaggaagcgcctgacttcagacaccacccccgactgccagcgccgtgcggcagcggactccagcgtgcggggtcggcgccggccgcgtagccggattgtcctgggccgcagtggcggcttccaggctctaggcggcggagcggagccgcccgggcacccgttacctacaccgaggggccgctcctggggcatctctggggcggggaaggctggaggctggggacgcagccaggaaagggacctgtgagtttcgccggccgcttgccaagacttggctcaaggaaagtggtcccctgaatcaatgaagaatttgttaaaccaggtttcccacctgtgccacagttcccatcaattctggcaacgcctgccgccttacctcccaggcaggccacatcgttaagatcagtcttcgtacttctggcctgggactgataaaaaatgggtctctgtgacgaatctggttatatggcaccaccagctgaggccaaaagcctgctagcctgccaccaagtgtaccccgaaagaggggtgtgtgggcccgagtcacctgggtggtcctttcaggatttgtggctctgaggtggcccctggtgctggaatttggggaggtggaggggatagagggaagacattctgggcgaagagtggaagatccataggttcctcggtgaccctcatggggacagtacacccgggagattcatgttctccaggtacccggagctcacggactgaccctcttctcctgcctcctctggcctacgtgctccgggtagatccactttccttgaaggtgggggtgggggctgttgggcctggggaatcttttgctgtttacttggggaggctcaggctctcacggttgacctctgcccagtttgtttcatgtaagtagagcaacctagtttcaagaaggaagcaccaggccattggtctcaacatttgggcaggaagcaccagtgtaaatcattcctttcaatagatttgtcggagcatactttgttcttttagggtaaatcttttccttggtccaccccatgcatgtacaaggcacacatgcacttcctttagtaggttgtccctgactcccacttccttcaggttgatcttgacctgctctg

SEQ ID NO: 4589 - DNA, 1217 bp, Artificial sequence
  DNA replication origin
ttaatgtttgatgaaagagcctaaatgctcactgatttgggagaggtctgataaagaaaaaggagcattaaccttgattatgcctttagctccagccacctttttaagagtaaattgctgggcaggtgggggagggctagtcacgaaatgaaactgtaagcccgaccaggtgtgaggaggggtggcaataaaaagattatagggtggaggagcagaggctgaggaagaattgggacctagctcggcctggcgaggaggggagaggtcagatgggtctgtagaaaaggaagattagaaagactcagcgatgcttggggttgggactgaggggacaggcgggagggaaaaaaggaagatttgggataacttgcattgggaacagagactagagagggactgatgtgtaaaagaatgcctggacgtcaggcacctcagaccatttgcctattttacgacaagaattatttagatcttgtaggatggaaaaattgaaagtgccattttccggctatttggaactactgtcgagtttgtattggggtcaagcggcattgcaggagaaaataagatgcttagattttaggtcaggtgagagttgaagaggttttaagttcttaagaatacaggctaagggagaagaaggaggaatggaaggtggaagagtgcctatagtgaaggaggcaagcctagagaaaagagagtagagacacggagaaggggtggggggttcttgccctccagaaaagcagagaagggatcggggcatggaaataaggggttggggcacagagataagaggtcggagtgcagaaataagggattggggcacagagataagaggtcggggtgtggaaataagggctcggggcacagagatatgaggttggggtatggaaataagggatcggggtgcagagatatgaggttggggtacttggccctcccctagaaaagcaggacttgctgctaagagtgaaggagaaggggttgggggtttcttgccccccagaaaggcagagaaggggtagagacatggagaggaagaggttggggtacttggccctcccctagaaaagcgggacttgccactaagagtgaaggagaaggggttgggggtttcttgcccctcagaaaggcagagaaggggtagagacatggagagaagggattggggtacttgcccctcccccagaaaagcaggacttgccgctaagggt

SEQ ID NO: 4590 - DNA, 1245 bp, Artificial sequence
  DNA replication origin
cctcccaaagtgctgggattacaggcgtgagccaccgtgcccggccgtaaacattttttaaaatagataaatttgacctggatagcagccccactgttcatttttatgaggagagggagggagggctaaataaaaaatatttaagaaaatgtgcatttacatttgctggaggtgtactagatgatgagtaattggtcacaatggtaggtaagtgtatcgttcaacccagctcatcagtcagtcaacaagtgtttactgaacaccttctatgtgtggttactgtgcagtgctggggatgccacgagccaagagtttacactctagtgaggagagacagacactaagcataaaaacaaacaggttcaagcattgatacccattatgcagaagataaactcattttaacctgagggaggaggctgctttagccagagtggtcagggaaggctcttttgggaggcagcagtgagctgttgcaggtgggttcgtgagacggatcagaggataagctagtgctggctgattgcaggcattttcattatgctatttgaggccacatcattggccgagagtggagcgaagagggagtcagggagatttgagatgagaaggtgggaaatgatcctgttgaagagtctgtacttcgagagaagggcaggttgcttggcaatgttaagaaatcatctgaaaggtgtagagggtaatttgaagtgagtccagtccacagagttttgtgcaagggtcaatggcccagatgcaggcaggggcaaggtcacatagggtttaactaagggtgggactctgtgaggtagaaacagtggtgggtgagagggcagaggagttagaggtgttttgcaagggaatggttatccagttggataatttaagctacatgagaagagatgggaaaagtagagttggagatagataattaaaaggtgattagcaggtatcagagatgttggagaattgctaggaggtggggtgccagagctgggctggaaggggatggtcagagtaggatgttgacatccacacattgaaagtggtgatcttggtagcagcaagatctagggtatgaccacgggagagggtgactgaggctggggtggaaggagagataagtggcattggaggccacgaagatgtgatggtgggtgtcgggtggatcaccatgtagatgtcaacgtcggcaggaatgagtaaggagagtggtggaggggaagatggttagccaggagctgg

SEQ ID NO: 4591 - DNA, 1321 bp, Artificial sequence
  DNA replication origin
tcctggcgcggagaccctggcatccctcggccgggcgggagccgcttggcccaggtggggcgcgtctgttgccgagcgcgtcggtgctgcagccctggccggcagcggtgtgttttgcgcctaaaggtttctggtgatgatgtagcatccgaggctcttaggaaatcggggctgcaagcactggcccctgcttggggatggtgggaccctcgcccggagcgtaacgcctgacaggtggggctttcttttgggtccgaatggaggggcggcaagcctcgcctcgcctagccgggcggggccgctcctcccctcccctccctcccctcccctctctttccttcccgctcggccgccgccctccggggtagcggtgcgaggcgggcttggcggggctgggcgcgtcccccggggcctcgcgatcgctggctgcgcggcgctcagccgcagtggccggccgagcaggtgcggcgtcggcagccgcctacattgagatcggggcaaccggcacgtgagcgggcctcgtgggttttgattttatgcggctccaccactttggagggaaaaatcccactgtacccgagggggtcttgccagtctgtttcttccatcttccctctcctctccctgcctcccctccctttctgcagccggggcggaggccatccccggtcccggaggcgggagtcggtgtctgcttatttttaaatcacaccacagcctacctggtgttggggggaagggagggaggggcagactgctttaggatgcagatcaggctctcgggtctggcctattgtcttgccttttctcttccttccttttctcacccctaatctccatctcttgcccaaaactaaaaatagaaaataggaaatagaaatagaaaataaaaaagcaagctccagcccacaccctatcaaattctttaaaaaactgtcatttatctctgacacatgattaatacccatctgtttccttacacccactcttccctcttgctgtttgtcgtctaagattcaactgactcagatgagctttatcgataatagaaatcaaatctcagtttcctaaatgcacatttcgtgcttcccgagtaacccaaaaggagtggttggtctggcatcctggcagaagcaaagggattggagagggtgcaagcaactgctttcatgtctagtttgtggatctagctgggattcctgagatgtttaacttgtgcagtgaggggtgttctcattaatggcattagaaaattatgttccgttttaagagaaaaatagcaagtcagcatttgaagtaaaagtgttttaaatgaatctga

SEQ ID NO: 4592 - DNA, 1039 bp, Artificial sequence
  DNA replication origin
aggcctggaaagccggcctggagagccggcctggtgcaccggccagagcaccccgagggatacgaaagaagaaagaatgctggacacaggttctgagcacctgaaccggatactgaaggctctgccagccctccagagcgctggcagtgaaggacagaacggctccgcagaaaggtactgggtagtgtctgggggagcctggcctacgaattccacccactcacatacatcccttagctcccctagcacccagcacaggcctcacattgccgaccctagagagggctgctgcgggtcgtggtgttgggggtagggggcaggggagtgtatttatccacaggcaccagggatccagttcctagcaccacgaaggctcgggaggtcagtccctcccgctgagcggccaaaaggcaagaaggcgggtggtgcgggtctggagggtcccgggggaatgaccagaatgggcccacgccccgaaaaggcggcaggaattggagggtggcggaggatgctgagcaaggttgaatccagagaggatggcctctttacccgacttcagccgggctttggagaaaccccaggggattccagttctaaggggagctgggagcaggagtgcccctccctgccgaaggtcttgccattcctcccactgagaatgaaggacctgaaccaccattgccctccccccaccgtctggcatctcccttccaactcccctaggttcagtttctcaatcatcttaccaaaaaagagaggaagtaaagagtcgaaagaaattatctgggctcctggggtattggcgggttgagatcacagtgaggccgcaggtggagactgaaggtgaagaggagagcagcaggcccgggacaggtcccagcttcgaatgaggaatccctgatcccagtgaattcgtgccaggcggactcaccactcctccagctctgcgtccgtcttgcactgggcaggaagtttcctctagacccaggcagggacccaacttacgcacgctttgttctccaacccacgcacatactct

SEQ ID NO: 4593 - DNA, 1621 bp, Artificial sequence
  DNA replication origin
gacctcggagagacctagcagagaacaggaggttggccttgctcgggcgcttggcggggtggggtcggtgggggtgctggaggcgggggcgcaggcctaggctcagtgcgccaacccctagatttatacccacacccacactcatgaacccagaccggaggaccccctcccccggccctcctggaagagcaaggcaagagtgggcgaataaggctagcaaagtgaggcaagaagaccgactcacccgcatccccgggggagagtgaacaggcacacagacagacagccggttgcaggcgcccagaggctcgagaataaggctgagaccgtggtaggcggcaaagtcctgggttccccgcaggtctgaggccgtcacaggggaccgcaccacgagacagggatagaaggtggggatttccttgtttcccccgcggagctttctccgtgctctgtcgctgtcccgggtcccgccttctccgaggctgaggagaggtaaagggcggaggtgagcacggctggaagtgaagcagggtcaggctgtgaggagcggagcagctggggtcccggggcgcagccctttgaggcgtgcggatccccaccatttactggagaggccagcgctctcccgagcctagtgtctctctcaacgcaccagaaggggccttctttgactcagaagggggcctggacgaaagattgagaacgaaggtgtgtgtgcaaatgtgtgcacgagcaacaaggcctgtgacccttcccctaaagcactacaatctcagactttccttcgtttttctgacctgctggcgtgagcagggtgctttggtctgtccaataatctggttaagggtgtctgtgagagctggcgtggatatgcccgtgaaagtggctgtagcatggctgagtgtgtccctggtgcagcctccattatccctgtgagtgggaaagcaggtgtatgagtgtgtgcgtgtttcagtggcatagtgtgtgtccaatgtgcatgtgaatggttgtgtgtttccgatgccagatgttcccggcagaaggtgaggttgggggggacacacaccaattatttaattgagtgattaacaactactccacttagggtatggaacctaggaaaaggggagggtaaaaagggcaggtcgggaggtcttgctggtaatactaacggaaagaagggaagggaggaaagaagaggggaagaaaggaaggaaagaaggagggaaggaaggaaggaaggaaagaaaaaaaggaaggaaggaaggaagggaaatgcagccacaaagtgatttgggcgggggggcaggaaaggtgggattgagcccaaggcttaagttacggttcagagggagagcagcgtggactacctgtaggtgctgagagtttgtgggcctggggcacggggctgtaggaatgtatatgtatgtaggagggaggagtgagaaagaggtttcaggagggtcctggggaaagtgtgatccagtggaaccgagctcgagctcggctgaaggaatccatgttgcatgatgtgcggtgagctctgcactctgttcctcccggccaggccctgggagtggcagtgaactccttaatgactgccatgcaggtcagaccctct

SEQ ID NO: 4594 - DNA, 1189 bp, Artificial sequence
  DNA replication origin
tttctccctcggccctcgtcctcctctcgtctttcccggccattcctctcagccgaacgcgccttcccagcaccttcttcctgcaagctcctccatctggactgcgaccgattacccagctcttcccggcctcctctccgcgaggccgaggctccccaggtccccagcgccagcctttcgcaatgccaagggctccgctttccctcgatctgggcctcgcccggcgagatgagaggagaaaggggactccggggtcttgccctcagcccgaccccaggccgcggccagagcctgaagtccgctgcctcctccatccctaagccctgggaccgggagacccagcgccagaagaggccactggcggtaatggctcccccaggctccttcctgggctccctcctcccggcttcctcctgctgcctctttccagcctcttcacacgcgccgctcgggagagccactgggcctctggaggctaccggcccgagcggatttctttggcctccgcctggggaaggcgaacaggctggaagctggccctgggtcgttccagcgaggggattatgtttgatctgagctcggctaccctcaagctgactgggacaccctgggccagttgggcactacctctctgcggctgctgggtgtgggtggcactggggactggagggtagagcatgcatgcagcccagtgtgagggtgactgatgactgccttgaatacagagacaggggccttagctctgggaaacattcctggtgccagatgtcactgggacagtaggtgctcactgctactcatagttgactgcttgagtcaaggcagttataccatcaggaattccagcaggtgtgtggacctgttgggcaccagggattaaatccgattttattctttagactgtgggatgtcttgagtgaaggcataagcagaccttttggttccattaaaaatatctgtaggactgccagagaaatcagtcctccaatcccacacattcccaggggaggatctaaagtcactgcctgtgacactcatcaccttgaaccccacctatgggtggacattttcttccccccaggacaattgtgagttctgtgcccacctaacatcctctccactctactaaccctgtatgtagagcaaataagttttgtgtacagatgtcaattaaatagccttcaggggt

SEQ ID NO: 4595 - DNA, 805 bp, Artificial sequence
  DNA replication origin
gctggcagagggggcggcagtgggggggacgctgaggccgaggacagcgggttgaggcgtggggaggagttcctggggtcacctaaggaggtgcccctgtggctggcaggtaggcctggcaggctaggggtcagcgccaggaggctaggggccctgggcacagagagcagccggccctgctccagcagccgcagaatgttggaggtggcaaaggcctcggaggctgaggaggacgcccgcttctccaggtctctgctctggtctttcttctgcttggtgcggcggttctggaaccagaccttcaccttggggtgggggagggggtgtcaaggagggagatgggacaggcaaagcaaagtgggggcaggtgggaggaggaaaggagaggaagggcatggggttggggcaggtggtggatgggggtgggggtggggtgtgagggtggagcaagagggaaagaagagcagattgttgttaaggtctccccacaaccatcctgctgtaggcgaactgattagggactctggtcccccaaattatggaggcccctctactactaaactgactctggcctaggatggaggaatggatcgacagacagagaatggagtttgggagtacaactgatgttctcctcttggcccacatgcccttggctcaaagtcaagttcacagcctcagccaccatttatgtgctggtaattccaactctacctcaggcccagagatctgaactgagatccaggccatgtatccacctgcctgctagacatctccccatggatatctcaaaaaacaccccaaa

SEQ ID NO: 4596 - DNA, 1410 bp, Artificial sequence
  DNA replication origin
aggtgctcggccgcagccaactccaagtggctccatgcagcaggcgaacaaagtctccttgaaggccacctggactgacgcggagtccaagcagcccaggtgggtagcgggagaaggtgtcccggctgcagggagcgagaacccggcccagcgcctccctggtgggcagggcctggagcgggcgggggcggaggctgcggcccgagaagccagcagagacaggctggggccagggatcgcctcccgagaggtgcctaggccgtggcccagagtcgcttccccactgccccgcccaccagccaggcgggggccagggatcgcctcccgagaggtgcccgggccgtggcccagagtcgcttccccactgccccgccctccagccagcccctgcccgacctcgcagaccacctcagtgcgcaggcgactgccctcgccaggccgcgccgccctgcctcgctcaccccgccccgcgctgaccccagccccagcaaggagtccgaccagacggcaatcgaccagacggcgatcgggagctactaccagctgttcgcagcggctgtgggcaacgtggaatggctgcgattctgtctgaaccagagcctcagggaaatccccaccgacgacaaggtaaggtcttgagtgttggggcaaagaccgaggtccctctcccgctacgctgctcggagtggtcacctggagaagagatatccttttctgggtagatcttcctaatttaactcatcttctggctgtggaaggaccattttgggggcagggaggttgggtgggctgatgaacacacactggttaattagcaaaagggtgtgagcattcctggggacacagggaagaaagtgaaggtaaccccaataaatttatataaattgtggaccctgggacctcagtcccactcagcctcctcctgcctgctctgaacctcacagggcttcactgccatccacttcgccgcccaatggggcaagcttgcatgcctgcaggtcctggtagaggagtacaagtttcccgtggacctgctgaccaacaatagccagacacccctgcacctcgtcatccacagggacaacaccaccgtggccctcccctgcatctactacctgctggagaaaggcgcagacctcaatgcgtgagtccagcctgcttcaggagggaggcttcgggcacaggcacgggcacagccctacttccaggcaggcaaatccatgcaggacaagcagaggggttgctggaggtgacaaggattgggtcccacataaagcagtcaggaatccacatggtgtaataaagagactgggctttagccgggcatggtggctcatgcctataatcccaacactttggaaggccgaggcaggcggatcacctgaggtcaggagttcaacaccagcatga

SEQ ID NO: 4597 - DNA, 1035 bp, Artificial sequence
  DNA replication origin
cggtcaggccgggctgccaggctcgacaggaggggcaggatcaggcgggaaggggttggggcggcgaaggccgggagcgccgggcagtggtcccccgagtggctccgaaacccccgcgatgcgacccccaacgagcaccgatgccggggcgggagcccgcgcgggccggggtcgtgcagtctcaccgacagccagcgtgatgaaggccacctggatgaagagcgacagccagctcagcaggtacatgaaccacatggcgcccccacccgcccgctccccggccaccgggacgggcctgcgcgcttcggctccggcgacacacagccgccaccgccgccgccgccgccgcgtccccgccccgcggacgacaggacgacggtgcgccgccgccgagaggagcccggccctagcgctgcccggggccaggctcgcgctagcgccgcccgccggagaggagggccaaccgccgctgccccgccaggatcccccgctccactgaggggaatgaatgcagaccgctgcagccagagggaggcgggacggtgcccaggggcggagacgaccaagcgcccatactggggctcggagtgcagcctccagtccctccctgtgcactcccgtaccagcctggaggtggtccagggccggacagggccgcccgaccgcgccccagcaacctccccagaacctgcctcccggcaggttgcggacaagtctgtctcttgctatcgcaggtgatagggacaaaattattgaattcctaatatgtgccacgctctgtgataaaggcgaggtgtgttcttgtcggaaatttgagcagataatgtaaatcattttatagacggggaagccggggccaaaggaagttgccctgggtcatgcacctaggaagcggcacaatcaggagttggggtgattttaatcggtcatcctccggcctaattcccctctaggctgttcttttggggtacattctgcacctttgtatcgcctgcacctcaccccttgccgggcacgcagggcgtccgctaggcg

SEQ ID NO: 4598 - DNA, 1167 bp, Artificial sequence
  DNA replication origin
ggtgataaaaggattatagggtggaggagcagaggctgaggaagaattgggacctagctcggcctggcgaggaggggagaggtcagatgggtctgtagaaaaggaagattagaaagactcagcgacgcttggggttggtactgaggggacaggcgggagggaaagagggaagatttgggatgagttgcactgggcacagagactaggaagggactgatgtgtaaaagaatgcctggacgtcaggcacctcagaccgtttgcctattttacgacaagaattatttagatcttgcaggatggaaaaattcaaagtgccattttctggctatttggaactactgtcgagtttgtattggggtcaagcggcattgcagaagaaaataaggttttaggtcaggtgagaattgaagaggttttaagttcttaagaatacaggctaagggagaagaaggaggaatggaaggtggaagcttgcccacagtgaaggaggcaagcccagagaaaagagtagagtcacggagaaggggtgggggtttcttgccctccagaaaagcagagaaagtgttggggtacggaaataagggattggggcgcagagataagaggttggggcgcagaaataagggattggggcgcagagataagaggttggggcatggaaataagcgattggggtgcagagataagaggttggggcgcagagataagaggttggggcgtggaaataagcgattggggggttcttgccccctaggaaagcgggacttgccgctaagggcgaaggagaagaggttgaggggtacttgcccctgccccaggaaagcgggacttgccgctaagggtgaaggagaaggggttgaggggtacttgcccctgccccaggaaagcgggacttgccgctaagggcgaaggagaagaggttgaggggtacttgcccctgccccaggaaagcagagaaggggtagagacaaggagagaagaggttgaggggtacttgcccctctcccagaaaagcagagaaggggtagagacatggagagaaggggttgaggtacttgccccttccccagaaaagcgggacttgccgctaaggatgaaggaccaaggcaggcgtccctgcgtggtctgacacccttgaaacgtggctgaatgatcagagaggcgtcc

SEQ ID NO: 4599 - DNA, 869 bp, Artificial sequence
  DNA replication origin
atgggattagtgtccttataaaagaggcctcagagacacccgttgccccttccgctacgggaggacagtgagaaggtgctgtctgtgaaccaccaatcccccaccagatgttgaatctgccagcacttagatcttggacttcccaggctctcaaactgacaaatttctgttttttctgagccacctagtttaggtattttgttctaacagcccgaatggactgagacacagctcagagcagggagctggagcccaaggatgttgagaagagcgtccacctgaggggcagcggcagcaaggagtgggagagccagagcagggtaggggcaccgacactgtggggagggcacgcccagcatggagggccagggctggtcctgtggggagtgcatcgttgcaggggaaaatggtgactaatgtggggagttgaagcccaggtgggataagctgggtgtcctcgcagggagtggcctggtatgggagcagggcctgagaagggtgaggcagatgttcacatggggtagggggcaggtatggggagtcagagccacacagggtgaggaggatgtgtatccactgggacgcttccgggcgggatgttgaatcccacaaaaggcaaggaggactgcagcacagggagtggcccagctcacatggggtaacaggcctctgtgcaggggtggtgtggcctggaattgtgagtgggagctcagatgggatgaagagggcagccccacggttggagcacatggagggtgatgagtgcagtgctgaggctgagggaggggctgcagaatcatagggaccggtgacagagaaggggctggttagatgagtaggtagtaaggatcatgggagcctggcttccc

SEQ ID NO: 4600 - DNA, 959 bp, Artificial sequence
  DNA replication origin
gaaaggaaatgagaggttctaagaggcgggctagtggcttgtactatagcatagcctgcctttgctggtgtgtggcgattaggcctggtggaactgccatcaataaatcaagcgtgatcagggtgaggaacagaaaagaaggaaatatggggaaatcgggtgaatatcaggtggatcagagagatacagtcatgggggtcaggtgtggtatcaggaataatgtgggaggccagattgaagtccgggccaggaacaatggtaattgtgggacttaacaaagagtgagtacagctgaaggagccagggagcagaaagtatatgcatcaggtatgaggaagaaagtagatttcagaagttatgagaaatgcagagagtgagttgagcacagttcgtgatttttagggcctctaaaagtattaaagcagtggcagccgctgcacggagacatgatggctaggctaaaacagtaaggtcaagttgtttggacagaaaggctacagggtgtggtcctggctcttgtgtaagaattctgaccacactaaccatgcctaggaagaaaaggagttgttgttttgtaagggattgaggtttgggagattaatcggacatgatcagaagggagagcacatgtgtttttatgaagaattatgccgaggtaggtaatggatggggaaaaaatttgagctttggaggggaatacccgctatcctttggagaataaatgctgaaggagcagaagtgtgtcttgttgagaagattcaaaggaggggctacaaagaagaaggtcatcaatatactgaataaggtgagaagcggaggggtggaaagaaactaaatcatgagacagagcttggctgaagtaatgagggctgtccctgaaaccttgcggcagtacagcccaggtaagctgctgggactgatgggtgtcagggttagtccaagtgaaagcaaagagaggc

SEQ ID NO: 4601 - DNA, 964 bp, Artificial sequence
  DNA replication origin
cggggtggtggccgggcagaggggctcctcacttcccagtaggggcggccgggcagaggcacccctcacctcccggacggggcgactggccgggcggggggctgacccccccatctccctcccggacggggcggctggccaggcagaggggctcacttcccagtaggggtggccgggcagaggcgcccctcacctcccggagggggcggctggccgggcggggggctgatccccccacctccctcccggacggggcggctggccgggcggggggctgacccccccacctccctcctggacggggtggctgccgggcggagacgctcctcacttcccagacggggtggctgccgggcggaggggctcctcacttctcagacggggcggctgctgggcggaggggctcctcacttctcagacagggcggttgccaggcagagggtctcctcacttctcagacggggcggccgggcagagacgctcctcacatcccggacggggcgacagggcagaggcgctccccacatctcagatgatgggtggccgggcagagacgctcctcacttcctagatgggatggcggcctggcagagacgctcctcactttccagactgggcagccaggcagaggggctcctcacatcccagacgatgggcggccaggcagagatgctcctcacttcccagacggggtggcggccgggcagaggctgcaatctcggcactttgggaggccaaggcaggctgctgggaggtggatgttgtagcgagccgagatcatgccactgcactccagcctgggcaccattgagcactgagtgaaggagactccgtctgcaatcccggcacctcgggaggccgaggctggcggatcactcgcggtcaggagctggagaccagcccggccaacacaacgaaaccccgtctccacccaaaaaatacgaaaaccagtcaggcgtggcgg

SEQ ID NO: 4602 - DNA, 915 bp, Artificial sequence
  DNA replication origin
aagtgaggagaccctctgcctggcaaccgccctgtctgagaagtgaggagcccctccgcccagcagccgccccgtctgagaagtgaggagcccctccgcccggcagccaccccgtctgggaagtgaggagcgtctccgcccggcagccaccccgtccaggagggaggtgggggggtcagccccccgcccggccagccgccccgtccgggagggaggtggggggatcagccccccgcccggccagccgccccctccgggaggtgaggggcgcctctgcccggccacccctactgggaagtgagcccctctgcctggccagccgccccgtccgggagggagatgggggggtcagccccccgcccggccagtcgccccgtccgggaggtgaggggtgcctctgcccggccgcccctactgggaagtgaggagcccctctgcccggccaccaccccgtctgggaggtgtacccaacagctcattgagaacgggccgggatgacaatggcggttttgtggaatagaaaggggggaaaggtggggaaaagattgagaaatcggatggttgctgtgtctgtgtagaaagaggtagacatgggagacttttcattttgttctgtactaagaaaaattcttctgccttgggatcctgttgatcggtgaccttacccccaaccctgtgctctctgaaacatgtgctatgtccactcagggttaaatggattaagggcggtgcaagatgtgctttgttaaacagacgcttgaaggcagcatgctcgttaagagtcatcaccactccctaatctcaagtacccagggacacaaacactgcggaaggccgcagggtcctctgcctaggaaaaccagagacctttgttcacttgtttatctgctgaccttccctccactattgtcctgt

SEQ ID NO: 4603 - DNA, 965 bp, Artificial sequence
  DNA replication origin
atctgaaggaaaggaagacatgccagccagagggaacagctgacagagaccctggggaggcgctggtctggcctgtctggggaacagctggaaggctagcatgggtcctggggaggtcagagaggtcagccagggctttcaaggtcacgtaaggggagagtggctggagaggaggtcagcgaggtcagccagggctttcaaggtcacgtaaggcctttgagttttgcactgagtgagatgggagccaacggaagactttgagtagaaccaggtcatgagaattgaattgaggatagaccatggggacaagggcagagcaggagacgcattgggagtccatggagtcgattaaatgactcaggcaagggatgacaggcttccactgggggcagttacaatggagatggtgagatatggtgggattttggacatattttgaaggagagtgggagggggatttgcagttttggtgacctggtggggttgaaggtgtcactgggtgggttcaagagagaatggaggagggagattggagacagaaagtatggagagctccttcaaagggcattgttgtgaaaagggagaaatgaccagtagctgaaggggatgtggggtcaacggtgtgctttcttgagagcaataacatcatgcttgtgtgccgatgggatgatccggtaaacaggggaacttggtaaggcaagagagtgagagaatcactgcaggctcaccactgaatgggcgagaggggatggggtctatgcccaagtgtccagttgttaccagtggggagtacgggtgattcatttgtaggaacaggagagaactcacaggatttgggcacagatgccgagggcgggcgttagaaggagactggggacctgaagaagttctctgctccgtaaagaggaagcaaactgagagtgaggttgggcgatggggtgtcctaggggcatccgggagacagg

SEQ ID NO: 4604 - DNA, 1269 bp, Artificial sequence
  DNA replication origin
cagtagctgaaggggatgtggggtcaacggtgtgctttcttgagagcaataacatcatgcttgtgtgccgatgggatgatccggtaaacaggggaacttggtaaggcaagagagtgagagaatcactgcaggctcaccactgaatgggcgagaggggatggggtctatgcccaagtgtccagttgttaccagtggggagtacgggtgattcatttgtaggaacaggagagaactcacaggatttgggcacagatgccgagggcgggcgttagaaggagactggggacctgaagaagttctctgctccgtaaagaggaagcaaactgagagtgaggttgggcgatggggtgtcctaggggcatccgggagacagggagacaagacatatagtatgattgcccccagcagtgagggctcgcttgagttaagggtcatgactacaaaaggcaccactcaggccggctgtgttactctccaacacagcactggttgggggcaggtgtggaggaggcggagttggattcgccagggttatggcttagccctgtgagaatgctgtatccctcaaaataagagaggggaaagggagttgagattttgcgcagcagtgcgtttaggctgagtgagcaggttggttagtgaggacttgggcggtgggaagacggacagtgccctgacaggggctaggtgctggagtgctgggggatagaagtgcgaagccagggcccctgtgtcaagaagttcatacgctggaaaggaaccagacataataagcgaaacgactgtcaccgttcatggcttacaccttgaacagctttccactgtggagactagggagtgtagagattgttggggatgggggacttgcaggggacagaatgggccgcagctggaccctagttctccagggaacgcagtatgatttgaatacagatctctgcctccagagatgagtgactcgacaccgctgcggagaaggctccgaggagggttggtggggactcgaacctcggagtctctcccgacccgggggtcccagcaaaccagaacggccacctagacagcctgcggacgggagaggaccggctccctggcgcagatcatggggcaggtggagagaggcgagaggcaatgaggcggggggctcggggtgcacggcacgctccgcacactcccccttcagcgctcactcagacttggtttccccgaagacacactctcgtccccgccgctgattgcccactccttccgcctgcactcctgcctcct

SEQ ID NO: 4605 - DNA, 1174 bp, Artificial sequence
  DNA replication origin
ggactgggagacatagcacatgaaactgctcatgatgagccttaagcatcagagtgggagtccggttgtccctgctgggcatgagaggaggcagctgcgttagatgccagcaggagtgggttcgtgcttcaagtgccatttacggaggtctaggcccaagcatcagggatgggcttgctgttttgtgacctgctcacaggggagcctttgtttgggaactgggtcagtggtgtctgaggcctgaaagcctggctgtgttgccctggggtggggcagaaggggttggggaggatgagaattcaggaacctagggaagggcaatcagggtctccggctgcaaaacacctggaaaatttgaaatgttaaaaactcagaaaaaaacccaattgccaccttctctctgtggctgtgctggccatgggtgcatggtgtggggagggtggggcactttcactgggcccccaaaagtgtggctgcaaggtgtggggcccaggcctgtgggccagggcatcttgggcccgtctcttccagctgttgacctcagacatctccacctgcacgggggacagggattggaatcatttcagctaccttccaacgcagacactgtggaaggcaaggcagccgctaacaagcatgaatggtggacccgcagatcagggagggagcagccctggacagtgggcagtcctcgaaggcttcctggaggagggtcactcagactgacttgaaggcaggggtaggctttgaaaaggccagaaggggagggtattccagcgtgtggatgtggcgggcagccaggctcaggtctcacaggtgggactcagtctcacgacacgtgcggccctgtgagaagtgggtggtggggaagaattgagaggggggtctccaatgccaggctgaggagaatagcagcaaagtcacacaactgccacacagctgagtgtctggccgcatgctgtcttatatacaagaccttttcccatcagttaggcacgactattgtaactgtcaccgttacagatggggaaactgaggctctgagagattgggcaactttcttgaaggctagtgatggcagagctgtgattggaaggcaggtttttgggacatgctcatagtcactgagccccatgtgcctctcggaggctcctggaagccccaggatggtgtt

SEQ ID NO: 4606 - DNA, 893 bp, Artificial sequence
  DNA replication origin
agtctgggaagtgaggagcgtctcttcccggccgccatcccctctaggaagtgaggagtgtctctgcccggctgcccatcatctgagatgtggggagtgcctctgccctgccgccccgtctgggatgtgaggagcgcctctgcccggccgcgaccccgtctgggaggtgaggagcgtctctaacgggccactccatctgagaagtgaggagcccctccgcccggcagccaccccgtctgggaagtgaggagcccctccgcccggcagccgccccgtctggaagtgaggagcgtctccgcccggcagctgcccagtccgggaggtggggggcagcccccgcccggccagccaccccatccgggagggaggtggggggcagcccccgtccggccagctgccccgtccgggaggtagggggcgcctctgcccggccgccccttctgggaagtgaggagcccctctgcccggccgccaccccatctgcgaggtgtacccagcagctcattgggaacgggccatgatgatgatggcggttttgtcgagtagaaagggaggaaatgtggggagaagatggagaaatcagattgttgctgtgtctgtgtggagagaagtgggcataggagactccattttgttctgtactaagaaaaattcttctgccttgggatgctgttgatctatgaccttacccccaacccggtgctctctgaaacatgtgctgtgtccactcagggttaaatggattaagggcggtgcaagatgtgctttgttaaacagatgcttgaaggcagcatgctccataagagtcatcaccactccctaatctcaagtacccagggacacaaacactgcggaaggccccagggtcctctgcctaggaaaaccagagacct

SEQ ID NO: 4607 - DNA, 987 bp, Artificial sequence
  DNA replication origin
atcttctccccacatttcctccctttctactcgacaaaaccgccatcatcatcatggcccgttcccaatgagctgctgggtacacctcgcagatggggtggcggccgggcagaggggctcctcacttcccagaaggggcggccgggcagaggcgccccctacctcccggacggggcagctggccggacgggggctgccccccacctccctcccggatggggtggctggccgggcgggggctgccccccacctcccggactgggcagctgccgggcggagacgctcctcacttccagacggggcggctgccgggcggaggggctcctcacttcccagacggggtggctgccgggcggaggggctcctcacttctcagatggagtggcccgttagagacgctcctcacctcccagacggggtcgcggccgggcagaggcgctcctcacatcccagacggggcggcagggcagaggcactccccacatctcagatgatgggcagccgggcagagacactcctcacttcctagaggggatggcggccgggaagagacgctcctcacttcccagactgggcagccgggcagaggggctcctcacatcccagacgatgggcggccaggcagagacgctcctcacttcccagacggggtggcggccgggcagaggctgcgatctcggcactttgggaggccaaggcaggcggctgggaggtggaggttgatagcgagccgagatcaagccactgcactccagcctgggcaacattgagcactgagtgaacgagactccatctgcaatcccagcacctcaggaggcggaggctggcagatcactcgcggttaggagctggagaccagcccggccaacacagcgaaaccccatctccaccaaaaaaatacgaaaaccagtcaggcgtggcggcgcgcgcctgcaatcgcaggcactcggcaggctgaggcaggagaatcaggcacggaggttgcag

SEQ ID NO: 4608 - DNA, 1808 bp, Artificial sequence
  DNA replication origin
gcttgtggtcctgtcctgcatgcttggaagagaaaagaggggatgtgagcaatctgaggcagccccagtgtgcagtgggacacagagcaagggagcagaaggaaaacctatgccacgcagcagggcacggcctggctctcgctcgcttactcactcattacaggcctttggactcgtaatgcacacaagggcttgtgctagaaacttctagccagaagctagaggcgagaggtgagcaagcagttggctctgtcttcagggagtcagtttattaaaggagggcataggctcacttgtgcctctcatacagggctttccaaacttaggtacaggtgacattccaggggcaaagagatgtggggctccgagcagggcaggtggccaaggagcatcaggaaggcatcataggccagtgagggggctgtgtccagtgcaaggagatggggggtgggaacccagctaggccaccattgcagggacctgggggagggtgaccaagccctgggaaggagatggccttggggggaaattgcaggacttgagctacaaggccttggtggccgactggatttggggctgaggaagggctataaggaggaactcaagtggctggggaattgggaagctggggagaagagcagagcatatgaggtcaggttctgttttggaggtgaggaggagccttctggggaaccccctgcagatgctggatgctgcagtcctggcacttggccagaatggaggagaatcacaggtgggcagaggtgtagaggctaagggaggtgaggaggctgggcgggaagctgatggtcctggcagtggctgtaggggtttctgtggcatggatggggacagctggtgagaaagtggaagagacatgtgcaggccctactgcaggagcatgctcagatcagcaggtggagggaagggggactggagaggcctgggcgtgtctgtgggtggggaggtgagcatggcttgaaggaaaggtggacagagaagggaaagaggccatggtggtcccaccttcccagagactggcagctctaggggaaagaggagaccagcgaatgctgagatggggagaacatggagttgatgctatatagctccagtatctgccttctgggcccatcactggctcacagcaagactccagactccaagagggcagggaccgtgttctttccagttctacgagattggtagtccaagtcctgagcacgtgtccttgctcaggaaggctgctgggtggggaggggtgtgtcgggggctgagggacagtccttggcctctcagctcagggctgaggacccatggagagggctggagaagagctcggtaagggcctgtttccctgggaggcagcacagggagtgagcaggccacaggagtttgaggaaggagctgtctgtgattagaggtggcaggacgaatcctggaggagggcgctcttagtctgagcctcattgggtggtagaatctggaaaggagagagggttccaggtggggaaccagagcaggctcggagagggccacttacctgtgggaagccaggcctggtttgaggtagcagggaggagtcagaagccatcaagttctgcccaagtctgcagacaccccctgagctcctcatgactacatgtgaggctggagttacaggcatgagactggatgtatttgggcgtggggagccttggaaggttcttgagccaggatagaccctggtttgttgggcctggactctgccttctttgctctaactgttcactcctttttggttcagtagcagtgacaaggcctggggg

SEQ ID NO: 4609 - DNA, 881 bp, Artificial sequence
  DNA replication origin
ggctgatggcgctccacccagccctaagcaaagccaggggccccgccaacgccggctgacttggaaattgcaggtaggcccagcgcagggctcagcaggctgagagcagagtgggctgggctgctcccaaggtccctgcctgcctctgcggggccaggtggatacctgtaccctgggcagtgtccggcctgaaagatgaactggcctcggggcattcatttcactcctagtgagcaacagctctgccctgggcttggactggatgctgcctccagagatgagacctggccctgctctcaggaagtccgcagaacagagacgcaaacagatccccacctgagcagcctcagagtcaggagcccttcctggaggaagtggccctgagctgcacctggcagggccagcaggcgttagtaaggcccaaagagtgggaagggcgtcctggctgatggagcagcatgtgcacaagtgcaaagacacagaggcaagggggagcctgtaggggtgggggtgctgagggccggacaaactagcgcagagcttcagaagcgttagggctccgtgaggcaggtggtggggacagaaaggcctgtccaccaggatgagagcaggggcttttcctggatgcagcagcagccactgcagggctgacatggaggcaggcatgacacagcttgaagacgatggggatactaaaggaggggtgggagaggaaggaaggaggaaggacatgggtgaggcagagccaccagggctggggcagagaaaagaggaggagggcagtcagagctggctcaggtttccagcgtggattctggggacccaggaaaagacagtgctgggaggtgatgaaacctgtctgcaacatgtgtagccccaga

SEQ ID NO: 4610 - DNA, 1321 bp, Artificial sequence
  DNA replication origin
atcatgtggaggcttgttagacacagagattctcggggcccaccagaccctgaatcagagtctgcattttaacaatatccccagacggtgcctgcttttgctaagtctgagaagtgcttcactacatgcatcgtcattcatccttaaaatggccctgggattcagttacttgcacgagtgaggtaacagagttgctaatggcatgagtgacccgtccacagctagtaagcagggaaagcagaattcaagccacagaggcctcacccatcccaccaatgaatcaccaggcatcagggacccgtgggcaaagaccagctctcaggacagaagccgggtcctagcacccagaaaatccaaccaccttccccaggaggcagggaggaccttagccccagtgctgtgctggggcatcaggacatcccgggacaaagacagcagctcagcagcgggagcccaaaccattctgggtcccagcaggaagacggaaacgtgactgtggagggggagtgtgagtgtgaaagagtgtgtgtgggtgcgtgtgcatatgattgtgtatgtgtgagtgtaagagagtgtatgtcagaatgtgtgtgtgtctatgtgttggtgtgtatgagtgtgttggtgtgtgtgagggtatgtgtgtgattgtgtacgtgttagtgtgagagtgggggggctgcatgagagtggggctgtgtgtgtgtgttggtatatatgggagtgtgtagagagtgtgttggtgtgtgtgagggtatgtgtgagagtgtgattgtgtaggtgttagtgtgtatgggtgttagtgtgtgggggtgttgtatgagtgtgtatgtgtgcgttagtgtgcttattggtgtgtatgaatgtgtggagagagactgtgttggtgtgtgtgttcgtgtaacagagtgtgttgtgtatgagtggaaagagtgtgtgtgttggtgtgtatgagtgtgtgttggtgtgtgtgctggtgtgtaagacagtgtgtgagtgtgtgtcactcaggtatagagtcttccagacagtcaagtgggcctgtggccccgtccaaatgccagacacacctaaaccttccaaaactctctggtcctccagctgcaggtctgtgggatctgccctctgaagccaccgcctccctttctggttctctctgccagccaagctgtcccaggactcggggctttgccactttggtctcttccatgtatcataggcaagtcacaggtgaattacaatccatcacccgcccatggctgctgacttcacgcctagtttcagtgatccctcaggacagtctcttccacaagaagaatac

SEQ ID NO: 4611 - DNA, 1386 bp, Artificial sequence
  DNA replication origin
ctgcgtggaatccttaaatgtacatcaaacacttacgttactggctgagtggcccttcacttggggttccttgtttaggtgggagcccagacacccacacagtggagaatcctccatgtgagagcacgggtccccgagtgcctctcaactctgtgccacaggcagggcctcttaccacaactgtcccacaggacctcctgtggtgacaggcgagctctagggctgtgctgtccaaaaagggagcctctagctgcacgaggctgcccagcactggaaatgggactggtgcagctgagaaatgaaattgtaaattttatttcattttaacgaagtaaaattaaaatttaaatagctgcaggtggctggtgctcctgtattggacagagcagctctaggaggctcccaggagggagagagtgctatgggctggaatgtcaggaaagcctttgggaaagacccaggccctggaggaaatgtggggttggggtgtcagtgcgaggcagaggcctggaaggaggagaagggagtatgaggccaggggagcaggagagtgctgacgtcagggcagcattttccgaagaggaggctggatgctgccggaagagatccactgggcgcaaggtaaagaggcccggcctgcgctggaggtggcggtgggatgaaaggggaggggctgggtttggaagacattgtcagtaagagttgccctgaccagacatcaggttccctgggtgggtgtggtgaacaggggtgggggaaggtgctgctgtctatatgcctcaccagatggcaggggcagctggccatgggtaagctggcctgggctggggatgcaacgttggggtgcttggaaggaaaagctggtaccatgggaaggaatgagcaactggaggaagagtccatgtgggactgtttggagaagggcacaggccctggcaccttcggagcaggagggaggcaggcggcagggctggcacttctcggggggactcggcaggactgagtgcaagtgcagaacagggcgggagggcagcggtatgagctgcaggctgccagagccctgagggggcttgcccctgcatccagtgtgacagatctgtcttctgggcggcagggagttaaggaaagtgcctgaagaaaaggcacctgccttgatgaaaacatcattttgtccaggctcatttaatttgatgaacgtgatcacagtttccccatttgcaaagtgggtgggaatttaagggtgaaatgagcaggagatacagaagtccctggaactgcaaaaacctgtactgctgagcgcattagagaaatgccaggaggccgtctctctggtctccaatagtcttagcgctgattaaattgtagcagggcaaacactagttggac

SEQ ID NO: 4612 - DNA, 1493 bp, Artificial sequence
  DNA replication origin
gagatagcatgggtgatggattgatgtgtctttctatgggaataagtgtaagttgctatgggagctacgggggtacttaagcttggggcaccaggaaagatttaaatggacacctgctgtctgaataggaagtacaggaggagtaggggtagaagtgcatttcagacagagggaccactgagctccaagcctcaaagctaaaagagcatggtgcctcctgcaacctgctagcattcagaagggcaggggttgcgtgtgtcccaggaggtggttcatcactacttggggtcatcaaggggaaatttatctcatgagagacatgcccagagaaggcagcaggagctggaagattagaggtcttgtggaggctactttgaagagtctgcacttcatcctgagcagatgggaagacattggaggacttgaaacaaagagtgacattattagaaagcctgccttggctgcagattgtagaacgcgtgggctgttgggagagggtgtcaaaaccaagtgaaagggggatgctggtgaatccaggcaagagagggtagtggcttgcactgagcaaaggagatgggtgggcgggcgtgagagatgttcaggagacaggattaccagtgtttggtgatcagtcaggcagggcgatgaggggcaggaggagccaagggtggcgtgggagcttttggcttggttgtctagatggtggggtcagacttgaagagagcaggttctgagggggaagatgaagaatccagttttggacaagttcagtgtgagaggccagtaggacacattaatgaactaagcagtaagatattggggcttagcagagatgtttgggagcagaaagtctaggagagggctaaggagcagatcagggcttggtggaggaagatgggaaggctgcagaggaggctcagcaaacagggtgagggccagcagtgtggatccagagagactgtttgggaaggagatgaggttagctggccagatgctgctgagggggtgagagagagaagagcccacgagtgtccttcgggtaggggactctggagacaaatttccggggaggggtgctgagggcagaagcagggtgcactgggaagcaggtggtgtggacatgagggaggagaggtagtggatggagacaggattagagagaggagaggagggagcctgcagagaggagggcgcgggtggatttgggagatggggatgtctttaaattgggaaggagcagatccaggagatagtgtgaaaaattggggaggagcatttggacgcatggtcagagggggagccacagaggcaggcaaccctgggaggtggcaggaaatggcagggaagaagcatgtcctgggacccctggggacagcacggtggacagagatggccttgggatgcatgctgtggcctcatgctgaggaagctgcctggacacacctctaaccactgtctctgcctgtctcttccttctgcctccgctgggcccg

SEQ ID NO: 4613 - DNA, 1860 bp, Artificial sequence
  DNA replication origin
ttaggggaagaaaaacagtgttcaggaacacacagagagcctgccaccccctgtccatttcctatagagggtcttgaagctccaaatagaggctgtgcccccagaaatcgcacctttgaggcactgagatgcccccagagccagctgggtatggcaagggcggctcttgcttagcattccgagagagcactcctaggtagaggggctcctcttcaagtcctcagagaaggagaatttcgggaggtgggaatatgtgagtgttgaagaattagagaaataacttttaggaagttccgactctggtcacaaagagacaagggatgagggggtgtccagaagatctcaaatgagtgatgtcaaagtgaggagatgtttcattaacaaggagaccaaactcttggagtctcctggccctgcaagttcaccataggctaagcaaccagggaagcttctccgggaaggcggcctctgaggcgggtgggtgaacaggggaggacagggaggctttcctggcaggcaaaagggctcgggcaaaggcttggaagtgggactctgtgtgtatgttttatgtggcaaaggggtacgtgtgtgtatgtatgagtgtatgtggtagaggtggtgtgtgtgtgtgtggtagaggtggtgtgtgtgtatgtggggtagaggtgatgtgtgtggcagaggtggtgtgtgtgtggcagaggtggggtgtgtgtgtggtagaggtggggtgtgtgcgtgtgtggtagaggtggggtgtgtgtgtggtagaggtggtgtgtgtgtatgtggggtagaggtggtgtgtgtggtagaggtggtgtgtgtgtggtagaggtggggtatatgtgtgtgtgtggtagaggtggggtataagtgtgtgtggtagagatggggtgtgtgtgtgtggtagaggtggggtgtgtgtggtagaggtgtgtttgtggtagaggtgtgtgtgtgtggtagaggtgtgtgtgtggtagaggtggtgtgtgtgtttggtagaggtgtttgtgtggtagaggtgaggtatatgtgtgtgtggtagagatggggtgtgtgtgtgtggtagagatggtgtgtgtgtgtgtgtgtggtagagatggggtgtgtgtgtggtagagatggggtgtgtgtgtggtagaggtggggtgtgtgtgtggtagaggtggcgtgtgtggtagaggtggtgtgtgtgtgtgtgtgtggtagaggtggggtataagtgtgtgtggtagagatgggatgtgtgtgtgtggtagaggtggggtgtgtgtgtggtagaggtggcgtgtgtggtagaggtgtgtgtgtgtggtagaggtgtgtgtgtggtagaggtggtgtgtgtgtgtgtggtagagatggggtgtgtgtgtggtagaggggtgtgtgtgtggtagaggtggcatgtgtggtagaggtggtgtgtgtgtgtgtggtagaggtggtgtgtgtgtggtagaggtggggtgtgtgtggtagaggtggggttgtgtgtgtgtggtagaggtgtgtgtgtggtagaggtgatgtgtgtgtttggtagaggtgtgtgtgtggtagaggtggggtgtgtgtgtgtggtagaggtggagtgtgtgtttgtgtggggtagagttgtgtgtgtgtggtagaggtggtgggtgtggtagaggtggtgtgtgtgttacaggaggtggtgtgtgtggcagaggaggtgtgtgtgtggtagagggatgtgagtgtgtgtgcgtggtagagatggtgtgtgtggcagaggtgggtgtgtatgtggagtagaggtggtgggtgtgtgtccgtgtgagtgtgttttttgtgtgtgtggtgagcgtggggtgccagcaggagacaggc

SEQ ID NO: 4614 - DNA, 1296 bp, Artificial sequence
  DNA replication origin
tttaaacctattattttaatggcacatgatcagcctttgtaaacttaaaagccaaggatcaccccctctttccccacattctgctgtttaggcattcctgtatccatcaaatattgacagaactgcaattatgtctttcaggcaatgttctaagcattgaggttatgagtgttacaaaagataaagggggctgggtgcggtggctcacgcctgcaatcccagcactttgggaggcagaggcgggtggatcatgtgaggccaggagtttgaaaccagcctggccaacatggtgaaaccccatctctactaaaaataacaaaaattagctgggcgtggtggcacacacctgtaatcccagctacttgggaggctgaggcaggagaattgcttgaacctgggaggcagagcttgcagtgagccgagatagtgccactgcactccagcctgggcgacagagcaagactctgtctcaaaaaaaaaaaaaaaaagaaagaaaaaagaaaaagaaaaaagatgaagggctctgccttcatggagaaggagatacaataaacaatattaatacccacgtaaaatctatgggatatcagatggagataatcactgtggagaaaaagcaacaaagagggaataggaattcttgagacgggattgtgatttacaatatgggaaataatgagggtgagactgaggctgcactggaatcaagacaagaaggaaatgaggaagtggcttagggatctatcagggggaatagtgttcctgccaggggaaggacatgagggtgctggaagtgttcaggaccaggaaggcttgttggctgcagcagcatgagtgaggaagaaagttgaaggacgtgaggtcagggaggtgtgagggctcgatcacaagcgactttagaagttattacaagggctttagttttattctgagtgagctgacaaatcactggagggatttgcacagagggtgacaagatccgatgtacatggctgttgggttgagcacggattcagggagcaggacggcaaaggtgaaggtggggaggccagttaggaaactgctgcagtcatcccacatgggatgatggggctggactggggcggtagtgacagagtggtctggttctgagtatacactggaggtagtgccagcatgagtgactgatggattaagtgcaggtcgtgaggaacaggagtcaaaggtgagtgcagggattttggcttgagcatctggaaggagagagttgccatttgttcatatgaggaaggatgtgggaggagcagactgggcagg

SEQ ID NO: 4615 - DNA, 1023 bp, Artificial sequence
  DNA replication origin
gagcaggtgtggccgctgaggtgggaggacagcactgtggtgctctggacagtggagctctgcaaggcgaggggagatgcttcagggacagaggagtgaccacttctgccaaatactgctcctggattgattattgaggcctgagtcattggtgaccttgacaagaatgttttgagggaggacagagaatggaaacataaaaattagagacaataagtgtggacaactctttctagaagtttttctataaaggggcgaaggtaatgaggtggaagcccaaagggaacgtgtgggcagagagagagacgtattctgtgaatagtggggcactggtgcctatgtgtgaaggctaactggaatgacccagaggggagggatgttggtgacacaggagagggtgaggagagtcacggagtgatggccttgaatggaccagagaggatgagccccaggcatgagggcagaggttggccttgggctggggtgcaagccgagcacccacaggagcagaagggaaggtagcacgtggcatgggtgctggtgggggcttggggaagtctcttctggttgcttctgcttttaggagaaaggaagcagggacatgggctgagcatgaggccagggaggaggtgctagagggctggggagagggccagtgtggcaggtggtatcaggagaaggggcgagtaaagggccagggaagtgagatgaggtgccgggcggcactggggctccttgaagctgtgccaggaacttggtgtgagacccagcagctggtttcatggtttccttcagccacatttggttgtggggggctgatgtgaagtggagaagagctggatttaaccccaggtggcactggccagaagtacaatggaacaagagaggtggaaggagtttaggagaaggaaagggcaagggggtaaacaaagcattgtaggaccaagaaaatattagttaatatgtaaatcatgattctgccacatgcctaattgctgttaaaggtgcaggccattgattaga

SEQ ID NO: 4616 - DNA, 844 bp, Artificial sequence
  DNA replication origin
gaaacaaaagaaaacatggattcaacagggttaagtggatccctttaccgagccattgctgtggagtgactggcagaaagcagaattgagcaacagggttctgggaggtcaaggaaagcatgggccgtttgcaggttgagcctcatttgctgctgttcagtgtgcttccctgacatgagcctgtttccatcagaaagccaaggttgcatctgccccaagacacagcactgccccagccagctctgctgcagacagagggagagggggcctgggagtggagagggagggctgcgccccccgtggcacccccagggctcacctacaagggctggagactgagaccgagaggaatgggaggtgggacagccccttcctcatgacaggtggagatgtggattaggagtggctgttttgtctctgaagtaagaggagagatgatctggtactggggcaggtgacttgagaccagtggaaaaggctggaaagagctgctatgagtgacagtgagggagggacacagagagatggggagggaatgtgactggcagcacagagagggttacccggcagttctggggacccagttgtggttgctgattaagaatttggggtggctccattctggcaatgttgtggttttgtctctgcatcatagggcctggtcaggaggaaggaagaaggggagagtggggccaacccgtgggcgagttccagaggaagacaggggtcgaggatatggaagggactgcctgatggccaagagggtcttggtcagacttgggagaatgagaagcccacaggggagcaggggtggcgaggaggaagagaggtcagagagtggaag

SEQ ID NO: 4617 - DNA, 1149 bp, Artificial sequence
  DNA replication origin
aggggtgacagtaattccagcacctattggttcctggagggaaaggccccagggccactattgccccactccagggagtagcatgcacagtgtgtattctaacgaggcaatcaggcacaaggacagagagcagagatgacaggaattgggatcctgtcactgccagcctcttataactcacgtgaacttgtgcaagccattcaactattctgtttctcatctgtggaagggggacagtaatagtacctatctcatagggttagtgtgaggattaagtgacgatatttgcaaccacttataacagttcctgtctcctcataagcactcctcatacgtgagtgttcaattaattcattcacttgagtccacgtgactggtgcccaggagttggtgcaactcagtggaccaggaaagaggacagccactagagacaagagagttcaagactgggtcaagaccttggatgtgaaccctctgacactcactgaatgatgatttgggctggcaaatcctctaggaattgcccctcatcgggaaagactactaagattaaagccacagcttcttccagccctctttttgagctctctgatttccctcacagacctttcttgtcctcttcccacacacagatggcaaacactctaagccctgagcaggttctctcaagtgaggtcctgcagggagggcctaggcatagggagacactggctcttctggccatggtcaaagggggcatctgacttcttgtctcctgtgctgtggccacaactcacttcccagccttccctgcaagggccaacatggccagggctggggaggcacctctcctgcagcccccaccgccctcagaggaaggttctgtgtctcttctggcccctgctgttagaggccacagggaggggctgctatttgggggccctggctggaggcttcgatgtcttccaggtgtggggaggcccagctggatgggcaggtgtggggagggccagagcagctgtgagtgtctggaaggcattcgggcagctaatgagtgcaggatctaattaaaagattggaggaggaatctgggtccaagccacgtggagcaggaagtgcagaccaggggcctgcctgagcctgggttcggtggggtaggaggagtgcttg

SEQ ID NO: 4618 - DNA, 1221 bp, Artificial sequence
  DNA replication origin
agcagaatcatattaataagcctgggtcaccaaactgagtaataccactctggcaaaaataaaaataatggctaaaatattttagcaatgagaagaattttcttctgtgacttagaagctgtatctgaggacagttccaggcaggaatgtttgtaaactttgagaaggaaatttgagtttgcctttggctaattaaatccttgctagggatctgacatacagtggagagaagggaggaaggtgggggatccacaggacagagatcccctaaggggaataagctagatatgtttcagggatggtgagcgactcagaatgacaggagtggaagagaggaggaggggaagagaagctaaagctgggcagaagcggggaaccaggtaaagaccttgcagccagagcaaagacttgagatttgatgagacaagaaaagaggtaacagaagacttgtgaaggggtggcagtggcattgcagaggggcagggtaagaaggggtttcagggaaggtaccacttgggggctgtgggggtcatcctgccaagcaacaaggagagctgggattgaaatggtagatgtggcagaaatggaaaagtggtgctgagaaaggatggacccattttgctgcctaactggatgtgggaggtaaagaagaggagccatgtcccaggggctcagcctgggaggagactggaggcatccctgacataaacaagatggccgaaaggagttacattctggagggaagactgtgaattgttttgggtcatgattctccagtagtcatgtccactgaggacttgaaaacatgaacctagagcacagaaaagaagctttagactgggttgtagcgagggagcaaatgaactctcctctaggagccgttgtgtgcactatagattcctaaatggagaaagcagagtcttagaaaataacctgcccctgctttgctggcagagaggtaggaaatggcgatggagaggcagggagctggaaggtaacaagacagacaggaagggcagaattcccgggaaacaaggttgaggcagacatttgcaatcctgagggctggatcccacaacccgcgtccttccacagccttccagcctgaggggtgcccatattggccctgaaggaaatggggacaggcatctggggcttcccatggacctcaaagaaactctcctctagggtcatgccagaacagaagggtgacattctggc

SEQ ID NO: 4619 - DNA, 924 bp, Artificial sequence
  DNA replication origin
acagacaaaaggaggagcattgttgggctgtcccagtgctgctagacaacagcttccggtgccttccctgagttgcggagatgaacacgaaggagggtttcaggagccaggagtggtgctgctgaccactgaggctgcagatgtccccctttgaacatgatccctgtggtggtggtgggggcttgtgtggggtcacggggtccctggggtgaagctgtgctagagaagaagggtgcagttcaacttgggtagtctctgtgagaatggaatcaaaggttccttgaggtgtgggtgagattgaagggcactgaataaggttgggctgggcatgttttgtggtgggttggtgtgtgtacaggacttgaaggcccagtgtagctgggggttcaatgtggctaggggatcggtgaaccgtgggcaagcttagggctgccatcagagtgccctctctttaagtggaggggcagtgaggtttggcacggggtgttctgcttgtagccaggttgagcattagtgtgacatttggcttcagggttgacatgtctttgttaggtagacttgggctggaggttagggcatggatggggtttgaagatcagtgtaagcttgagacactgagggttggtctgaggtgaagtttggtgaatcagctttggtaaggcttggtaagtcttcgtatgaggtgaagttctagagttaagggtgtggccttgttttaaggtcttgggttggctgggattgaggtcattgtttggttaaggttcatggagtcagtgagtgtttagcttggggtgtctgtgccaggggctctaattaggggggttaggatccatgggaggctggagatgggagtgacaggccatgattgagattggggtcggcctgtggttgggcagctggcaaacagctggggcttggtggatc

SEQ ID NO: 4620 - DNA, 935 bp, Artificial sequence
  DNA replication origin
gcccaggcaggggaggtgcggagagcaagcgagggctctgaggactgccagcatgctgtcacctcttaatcccattagccagatgggcaggcactcctctcctttttggcagaactaccttcccaacaccaggcctccccagcctcctttgcagctaggttttcagcatcaggcctgaattcgcccaaggaatcaggtgcttccaggaaaatgttttctccctgataaaaagagacaatggaggaggaaaatgccttcttttctgcctgtagactttgccttgtaaggatgtgacattgggactcatggcagtggtctcacatgcttcagggaatgaactgagagaatcacagtatgcctggcccagtgcctgacatagctgggtggctgaattgaccaggcttgggggcgccgcctcctgactgccttccatggaagaggagtggccagcatttactgagtgcccttctaactctatgaggttattatgagaaatgaaggaatcaatacaggggttgttatctgtacatgtggggagcaggaagagcagagaggatggacagtggggccctgggaggcagctggtatttcaggggtgcccagggagtgggtccagagcagggactaaggagtggcccaagaatcagggttgaggggctggcggggggcagtggagcagggagctctgatggatggagagaggtcagggcagacaggcagaggcaactctggatagaggagcagggccccggttctctttgcatgaggcaagaccacctgctaagtaaagagctggggagtgaggtttcggtcagggagggattgcagaattgaaaatttgcagggggtgcagttcctggggatgccagggcctctggtctcctccccagtagagcaacttctcctttcccacttttctcctgctcctgaccatg

SEQ ID NO: 4621 - DNA, 1122 bp, Artificial sequence
  DNA replication origin
tcggagctgtccaacagccagtccaggacccaggtcctcatggtgttggcccagggctgcagagccgcaggtgctgcgtggaggactgaggagggtgaggctggggaatacagcggcagctatggagagcaaaggcctgggcgcttgccgtcagtcaagacaaggaactggaaacaagtcctcactggctcagagccgccgagtccatcaggggctcccgcttcaggcagtgccagctcctggtttcaaatgggagccccccaggtgctcgatctggctttatctcttggtcctcaaatgtctctgtctggctccattctgagtggggaggacactggtgggccatgggctgccctgtctgtgcagccctggtggaagggggacttctctctctggtcctcatgcaaccccacagaagaacgattggctgtgagtggggaggggtgactagattagctggtggggttttgtgcctgctctgttgggtgggggtgggggcatgtgactgtcagcctcaccatgaggacctggagagagggggccttcccagatggctgggagggttggggagcctccaccaggccagcctgggatgctaggcctgctgatctggggggcatttgcagctccggctgtggttctggccttcctaactgcacgcctgaggaagccccggctcctggtgagcctcattcccctgccagccatcctcccaggggttggaagttgagggtcatgacagacctgaggggacttaggtgggggactagcagaactggtgtctcagtaacaaagattcagtccaacccagggcagacaatgtcccacagggaaacgtgttttcccctcctgtcaagcaaacgaaaatgtgacccggctgcacacactcactgggctttcgggggcatttgattactgggaaattccagagacagggacagctgggctttgcgagtcctcattgctggtctcattagggcagcatgcagggacccagcagggccagaaatcagagcctggaaggactgagactgtggggctcgtaggctgcatggataggaaagcatctgtccattgcctctgatggggccaggctgctgcagctctcagcatgggacaccc

SEQ ID NO: 4622 - DNA, 1153 bp, Artificial sequence
  DNA replication origin
tattattgtccccttttcatggaaggggccactgaggcgtagagcggttgaatgagacttgaaccaggtcaggagacaaagaaaatttcggggagagcctgcaacactggactgcagcgtccgtgggaatagtctctgggccccggaggagagtcctcttctgtcctgcatgcctggggctgctggaagctggggtggacagtgagtgctaggaggaaggaggtgtggccaggaccagagtgtgagaccctggggtgcagagggctttggggtgagggcgttgtcttggggttccacccaccctgggcctgacttggcctcgggcctcccggtgttggctgggaagggcttgcctggaaaaccccaaggttttttggcctacattgtccatttagaggggagggagaaggaagggagggtgcagatgacccgcctcaggaatgcggtggggggaaggggggatgctggggttggggtcggggcagaaactgagagccttggctgaggcgcgatggctccctattcagaacagccggtcttttagctccctgggggtgggtggggagtcaccagaagctggttcatcctgccagaggcctgagagccaaatgcagggccccctctttgtgtgtagcagttttatgcttgccacgtggggcatgttggtggggagggtcgaatgagaaatgggtagtcagccagatgaaaggatccttccccccaaatctccctaactgatgatttcagtttactgaactccatgaaagtcctggaactaggtaggtagaatctagctggagactagaacactcagggccactgtttctaaatatccatgattgtcctggagagaatggctcatctgctgaacccaaggcccggtgaactcactgtggccaaggtgggggctgctgtgtgccatgcacacctctttatccggtccatgctgcagttagaggcctggctgcagtgtgggctgctgggccaggactggcctggttaggaggtacgtgcaggaagtggggcccaggtgtgctggggcctggctggtggggaactggagcgtcactgtttccattggggctggtggcccaccccacctctgggaggtctgaccagatgtgttggagggggcttctcactgccgtcactg

SEQ ID NO: 4623 - DNA, 1376 bp, Artificial sequence
  DNA replication origin
gcggctgcgcgtggaggttggggacagcttgtgggctgcggtggcggggcctggtcagagaggtgcggcgagcctgggcagcggagcgcacgggtctgggccgtgggggaagggcgggcggggggagagcaggcgaggcacgagcggggatcaaagcgcacccacccccccccgaaagaggaagggaaagtgggtgtttatcccttggatttcccgagcgactggaggaggcgcggaggaggcgcgcacgggacaggcccccgcccctcccggctgcgctaggctcccagcgctggcggcacgtgctgtttgaactgcagtaacccgaaagcggagccagcgggcgggccctaagccgccgggagggaggctgcgcgacctctcccactccatttttttccactgggtcagaggactcacccaggtttgaaacctaaggaaagggagaggcagccccccgtccctgagcggtggcagaccggggaggtggggaggcggactccctccgtcaggggccgcatgtgctgtggtcttggcgaaggtggggagcgctctactagccgacgcatcctgtagcacttgacgttctctgaacagcctgtgaagggtaattcttaacggcagacaaaagaaggagcggtcaaaccgaggagactgggttgcatccctgcccccacccccgttcccttatacagcatgtatttcaggaactggaaaggggctcccaaagtcctctcttccatctgccccactcctagctggaagcagttaccacagcctgggggcggcgggagaggagttctggggagtggctggaaggggctgtaggcttcagaatgaagcctcggcttttcaaagttgcgggcacttatttttccctcagcctttgcgactccaccagaggcccattccaaagagcgaggagagtggagactcggctccaaaagagatggctgcttcctgatctctgctttacagaggctttggccagaggggtattattgtccccttttcatggaaggggccactgaggcgtagagcggttgaatgagacttgaaccaggtcaggagacaaagaaaatttcggggagagcctgcaacactggactgcagcgtccgtgggaatagtctctgggccccggaggagagtcctcttctgtcctgcatgcctggggctgctggaagctggggtggacagtgagtgctaggaggaaggaggtgtggccaggaccagagtgtgagaccctggggtgcagagggctttggggtgagggcgttgtcttggggttccacccaccctgggcctgacttggcctcgggcctcccggtgttggctgggaagggcttgcctggaaaaccccaaggttttttggcct

SEQ ID NO: 4624 - DNA, 1465 bp, Artificial sequence
  DNA replication origin
acccgcgcccggccggctccgccagccgtttcgagagtccggccggccccggccccgccatcctcggcttgcgccgccaccaccggggatctggttacctgcgcgggtcgccctgcccggtcccgccccgccccgcgctcgggttccaaactccagggcggcaaccaaagtccgtctccgttatttccagggcaaaatgcattaggaaaatcgcggctctgggcccgtgaccccgccctgcagagtcctccgagggccgccgggtccctgcgcgggccacaccggagagcggaggaaactccaacccccatctgtagttgctgcctccgggcaccgaccgcttaccgctataaataatctttggcctgcggccaccccgcggggtctcgccagcccgtggcccggagcctggaaatatttattccgagaggctcccgagcgcggggtgggggtgtgggggtgggggtgggggcggagactcccgcttcgggtccagctgtccgggatacctctttcctctcgaaagtcattaccaaaaaacagcctcctgggggtgcccctgggcctccgcctccttgcattatttattatcctctaggccctacttcgcagttcttgtgcacgctatgaaaaataaaacctgcgtgctcgtctgtgtgagtgtgtttggtggggagagggggcaggtgactgtaccccgggttggggtccgccgcccctccctcgcgggccctctgcagaagtgcaccctgagagagacccgggtgtggctcccgcagggttctggcttccagtcgtcgcggagggagaagtatggcaacgtgttcaagacgcatttgttggggcggccgctgatacgcgtgaccggcgcggagaacgtgcgcaagatcctcatgggcgagcaccacctcgtgagcaccgagtggcctcgcagcacccgcatgttgctgggccccaacacggtgtccaattccattggcgacatccaccgcaacaagcgcaaggtaagaactctgcccgttttcttccgcgcaatccctcccccacctcggggcaaggagttcctggagcccggggaatgtcccctaccgaatctgtgcccccctttgcacaccatgcttgaagactccgcagttccccgccgacaaggcctcgagtccggatccagggcctgctccggcctcctcttggtcccttttcttgctggccgactgcgtcatgggcacccccaacggtggcttggaagagcttgagcgtgcggggtctggggtgtccaaagcctgtccttgccttgctccacagagctggaaaaagaagggggcgggacagttggccggcgttcgccttttcgccacgtttcccagggaattccgaggactggagaccgatcattctaaaatcaaagctgtccttcccaccacaggctgcttgaagggagtcgcgggcaggcggctgcgcgtggagg

SEQ ID NO: 4625 - DNA, 2194 bp, Artificial sequence
  DNA replication origin
ctgcccatccccaagggatccatgggcttcccgctcatcggagagaccggccactggctgctgcaggtaagggcgcgctcgctccgctgcactccggggtccgctagctgcgagcgcggggcagacggagcggcgggccggccagggggcgccgggagcctgaaggcactggtccccgccccgccccttccctcctctctgccgcagcagcccgggcttccccagcccgccggcagcgcggttccgggaccactggcgcccgcggcgcaggttcagggggctggtaagaggggttcccggacctgagggggctcccaagatggacttgcctgggtcgcggctggcctggcagggggcgtggagcgccccgggggcgcctagcgaggcgcggtcccgggggagggtccggtcctgagccgctttcgcctcccctcggtgctgcaagcccccagtcgccctcggctttctggggttggctgtgtcgctgggagccgaaaattgagtcgggagaggagggggctggtggcagcttgaattgccgatttaaaactgtgttcctgcggcgccgtcggcagcgccaggtacagtgtccctggtccgcggtccgcgcgagtgtgtctgttttgtggtggaagaggaagaaggtaacccaaggaaaaatgagaatccagggctctaggctttcggggaaaagggtctatttacttattgggtggggacagtttggcaggagagggaaacttgggagaggtgagtgtgggatccatagagagagagtgcgtgtgtgcttgttagatgccgcacaaccccactctgctggtgataacgggggtgaggcgcgtcagggaccagacccaggtaggtaatggggagattaacctggagttcacctcatcaagtgccagacaatcgcttttgcaatgtgatacacaccggttttcttcttggggtgggggagcggagcgcctctgcagtaactgcgggaggtgtatttgtgtgtacgcgcgtttgttctgttaggggaagcagggatgtcctgaaactgacaatccccgcactagagaggtgaagcgaaaggtgagcgctgcgacctgtgggtttacaggtgcgaaagcttggcttgaaattaacagacgcgtgcaatccgcgcgctcgcgcacacacgcactcaccctgccccgggacgagtgacagcggagcgggggcggggagggggttcgaagttcctctgccctgtggtctttccacgtcccggattaggcccatctctttttggggttgttcgtgcaatgaggtgggggtcctttcaaccaatggatgtatcacccccccaccccccgcaaagaaatccccagagcctttccctcgccaccacacttaaagtgtcaactgcagcggtgctctaggctttgggccgcgaatttaggaaataaaataacttgggcaacggctcccgccttttagagccagtctgctgaatccacggtctgtcaccacccacccccacttcgtttcctgacctctctgccccccctcaggtccccatgaccttttctccgaatcccacaagagcccctgggggtcagcgtccaacctgcacagaagttagggaggaggaaacctaagcctccccatccctccaacccggggccctagatctggaggtgaggagggaaatagggggtacgtgtacaggagcgcctaaggggttaatgagagccctctgaatcccagcgttattttttcggagtcatttatcagattttacggggggacctccaagggctctccgtttccaccgagcgccatctaaacagagcccagggctaaaaatacaacatttttgtataaattggactcgcggcccgagcggccgcccctatgaaagtactctttgtgaagaccgtggaaacggcggacaaataactctttattaatgccacaaaaaacgcactttaattatagttaggcagatcagaggcggggggtgggggcgaggcggcggcgacctcggaaaattcacaacccaacttttgtgttgaaagaaaagaaaaacagaggaaaagaaggagaggaaagacggagagtgagacggagcgagggagacgggtatagcagacggagggagggaaaccctcgcctcaccaccccttctgtcgcaccccacctccgcctagatttttcttaaaggggt

SEQ ID NO: 4626 - DNA, 974 bp, Artificial sequence
  DNA replication origin
ctgaacctgcgccgcgggcgccagtggtcccggaaccgcgctgccggcgggctggggaagcccgggctgctgcggcagagaggagggaaggggcggggcggggaccagtgccttcaggctcccggcgccccctggccggcccgccgctccgtctgccccgcgctcgcagctagcggaccccggagtgcagcggagcgagcgcgcccttacctgcagcagccagtggccggtctctccgatgagcgggaagcccatggatcccttggggatgggcagcttgcagctcttgtcgcgagtggcggcccagcgcagctgccacagctgctgcgacacggccagcagcagcgtcacggacaccaggcacgcggcgagggtggccagcgccgacaccagatccaagccctcaaagagcatgttggcggccgctcgggggattggctgtgccggccgcggcgggggaggggagggcccgacgggaggggaccggagcggcgggggaggggaggctgcggccgggggtcctggcacctccagccgaaacagagaaggaggaaggggccaagggaaagggagtggaggctgcgaggggagcggagagagggaggaaaaaaattgcctaaaagaagagaggaaacacgaggcgactggggtgcaactttgtttgtttgtttgtttgtttgttcctttatagcgggcttaggggctgctcaaggggtggtgagatgaagccgtgagtcaagctggtgggtttgctctccccgctaccatcacactcggaaaactttggaaaactttgtccagagggagcctctctctcgtaagccccttcccctgctcggaaaaaaagaagggggcagagagctagcagagagaaagtgcggtcgatttgtcaaaagtattgcagtatggccccaaaattcctaggtgaaaaaaagaaaaaaagaaaaaattcctgaatccaaaaattccaacga

SEQ ID NO: 4627 - DNA, 722 bp, Artificial sequence
  DNA replication origin
ctctcgtaagccccttcccctgctcggaaaaaaagaagggggcagagagctagcagagagaaagtgcggtcgatttgtcaaaagtattgcagtatggccccaaaattcctaggtgaaaaaaagaaaaaaagaaaaaattcctgaatccaaaaattccaacgaacccagaaactttgggggcgagggagaaagctccctggctgaggcgagtggagaggccggagcctaaaagtccctgggctgcccggggcggcgcgctcgagccccagagccgccgcagcacccccgaggcaggagcggcgggcgaggcggcgaggcgggcgctgcggcccgagcgcgggtgcggagccggcgggccgcggccgggacgggacgcagccggcgacagagccccgggcgggcgatggggcggcggcggcggcggcggcggcggcggcggcggcagcgggcgggaggggtgaggcggggtggggttgggggaggaggtggaaaacccgagctgggctattgtatcaattaagaaaaggcagtccgtcccgggacgcggtctctcggctctggagttgctgctgggggaagaaatggggaaaaaagaaaggaaggcaaaaggaatgaaagagggggaaaagcaggaggcaggatttcagggctggtggttttaaaagcttctctcaatgtgaatttgagtccaaagcgaggcgatgcgtgtgtttatatagagg

SEQ ID NO: 4628 - DNA, 1086 bp, Artificial sequence
  DNA replication origin
aggggcagacattagctagaccaatgtcggggttgctgtacgcagctccatgttaacacaggctcgcaggaggagaggccagatgacagatgcacggatgcgcagacacactcatggctctacaaagaatacacaaacccacagacataccacgtcgctcctcagacgtcgggccgacgcaaggccacgcgcgcgaacacacaggtgcggccccgggccacacgcacaccgtacacaggcacgcgcgccgggccctctgctgccagcgctgagaaggtggccgtgctcacccagcatgtttatttactcatttgtatcaatgaacgtttgtgcccgtcttctcccgcctctgggtaccggggccgccgcgtttgtccccgcgcaggacacttgccggaccagtatcggggttccccgacgctgcgggcggtggagggggactacaaaagcaggggaggggggtcccaatgtgcaggaaaggaggggctgcagagtcagcagcctgggacgctgacggggacaggagaacctccaggttccgtagggtaagagacatatggcgggggcggaccttagcatcggaggtgtgaggatatagggatcgggaatgggggatctggcttagggggattgggactggtaactcaggggtccctggagataagagccagcgggatcccgggggttggaagctcgggaccctaaggcacagtttcgagggctttgggcgcctgccagtcgagggggcagtccggccaggacctccgctgccggggcttcggcccaggagggactgctcggagctggaggaggggaccgctgacctgggaaggaggaaaagaggaagggaaggagcctagaagccaagcaggcactaagcgagtgcgcaccgtgtgtgcggaggtgtgtgtgttgtgtgtgtgcgcgtgtgtgttgtgtgtgtgtgcgcgtaggtgcgcgcgcgtgtgtctcatctcgtccgtctgtaggcgctgggctcagcgagacgccggcgagaaagaagaggaggcgagaggtgaactgagtttgatcctgcggcggctacaagtgggtcccgggcgggct

SEQ ID NO: 4629 - DNA, 1075 bp, Artificial sequence
  DNA replication origin
gtggttgttatctaaaacaaaacgaaatcaaaatccgaagatacctgggggtggggtgggagcaagtggcactaaggaacaaagaaggagaagaagccagcctttaggaaataaacacacagagcccagaacccagctctgtttcagcaacactgaaacagcaggatggcctctccaaggcgcgggtgggctgggtgggtttctggcaggcggtggttttcgggggtcagtgaattctctacacagcctcagagcccctgaagctgcaaggggtggggggaggagaagagtttagcccctaaaggcagaattcctggtaccgcggtgatttccaagctgagctgggttgagtgccaccatacacccctatccccacccagcctggacagcagggatcccagcccctgtcagaacagccagggcacaggcagggagcgccctctaagctgcccttgaggactgggcactggatgggggctgccgatcttgtggcgccggctctggagggagggcacgaagtgggggaagggtaggcacctgggcctcgggatgaatatctggggccacaagctgggttccaggggaaagcggcatccctgacccaccggagtcacagtttctgctctggctctggagaagggtctgggcaggacctgccgccccaggtccctctcctccatagctcctcagaaatgtcgtttccccatgggacttggtatcttgcaggcaaagggccccgccactgtcaggcagtgtaccaagaagacttagaacagaagggagccagcccgaggccctgggaagaatgagaaggagccgagagctgagttttccaaggactccttcatgccagcaaggcaggacaggactaagagcaaagagctccctgaggcgaaatcctgggctttgtccctcaggctagacagcccaaggtgcaggccagaggctgggagggctttcgcaaactcttctggtccctgaacacacggctctgcctcctgctcactgcctcctggtctctttgctctctggactccctggccagtagggccaagtggtcgtcttgatcctggac

SEQ ID NO: 4630 - DNA, 804 bp, Artificial sequence
  DNA replication origin
ttggacacagctgtcagctgcgttcttcgcacctacccgtcctctccattggcaagtccttttttggattgctttcactggggttgggtgtggggtgggaggaaaaggactgagtttggggctttgacaggggatgatgggggtatttccacttctttttgaaaattccttttgaggcaagtctctgaagctgagatttctgagatgaggtatgacgtgaggcttgtttcatattcaggcaaaggggaaagaagcaaagttctttcccaaaggccaccgccttcgtagaaggctgcagaggagtgggtgaggggctccctcctcactgttcctctctgaggggctgggagtgaggggccaggctgtgcctgcatctggctctgccaggtagagatgcctggatagtggttgttatctaaaacaaaacgaaatcaaaatccgaagatacctgggggtggggtgggagcaagtggcactaaggaacaaagaaggagaagaagccagcctttaggaaataaacacacagagcccagaacccagctctgtttcagcaacactgaaacagcaggatggcctctccaaggcgcgggtgggctgggtgggtttctggcaggcggtggttttcgggggtcagtgaattctctacacagcctcagagcccctgaagctgcaaggggtggggggaggagaagagtttagcccctaaaggcagaattcctggtaccgcggtgatttccaagctgagctgggttgagtgccaccatacacccctatccccacccagcctggacagcagggatccca

SEQ ID NO: 4631 - DNA, 1063 bp, Artificial sequence
  DNA replication origin
tgggcgctcacatggggagtccgctccagccccggggtcttacccgcgttgttgataagcagcagtcgctgcagccccttgggccgggggagctcgcgcagggcgccgagcagctgctgcaagccggcctcggcgcccaggtcggcgggcacccgcaccacgcgcaggccagaccgctcggcgcccagctcggcctccagctggcgcagtgcctcgtcgttgcgggcgctaaggacaagcacggagccgggcgacagcagcgaggccaggagcggggccagcgtccggccgaagccgcgggaggccccggtcagcaagcacacagcacgccccagcccgccctccatgctcctgttctccgccggcggcgctggcacccgagaccaggcaggaggcggtgcggccgcggggggcgggaccgctacgggtgtcggcggggccgccctgccggggcggggcgggaacctcaggcttcgggccgcgagcgcccaggggtgctggttcccttgggatctggttcccttggttgctggtggcggaagtcaaaccgtggcggtagcccagtccgtgccaagtgggacaacagagagggccggcaggcgcggcccacacggaaagccctagcccggttcccagcgctgccgtgttcttcgcccgcaagctcagcctccggctgggacgcatgctcgaatttcctcccagttccagccctaactttgcactactgacctcttccagggcaggccctgcactgggtgctgggcgtccctggtcgtggccagtgaacaccctgaatgaagcttatgcctgtttaggaattgaagtctctgcttgtttgggagctcaccgctctctggatgacaggagcttcctctgggagaaccacagtggctccaaatgatattaaaacctttcccttttactaggccctgagcagctccgtgatcccaccagtaacccctgcttctctgagatttctgactcctgtccctaaaagtgtgttccccaggattctgctcctgctcatgctacagtctccctggcagcaattccatccactttc

SEQ ID NO: 4632 - DNA, 1132 bp, Artificial sequence
  DNA replication origin
cgaagttagccagcaaagaagcaaaaggaagaggatatagacttgaggattacatcactggatgactgagccactgattggatgtggaggatgagagagtgatgctttgaggtgattcccaagttctccgcatggacaaaggcagagacaataacttgtactgagtgctctttggagtctgacattgatccagtgcaccacatatgttatctcatttactcctcacagaggtcccgtataacgcttgcaatttcacagatacgcaagctgaggcaaaataattggcccagggctcaccactaataaataggagagtctggatttggggccaggttattccagaaatagagagagggagggaaaacgttaatgtggggccagagccagaacaggtaggctaggctgtatcagcctgggaggcatcgggctattctccaaaaagtgaggctccgggttgcaggagatgggacctccaggaaactggtgggaggctggacaggggcaaagtgaaaggtaagcagcctgaagatgggtgggatgtagtggactccagcgtgaagagcctccagtctctggcagagctcagcagcttgggtgggaggaaacgaagggcagggagcagaaggtggtggggggaacgggttttggttaagatgggcagctgtccagtggtgaagaggggaagtatttgtgtatacgatcagttgtgggggatggtggtagagggagcagtatgagagtctgggaggaacagggcaggggagatggcacaggagaagattggggtgggggtgggggcactgatactgaatccagtacacagaggcaggcttagagaccccctgagggtgacaaattcttctcttaacttgctgcagaggaaacgacaagagaataggtcctaagaggagtgaaaatagaggaaactggccaagggataaagataagcagagctatggaagaaaaggaagaaaattagggaattactggagaggaagctgacagaaaggggcgctgggagaggaaaaggtgagggaggacgaaaacggaactcctatcacccagcgcattccagcaccccctccccctcccccgggaagtctgcgactgcatcctcacagggatggaatgg

SEQ ID NO: 4633 - DNA, 1379 bp, Artificial sequence
  DNA replication origin
ttcccaccccaccttcgaggccgcagaaaggcgccgctccgaggcctaggagggcgcgggcggcggtggggaggctgggacctggaccttgccggcgcactgcggagagggagccgcagagagttccgcttcctcgccgctgccggggtccattctagcggcctgagcgctgcctgggcgcgcagatctgggttgggcctcctgacgccccaaggccacggggtccgtgcgccgcgcaactctgcggggactccaggccgggtcttggcagcggcccgcctgagcgccgggagccgtggtttggagagcgctcagggcgccccggccgccacaaagcgggttaaagtctattttccactcgactgctccgaaaagcccccgcgcgccgacgccgttccggcccccttgggcgaggtggggaggggcggccaggggtggggaggcgaggcggccgcacccagcactcctccgcgtcctgggaaccccggggcctggcacggctgagacaccgcagaggcgccttcggaaggaatgatggaatccgtggggagcgcgggttctcgctggcctctccggagatttccagctttctgtgatggtcttttcctctcgtttgtgtctcaggctctttattttccccctctcctgtctcccggctcccctacctcccgacttttcctcctctgatttcttccccctcctccttttccccaccctcagtctgggaaaagtggaagcgccgccgagggggggaccaggacccgaccaggccgtatctctaagggggcgggggtgcggagctgggcagaggtacagaaggagattttcgttccatatggaaggagacaacgacgggattttgttggaacaaggttcccacagggatgcgggttcagttgggtaaacgttgcctgggcctgtgctctgcggtgacagagcaagtgctgggggctgagacaagacaggagcccagcaagctgaacccggcccgagggccttgcgctcctagcctggtaatgaatcccacccgttctgtcgcagacccccaccgagaggctggccaggggccacgaacttgtttaactgggcaggtagagaagcttggaatctaccgaccgtcctagacttgcatctacactggccacctcctttcattcgtgtggctctgggtatacttgttcatatctaaatcaatagaccttttattacaccaccttcccttgtgaggcattcaaatgctgacatttctactcgggaggctgagacaggaagatctctcgagcccaggaggtcgaggctgcagtgagccgtgatcataccgctgcactccagcctgggcgatacagggagatcccatctctaaaacaaacaacaaaaaa

SEQ ID NO: 4634 - DNA, 1462 bp, Artificial sequence
  DNA replication origin
ctgcggtgtctcagccgtgccaggccccggggttcccaggacgcggaggagtgctgggtgcggccgcctcgcctccccacccctggccgcccctccccacctcgcccaagggggccggaacggcgtcggcgcgcgggggcttttcggagcagtcgagtggaaaatagactttaacccgctttgtggcggccggggcgccctgagcgctctccaaaccacggctcccggcgctcaggcgggccgctgccaagacccggcctggagtccccgcagagttgcgcggcgcacggaccccgtggccttggggcgtcaggaggcccaacccagatctgcgcgcccaggcagcgctcaggccgctagaatggaccccggcagcggcgaggaagcggaactctctgcggctccctctccgcagtgcgccggcaaggtccaggtcccagcctccccaccgccgcccgcgccctcctaggcctcggagcggcgcctttctgcggcctcgaaggtggggtgggaaagtttggggagtcccggctctcacagcctgtcgtgagaactgcccccggggaattcgtccgccgtacggaaaaactggccggagcagagtcgtccgcggttccgcggtcgcgggtggaaggtgaaggtcgagggaggtcaggctgcttctgcgtgtcctgacggctggcgtgttctcttgagatgggctcgggctacttggccagcttcaatttaagccacagtgtctccgaggccctgacctggtccggcccgccgacacttgagcccccagagcctcagagaaggcgagggggtggatctcccagtgccgaggcccgccgtcctggtccaagccggtcgcggcaccgtgtctgggcactggagctgcttccagccccgcgaacagctggagggtggcagtgggaccgctccggcggcttctcccgcgcagtgccccgcctggccccttgtgaagggagtgagcgtcccctttccagagctgtcccccgtgacatccagaaaacgcgaaacctcaggaacaaggtcgcagcttcagaccgcggcccaggaggccgatggtgggtgagtgggagagtcccggagagcaggggggcagagagctggttttcgggaaaaccaatgtgttggaccccaaacatccaccctccgctcggatccaagttctctgagaactgaaacgacatcccgggacgaatgggagagttaggctgagctacacaccggggaggggagggttggagtttagccccaagcccttcggacgccttcttcggctcccgcgtgggttgagacggcggcacggccaccagactcagctaaagggcggagtcgcgaggagaagccagtggcgaggggaggaggaggcctggatctccccgcgaaggctccagtccggcttttgcctccgactgcgggctccctccccacccgccgtccctcgccccgc

SEQ ID NO: 4635 - DNA, 1319 bp, Artificial sequence
  DNA replication origin
tctttgaaatcttcaaagaggaggcaaggctacccacaacaattcttattctagtaattacattctctggttttgtggtatctgccaggtcagcatctattggccaggtgggactgaaaaaattgcctgacaaatcgggacctgggaaagcggttttctgtgaaagtcaaagtgtcaagagataattttcattttattatctaaacaactgtgccaaacatctaattgactgtagacctagactacagaccgtcacattagctcctggagccgaagctccagccatgtccctttcatttgtttctctaaaagccgggttacctagctctgagccatagacccttctcacaaggctgtggtctggtctacactaacaaaataaaactggaaactaaagtgatgcctgtacaaatcaaggccactctttaaaataaaatttaaaaaaaaagaaaagaaaaaaacaaactccaacaaatttcaaggaagaaaacgaactccaacaaatgcaactctcttttctccgggaaagacaaataattgaaacgtgtgtgtgtgtgtgtgtgtgtgtgtgtgtgtgtgtgtagggccagtggaggatctttattagcaagccgattgctggatgcaaactccggggttcggactggctacgaccttaaaagccctctgcccccgccccctgcccgggaaaactgtcctcggtattccagcagccgggtgggctccctcccgaaggcggcgagcaacggcggaagccagtttgcttactgcaaaccttccccaccttgggtaggagaggcacgtgtgacttggagaagtcgggccaaggttgccgagaaacatcccaagacagccaggccctccacactgaacattaactctccgattcgccctccctgctgcccttgcttcccccagagctggggcacgcgaatggactttcccccgcccggacgcgccagcgaaggctgaggtctcggaggtggtggtggacttgcgagagaagcgtggtgcgaggttaagccgggcggagggagagcgggaggagttgtactctggtctgagactggctcagctgggagagagaattgggcaggctgtggcgagggccagcacaggctccgaggacgcgcctgggcttgcgtccgaactggtatattttctagaaaagcctggaggtctccacctgctttcctgggagggagacctacgcggcgaaggcgcgggtggatgccgcacagctcttccctgcctgggaatctacctccgcggacctgcagccttcccggcagtaacttctaaacagccccgcgcgcccc

SEQ ID NO: 4636 - DNA, 1265 bp, Artificial sequence
  DNA replication origin
gcccccattccccgcggcgctgcggtcaagcccgtctttagagcctcttcctcgagactgcgtgcagcctgctgagcccgcaggacttttgtcaagcgctaaagacctagcaggaggcagagtaaatgcaaactgtatcccgagcccggctcccaaagctcctcacggggggaccaggttccctggaggaagcgggtcgcctcgggagcgggcagcgcaggcagcaccgaggccactggagctggctccagccctggcattcctgcagcccttttcccgccactgtgtcggggcgctcatagtcctgcggggagccggtccgcactggctttgctgctgttcctgggcaaaactggcggggccttggctgcccaccagccaggagcgtctggggagaaagcccaggtgtcctcagactaccaacagaggggcttaaccagggaggggccagcccctgcttggggcccgagggttgctctgatccggcccaggccggctgatagggctgtggaagccacggtgtgcgcgcgcagagcatctgagtggcctgggcctggtgggaaatagaccccgggtactcaggtgcttctctgaatcactggaaaggctgtcgaatgggagaaggaataaactccaacggcgcctgggcttgaactgagtgaaattaacaattaccgtgtagtgtttttgtaactgatcgttaatttaagggaaaaaattaaagaattagatgaaagttatagggaggtggatttgggttcattgtaagtagactttgccataaataaatgctgcctgggatcactgcataagctcttggtccacccaggtccgacgtgttggagtggggctcagcgaccctcagcctagctgctgccctggaggtggatttcagtctctgcgtgccggccggctcccagagttgcgagaggccggctccgcggtctcccagctacctcccggctgacttttcaccttccgctcccctttcctcctagtctcgaccctactacaccaccgtcccctcccaagtcccgggcagtgagaagatgcccggcatggggggcagccggagcctccctttagcagccagagtaggaagggggcttagtgagggagcccagacccaaacttcatccgcagctttcttcggcggaccttaccctctcctccttcagtggcattttggcatctattgtcgtcatatctgtctgctgccccacttaatctacaaatcgctcacgggtcggaggcaggacccgtgc

SEQ ID NO: 4637 - DNA, 1127 bp, Artificial sequence
  DNA replication origin
gttgggatgggacaaagccctttggtttctagcactgactggacacaagtgaggtgggcagaggtgggagagagacgctgagagtgcgagtgggacctgggtctgtgctcccagcagaaggaccttgtgtgcttggatccctgcatgtggcccagacagcaaggctgggtctctgacatctttccagtgagttccacattgatcaagcacccgacattccaggtgggaagaacagcatgagcgaaggcacagcacagggaaaacctgtggctcactcagggacagggatggggatgctgaagcaaagggtaccgggagcaaggcaagaagatggggcaaaggggctcagaagggggtgagtctgccctgtttgggtgcaaggaagagaaacctagctgcaacatggagggcctcctttgaagtggacctcatccttgacattcacagaaacctccctagaggagcagggcccaggccaggccggtggcagagggagctgggcaggggggtagggggtgctgcattagggaggtgtggttgggaagccagtctagactcaacccactagatgggaatggatggggctggggaagaggagaggaagcttgaggaagattcccagatttcctgtagcttgggaaactgtgtacatgtctaatgctgtttgtcgaggtgggtgatcctggagaagcacagatgggtaggtgcgtccggctgtggatgtatgggctttgaggtgctgaggggcagggggtggagcaggcagctggcttgacgggtctgcagctcagcagaggtcagctaaagacacaggccagggagccaaagagaagtcctggaagtggatgtgatccccacaaggcaaaggacataatgaggagtcagggagagcaaggactgacctgggggtggccagaggtgacaaggcatggatcacactgaatgaactcaggctgaaggaggagtcagagctaccgaaatgaaggcagagcggggtgggagaatccaggagggcatagccaacagatcagggagcaggtgaacccaacaggaagtggttgagtttggccacaagggggtggccagtgactgtggttggtgactgtcattagcaccggcagaatggt

SEQ ID NO: 4638 - DNA, 2634 bp, Artificial sequence
  DNA replication origin
tgtgcccaccagctctagtcctcactacactccctcttatggggactccaatgtgcacagcccagacatgacagagctctccgaaggccaggctggcctgtaccaccttctgcccacttcccagggttgccacatcttgacatatggcgggtgtctagaaccaagttcaaccaacctaagttgcaagaggcctggtgcctccttgactctgtccagggcaaatgtccggcggggaccttctcactgcagtagtgtctttctcacctgcccccctctagctaggggctcaggcatccccacgggctcagtccctggagataaagcccaacatcggggctgatgtggtgtctccaggggaaccccgtcttccagtgcctattctattccagtgctcttttctttctgcccatgtattccacactgagggagcacctactgtggaccagcattgtgctaggctttgaggacacaggggcgagacagatccgcacgtccgctgcctcagggagcttgtgatctaatgtggagaggtggggtatgagaagttcagggagctatgggggccacagaggtggccacgcccagcgtaggggagggaaggtgtctaaagctgagacacgaaagatgatgagctgaagacgggagagcagagtaggggcaggaatggaagtaggacggggtgtctctgaacaactcaggcaaagactggagtggggacagagcccagggtgtgcgaggaaccaaaatcagtccatgtgccctgtgtctccagtccaaggagcagggtggcgcgggagtctgacttgatccctgaggatcagggtgccatggagccatttcacagtgaagagaggcatgggaagacttgcagtttagaaggccggcactggctgtggttggggacggactgggctggatgagaccttgtggggagggacggggagaggacgcaaagaggctccagagtctttgggcagagcaccactggatggcggcgtcattcccgagatggagagctgagtggggccaggggagagggcaggttcagttccatttcaggtgggttgagttcaggcgcctgtgagacatccacagcaaagtttggcaggcaggcggctgtgaacctgaggctccagggagaaacaaggctgcagaaatcttgtgtgggggtaacccagggcatgtgcagagaagagggcccagccagaccaagccccaaggaccccgaggagcatgcagtgggtgtcgtgaagtggggggtggcagtgaccttggagagaaagatttttctggagtgtggtgagaacagaagccagatttactgtgggttgaaaagtcagtgggagggaaggaggtggacacagccagtgtagaccaagttttttaaagaaacgtggctgctggggaggagagagaccaggtagtagctgggcctgccttgggatgaaggggaggtgtcatcagagaaggttcctgcatgtggaacactaacgggcaaaggtgggagagagggaggatgacccaggagggggccccggagtgggcaggggaggtggagccaggtggggtcctgtcctgcgaggggagggatggcagctgtggggtgggaggagggcaggtggaaagccatgcatggacacggaaggcagcgggtttgatgatgggaagctgagggtttcgcctctgacaccttcagctttttccctaaataagaggaagtgtcacctgcccaggatgcgtgggagcagggggtgggtggccaaggagaggagagcagagcaggtatccagtggcctctggagagtgggcgagggagctgacctggctatgggggcaggggtggggtggttgtctgcagtggttgggggtccagccaaagtcaaggacagggaattttgagggtctccattacatggtcaggttcaagtaggagtggggtgcatggtggggttctccgaagcagggcttctgccagcagcgtgggagggacccttgggctagggagtagctgaagggatggcccctggaatcgggactgcaggggaagatgtaaagactgagtggtcggagtgtggagtgtgggcgcttaggtctaggggactggaaacagagaagcaggagtgagtggggtgctggaaggacaggcgactgaggagcccaggagggtggggtttggatggaaggagttgaggtggagcagccctgggtggtcatcaggtccagggaatggccctgggcagggctgtggtaggtctgcagtgcagtggacatggttcttgggggtgagggagatgcagaactcagaggccagtgtgtaggatgtccacccacgtggacacaccatcagaagaaagagatctggtctgggctggaagggatgctgtgagccccgcggcgggagggcggtggagaaggaagatgtgtcactaggtagggcatgtgagccctggctggggtggacacgggggtgcagggggcagagctctggggcccagggtggtcctcactgcagctcccagccccactatttgccccttcccactcccccacttttcctctctgttctctctccacagattgaaacatcccaattagagccggagatagcccaggccacgagcagccggacagtgg

SEQ ID NO: 4639 - DNA, 1231 bp, Artificial sequence
  DNA replication origin
caatgttggacttggaaatgtggcaggaaatggaggtgtggctgggacaggcagaatcttgtaggctacatgaaggtgtcagcattttacctgagggcaatagggagccacagaaggactttgagcaggagtggaccataacccagcctctgtttttatttttttcttgggataggatctcgctctgtcacccaggctggagtgcagtagtgtgactgcagctcactgcagcctcaaactcttgcctcagcctcctgagtagctaggactacaggcacatgccaccatgcctggctaatttttaaattattttaaaaatttttacagagacagggtctcgctatgttgtccaggctgatcttgaattcttggcctcaagtgatcctccaccttccaaagtgttgggattacaggcatgagccaccgtgcctggccttagactgtcttagaaaggtctctcttgggatggtgggtgtggaggatggactggaggggtaaggagggggtggggaggcctcctggggagcatctgtgggaatcagagaagtgccaggtcctgccctatgatgctgccagtgggggaagacaggaggagcctttctgaagatgaaatccacaggagttgatgaccaattccacgtgggggtgagagggaggtgttgaggatgactgtgcgttggatgactcctaattctagctcaggagctggggtggctggtgacgccattctcggagggaatatgggaggggatgggccagggttgggggtggtaggctcaggatggccacatggagtctggggtgccagtgggttccccaggtggacaggcctgggaggcagatgggtccagggctctggagctctgggcaggagaaagcgcccgggatgtgtgagcatagccagatccttcagagtggaggagctcgcccagggaagcagatggaggggtgggtgccaaggcctggggaacaggcacatttgaagggcaagcggagggaacaagcctgtgatggtggccttgggggaccagcccgaggagcgaacgtaatgacagagggtgccacaaacactgagcagccatgagcgtcagagagagttttctgagagttgtcccagtgagggctgagaggctttggtcttggcaactggatttcagtgactgcctggggtccacattgtccgacccccacctcatgctgatcctggttcatagcctctcactctatccca

SEQ ID NO: 4640 - DNA, 1509 bp, Artificial sequence
  DNA replication origin
caggctgttggcagtgggcatggagagaagtgggtccctaaagagggagtcaggaggcggcttcttcgggattcgatgaagagctgtatgtggtgggagggaacgggagccagaggatgtgcactggctttctggttttgaacaaccaggcagatgtaggtgcttaatgagatggagccaggcgggggcaggttcgagggagggcagtgggtcagttggatggacacgcggggttgaggagcctgtgggatgttggctctgggtctggaatgaggagagacgcctgggctggagggatagaagtagagcctaccagcatgacaacagtgctggaatcgagggtggtgggtgaggcctccaccctggcggggtccaaagacaagcagccagggtggtgagggcagatccgggccatgtgtgatcagggtgggtggggggcatccacagggtcagaccctcctgagaggtcacactccatgagattacagagtatccattagtgtctcaggcaacgtagccaaaccctgtccccagagaagggatccaggtgacaggtgaggggaaaaaatgagaaagacaggtccacagccgcaacaagatgtgggatcaggaggggcttttatttatgtatttgtccttgttttaaatgggagagacaggggcttgcgtaaatgcagtagagaaggcaccaggagagatgtcgaggacgctgacaggacgattttgggaaagtctatgaagaggaggggggaccagagcacagacgaggggatcagccttggcacggggagacccctccccacttcagtaggtggaagaggagtggggtgggaggaaaatgctgctgggggtagggttcaggggtaggaaaattgaagaagttgttccaatggctcctgtgttcttgtgactgagcagacaggagagagtagggtggggaaggggcaggaagtcagaggtctgaggacacagagaaggggtgagacatccaggggagaatgagaggtgaggaggctgagcagcacgtggtctgggagtgcagccgggcctgttcaccaggaggtgctatgggccagtacagggagggccacagatcctttcttctggggttttgtcaggttgggggtgaggggggctgagagatgggtgacagcacggaggagcagaggaccacgggatccacgctgggttggagtgaaggtgggagctaagctgaggggaaggcacagacccaagagggcccaggaggtgtctgcattgagctcacaagaaggcgagggctgtggccagaaagcggcgcttctgaatctgtgatttcaccatggacctgcttcaggcagggccccaagagaggtggaggagaggtgagggctcctggagacaagtcggggaagtgaaaacaagaggccggggctgttggggctgcgagggctggagacccaggctcttagagcaggaggagggggtgacccgccttaggccctggaaggtgagaaatggggtggcttc

SEQ ID NO: 4641 - DNA, 976 bp, Artificial sequence
  DNA replication origin
cattcgtgacctgagtaattgaggtttcagccagcaacgtccttcaagacattgggataggggtctatacccgctgggataggggtacctatcgggaaaaggtcccaaagacagaactctgctatatctgtttagctgcacactggcactgccccggaaccacgcttcctgggcccagagacagagtgggacccagcatggtggctggcagccagcccaccccaccttcgggtctcatggggctccctcctctctccctcacaggacggctctcctgcaggcacgcccccggctgctcctccctgtgcaaagcctcgtgtgcctggcagccttcggcctggccctgccgctggccatcagcctcttcccgcaaatgtcagaggtcagtggggaggggctcaagggcagggcagggcagggggtgctgtttggtgatttctgaacaaatactcataccgtgccgactccttagcgccatgctaggcgctggggctggaaccgtgaatgaggctggcccaggctctggccctcagagtgagggtcacgcagtcaacagggtgattaaacagaggccagcagatgaggagccaggagcgttagggtgggagaagctccactgggtgtggaaggagacagcagaccaaactgagcctagagggaagtgacatttcactgggactgggagcgtggctggagttggccagatgaaaaggggtggcggggggagatgtgaggtccgcggacacctggtgtgaaggttctgagaggtgaggcagcacacgccatgtccaagagctgaccaaagtctgcagcgcaaccagggagtgcagcaaggtgatgtggcctgggaatgaggggctgggctgggtggtgttgggaacttggaagccagaacagagagggtgaatgtcctcctaagggctgtgcagggcagaccacagatgcctgattctgagcggcccctgtgctgccgcgt

SEQ ID NO: 4642 - DNA, 759 bp, Artificial sequence
  DNA replication origin
gggcacacccgctcaggctcttcggggcacggcgacaggggtcctttccctccgggacctcctctggggcgtcgccgactcggccctagactgcggaggcgggggtggaacgcggagcccgggcgcctggttgggcccggagaccggagccggggaggggccgctcccgcgccgcagaccctcgggctcccgcgcctcccgcaccaatgagacggaatttattaggaaacaggcagagagaccgctgaagtgaaccggggcttgccaggggtgggcggcagccgaggcggccagaaaagaactttgaaggaagaaaggaaattgtgctaaggtcggtgcggtggctttttttttctttttttgttgttgtggtggaaggggactggttccagcaagggggtgccccgagctttgctgataattagggaacttggctcctgagccgtctgaaaaaaatgtccccagtgtttcttaacaggactttaattccttttaaaagtaggccatctcagcatgtaggtatccgaggcgagactggcatcttccttccagtgtaggaggccatctagggcgagagtgtcggggtgtccctgcctggacttgagtgaccttattacattgcctgtccccgctcccacccccattctgctcgttcttaaaggctcagtcgggcctgcctctctggcaaacacttgctcccttcttctctggtcccatcagatcgcaggcttcctcctgcacatctctttggccacctga

SEQ ID NO: 4643 - DNA, 1501 bp, Artificial sequence
  DNA replication origin
cggcagcccctcggagggacgacggccccaggggatgacacagcgtttcccccgcacgccctggctgcgtcccctcagggcatcggccggcttgctgcgtcagcgaatcctcagcccgagatggagagcagggacgggggacgccggaccgccgctcgcctcggcactcgccccctcaacctgctgcgcgcgccgagcccggcttgggggccagggctggggagtgaccgcggggcgcgacgctgcccggcggcaccgccagcagctcgaaaggaacgtcagtccccaccgggggaaaaagttagaaggcatcccggccacgccaacttcccatccagggccagactagaactttgcgtcccgggcgggcagctgcacaacccggagcgaccctgagcagccgctcgaagccgggcgctcgggaccttgaccgcagccgccggtggccaatcacagggcgccgcgggcgggaaaggctagagggcgcgggcagtcggggagtgacggcgccaagggccaataggaagccaagatgggagtccgcgcccgccccgttgaccaatgggaaaagggtgactgtgaccgaggttccccccctggcgctagctgcaggctccgctggccgcgggtgggagacccttgggcggaaggggactttggaggggagtttgctcgtcctctctttgccacccgccggcccgcagaccacagcccggtcctcacctgctggaagcggggtttgcccagttggaaaggaggtgcatcgctcgaggcgctagcggcactagccgccgccgccgatgctgtagtcgctgtatccgccatggccactgacgcccgcaatctccggcccttttaaaatgtccctcctcggcccccgccacagctgcctctcccgattggccctaatcaaccgcagcgagcgggaggcgcaaggcgttgtggggagtgtagtttttcgcgtcgcggcgcttacaaccgtagactgcggagagttgcggccgtccggagaggtctcggtgcccgctgtccgcgttgcaaggtgcaaggtcggcagtccaggaaaggtgttcctgtacgacgaccacgggccacccctcgctgcttagttgcccccagaagttagagttgctgccgtgggcgtcgctcctggggccaggcagcgcagaagggtcccattcaagggggaacctgggaccagatgggcaaagactccaggcggagtagggttaacctcggaaggctttctccaaggagttgcactgcggaccttctcgtactttcctccgtcgccaccctgcccactcgtcctgtgctctccggctgccctgacactcagttcctggagcatgctggggcctgcccgcctcccgacccctgaacattctgtacccggaagactaaatcttcgcctgatgctggctttctggctttagcctaaacattgcatttcccagtccatcactctgcttgcacaaaatcccacagaggctccgtggca

SEQ ID NO: 4644 - DNA, 926 bp, Artificial sequence
  DNA replication origin
taagggggcaaacaagccaaggcctcctggcccctcattcaaggcacttttatactacactggtcatcctccccttccctggcacagcccgcaggtggcattagagctgcttttataccccatccctagcacaggctcctaggtgtcaggaaaggactgagatgcattctttctccatactgtctgcccagagcatgggtgctctgccactcttcccgatttgtgagaatgaatgcatggatctagcctgagagtctctgggtctgggtgacccttccttcagtggagttcagggccttggactaagccattttgctttctactcctgaatggtctaaatcctctgtgaagtaagcatagatttgtaagaggtccccctgggcaggatagttaatgtgggagcctgatgcagtttatgttatagtttatgtacctgtcacagggtgctggaggatcccagagaagggtcatcttagcctggaggaatcaggaaggcttcctggagaaggtggctttgcacaactgtgaaacatgagtaggaattagtgagccaacgggaggaaggggcaatgttgttccagacagaagaatagcttttgtaagatcttggtaagaatgtggctttgggagtagtggaccatgaagaaagggcagggaccagattgtgttagagattgtattttcttaccttgatagaagccattaaaggattctcaagctttgagaatgctgagatcattatcctgcagcagcatggttggaggtgggcaagactgagatggaggagctgatttagtggctgtgactagaaggaaggtttaagcattggcctggagaggagtggggtggcttgagaaggtaggaaggtggcagtgcttgattgttaaggccgaggctgaagaggatgagccagaggacctcctagg

SEQ ID NO: 4645 - DNA, 865 bp, Artificial sequence
  DNA replication origin
cttgggccagccaccaccgtggggggcccagccctccatgctctcccctgtctgaagcctggcccctgactacctcctctgcaccaccaggggagccagccttactccctggcccccatgagccctccccacctgggggctcccctgccctacttagggaggacctcgctgcagccaccccagcctccccgcttgtgcttctgcccttggagacacgaccagctgaggagccacagcccagtgccaggtgagcatccacccccagaacactgtccaggaggaagggggtggacagggggcagaacagcccaagggactgaggggttcacactccagtctcatcctttgtggggcaggtgagggtctcttttaccccagaggcaagacggtacaggctttgaagacaggagctttctatggtaccacctctgaagctgctgtcttgggacttgggataatcaaggcagccccccacaagccaggggtttggagaacagcactgatgaggtgcagggtataaggaatgaagtggggagagccgatgtgggctggcagggaaggagagcagtgctgtaggcccttctggagtgtgtgcactcagccgcaggggagctgtgggtggggggcggtggaacttgtcaatcagggggtagttcttggggcagaccgtggcagagcaggctggcagtggagccttgagcagtttcctattctgctagagtgagggtgcaggctggggaaggcagagagccagaggagggaccagcacttaggtcagagagaaagctgcagacaccttcagaagaaaaaggaaaactcaaacacttcccacatatgtaactctcagaagaaaggttccccacgc

SEQ ID NO: 4646 - DNA, 885 bp, Artificial sequence
  DNA replication origin
tcccaagtccagaggaaccctgggctccagccacacgctgctcccacctcttcctcctcctcctcctcctcctcctcctcctcccccaggctctccctggggctcagctgccttcgcagtcatggccccagggcctgggtcttgcagccctgccgcctccagccccactcctgcaggggccaggatctcgctcctggcctctggacgcagcctgctggcagcaaagacgttgaaggtgttgtcccactcaggcagggctttcccaggggaggccaggggggtggggctggccctcgaggcactggggagagagggagcaggtgaaggagagtttagtgctatgtcggctatgagctcctcgaagaaggggttgctctgcaaagaggtgaggaacgggttggtaagacccaataatccaggtggggtggcttcaggggcggcggtggtggcggcagcggcagcagtggcagcagcgggggaggcggctgcaaaaaggttagtgcttagcatgggagcagcagtgggagcaggagtgggaggggccggagcccagggggagcaggggaggtggtgaggaagagcagctgggtcagattctacctgaggagacacgtccaggctgtggagggagacaaaaccgtgagcctcctggttaatgccaagactggaaaggcccctgagtcccacgccccaccccctgcttcgggaccaggggccataacacacacataggctggatttacctacttgggccagggtacagagggaagaccccaacatgtaacattatcaagtgcctcccaaggagaaatatgccaggcaaagctattttaatgctcactccaaccccagagagaaatcatctcatctgataggcaggatccg

SEQ ID NO: 4647 - DNA, 1029 bp, Artificial sequence
  DNA replication origin
gaaagccaggtgtcttcctccagggcgaggttgaatgttgattaccccgctaaacgtagaagctggctgcagggggcatctgcctcttgctctcaagatgccctccactatctagagatgtcacccccccacccccatcctgtccctctgtgtcctgtgtccctggtctgaggataggaggagcttctaagttaaggaaggaaacacttgagtcagccttccagtggcctgcctgcctgccctgccctgcctgaggtagaggcagcggcatggttaatgaacagcaggagattatctcccggtcacttccacctcagtgggccagggtttttttaaatcatttattttggcagcatttaaccttgcctgtgttaagatcaaggcttcagccttggagccccatttcctgttttgggcttgggcaggagctggaagccagtccccggggctgacagcctgctgtggatcactcaagtggttaacttgggagtgatctgggtaggagggtaaggggattggggcaggactgtgccttaggtcaggagaggtgccggaaaggtttgccccagtggaatggcatccactgagtgaataaatccaggaaggcttgctggaggagggggatgagcctggtgcaaacccaaatgaaagcaggatttaggtaaaaaggatctgaccttgaatgttttctgaaacatgggtgtggaatgactttcctggctggctctctgtggtctgggatggggagggcgttagtgcaggttccaggcatggctgtgacctgactccatttccccatcccctggcctgctccccgccttccttcatgacttgctgtttggtggcagggtgtgggatcatgtggtatatagcttggaccttgtttttttcctcctttctgtcctctccctccttcctggttcctggagcccaagggggtgggtatatggggcgaaaagctctctcctggatctcttagcccattctttttcagaagaggtgcctatcccccaaatcattccacccctt

SEQ ID NO: 4648 - DNA, 1257 bp, Artificial sequence
  DNA replication origin
gtcaccaggtcctggggtctgcaccggctcggccagacctcgccccccgcttctccgccatggccctggtgcggggcgcggagccggcggcggggccttcccgctggctgcccacgcacgtccaggtgacggtgctgcgggcccgcgggctgcggggcaagagctcgggagcgggcagcaccagcgacgcgtacacggtgatccaggtgggccgcgagaagtacagtacgtcggtggtggagaagacgcacggctgccccgagtggcgtgaggagtgctccttcgagctgccgccgggggccctggatggcctgctgcgggcgcaggaggccgacgcgggcccggcgccctgggccgcgagctccgccgccgcctgcgagctggtgctcaccaccatgcaccgctcgctcatcggcgtcgacaagttcctgggccaggccacggtggcgctggacgaggtcttcggcgcaggccgcgcccagcacacgcagtgagtagggggcgcgggggcacagaaacggctaaaggcctaacagggcggggctggtgggggatcaggaccccgaacttcagccgggccagtgagcccttgcctcgtgcttaagggcgtaaaccgacagaaacgttggttcttcgcatttcggggtcgtcttcaagcttcccaaacgtgcgctgtgtggggctcagccactggtggtccctgggaggcctgggggaggtttaagtggtggcgaacgttaggagtagattgtcaagtaaagttaggaatgagattcagaggctttggggctatggaaacctcaagaagggaaatcttggggccgttcttagaacctccgggcctgcctccctttcctcaaaggggaggggaactgcgggcgcctgtccggcaggggagtggagaggcgcagccttgccctacgggggaaggaaagccaggtgtcttcctccagggcgaggttgaatgttgattaccccgctaaacgtagaagctggctgcagggggcatctgcctcttgctctcaagatgccctccactatctagagatgtcacccccccacccccatcctgtccctctgtgtcctgtgtccctggtctgaggataggaggagcttctaagttaaggaaggaaacacttgagtcagccttccagtggcctgcctgcctgccctgccctgcctgaggtagaggcagcggcatggttaatgaacagcaggagattatctcccggtcacttccacctcagtgggccaggg

SEQ ID NO: 4649 - DNA, 1122 bp, Artificial sequence
  DNA replication origin
gaaggaggagaagaacaacaacaagaagaacaagaagaaaaagaggggccagtgcggtggctcatacatgtaatcccagcactttgggaggccaaggtgggcggatcacctgaggtcaggagttcaagaccagccagaccaacacggagaaaccctgtctctactaaaaatacaaaattagccacgcgtggtggcacatgcctgtaatcccagctactcaggaggctaaggcaggagaattgcttgaacccaggaggtggaggttgcagtaagatgagatatagcaccattgcactccagcctgggcaacaagagcgaaactccctctcaattaaaaaaaaaaaaaaaaaaaaaagggaagggagagggggagggagggaaggagagatggtggagggagggaagaagggaaggagggaaggaaggaagggagggagggagggagggaggaagtaagtaaggaaagaggctggtgtggcctgagcaggaggaaaggcaggcacaacgcttcagggcctcgtgggccactttaaggatttgggatttcctccttagggcaatgcaaaaccatttaaggattagtaaaatgcttctttttaaaaaatataattcagacgaggcagtctctgtagctgtgttttgggcaagggtgtgggtatatcctggtcaaggccattacccagaggaaaatgggaggagagccaggaaggcagccagaaagactccaggggaactcctcttcagcatgaagactccagaggggcctcgctggcagtgccaaagcccaggctgctgatccagattgcagactggaggatcgtggtattcttgggtggggatgggggtgcagccagtgggtcagttttggtaaggctgtcagtcttttggaaagggccaggtcagagtgtggaaagaccagcctcagaatcctgacctgagacaaaagctgcaagagaccaggactcatggtggaggaagttgctatgcgtatcatttcctgagggatagggaagagggagtgcccaggagggaacttcagtggagaagcttggcctctgagtgctggagcattctaatgtatacttttaagatttctttttgtgcattgtaattcacaccaag

SEQ ID NO: 4650 - DNA, 1603 bp, Artificial sequence
  DNA replication origin
ataaggagttccaggacaggcttggtccctgccctcagggagctcagcatttggctggaaagagaaacaggacatagaactagatgtgagagcaagcacgcaccaattgtgcaaactcacgctcaggcagcggggcctgagtattaaaaggggcttgaggtaaagcgagcaacctagaagtgcccactgcagccagccgtgtctaggggaaagtattcaggcaggcctcagggagaagagggtggcagacacatggtatttactcactcaggtattattcagcactccatgtctgaatagagcctagctttgtgtctgaataacacaggtactgctcttggcagtgactgcaaagcatgacgtccctgcctcgcgctgttccacctaagatatagtcagtaccaaccgagtgagtagtgaggatgacggcgaggtgatgggggggctctgaggcaaatcaacaggttatgggagtgactggagctatctgaggccaggggacagctctcttaggcaagatgagggcaggccaaggatgagagtgaggggaggacgcactccctcaggtgctagccctgcatttacagggcctcgagagggagtgcctccttaagatgtgtgcctcagtggaacgtcacttgcctcaccctagtgcagccgtgttcaagggtatacaaggggaggtcactgaggcatgagggtctagtttgctatggtttcctcttagccagaagcctgatttctctcctgtgtctctgctgttgtgttctacattggcccagcctctgcccccaaccccagtgtttgttcccaggtttcagggtgtcagagaaggcccctgctcaccagatcccagagggccccgcagcaagccttgcccctgcacagagaagtcaggctttgaactgtgggcctagactcagggaggtcgactcagtaggcaaatgctcagttttcctggcctggggtggctattctgggagggggaaggggtgtaagttcaggctcagataggaagctgaaaggtgggagggaagaaacaaaactcaccccagatggcaactgggtcttgtccctgtgaagctatcacccagtcatcagtgggtttgccccgaaaggctccatagaaccctatttctctcctcatctgcactgagctctattttgtagaatggaccatgtcaatttcccagcttgaagcacttggcattcctctcctgtgaggcccaggtttctctgggcagaccacaggaagcaggctcaggccaccgcataagtacggggtcttgagggtgatttgtgtttgggtggttggggatctcctaacccgggctccacagtgagctctcaggggtgtcaagcccagtcgcgctcaagggccctctgcactgtctccttcaccgggacagcagggtctgaggtcccgcctttctcggcctggggcgtgcatggcctgggctccattgcaagtttttggacgtcccctttctcccccaccccatcttttccctggcgatctcactgccctttccaggagcacgctcccgctctgagtccggaaggaccccgcgggggtcctgacagcctcccgggcccagggtgg

SEQ ID NO: 4651 - DNA, 1638 bp, Artificial sequence
  DNA replication origin
aggcctgtgcctgttttgggggtccaggttcctgggtgccagaaccccattttctcagtctccacagagctgtacgaggggtacagtgccctggagaatttaagcccttcattaatggtttgtaaaagtctggacttccttttgggaaacctgggctccagtcctgctgcttgatgcaggaacgtcactgaggtcccctgaaaagtggggtgatagtgtcaggtggtactgagcccagtgatggaggcagcaatttgttttgtaagtgcctgcggctcctgggcgcagtcccagcgaggacgcgagaacgcgcggggatgtgaacggtggggggcgcccggaaccgaggagctgaagggcccggcggacgtaggccgtcatttctcgcggcgagcagcagggggcgcgcgcagactgtacaatgctggcgccccacctcccggcagcgggcggggacgcatcccgcgggtctctagagcgggagatcgcgcgggaaagggccgtgccgggaaggggctgtgccgggaaggagcggagggatcagtgcttcgaagggatctgtacgccaagatgatcctaactccttaggagcttcgaagctacgggaaatgaagctggaacgggggagagggggaagggcgctgtgccccgggggcggtaaaggatgggtggtggtggggaacggggacactgtcgagcgctgactaccgctgcgctcgggctggtggagtcactgcttcctaactgtggggaagaaacaaacattccccgcccctcctcccaggaggaagagccggtcacttctggaagtcccagcagctcactacggaacttaggggagggtgaagaagagaaggcgtagagcggggaagtggcttggtcagttcagaagcaccaatagcataggacttcataaccttccaagaagagggctggttacaaagcgtcttcgcctcccaggggctgggttgggggtgtcccaggagccagagtgaggcatgagtggggagtccctgcgtcactccagagaggaggcccgcttgggcacaggtgccccagggaccagcctactgcgctttcaagcccctacgtctttctaagggatgagggatcctatcctagaccaaacctgccagcccatactgaacataccgcctttctttgaaagaaaagtgggggggaggctaaagaccttcgcagagggaccctgagatggaatcagatgctaaatttgcgcacagccctctgagctggaaaactggagaacttcctggaggaagaggctgggagctagctgtgccttgataggtgggcagaatttggagaagccagggcaaagtcttgtttgtaggaatgagcagtccgcctgggaaacgggaaagagttggaatttgcggggcgggagggcaggggcagggccagaggaactctagctgggggtgcggctaccaggagaggagctggttctggagttctaggctgtccttccgacctctgggggccctgagatctggtttaagactcggtcttgtaccctggggctgctggatgcctgccgaagtctcgcttcccggagcagctgaggactcagccctgcggctgaggtccgcgagttccctggacatcaccgggtgtcgt

SEQ ID NO: 4652 - DNA, 1248 bp, Artificial sequence
  DNA replication origin
tatcgacagctgaagcaagtccggctacgggcacacctccagtgcttgtcctccctggcccgcccaccgccagcgaggacccggagagtatgctggggcggggctgaggcgaaggccggttgtagctgttaagagtttaagccaatcagcccccggctccacttctctcgaccaataggaagtaggctaaggcgcagaggcggaaagtgtggctacatgagcaggcgtcagagccaatcagccttgagcctcgttcccgtcgtccagcccgcggcgagagcgggtatgtgggcgggaggccggagcagctgtcaggctgaagtcctgcgagcgacgcgcggcggggcggcgagaggaaacgcggcgccgggccgggcccggccctggagatggtccccggcgccgcgggctggtgttgtctcgtgctctggctccccgcgtgcgtcgcggcccacggtgagcggcaacgggtgggactgcgttgcagggcggggctggccgtccagcttgcgcgcgtctcgggttgggggccaagggtcaccttggggaccctgcgagttcagagcaggacaggtctgggagcgggcggccggaataagtgggtggtggtccaaggacataaagtgggcgcagcctgaggctgaagctctgactcctcaccttcccacgacaaagcagatctccccactcgcccctccccgcccactagcgccgacccaggtgacttagggtgcgaccagaagggacagctaaggaaggatactacaggctggagatatgtatgtgagcattcacatgtacacaggagcacacattcctacacgtgggcacacacgcacaaaccgtttacacctacacaagcacataaatgtatacatctatgcacataagtgagcacatacgtatacccacaacttacacaaataagcacacacaaaggcaagcaagggttggggaggagggagtgagtttgacgctagtccaggaaggctttctgggggtgtatttgtatccgagagggagtccccactcccaggactgtatagcccagtgccaagccatgggagctctaactgatggctgtgatttgggcagtaaacaaagacagctaaagccttaatgccatccttggtacacagtagtgacttggtagtttgttgatagactaacagacttgtgacagcagttttctttttttcttttttttttttttgagacggagtcttgctctgtcgcccaggttgcagt

SEQ ID NO: 4653 - DNA, 927 bp, Artificial sequence
  DNA replication origin
ggctgggcttcggggactctctagtgaggggcgttcattaaagaggggtcgccgcatttcggtcgtgcttcttagagcacggagggtctttgctcggcccgcatcacctactaacttaattccaccctcctccatccccggacgccagaccaaggaatgcaataaaggcaaaagtgtgggacgcaaagtgtgggataggctggtgccaaagcactttacgtgagcgatctcatttaatcctcacaaccctattgcgttggtcctattaaggccattttactgatgacagaaaggaggctgagaggtcaaggtgtccagtgtcacagttacatagtcagtgtcaacgggacgagcgtgggaagctgcccccaatgcccgttttctggctttgcactggccagaggctcctcgtggatggcgtgcgccaggccgcggccccagcgcctatccacggtgagcgcgcaagcgttggtggcactgggcggaagaccccctggcgcaagacgagtgccttcccgtgaaggcgtggggaggagggaagcgcagctgggaggagggaagcgcagctgggagaaggctaatcgtcgtcaatcgaggcggccttggagtggacaggaccgagaccgcaagggttaacggcctcgactatcgacagctgaagcaagtccggctacgggcacacctccagtgcttgtcctccctggcccgcccaccgccagcgaggacccggagagtatgctggggcggggctgaggcgaaggccggttgtagctgttaagagtttaagccaatcagcccccggctccacttctctcgaccaataggaagtaggctaaggcgcagaggcggaaagtgtggctacatgagcaggcgtcagagccaatcagccttgagcctcgttcccgtcgtccagcccgcggcgagagc

SEQ ID NO: 4654 - DNA, 901 bp, Artificial sequence
  DNA replication origin
gacgggaacgaggctcaaggctgattggctctgacgcctgctcatgtagccacactttccgcctctgcgccttagcctacttcctattggtcgagagaagtggagccgggggctgattggcttaaactcttaacagctacaaccggccttcgcctcagccccgccccagcatactctccgggtcctcgctggcggtgggcgggccagggaggacaagcactggaggtgtgcccgtagccggacttgcttcagctgtcgatagtcgaggccgttaacccttgcggtctcggtcctgtccactccaaggccgcctcgattgacgacgattagccttctcccagctgcgcttccctcctcccagctgcgcttccctcctccccacgccttcacgggaaggcactcgtcttgcgccagggggtcttccgcccagtgccaccaacgcttgcgcgctcaccgtggataggcgctggggccgcggcctggcgcacgccatccacgaggagcctctggccagtgcaaagccagaaaacgggcattgggggcagcttcccacgctcgtcccgttgacactgactatgtaactgtgacactggacaccttgacctctcagcctcctttctgtcatcagtaaaatggccttaataggaccaacgcaatagggttgtgaggattaaatgagatcgctcacgtaaagtgctttggcaccagcctatcccacactttgcgtcccacacttttgcctttattgcattccttggtctggcgtccggggatggaggagggtggaattaagttagtaggtgatgcgggccgagcaaagaccctccgtgctctaagaagcacgaccgaaatgcggcgacccctctttaatgaacgcccctcactagagagtccccgaagc

SEQ ID NO: 4655 - DNA, 875 bp, Artificial sequence
  DNA replication origin
tgggcctcagggctgctgggctctttgaaataatccgcaatcccaatctggaccacaatggacttgaggttccggcagatgcctgagaaaaggtgagcaaagtaggggcgtgtttggcctgggctgtggagctgcctcctctcctctcactaattaatgaaatcagacaatcaggtgccagctaccgggaacacgacagaggagagcagactcatgccacctgggggctggcgaccggatgcggggagaggtagatggggctgaggcacaggagaggctgcattggcctctgggagggtgagtgggcagccaccagctgtccaaagcctctaggaacttccctgacacagggggcagctataccatggtctgggcatttggggatgaatggcaaggaacagagtggctgaggtggggctcgtggatccaggctgaagcacaaaggagggggaggtggggcaaatacttggggacagagggcttcagggactggatatgtcgtgaagtcgggggaggtagaggaagatcaggcgactgagaagggcctggaggtcatgattctggaggctgagcagttagttctggtggtaaagtccagggtatcccatgtggctgaagggggaggaaggtcttggaaagagggtcaaggcaccttggcgcagttggcatggggtcctctcaggagccaaagggtcctggctggtggtctccttgggcaggagcagcccacactgggtgccaggtcctcagtgcaggtggagtagtgactgagagtggagtgggtggtttgagaaaggtgtggaagccaaggaggtatgatctggagtccagggagagaggagtcttcaccctgagaactgtccttgggggggctt

SEQ ID NO: 4656 - DNA, 1350 bp, Artificial sequence
  DNA replication origin
tgctccgggcatactcctccttgctctccttctttccccgctgccggggcttcaagttctgcagcgtcagagagtgggcctgggtgcaccactgagccagcattgccaggaactgtgggggaggggaaggacatttggagatgaaggggtctgaacttggttggctggaggtgggccagccccaggatagaaggccccatgagagcatttcagggaagccaggttggcattacagtgttgtaagggttgcaaggaccagacctcaaggggccagattctacccagggggaaaggtgggttcacagcagggcacagaaggcaggcaggggcaggtaccttggagcagacacgggcattctcaagcagcacccttgtccagactgcggggtggcgggccacgaagcgccagtcccggcagacctcggcagcatgcagcagtgtgcgcgtgtccaggtaggtgaagatgcagaagagggcagctcgcatcttcaggatctctgggctgatgacctcattggagcgtgaggggctgaccctctctgctcgccgaccccgcccactgcctccctcggggcgggctgcagaataccaggggttcaaaagtgagcgtggagggtcaaggctggtgtggggatgtgtgtggggagctggggcagggtaggatctgcagaggaatggacatgctgtggtaccagggcctagggaggaaggaaaaggggcctctgcctccctgtcctttgcggtaccccatctccagttttacaaattacaaaaaggcatcccttgtgtaaacttcctttttaaggttatatatcattcaaactcaccccctacaagaggcaacacatcagatttggagagtgaaaggggttgggggggcggtggtgctggagtataaaccaggcctctggaaacagaaggcaggcatggggctgcccagaagatggggtgtggctacacccctgaccctagccctctcacctcccaaaccacccacatatgtgtggtgccttctgtgaatacggtggggggcctctcccccactgcaccaggggcttcagagtttggaggcaacactcaactgttctcctgtaaatgttgatgagcctaccacgtgaatggcccccctgccccccagatgtggcatccttgtgcaacagacaatctgagcatacttgtgccactgcagccctgccctgtcacaagagttcctgccccaggcttgaagggcgctatgtaggaggggtgggcaagtctggggaaaggggaggggggtgcaggagcccaggagattcactgcctcagacctgtgtccccctgcccagccttccgggacctacctgagagccg

SEQ ID NO: 4657 - DNA, 1091 bp, Artificial sequence
  DNA replication origin
catcaccctcttccccctcagtgctgtgtcggcggggtctgcgctgccagttctggatggcctggcgccgcaggcctgagctgcgagggggctgggaccgctctgagcccccgttggcagcctgggcccgtgtgcccaagcccccagggccactgtcctcaggggccccctcctctggcctgggcagctccagactgtcactgtcatagcagcctgagctctgggatgcggctggcacacggctggaggccctggggcagggtggaccacacagtaaggggtaagaggcaccaggcctacccaaactccccatcctgcccctaccatcagctgagggcaacccacccgccctgctttccaaaagccccctctgggtgtggaaaggcagacatacgtgacccagggagggtaggggcaggagggtgacacaagccccagacaggccagcggatccttccagggtgagggtgggctgcatggggtgggctgggcccaaggcttaccctgtgctcggagaggagccatgccgtgacactgcatatgtgttaggcacggccgggcccacgtggtgttctcgctgtgggcccccagagcaggaggtaaaggagaggggcggaggaggcaagaggatgagcaggaatagcaggggaaacagggcaaaagatggagaggagatgggggagaggagagagaagggaaaatagttgggaaagatggacaaatggacagacagacagcccagagaggcaggcttaccagcccctccccacacccacacaataccctggaccccagcttgtggctcctggactctcatttgcagggatgggcagagatagcccccgagggctggggccaccgaatcacatctcactacagcctcgggggctggcactggcactcctgcccaatcaaaggggctcccctgttcctggcatctgctggtggggtaaaagccaaagaaggggcgaatgcggcatcatgggggagatgtccagccatgtgaaaggtgaggttgtggggggccaggtgtgcaggtagaggagggaaggcaggtgggcactcaccattctgcctgggccccgggcatt

SEQ ID NO: 4658 - DNA, 1186 bp, Artificial sequence
  DNA replication origin
gctacaaaagcatcatgcagtcagtagaaactgtactgtatgaaaatgaaaaacagtatgtacaaccatactgtttttttcagtacagtattcaacaaattacatgagatcaacacttttttttataaaatagactttgtgttgagtgactttgtccaactgtaggctaatataagtgctctgagcacatttaaggcaagccaggctaagcactgatgttcagtaggttaagtgcattaaatgcatttttgactgatgatattttcaacttacaatgggatgagggggatgtatccccattgtaagccaaggagcatttgtatatagatgttatttatgtgtccccattgtcatataaactccataaagacaggagttgttcactgctatttccccaatacctagaacagtgcctggcacctagagggtgttcaataaatgttgaatggatgcacaaacaaccgggaatgcatttgggagtaagtatgcatgtgattctaagtgtgccatgtgttcacgcagctcctacaagttggtgcaaactatcagtatgcttccacatttgagtgtattcctctgtgggttgatgtgacttagtgtgtatttttgaaggttcctgcaagtatgtttgactgtgtcggtggtactgtgcctcaatggttctttgcgtgtctcacacgtaagcacatgcccaagctggaacatgatgtgactacacaaacatgaatgtgtgaggctgtgcctggggctgtgtaatgagcctctgtgtggggatatgtgacatggctggtggctctaagtgtgtgcctaggagtgttctgtgttgggatgctgggtatcgaaggacatgcacatgtgactgaacatgtctgtgtttctgtatgagagagatgtgtctggttatggcatatggatgtacatggggtacatgtgtgtggggatgtatgtatgcctggggttgtgtgggactgagtatgcctgattatttctgtggagagcagggtgtgcagtatttctgtggagagcagggtctggggccaggtgggtggggtgtgagtgtgtggctcggagtgcatgcatgcatttctgtatgtgtcatcgtgcggggctgtgtgctaggcctgttctgcaggaacccatgtgaccataagcagacaccgcaggcagctgtgccagtgtctccccg

SEQ ID NO: 4659 - DNA, 1311 bp, Artificial sequence
  DNA replication origin
cgccgccctgctggccgtgcccggcgcccggcgagaggtcttcgagagcacttccttccagggcaaggagcaggcggccgggccgtcgcccgcggcgccgcacctgctgcaccaccaccatcaccacgctcccctcgcccacttccccggcgacctggtgcccgctagcctgccctgtgaggagttggccgagccgggccttgtgcccgccgcagcagcgcgctatgcgctgcgcgagatcgagatcccgctgggggagctgttcgcccgcaagtccgtggcgtcctcggcgtgctcgacgccgccgcctggccccggccccggcccttgccccgggcctgcctccgcttcgcccgcgtccccctcacccgctgatgtggcctacgaagagggcctggcgcgcctcaagatccgcgcgctggagaagctggaggtggaccggcggctggagcggctgagcgaggaggtggagcagaagatcgcgggccaggtgggccggctgcaggccgagctggagcgcaaggcggccgaactggagactgcgcggcaggagagtgcgaggctcgggcgcgagaaggaggagctggaggagcgcgcgtctgagctctcccgccaggtggacgtgagcgtagagctgctggcctcactcaagcaggacctggtgcacaaggaacaggagctgagccgcaagcagcagtgagtagaccctcggggccctgtgagtggttgtgcctgtgcgggtcactgtgccaccaccaccaccgtgggcgtgcctgagtgtgtctgtatgtggccatggctttgtaatagaggatccgtggccaggagcatgcatgtggggccaagagtgtcatgatgatatgtggtactgtgaggacatggcagtgtgaccctgtgcctctttgtgaagtctgcctttctcgttctctgtcctagacaagccaacccctgcattttggcaccagatcctcttctcttttgcctagccaaagatatagctcaactctcccctctccttttccatcacccgattttttgtttctgcatatttctaaaagcatacagacatgtcatttctcccatctgccataacccccttccccttaagctactgccccttttctctcctccttacagaaaactccttgtatttgtttatacttcttgtctccaatttctttcctcactttctctcttgaacccaggctgatcgggtttccacctctaccagggtccccatgtcaccagcgaccttcctgttgctaaggcctagccatcgtcttacttggcccattggtggcatttgacata

SEQ ID NO: 4660 - DNA, 912 bp, Artificial sequence
  DNA replication origin
agtgctctcgaagacctctcgccgggcgccgggcacggccagcagggcggcgggctcgggagccagcgggaaccccgaggcagcggcggcggcggccgcggcggcggcggcgccgtcgcagatgctgttggtcttggagaggatgtagagcgtctcgtaggtgtggctgtactccaggtgcgcgcgcagcgacgacaggctccggaagcgcttgtgctccccgcagcgggggcagcggtacggcaggtccagcgaggccatggccccgccgcccccgcggcacgcgggctccaccgcggccgccccgccggtcagccgggcgcgctcatgggggaccgcgggcgaggccccctgcggggtcaggaaggctcagggcgcccgcggcctggggcgaggaggctggaagagacgcgatgagtcttaggaagagggtatcgctgctcccaccctggctcccagcccggagccctcatcccccagccatgaggaaatcagcattgaggggcaaggggagacctcccagaggaggctggcctgctctggcacctgtgcgagggcctgtatgtgtgcaagagacagcgagagaatgagataatctgtttttaaaggggcaggcgcgtaatcacttttatttataatggttccaacctggaaacgacccaagtgcccatcaatggtagaacggttaaactgtagcatattcatgatggaatctacccagcaataagaaaagaaactattggtacacagtgacatggatgagtccatccaatattatgttgcatgaaagaagccagaccaaagagtgcatgctgtagaattccagagagatggagttcaagaacagacacaattgatgatgaagtcagcatagaggtccccagctgggggctacatggactaggaaggggc

SEQ ID NO: 4661 - DNA, 1468 bp, Artificial sequence
  DNA replication origin
ccgctgcgactggctgggaggttcggccgcccccgccccgagagggaggcgggggcgctagccgcggcggccacccaaggctgcggaggggaacgagatccgaggccccaaggcggccctgcgtctggaccgggcacgcgggggctcttctgcgtccccagccctgggccgctgggcctggcctcgccgcggggtggaggaggtaagggcgagtcgcgggcacgctgcgggactgctcccggagagggaaggagggaggaccccagccactgtcccttcttccccttccggctccttcacagccctccggaggcccgcgaggccgcccaacggggagggattctgggcaggccagaccagaggcagggaaggggttaatttaagaaattaaaatcagaacgtttcgagaccaggcttcccctcccccctctcgcctgtcgctccctgagccaggttttggggcgggggcgggctccagaaccccactgggactctggaccttggagaacaggggccagagggaggggggaggggaagcgccctgaaaccccaaccctccctaccggtttctgaggggctgggggaggggcctggtgttgaggcctggctgggcacctgtgcgggtgtctgtgcgtgccggtgtgcacgtgtgatagtctggaggtgtgcatgtgtgtgcacgcatgtgtctgtctcttcacatccagtgcctgtactggtgacagtgctcacagtgtctctgaatgtgtgcgcccctccgcattgccttgcatgtgagtgtgtgtgacacggggcctgtgtgcactgcccacagtcggccagcgagtactgtgtgggcctgctctctccttaggtctctctgcagcgaggggcccagatggttttctgggtatgggatccaggttctggagcctgtgtgtgaccttgggaggtgtatgcctgtttgcaggagcaggagagtaaggcagggcttagaacagaaaaagcagtgccagggctgctagaaggcagaggactggatgcattgacccctgagggtcttcgccaggctggagtgactactctgggaggtatacatgttggggccacagccacaggtgtggagagccagagccccagccttcttgggggactcagagggatttatagaggcagtggacattcctttactccccacccacaggggcctaataggggtataatggggacaactccggctgcctcccccatccttaggatacctccacctgctggcagatgcctcctaaaagtaccgagcttagagcttcatttctttggcttgtaaatccatctgttaacatccaaaccttccttccccatttctgtaatttccaccttctcagccccttttctgcatgtggattttatatggaaagagagggaaagaactgttgggccctgaaggccaagtgggatgaagagagaagatgccatgaatgtgatgggg

SEQ ID NO: 4662 - DNA, 1347 bp, Artificial sequence
  DNA replication origin
gggcctctccgccctaaccctagcactctggcttgggcctgcttccacgcgggggcaaatccgggggtgggtggttctgtgaatccggaagggggcgggcgcaggcgctactcctgagacatgcgccacggtccctaagcggcctcatgggcagcgcgcctgggtcgtgcactcggcgacctcgggtcagatgcttggtctccgcggagaccgcctgggatgatcccctctgggcattcctagggaacccgcggaactgctgctggaccccatccggagacccaattctgctcttaaagagccgcctaggaacacgtgtacccatcacaaatcccatcccggacctagaggaggaggaaaaggcctccaggtccctggttccctcctacccactcccaccatttggctaagatagcagccaggcttcttgggactggagcacctagacggccccacctttggcctaaggcctaccaagctggtgaggcagaaacaatctggctgtcgtacgcttggaggaagtccacagggctgcagtggggctgagaaaccacacagggtttggaggcaaccaaggccagagcagagctgaggcttggatgagaaaagggggaagtgttatttcagcctgagggtggtgcttgggtagggctgtgcacatgtgccttgagggggaagtgttatttcagcctgagggtggtgcttgggtagggctgtgcacatgtgccttgaggggcaatctggttgcaggagagcagaaacccaacttagtcccaggattccagtaactcgggctcatgggaattctctttgacccccatcccattcctgtgaaggcagaggcattgggacattcagtatcaggaaggataatttgtaaacttgtcagtggctttgggggaatggcaaacttaataaggacagaggctgtacagtggccaatcaggttgaattccccctctctcgatcttctcttcctctctgtagctcctgaatttctttcctcctcgcggaggtcttctgagattggacaaatgagaaatcacttttcctaatacccaaacgataacagctcctattaaccaggcaccaagcatcatgctaataatttttatgcatatcatttgctcttcctaatattattattatccctactttgcagatgaagacgctaaaattcagagctcaacacatggcatagtcaagacttgaactcaagtcatcaaactccaaagtctatgctcaaccacagtgccctcctgccttctctgctataatacagtccactggaccttcacatgtcaaaatgcagattccccaaatccatctgctcttgcagatggccaa

SEQ ID NO: 4663 - DNA, 1181 bp, Artificial sequence
  DNA replication origin
cagcggggaaagctgaggctgcgtactggccagaaactctccgccgtcgccgctactccctccctccccactaggaggggtcaggagcccagggaggccctcagccccctcccctaagtcacccggggccagcgggaaagcgtcataggccccgctgggatagagtctgttggctgggacggccggcagttccgcagggcagctgatggacagcaagtcctcaatcttggtccctattacgggaaaacgagcctccggggcggcctggtagtctccctgtgacccacagttccctggggcccccacagaaagcagctcccagggcgcgtagggacccttgaaggcagagacagcgtccagcgctggcgaggcgggaggcgcccggaggccgggcttgacgtcgggcggggagagctgaggctcatacaggcactgcgagggggcacccgcgcaaggcgaggcctcccagaacgcctctgggaaaggggcagcgcccagatccggggagtaaaggtccggcggacccggcagcaaggcatcggaccccgcaggaaaaggggcatccagcggggatctggacgctgctgcctctggaccggggaagggtgccaggcctaagatgcccgacatgaggttgaagagtgcctccgggtcgtgcgggtgttcgggcactgcctgaatgaagaagctaccgctgtagctgaggccgggagggggtgtgggcgcaggcccctccaggaagcaggagtcggctaagtccccacttgcgccgcagctgttcaaagcccagctcaagaagtcgcctgctgaggagggagcaggaatcagctctgggcacatcaaagggtgcacctgagtccacagcccctacctacaaaactcttggtgcccacggatatacacaaagtgccttttgcacattctgattcagcaggggcccgcatacgtcccaaggagcacatagaaacatgcacacgcaaaacacacgtgcacaggcaaaagggcgctccgataaccgcacaggttcctgcggaggcgctggcggcccagtgtgggtgggaatgggggtgcgcaccccaggactcctaagcttcccatcgcccctattctcatagctccaatgtcccagtccctcctggttctcaggtatggtgcgcccccgcgctgcgccgtcgtcgtct

SEQ ID NO: 4664 - DNA, 997 bp, Artificial sequence
  DNA replication origin
atggagcccgaggatctgccatggccgggcgagctggaggaggaggaggaggaggaggaggaggaggaggaggaagaggaggaggctgcagcggcggcggcggcgaacgtggacgacgtagtggtcgtggaggaggtggaggaagaggcggggcgggagttggactccgactctcactacgggccccagcatctggaaagtatagacgacgaggaggacgaggaggccaaggcctggctgcaggcgcaccccggcaggattttgcctccgctgtcgcccccgcagcaccgctactcggagggcgagcggacctccctggagaaggtgaggcgggccggggaggggtgtggagccgcggcgagttgggggtggaggctgggccccgagcgctccgcccgcccgcaggtcacgccgcctgacggagaaaacgcgcgcagctgaggctagtaggcggcccagactccagcccaggtgccggccggctgctccgcgtctcccaggctttgtggcaaagacttctcgtttcctccccctcggtgggtcctgggccttttgaactcccgtagacgttcaggggagcctgcattccccgtgagaaacgctgagagaggaccacgggtgtgtcgagccttgaaggagggaaaaggcggtgtaggaccggagcgagtggttgcctggggagcatcttgttggggagacagtgaacagatgagcttgactgaattgcaggactcccctgagggagtaatgtggataatgtacaccgcgcgatcacttagtctggagaggctccccgcgggttttcctcccctggaccatcatttgtagcaataaaggggttccccagccgataggaggggcttggaatgcaggaggcttgtgatgcggctccaaacagtctgcaaaactacaaagcacagataatacacaatggagaaagccgatttcatggtagacccccgaagatcattttgaaaataactctccatttaatttg

SEQ ID NO: 4665 - DNA, 1094 bp, Artificial sequence
  DNA replication origin
cccgccccccgcgcaccgcggcacgtgctcgcccggggactcccccgcccgggagggcgcacacgtgcggccccgccgagccccgccggcccggccgggccccgggccgggcgagaggggggtggttcccgcggaggggaggggtcgggtgggcggcctgcgagcggcttggggcaggctccggcccggccgccgcttctctgcacctgcagtggctcccacccacgcggtcggccctcccgggaggcggccgcccccttcgggttggccaccctcgccctccggcggggctgcagccggggccggcgaggcggggtggggcacgcggaccttccagcctaggccctcggccgagcctcgctcggtgtccccacttcctgccactccctgcgggccagatctgtccgggacagccccggcgcccccgggaggcctgagcgccgggcccgactgacccccctgtcccagctgccgctggctcattccgaggcaggacaatgggggacatcgcgcgtttgcgtaccgagtcagcctggccggcaagaaggggttgctcgggggcagaggctaagggcaccctcgcaggggtcacggccgaatgccctgtccaggtggaccccacggccctgccatcaccagcctcccccgcgccgcgctcgattctttcgcgtcgaaaacaaagactaatccgatacccccgccctgcctcccagaggagggggaacgggcgcgtcgcggagggtaactgaggaggacagcgttcaggagggcctcggacagcctcgagggggccgtggggcgactaagccctaaaacccggcgcagacactttgaagagtcaccctgggctacgttccaggcagggggtaaggggcagggctcaggaatatttccaagttgccaaactgcccgttctctctgctgcttttttccctcacctgttgtgcaggccaagttgaaattccaggttagattaattcagccccacccatctggcctgactgccaggctggtgcctgcaactgccttccacctacctcggttgcaggggagcagggtgggtctctgacatacacgcgcacacacacactcgg

SEQ ID NO: 4666 - DNA, 1781 bp, Artificial sequence
  DNA replication origin
gggccgctcctccggtgcggggggccggactggggtgctgcggggcgctgtgcggctgagccgggcgggggtggcggggcgggggcgggggctgcgaagccgccggagcggagtggcggaggccccagaacaaaggagcccgagcggcggcgcgcgcgcggcccggcccgcggctcgagcgcgcccccctccccgcgcccctcggcggcgcgggccgccctccccagtcgggctggcgggctgcgctccggcggcgggcgcggcgggcgcgggctgcccagggcgcgcccccacctccaggcggcttccgtgccgggggcgccggggcagtcccgccgagcgaggctctcagcaaactttattttgaaagctcagctccctagggagggcccggcggcctccagccagggcgtgtgggggaattttggtgaaactctcaccagcccgtgggggtggggaagagggcaactttcttagaaatctcaccttgatcacccccttgaatccagggcccccagcagccctcaggcccgaggccgcctccctcagacagggagcgggtgctgggtgcgtcctgcctgaggttctgggcaggacctcaattgagcaagccccatctcttcccccattttctcttcccagaaacaggaagaagtgacacgtgaaagttgtccctgagccccgagtgatgcgcttcccctttctgtctttttcaggcagcactgccttctccagcgtccagaccctggaggaaaaataccaggagaaactgctcactcagctctgcccccaccacacccctacctgctcaactcatgcctgggtccagggtgggtgagggtgaagaacccaccgggccaagatgatcccttttctgagggctgctgctggtgtcctcccccagatcctgggccccagcaggtgggagagtggccccctacggagtccgatcagactgctgcagaggaggtgaagaggggttgagaagaggcatccatccacgagactgaagccacttgccttcacccttgtagactcttgactgttctaggcgagaaggacctgttggtggcctttggaggtggcaggaaacgactgtggttctgccccagcacctatgaccccacctctggcagcatcatgagccagtttcaggtgcccctggccgtccagccggacctgccaggcctttatgacttccctcagcgccaggtgatggtagggagcttcccggggtctgggctctccatggctgggagtgagtcccaactccgagggggtggagatggtcgaaagaaacggaaacggtgtggtacttgtgagccctgccggcggctggaaaactgtggcgcttgcactagctgtaccaaccgccgcacgcaccagatctgcaaactgcgaaaatgtgaggtgctgaagaaaaaagtagggcttctcaaggaggtaagccggcccttgctgggctaccctgttccttcctcgagggcacggtgatcacgggggtcttgttcaagcaaggctcgtccagttgagtccattctctcatttctgatcctcttggtccaactttaagtaggagtgtaactgacatgtttggactcctttgcagggctgacaatttgtatgagtaactgggtagaagggggatctgagctagcaccctcatctctgatgtttgcatttgaggcgggactgtgatgtctacctttacctctagaagtttcttgtcctgctgcttgaagcctcagatgttgtatttcaagctcatgctaatgcttgga

SEQ ID NO: 4667 - DNA, 904 bp, Artificial sequence
  DNA replication origin
gggactatgggctcctcctctgggctacttctctggtgtagccgagggctgctggaaggcagggtggggacctgtgtttggggtagggctgaattaccaccgggagatgagtggagccaggagttgggatgggaactttgctctgtggctccttcaggctgctgaggaagataggtgctggttgagcaagtctgggagtagatcacagttcagttctggcaggtcctgccctcccaggacagcgggtgtctctcagatccttgaggacctcagggagaaggctgaccagaagaggggcctccacttctcagtgcccagccccctgcctctccaccctccttgtgtagaaacttggctcagcacattccagctctgtgcagagcctaggaaagtagggaagacagggcccccgcccacgtgggaggactgccgtgtaaataaataactgcactttattgtgactggtgctgtggaagaggcagtacactgctctgtcaggacccgggaggagcagatgatgctcatgggagcttggtgatctgagaaactggcagggggaggcaatgtttaaactaagtcttgtaccacattagcttgccaggtcgggggaggtgcggagggatccaggcagaaggagcagcaccgggaagtctctgaggcatgaaaacattactagatccatagcttaaagggaagtgattgggttcaagtgacctcggtcttctttgtatctccctggggttggcagagacagacagaacttagagaattggaaagagaaggacctagatttgaattctagcccaccactcaccagctgtgttgacaggcaagtaagttaacatcgcgaagtccttccgttgccctgttagagatgagcttgtatggggagtaagtcaaatga

SEQ ID NO: 4668 - DNA, 964 bp, Artificial sequence
  DNA replication origin
tctccctggcctcagcttattcatctgtgagaatgagaaggagcacccagtgagctcttccagaaattgattcacctgcagtgaatcctcacaactggatgaggtagctgctatttgtagttcagttttataagatgagcaaagagaggctacgagaggtaagttacaaccagctaggtagtgatggagcctggagtttgtgggtaccaaagtgtgtggaagtcgcttcctgggaggtagaagctctggggtgctcagctacagggagggattggggtagggaacgatgtgccctgggtggcccaggaagtaaatctaggagtggattgcagggtctgcctctcccctctctgttctttctcatcctgccctcctttcagtcttctgatgcagctttcaaaggctgagtctggaaactggaagaccggagctcttggggtctgggctacctcccctcctctgcctttccaggagatgggaagccctgaggtctggggacccttggggtcttgggggttacctcctgtagcctaagagtggagaacccattgtggggtgttggtggggaggctgtcttggatgggtatgttctggcggggctggggggtgatcctagagtgaggtgtgggtgtttgtgtgtgtggaggagggcagggttgacacaggaggtgtgggctccgaggagcctgttttctgaggtgggcgctggagcagggaggagcagagagcttgcatagctgttaagagtatggtcttcagagccgacagacctggctcagagtcccggctctgctgtttcctagccgcatcaccttgggtaagttgtttcacttattttatcacctcatttgcagaatggagtaaaggttcgtgctgcctgggctttttcttcttttttgaggatgaaggggctattgcacctcatgcccttgtgacagggcccggtgccgtcccagctgctgcc

SEQ ID NO: 4669 - DNA, 1056 bp, Artificial sequence
  DNA replication origin
tgtcatctttgatcctggaggcgcagaggacgccttctgggtattaccttcggggtccccgcgggaggaggccgggggtgccctgggatgccccagcctgccggggagcggcacggcgggcctgggaagcagccagcgcggctcagcagcaccctcggctgcgcccccgcctcccggctgggcaggtccaccaggcgggggcagggccggccgcggggattggctggcgagcgcgccgccccctcgcacaccagccccgcggcggggaggggagcgcagccggcagctggccgccgcctcctctgcagtgcctccctccgtgcgctccctccggcggggataatgggaggcccgccggccgatgcaccagaggaggccggccgaggtagagcgcgcggggccggggatggccgggcggacgcgggccgggggtcgccgtcctctcggatctcggggggattctcagaggagaaatgaaaacaaaaacacactggaaggcgggggagcctgtctgccgtgatccaggcggcagctggaggcaggaagatggtcccagatagcctttctttcccaggctgtatcccctcccgttcgccttcttcccctccggccgggctgggggctgtagcaggaggactttgctgccttcctggtacccgcctggctcacacgttcctctggcttcttttgcaggtggaaataaaggctggtgaaggagccgggccgtggggacaaggagcggctgtcaaggtaccttgtgtgtgtgcgtgcgtgtgtgtgcgtgtgtgtggtggcggtgaagtgtttgaccggattggataaaaataaagggtctcctctggtgatcccttaatctcccactgtgtgtgtagcagcagctgagggggaggggcggcgggggtgtgggcggccaatgaattctcaggcctgtgtgggttttgtttggattctttttgctttctcagctggatggttttgggtgcagttggggcttggtttgttgaactgttttttttttttttttctttttaagacatgcaacccactccccacccc

SEQ ID NO: 4670 - DNA, 1794 bp, Artificial sequence
  DNA replication origin
gcctggctcacacgttcctctggcttcttttgcaggtggaaataaaggctggtgaaggagccgggccgtggggacaaggagcggctgtcaaggtaccttgtgtgtgtgcgtgcgtgtgtgtgcgtgtgtgtggtggcggtgaagtgtttgaccggattggataaaaataaagggtctcctctggtgatcccttaatctcccactgtgtgtgtagcagcagctgagggggaggggcggcgggggtgtgggcggccaatgaattctcaggcctgtgtgggttttgtttggattctttttgctttctcagctggatggttttgggtgcagttggggcttggtttgttgaactgttttttttttttttttctttttaagacatgcaacccactccccacccctgcctctggaaatctctcgagaatgtccctggcactgttggtttgcatccaatctgcagaaatcccgggggggacggtgtgcggggagggggggtgggggggcgtaagagggagggagaattgcgctcctgagtctgaagctgataggatgtcattagtcatgctgctgtcaccatggagatggctggagaggagaggaggtggtgggggtgaggatattttgggtagggtgggggctgatgcaacatcatgactgggaatccggcgggcgtctgctgttactctgtgtgacttggtgtctaggggactgggaagagagtgttcccaggtgcgtgggaagcagagaagggggcactgagcttctccttgtggttgtctggggggcggggagctggggtgtttgagacaggggaggggagagtccagtagagtatcagccattactaggaaaccacagatattcctcccacgttggcatggacccgatcagtaggtttccttgagcttgtcccccttttcagggctaaggagccactgtgagtttgggattactcagcagtatcctctgctggcccagggcggagaaaacagattgggaggtggctctgtgtggctgcctctgaagtccaagagcagagaggctggaagggagcatggggcaggtgggcagggtcagggctcatggaactcttcctagcggagaggaagcgcgttcctgcccctgcctcagcccacctgccccctcagccgctggagtcttcagggagctggggatcttggttgcttgggtagcaggtgggtgagctgcaagtgtccccagatacccttagtttcctccctggaaattctcttcccgccccctgggaaagctgtgggaagctccatggaggtgctggaagtggcatcctgccaccttactgactggatatggatgctggtagggaggggctctgcttcccacgtgggggatagggacttctaggtgaggctgcagggtgtatcaggaggcctagatagttccctggctttgtcccaaggaacttgaggcaagtaagtgcttggggaagggtgtgaattttgcttctggagcagcttctgggaaggagaagagccagggggcatcggcttccccgtctagcgggtgtgctttagtgagactgggagtagtggatgatcacctgggatgaggcggtgggaggctgggaggtgacagagggcagttgatacgggcgatactgtgggtggggaggagagagctgagctcacctcaagttggctctcactacacactcttttctacagccttctctggagcagaacccccaggttccacctctgcttcctcccctcgcctcccgctgctggctggaggagttgtaatcacctcatgtgctgt

SEQ ID NO: 4671 - DNA, 978 bp, Artificial sequence
  DNA replication origin
ctgctattcttcctatttcatctagcttttttccttagtgtttataattgcaggtttagatgagtgtataatactctgttgaattgtatcatagtttaccaaaccaagcccctcatactgagttttcagctttcactaatgtgtggaaagattttttttaatgcaaacttataagctcaagtttctaggaatagcactgcttgatggaagtagtctttattgctcttgataacatttgttcatgtgttcatttatttgcttatctacagatttatttacttatttatttttactgtttgaaccaagacagaagttgtaagttgtgaattagaaggcaccctggcctgggagctgggtgatgggggttcaaggctcagtgggttgaatatgagtccaacagtagtgttctggggtggaagcagaggcagggggccagtcaaggagccacctcctgagtttgtccttgtgagagataaatgaggagaaaacaaaaagaaggcagatctgaaatgctctacaggagcagttggcaggactagggtttgcttgcatatggaaacatcaagaggacatcagaggggatggaagggtttagccaggatgcccaggggaatggatcttaacgtgatttttttttgtaaagggatgtccgggggggagttgctgaggaaaaggatgcaggcgctgagttaagttgtaaatgtgatgggcttaagttgcattcaagtggaagtgtgtctggtagctggaaagcagtcaaggaaaaaggaaactttggggctgttggtgcaggctgagcggtggggccttgattggaggggaggcttctgaggggagcatggggcgatggagagcagtgagggcaggagagtggagaacagctctgttgaggggacggaggaggaaaaggagaatggaggaggaccagtaaccggcagggtcacggaaacccagggtgggcaggtgagtgggtgatct

SEQ ID NO: 4672 - DNA, 839 bp, Artificial sequence
  DNA replication origin
tctgcccagccagccgccccgtccgggaaggaggtgggggggtcagtcccccgccctgccagccgccccgtccgggagggaggtgggggggtcagccccccgccctgccagccgccccgtccgggagggaggtgggggggtcagccccccacccggccagccgccccgtccgggaggtgaggggcgcctctgcccggccgcccctactgggaagtgaggagcccctctgcctggccagccgccccatccgggagggaagtgggggggtcagccccccgcccggccagccaccccgtccgggagggaggtgggggggtcagccccccgcccggccggccgccccgtccgggagggaagtggggggggtcagccccccgcccggccggccgccccgtccggtaggtgaggggcgcctctgcccggccgcccctactgggaagtgaggagcccctctgcccggccaccaccccgtctgggaggtgtgcccaacagctcattgagaacgggccatgatgacagtggcggttttgtggaatagaaaggggggaaaggtggggaaaagattgagaaatcggatggttgctgtgtctgtgtagaaagaggtagacatgggagacttttcactttgttctgtactaagaaaaatacttatcctgttgatctgtgaccttacccccaaccctgtgctctctgaaacatgtgctatgtccactcagggttaaatggattaagggcggtgcaagatgtgctttgttaaacagatgcttgaaggcagcatgctcgctaagagtcatcaccactccctaatctcaagtacccagggacacaaacactgcgga

SEQ ID NO: 4673 - DNA, 1125 bp, Artificial sequence
  DNA replication origin
gccgggcggggggctgaccccccccacttccctcccggacggggcggccggccgggcggggggctgacccccccacctccctcccggacggggtggctggccgggcggggggctgacccccccacttccctcccggatggggcggctggccaggcagaggggctcctcacttcccagtaggggcggccgggcagaggcgcccctcacctcccggacggggcggctggccgggtggggggctgacccccccacctccctcccggacggggcggctggcagggcggggggctgacccccccacctccctcccggacggggcggctggcagggcgggggactgacccccccacctccttcccggacggggcggctggctgggcagaggggctcctcacttcccagtaggggcggccgggcagaggcgcccctcacctcccggacggggcggctggccgggcggggggctgaccccccccacctccctcccagacggggtggctgtcaggcagagacgctcctcacttcccagacggggtggctgccgggcggaggggctcctcacttctcagacggggcagctgccgggcggaggggctcctcacttctcagacggggcggccgggcagagacgctcctcacctcccagacggggtcgcggccgggtagaggcgctcctcacatctcagacgatgggcggccgggcagagacgctcctcacttcctacatgggatggcggccgggaagaggcgctcctcacttcctagatgggatggcggccgggcagagatgctcctcactttccagactgggcagccaggcagaggggctcctcacgtcccagacaatgggcgaccaggcagagacgctcctcacttcccagacggggtggcggccgggcagaggctgcagtctcggcactttgggaggccaaggcaggtggctgggaggtggaggttgtagcgagccgagagcacgccactgcactccagcctgggcaccattgagcactgagtgaaccagactccgtctgcaatcccggcacctcgggaggccgaggctggcggatcactcgcggttaggagctggagaccagcccggccaacacagcgaaaccccgtctccac

SEQ ID NO: 4674 - DNA, 1122 bp, Artificial sequence
  DNA replication origin
cccagttatctaaagcgtgggccccggtctctgtggacacttggatttaaatgcaaacaaacccttgattcattctttggacaaatgtgtattgagtaccagctgtgcccaggcactgctctgcatgctgcgggatgaaacggacaaagttcctgcccaagtatgtgtgggaatgtcctgtagcaatgaaggccaagagggaaaaatgaagtagggtgagggataaagcaacaggagatgctgttttagatgagaggctgctctgaggaggggacgtttaagttgagatgtgaatggcgcaagagagtgagagagccactatctgggggtagagtgctccaggcagagggaccagcgtgtgtgcaggctccgagcggggagcaggctgggtgtgtgttcagggaacaacaggaagggagtaacttactgcaaggggcagggagagtgggattggagaggcctgcagggaccagctcacagggagccttgagggccaggggagggttgcggggtttgctctaagtgtgatgggaagctgttgagggcttctcagctgggcagcagtaagtttgcattgtaaagttagacgcactcctgctgctgcagttagagaatgaggtgtgtgatggtgggggcagagtgaggtgaacgggagggaataagaggaaggaggcgaaggaggaggctggggcagccatccaggccagaggggacacggcttgggcaggagtggggggaggtgctgatgggacagattttggatgatgtggaagggactgccaagaggatttgcagatgggctggattgttatgtgagcaggacttgaggagcactccaaggctttttgcttcagcatctgggtgagtgttggtaacatggaccgagatgtaagtaacaggggaaggctgaatttaggagtaagaaatcaagagtcctgtttcaagatgcctgctagacgtgcaggtggagatgtggagtaggcagggggcaaggagggtctggagagcacgtggtttatagttagagctgtgaggccgacgccatcagcaggggagtgagtgcagatggagaagagagggagtttggacttggttaggggcttccttgaagggatgatgctg

SEQ ID NO: 4675 - DNA, 1164 bp, Artificial sequence
  DNA replication origin
ccttttctattcaacaaaaccgccatcgtcatcgtggccagttctcaatgagctgttgggtacacctcccagacggggtggcggctgggcagaggcgccccccacctcccagacggggcagtggccgggcagaggcgaccctcacctcccggacggggcggctggccgggcaggggctgaccccccacctccctcccagacggggtggctggctgggcgggggctgaccccccacctccctcccggacggggcggctggctgggcgggggctgacccccccacctccctcccggatggggtggctggccgggcgggggctgccccccacctccctcccagatggggcggctggcggggcgggggctgccccccacctcctggaccgggcagctgctgggcggaggggctcctcacttcgcagatggggcggctgccgggcggaggggctcctcacttcccagacggggtggctgccgggcggaggggctcctcacttctcagacggggcggccgggcagagacgctcctcacctcccagatggggtggcagtcgggcagagacgctcctcagttcccagacgaggtcgcggcctggcagaggcgctcctcacatcccagacggggcggcggggcagaggcgctccccacatctcagacgatgggcggccgggcagagacactcctcacttcctagacgggatggcggccgggaagaggcgctcctcacttcccagactgggcagccggtcagaagggctcctcacatccctgacgatgggcggccaggcagaaaaacgctcctcacttcccagacggggtggtggccgggcagaggctgcaacctcggcactttgggaggccaaggcaggcggctgggaggtggaggttgtagcgagccgagatcacgccactgcactccagcctttcctgatttcccactcctctctggggttaccgaatccctcctgcacgcccctgccctggctggcgtgtttcttggtcggttccgcccacaggccgggtccagttttttgtatttttagtagagacagggtttcaccatgttagccaggatggtgttgatctcctgaactcgtgatccgcccgccttggcctcccaaagtgctgggattacaggcgtgagccagcgcgtgtggcctatt

SEQ ID NO: 4676 - DNA, 830 bp, Artificial sequence
  DNA replication origin
gcccggccgccccgtctgagaagtgaggagcccctccgcccggcagccaccccgtctgggaagtgaggagcccctccgcccggcagccgccccatctgcgaagtgaggagcccctccgcccagcagctgcccggtccaggaggtggggggcagcccccgccccgccagccgccccatctgggagggaggtggggggcagcccccgcccggccagccaccccatccgggagggaggtgggggggtcagcccccgcccagccagccgccccgtccgggagggaggtggggggtcagcccccgcccagccagccaccccgtctgggagggaggtggggggtcagcccctgcccggccagccgccccgtccgggaggtgagggtcgcctctgcccggccactgccccgtctgggaggtggggggcgcctctgcccagccgccaccccgtctgggaggtgtacccaacagctcattgagaactggccacgatgacgatggcggttttgttgaatagaaaagggggaaatgtggggaaaagagatcagattgttactgtgtaggtgtagaaagtagacatgggagactccattttgttctgtactaagaaaaattcttctgccttgggatgctgttaatctataaccttacccccaaccccgtgctctctgaaacatgtgctgtgtccactcagggttaaatggattaagggcggtgcaagatgtgctttgttaaatagatgcttgaaggcagcatgctcgttaagagtcatcaccactccctaatctcaagtacccagggacacaaacactgcggaaggccgcagggtcctctgt

SEQ ID NO: 4677 - DNA, 1142 bp, Artificial sequence
  DNA replication origin
tgtggactgtatgggacaggagatgggactccaggtgatagaacccaggctcatgggaccaaagtaacctgcaggaaacagtgccttctggagcgagtcaggagagatgcccaagtaagaggcattacaatgatggaagcaccgggcactggtccctgactagacgtggatgacaggttggaggacactagggccgttcatgggtgctggtgctgaaggtcccacccctctacccctcagtccttcctgatagctcagagcagggtcctgtgtcacagaatctcagagcacctcctttaaaatgagctgtgcactggctctctcaccactggtcttataggccaggaatgagtccggcagcatcccagagctgaccccagggcaggccctcagaggcacttggtgctggatgaatgaatgagcaggggaagaactagtcaattagggacagaaatgcaagacaggagaaaggtccagagtgtgattgtctgcctgctgtgtggagggacagaaactcgatgttgagaggctggacaggattgccaggagtgagggtggggtggagctgcttctgggggcagaatcttgagggtaaaggcagagagtaaccagatggcagacagaatcggcagctactaaggggtgagagaggtgagcgttgcagaatccttgggagaagcctttcatcttagcggatctgtgggcagcggcctttagtggaacaatcaactgacatccccagatgatcactgtccacgctgaaagtcaccgcagtggaagaacttctcttcatgcacagggcaggcaggttcagaaccaggggagaaggaaaatgaaagttaagagaaagaatggtatgagctgaagcaaaggatggttcagaaagggggagagattaggagagcgcgtgggaagtgccccctgcttgggttctgctccggtagtgtgggatttggaggaggatcaaggtcagaggcccagtcgaccttcccaaggccccggccccgctgcagtccctcgcacccacgccttgactctgggctatgactcctgtcttctgctcggtaaaccaatcctttttttttcctgtgcccgcagtattatgactgttcatgtgtctgtccgcctgacctccaacctcc

SEQ ID NO: 4678 - DNA, 1093 bp, Artificial sequence
  DNA replication origin
gcctccgctctgccaggaacatgaacggactctgggcaccctagctttggctgcagcccaccagagcctgtcagtgccgggctgcgtacatagaggtggcaaacatccgggaggctcccagggccttagggaaagggggaatggagagtgacaagtacccatatttcagcggtacttgcagaatttcagttttacaagatgaagagttctgaagatggatggtggtgatggttgcacaacatatgaacgtatttaataccactgaactgcacttaaaaatggttaagatgggccgggcgtggtgacacgcgccgaggctgaggcacgagaatcgcttgagcccaggagttcgaggctgcagtgagccgtgattgcaccactgccctccagtctgggcgacagagcgagaccctgtctcaaaaaaaaaaaaaaaaaaaaaagttgataaggtttatgttatgtgaattttaccacaataacaaaattgggaaaaatatacaggggaggaggaaaggaaaagctctgtttgcatttttgggtttccttgggaaggtgatttggtcggtcattagagcgctggcattgttggcattgttagagccctgcaccttacaacatcagccccttctttttttcatctaacgttcactgtgtaccagacactatgccaagctgtgcgaattcaaagatgagaaaaactgttcttaatggagctcatgttcctgacaaggggcagaacacgcgtgtaatttccagtcagtgcggaaatgctgttagaaatatttcaaaggcgctgcttgttggagcaatgagttcttgaaggaaaacgtgggaggggactttcagggttttccctggtctgactcttgacctcccccatgtttcgttactgtgtgttttctccccttctccctcttcctgagtgctggcctcatgtgactgtggaccagacctttcctaggcttccatggtccaaaagagatttataaagatgctctcattcattacctaaagaactgggccagtttgtctacactctccaataacaaatgctcttttcactacctttctgaaagaacaagtaagcttcatc

SEQ ID NO: 4679 - DNA, 1987 bp, Artificial sequence
  DNA replication origin
aatgatagaggcagaggtgttggttgtagaagtagcagtaaaacggtggcaatgtagatgaaggtgtaaagtgtaggtgaagttatgaagtacagatgcaggtgatgaggtataaatggagatgtggggtatagatagaggtgtgaggtgtagatggaggtaatgaaatgtagataaagatagtaaattggccgggtgtggtggctcacgcccgtaatcccagcactttgggaggctgaggcgggcagatcacctgagttcaggagttcgagaccagcctgaccaacatggagaaaccccatctccactaaaaatacaaaattagccagatgtggtggtacatgcctgtaatcccagctactcaggaggctgaggcaggagaattgcttgaacccaggaggcggaggttgcagtgagccaagatagtgccactgcactccagcctgggcaacacggcgaggctccatctcaaacaaacaaacaaacaaacaaacaaacatggtgaggtgtagatggaggtggtgtgaggtgtaaatggaggtgtgaggtgtagacagagatgatgaggttcatgtagagagaggtggtgagatgtatatggtggtatggggtatagatggaggttctgaggtattgacggtggtgtaaggtggagatggtgaggtgtatatggaagtgatcagatgtagatggaagtgtgaggtgtagatggggggtgaagtgtagatggaaatgtgatatgtgaatggaggtggtgaggtttacatggaagtgatgagatgtagatggaggtggtaagttgtagacagaggtgtgaggtggagatggagatggtgaggtagtgtatggtggtgtgaagtatagatggaggtatgaggtatacatggtgatgaggtgtggacaagggtggtgaggtgtagatggtgatggtgaggtatagaaggaggtgtgtggcgtaggtataggtggtgagagataggtgagggtggtgaggtgtagatggtggtcgtgaggtgtagatggaggtggtgatatctagatggaggtagcgaggtctagatggaggtgtgtgatataggtgtaggtgatgaggtataggtgagggtggtgaggtgtagatggtgatggtgatgtctagatggaggtgatgaggtctagatggaggagtgtggtgtaggtgtaggtggtgaggtataggtgagggtggtgaggtctagatggtggtgaggtctagatggagatgtgtggtttaggtgtaggtggtgagatacaggtgagggtggtgaggtgtagatggtggtggtgaggtctagatggagatgtgtggtttaggtgtaggtggtgagatataggtgagggtggtgaggtgtagatggtggtggtgaggtctagatggaggtggtgaggtctagatggaggtgtatggtgtaagtgtaggtggtgaggtataggtgaggttggtgaggtatagatggtggtggtgaggtctagatggaggtggtgatgtcagatggaggtggtgaggtctagatgggggtggtgaggtctagatggaggtgtgtggtttaggtgtaggtggtgaggtataggtgagggtggtgaggtctagatggtggtggcagtgaggtctatatggaggtgctgatgtctacatggaggtggtgaggtctagatggaggcagtgaggtctagatggaggcggtgaggtctagatggaggtgtatggtgtaggtgtaggtggtgaggtataggaggtggtgaggtctagatgtgggtggtgaggtctagatggaggtgtgtggtttaggtgtaggtggtgagttataggtgagggtggtgaggtgtagatggtggtggtgaggtctagatggaggtggtgatgtctagaaggaggtggtgaggtctagatggaggtgtgtggtttaggtgtaggtggtgaggtataggtgagggtggtgaggtgtagatggtgatagtgacgtataga

SEQ ID NO: 4680 - DNA, 1746 bp, Artificial sequence
  DNA replication origin
accgggtgtgtggtgaggaagcggatcctggagtttgggagtggcagctttgactcgagggatggcgacgataggcctaaatttaaagtggggaacaggagtgcggggcccgagtccaagtcacggaaaggaatgcctggccggagagggaagaacgctgccggggagacacgggtgccggggccgagggcttggggttcggcccgggccttggtcttctcgccccgctggcgtccgcggtaggcttccaaggggcgtgtttgagagtctgggaccaggacctcagccagagggcgcacccagtggcacgggagcctcgcagggtccaggcgtttcacggccgccttgcggcgcatcctgtggtggtgggcgctcagccgcacatccgagtgcccggcccgctgctgctggcaggacgcggaggggcgggtggcgccgcccacagaggggtaggacaccaacacgcccgaggcgatgcagggcaccccctctgacctgagttccagccgatccccagccgcgtccagttgaggcatgcaacagtagaggtcttccaacgacaaatggaagccgagggggtgtcccctcccagttgaggcctgggggctggctaccaggtacggatccagagaagggtcggcatcgtcggcaggcgcctcctccaccgacagttggaagctcgcgctcaaggacccggccgaggagaggcctctagactggccgtccgcttcctctacaggacctccgggccctgcctcctgaaacagctctgatgtgggaggaggggccgacgtgactctcagctgcggagaaggctcccaagattccatctgctcctgggagcctcgacccatccacgaccttcctaaagggatccggtccacgcccccagggtcctggggaaatgcactcgggcagtgagatgtcggaaaggggagagcaggagcaatggcagaggagtccggagaggctcctgaggagtgtacttcgccttggaagttctccaggccctccgaggtggacgcgtgcagcacgggcactgaaccctgagcccaggagtccgtcgtgcatgccgaaggctcctcgtcctcaccccatgtggggtcctcagctactgcagattctccctcgtcccgggccaggaagcgccactcggtgatctgcagcatggcctcccgggcctggctgatggtgaatggaatgcactgcggaggcgagagaggatctcaggtcggcagggaggggcgggagagggagacgagtctgaaggacccggatcccggcccacctgctgagtcaggtagactttgaaagcagagtccatgactcgagccagcaagtcggccaagatgtcccctacgacgtcctcgccctcctcgagggctgtaagcgccatccactcggcctcactgagccgcccaggcacaatatccacctgcggcactggcacagtgggcggccgcactttttccgccttggaccgggtcaccccgcggtctcggacctgcctctcctgcctctgtgagaacaaaacatggcaatcagagcaggaaaccaagaagtggaacggaagagtagctataggctaggaggaagctttctcaagttgtctagtgggaaggaaaagggccaattgacgaagagcctactatgtgacagatacttagtagatgtttgacctaataattttcattaacagcccactaaccacaattgacagataaagaaactgaagtggggaggctg

SEQ ID NO: 4681 - DNA, 758 bp, Artificial sequence
  DNA replication origin
gacaaagacagtttggctgggggaatcctgggggccagcacccccctccattggccacacctgctgctgccaggacagtggagtggggtgtgccagaatgggggcttgggccccttttaagaccaggggaaccctcccaggcccctctatgggaagccagaggcaacagtggaggagcagagaagtggctcccaaaccaaaagcccagagagcaatgtcaccaccaagggatcagggacgcagcaggtgcagggtgcggctaagcaggacattagccttgtccaggagggcacatgtgtatgagtgggtggacggggggaggagggggtagggatgggaagaggccaggggaaaagtcctctccactcagcccatagggacctgcagcggctggtgtgttgtgtagtgtggtggtgaaggtgcaggtggaagatgagggtggtggctggaggcggtggtgatggtgggtgtagggaaggggtggggggtgggaggtggggggttgggagcagatcaaagctgtccagtcccagaaggaagctgctcctccagtgaggactcctgcgagatgcccttctcttcctccttctccagttttttgggtcttccccttggtttccttcccagagttgtggtggttttcccggtcttggcagcacccttgtttttgcttccctttggtcggccccgaggtctcttaggtgttggcacttcgctgagctccttctgactccctaccagcgctgtcctgggactca

SEQ ID NO: 4682 - DNA, 671 bp, Artificial sequence
  DNA replication origin
cagctatgctggcgccctggctcctccgatttcccgcggccctcggacccagccggctccccaggccagtgcagctctctggacctcgcgcgcctctgcgcgcctctcgcaatggagcgggctggggaaggatccgtgagtgctgggactgggatgagactagccaagatgggggttgaggacacctccgtgtccccctcctgccaggctcacccatttgggatgtttgtggctgaagctgggtgcagactggggtgggggttgtcgggcagcgcagaaccctggtgcagacaaaactagactgggaggacctatgtagtctgaaagggcttcctggtgaggggctttgggaaagggttggcttattacagaaggaaaacgggtggatggtgatgggggaaggtgataaaagtccggcctagcacagtggcccagaaaatagccaaggaagcatctgtaggcaggcaggacaaggctttttagaagagggaatttagggtgttcgggtctgagagacttgaaggctggagccactagggacagatgcaagggcacagtgtatggaggagagctggtgtgaggaaaaagacaggtttggagtggtcacattagttcccctgtttcaaatggatggctcgacttgtctcctgaaccaatctgtacactgtgat

SEQ ID NO: 4683 - DNA, 2009 bp, Artificial sequence
  DNA replication origin
tgagcggggactgagagggcgaatagctaccccgaagactcttctgtccccaaggtcagactcacactcgcccaaggagagcccagttccaagccttcccttccgggtctggaaagggttaagtgaggtgggccttccttccgccccctctacctcccggctgggattccaggcctggcttctgccctttccctccagcctgcccagaacaaagaggctctttcacacccttgtcccggcgtcccgggccttctctgactcagaagctagtggacctggggagagggggcctttgtcgcgtccccttgcccccaagcgactgggcccgaggaacccgcgtggggccagcgtgggggagtaaggggcgaggcccgggaccagggggaggggcctgtgagctggggccgcccctgggattagcccggccttcggggacagctcggaggagctggggcggagccgcagggcctggcggccgccgagtgaagtgtgactccgtgggcctggcgtggaggcgggggcgctaggctgcagctggctcggaatcggggctggtttcctgtctggaagggaaggggcctgcagaagggagcggggacagcagcagacaggcacacccctgccttcctctctccctctcctcccttctctggaaaagcgaggtaattgtgagcccagggtggagcgggctggatgggggccctgagttggaaggggtggccctagggctgggctgctttgccaactcacccctttgtcccattccctgggctcactctcccctgaggtcctcacctgtgtggctctttttcccaactttctcaaactaagctggaacccctctcgggaagctccaacctcctgcaaaccccatgactctagaacctgcatgaggcgtcgtttccctgcccccttccagttgtgcctgcccctcactgccctctccgcacacagattccctgtccaccaggccagggatgtgggcgggggctggggagcggccagagtcggaatgaaagggcctttttcttccacagctgggagaacagctgccaccaaagcgagactggacactctgtgcctagagccccctctgcagctggcctttcctcctgggaccccacttatcctcacttcgctttctttttcttccctgcctggctcccggcagggccccggagcagcagtgggcgaggaaaatttgtcacagcagccagaggggtttaacaggagtgcagagggataagggcagcttctgccctctgcccaagagctggccacctctttaaagactgagggaacagtgggaggaggaactgtgggacagtgtggtacctatctgtcccccctctggaggggttgacaagggaaagggcaccggggggcacagagatgcaggacagattgcacatcctggaggacctgaatatgctctacattcggcagatggcactcagcctggaggtaatcccccgacccttggagtacacacctccttcacttgcatcccagccccaatctctgccctgcccattcctgctacagcatggtggggagagccaggcctgcttaaagtgggaagagggacaggtggttccctatgccttgtgttgggtgcagtgtgtggacccaggctcagttctgcccatcatagtcttatgtttgcagcagggtctttacacctatttcaggaagctctgtgggtgagtgtaaatgtctgttctggggacaagggttccttttaggcatgggaagaagagaggagttcaatgtgagagaggtttacagaaaggatgtagccttgctagagaagagaaggactctgggctatgagtaaggattctgctggcccttgagacagcaaggtgctgtttattcgtgtatttgtttttttcaattctttacagagacgaggtctcactatattgcccaggctggtcctggctcaagtgatctccctacctcgacctcccaaaatgccgagattacaggcgtgagccactgcacct

SEQ ID NO: 4684 - DNA, 1290 bp, Artificial sequence
  DNA replication origin
gggcccccatccagcccgctccaccctgggctcacaattacctcgcttttccagagaagggaggagagggagagaggaaggcaggggtgtgcctgtctgctgctgtccccgctcccttctgcaggccccttcccttccagacaggaaaccagccccgattccgagccagctgcagcctagcgcccccgcctccacgccaggcccacggagtcacacttcactcggcggccgccaggccctgcggctccgccccagctcctccgagctgtccccgaaggccgggctaatcccaggggcggccccagctcacaggcccctccccctggtcccgggcctcgccccttactcccccacgctggccccacgcgggttcctcgggcccagtcgcttgggggcaaggggacgcgacaaaggccccctctccccaggtccactagcttctgagtcagagaaggcccgggacgccgggacaagggtgtgaaagagcctctttgttctgggcaggctggagggaaagggcagaagccaggcctggaatcccagccgggaggtagagggggcggaaggaaggcccacctcacttaaccctttccagacccggaagggaaggcttggaactgggctctccttgggcgagtgtgagtctgaccttggggacagaagagtcttcggggtagctattcgccctctcagtccccgctcaaccacacaccttcagccccgccctagcccttagggcgttacaggtggggatccaacaggttaacgcgtggacggcggacgggggaaacgctcagcctaggggctggactcctcttaggccccagaaaaggaggcggaaattttgcgtgtgggaagtaaccccaaggagttaaaagccctgcaggggcatagaggagcctttgaattgggcttcggggaagcgagcggccccggcctaaagtcggggttgatgacagaggctggcccagatggctgcgacaggttgtgggatggggctggcgactggggaacaagcgggagcccaggccaagagtccgagcgcttggggcccgcctagctgcccaccgcccttggcccggggatgcccaagacattttggggttcaggcacattttaggagtcgagctggggccctacaaattgagaccaacccgggctttttccaggctcaggcagataatcctaaccaggccgcggaatgggcagcatggatccgatgaaaatgcagaccgtccacaccttactttttaagtcaacaactccgtcgggtttgtacccagaccgtgc

SEQ ID NO: 4685 - DNA, 1085 bp, Artificial sequence
  DNA replication origin
cagggcgagaggcgggagccggagaggtgaggcaggacccgggctccactgccgcctctccgagctcttgtgacgcggacctcagtgccaggatggctcggggcgagcggcggcgccgcgcagtgccggcagagggagtgcggacagccgagagggcggctcggggaggccccgggcgacgggacggccggggcggcgggccgcgtagcacggctggaggagtggctctggccgtcgtggtcctgtctttggccctgggtatgtcggggcgctgggtgctggcgtggtaccgtgcgcggcgggcggtcacgctgcactccgcgcctcctgtgttgcctgccgactcctccagccccgccgtggccccggacctcttctggggaacctaccgccctcacgtctacttcggcatgaagacccgcagcccgaagcccctcctcaccggtaaccgggccccagggcgggcaggcaggcggactcctaatctgggcgccccagcttgaagcgagagcaagggtgggaaggaatggatcaggagagttatgaagagggatgacccggagacccggagggacaggtcccctgctctttgacttacgtggccattctacccccaggactgatgtgggcgcagcagggcaccaccccggggactcctaagctcaggcacacgtgtgagcagggggacggtgtgggtccctatggctgggagttccacgacggcctctccttcgggcgccaacacatccaggatggggccttaaggctcaccactgagttcgtcaagaggcctgggggtcagcacggaggggactggagctggagagtgactgtagagcctcaggtcagggcctcaggacacccttttctcagcccagaccccctccatccttcccttgctgccagcaaatgcagcatgaagtgggctctggctgcctggcttaaatcctgccttaaacaactgcctgtataaccatttctatttaccatctctaagccttgatttccttgcttgtaaaatgtacaatgtagataataatagcacttaactcacaggactgtaagaattaaatgaaaaagaggct

SEQ ID NO: 4686 - DNA, 1174 bp, Artificial sequence
  DNA replication origin
tccagagctaagctttcctctgaggccaggctatacaaagcttctgcctcatgcaacagaggctttgggtggaaacagggagtgagggctcagcctagctcaggctgctcccctccctactccccagccactcacaggtaagtccttttggatcaggagcaggaaggaagctgggtcccatgctgccaagtactgctgagctctgcccaggaaccagagcaaggtggtctgaagggtacagagacctagggcgacaggcgcaggatctggggatttgagcagcagagtgagtatcttaggggtcatggagtacctttgggaagaggcagatttcagaacagagtgaaagaaaagagatatcctcaactgctctgtgtccccagccccagcccctcgtctcacctgcaggctggcagaaaatccgtcgtaacctgggctctcgaagggcatccaagagaggaggaaagagctgctgcaaaagttcagcagtgccagaggatgtgggaaggctgctctgacccccaagagctgatcccaaggcctggcagaaacctgaggatgagagagtatagtgtggtggggaagcggtaacctgggacttatgtcacccccagtgccccttccttctcaccttggtcccagctccagataagcgactgatgaagtagtctgtgacacaaagatgccagctccttctcacactcctgaggcagggatgctagtgggagaaatgactctggggcctgaaaacaaggtctcactttccacaacccctgcccactcaatgatgaggcaagaaggcatgcttcctccaagactcgggactggggtggaaagcaagactttgccttgaaagctcagaagctatagtctgaacccaggggtgttctttctaaagggcctgcttttgccttcaggatggcaggtcagtgagttggccaaggggaaggaagagaccccagccttcccaaacgcccacccaagcccatcactcaccctgacccagtgcctgactcagctgttgcgctgttgccctggggtccctccagggtcccagatttaggtccagactctgagcacaggctgcccacagcagggtccagtattggctccacaaggccccagcccctccgagccctagtccacagctggctgaacccgccacgcccccgac

SEQ ID NO: 4687 - DNA, 1172 bp, Artificial sequence
  DNA replication origin
gtccagggccccagagcccaggattggcggcggctttgtcttcaatcgtccacctgtatctcctcgtctgacaggtggggccgggagtcagggccggcagggccgaggcagaggccgggatctggagcgccttcgggcagtgctaagctgcacaggacttccggggacaacgcgcgtagcgaggcgacgtcggcgcgcatctcctccacatcgcgcttgagcttggctcgccggttctggaaccaagtgaccacctgcgcgttggccaggccgagtcgcgtagctagcccgtctcgctcggacggcgccaggtacttctggaagacgaagcgccgctccagctccagcacctgttgcgcggtgaacgcagtgcgtgacttgcgccgtttgcggccgaagggaccagggcccagcgcgtccggacctgcccgccctgtagggatagggagggggtcagtttccagcctccgggaatcaggctgggcctggaaagaaaagttgggggtggggtcgggccggtggcggtgggggaagtagagggagagccaggaaggcggacggagaccagaactgtgatcccttatcgggagtcaggcccaggtggggatatggggcgcaaagcgggctggccacaggggtgcgaaaggcagcaggctgagggcatattgtaggggcaaggaagtgaaggaagggagggatgattcagaggtgcagggtcaaaccttctggggtggagcctttgaggcttttaggagcctcaggctgagcaggctataagttgagggtgacatcagaggcgagtaagagtcagggcagccgacccagcgtggtggtggtaacaggacttagatcatgcccttccatggatcgggtcgggcattcggtttacagttccttagtgacaccagagcccgctcctccggccccaaagggagataatgaggtacagagagcgagaaaaggcagagtgcggaatcccgcgcccagtgctgcgccaagggctttctgctccttgactcccctcgagaagagagtggcttggagcggagcttggtcacccggaaagactcgactctccagcgctttctgtgccgcctttgcaggctcactcgtttaccgcctgcggctgaagccttttgtctctttctctcctgcctttctctatcgcgatt

SEQ ID NO: 4688 - DNA, 1711 bp, Artificial sequence
  DNA replication origin
cccggacccgactctggaagctgcggcgcagagggtgctcgggggaccatgcgcggggctaggatgtctgcgatgcttaagagtgtccggggtgttcggggctcgcgtcccgagttcatggtcggccgggctggggcggtccggctgtccgttgcgctaggctccgcaaacgcctgggccccagtgctcggctcccaatccgggcccccagcctcggacccgcccccggctctgggcccgagtcccgtgtgcccctcctcctgcgcccccacctctccaccccgggccgcggtggatctggagctcctagatgtccggggagggtatttctacaggctggggcaggcgcggagagcagaagccgaccaaactacccaccagagcagggccacggggctgctccgcgctgcggggcgctgcaccgtgcacagtcaggccgggccatacctccagacgctgtatgccgccgactccccgcctagccgccgctccggctcataaactagtagacgataaaattgccttctctggccccagcggctggggatttgcaaagttctgaggaaggctatcagggctgactgtgctgggatctctgatcccagctaggacctcagtctcctaacctggctccctcttccccaccccacccctgagaaacgttgtttctggtcctgacggctggaagtgattagtgctgcatgggtcgggggcgcaacacttgggaggacctggcctggcggagcgactgcaactgggaatagtggggatgccacgaagaagcaagcacaggtgaatggacccgaggctgccccacctgacgaaatcagaacacacagagaagctgccgggagacccgggccgcaggagagaagacccagggaactcccagctggtgcaactgcccaggaggggtctttgtcagtgaggactggcaaaatcagtcgattttgtctgtctttatcttctttttattaagctcccatagttcaggtatgtatggtttccccagcctgcagaggctcagaaactgccaaggggagcaaggtgccctgaccagagaggggtcactccccatagaagagagacttgaagggcagacttcacggacccagctggatcttgggacattcctgacaacccaggtactaactgtgaggcctggtatactcattcctatttaatctgggccctttttatctgccacacttattctggttctgggctcatacctgggtaagcacccacagccctcctttgtaggaagaaggcagctcagggacagtggggcctcagcagttgaggcccagcagggtatgggttttgttcctacattccaccccaaacagctggaggattcacaccttagagcagggaagccctgccactcctgaggagcttgctgctttgctgcccagggaagtcagaaactgatgtgcttctagctttttaaaacagtgtcaggaaaaaccaggccagtccctcctggactgtccattatgtcactttccttgtagacccctgcatctcccaccatctgtgcagtgtccacctgtctattccctggggcaactgctgcatgcaattggggttccctaaacagggcttaggagatccaaggcacctgggccaaagactccttgacaaagatgggaaggcaccttgatagggtcttcttggtaaagggctcactccaacaacccccctcccc

SEQ ID NO: 4689 - DNA, 1581 bp, Artificial sequence
  DNA replication origin
ggggagttggggggagaaaagtgtcgaggagggcgtcggagtttcccaccgctggctgcttcccggcccgcacgcccgggagggtggcggtgggcgcgcagagatctttgcaaaacagcgtccagggcggaaaacaactcacaggcctgccgcccccaaagtcacgaaactaagatataaggaccggttcactccgcagtagcgctttctgaaagagaaaacaatcccagaagtgtgcgggacggacggaagccccgcctcacgctcctccgcctggactttgctccctgaactcccactgccctctcactccggttcacggacgtttcctaagggtggggaggaggggagcaagctcttcgctgagattgtccttgtccacctccccaagggggttattccgagggtcctccaaccctgctacacattcacagaattcagtggaatgtccgggccggcaatccgagactaaaggtcgtttattgagcaggcctccgtgccaccagtggggaacggggtcgagcgggggcggcccggggtggaggaacccgccgatggggtgtgtgggtgcaagataaggtgggggtagggctgaggggtgagaatgggaaatctgaaaggggaggtgtgaggaagcatccttaagcgggaatggggtgccttcccaagacagcgaatttggaatgtggggatctctacaaggggagggagcgcagggccccgaaatgtctgaatggacaatcaaaggaatctgagaaggtgggaaacacaagagactgcctgaaaaggaaaaccgttggccccgcggggccagcggtgaaggctggcctccgtgcatctcttgagaaggatcgtgaacagggagggttctacccgcgggtgggaagaggcgagcacccaggagcttctgtgcttccaagctggggtggggggtaacctataggacagccgagtgagtgtcccctccccaacccagaacaagttttaatctcttaatcttcctcattaatcactcaccctcctacccctctctgtggatccgatttcgccccagctcgagttccagtactgagaaaagtccccttctgtggccccacgatcccctggactagtccctggccgctttgacgaccttagaggggcctctgctgtcctgggcctcctccctttgctactctccacttccatctcctcccccaaactcatgtttaggagctgtccaatcccagtacctgagcccagctgcagaggggagaactaggcgggagagatggaaggggctgtgaggcacaggcccatcagcagagctccacactcctcacagacacacgtaagtaattgagagcagaggtagagacagacacaaaagccacatagaggatgcatgagtgaaggttgcagcatctgcttggtgatatgcctgggatgcagtggggcagttcctgctgcctccagagagctgctttattgcacattaagtgaaaccactaggatggtttccagggctgaggcctgtagcccgaagatctctccaggccctcccctgcccctcaccattaataaccatttaacaacgtcctg

SEQ ID NO: 4690 - DNA, 1627 bp, Artificial sequence
  DNA replication origin
aggggccaagcccccaccccatcccactccccttccctccccagatatttatgtgaaatgaactgcagctttattttttgaaataaaaacttttaaaaagcacctctcttctgccttattcttcctgcctcacactcatgctgtgtcctgccttcttcaaaaatcctctgagtttcattgtgaagaagggcctgtcctctatggccatgggccctcaatgtcttgccaaaggagaagggtagaggatccctatatgtgtgaaaccaggcctcccacaccactctttttggtgatgggaaggtttcctggaggggagctctcagctgtctttgtatgctgcagcatacagtgcgggtgcgggcctcttaggaggtttcctaattcagcggtggtgagaaggctagagttggacagtggctgctgcaggattgaacaagtgtgattttttaaagaaaaatccaaagaattgcattatagttttataacttgggggatggggacaaaaaggagggagaagtctaaaaaacaaatggagtggggccacaggaattgtcagaaatggaggcttaggctgtccatacaggattcagcaagtacttggggactgcgactagaagaagccagggtggggaataagtagctgaggaggagagggagctgatgtggaggagagcaagggcaacttcaaggaacaaaagggaagctgcaaggcaccagctccattaattcagcaaacattccttgtctgtatgccatgccagggtccttgttctatggttctctcagtggggtagctagaaacttgcccaacagacaggaacagacagaagccaaagcaaagaattcctgaaggtagccggcctgctgccaaacctgggacaaactgtatggaggcgcagcgtgtgtagccagaacccgagttaaaacctaggtcccaccctggccggtctgactccacggcttctaggggttggttgtgcgaagctgttgagggctgaaggcgctaaccatcaaagatggaggtcgggtggcagaagatggggtgggaggcagagagtgagtacagcgaaggcggcctcaactggataagaaaactccagacttgcgggaaaggcctgagctcgcattggacgctctggggtgccacagtcggacactgtttccgggagacctccgcctctccgcgcggatgaagaggctgcagacgccgaagaagagctcgagtgcgtggggcactgatggggatcggggtgggcacacagcagacggcctgggtacgcttctttcctgacatggtctccaaggttagcaaagcttccaaacgtttccaggcctccagcctggaatgcctctccccccgctccccgacctcttccaggaacaccccagctcagggctccccactccccttcctgcgaattgaagctctgtgggctttgcggtccgggcgggcgagtacctggcggccggggctgttctccaggagtttctgcgcgaaaagtttcctaggagtgacgggatggcgtgggctcaggggagagtagaaacgctcccgggggctttgcagggaccgagcagctgcgggagctggggagcagtctgactgggactccctggaaggccctgc

SEQ ID NO: 4691 - DNA, 1050 bp, Artificial sequence
  DNA replication origin
tgcagggagtcctcaatgcaggactctgcccctccattctgtgcctaggaagtctgttctcacactcttcctcctcaacggcgggagggcgaaatctcgccacgggggacacgtgggacctcactgaggccttggttggatcctggccgccttgtttcccataaacattttaccccacccaaactcaaaaaatggcctggagctgtcagagaagggaggtggggaaagacctaagccgcttggtgaccttgtgacctctggccatgaatccaggagccgggagtgcgtgaactctgcgtccttcccggggatgggacccccgcgggcgggcccctgagccttagacccgcccccgccgccgccctgcccggtgcaggccgcggtaatcgggttagctgggccggaattacattaccttccccggcccgccccggcccccgggggggccctggcgcctctgagccggtgagactgggctcagagaggggggcgcttctaccatcctgcggtggcggtggcgggtgggcaccaacgagcagctcagcctacctctgacacgtggtggccaaaggaccttaccctgctgtgccagccctctaccctcgtcccgagcccaccccgctgttcagctccatcctgctggttcccgtgtgaaccgaaatgctttgtaagtctactagctggatctccctgggagcactgatcttcaaactgattctccaggatcccctgggaaagactctgccccctcctttctccccagcagatgggctggcagcctggcgcctggggcagggtgaaggggtcttttctcccctgggaaccaggaatgatatttgggcatctgggcagaaagataaagaagagaaagaagggtgagctctgtccaccagcccttcagtgttctctgaagccttatatctagaggaggtgaaccataaatgggacagagggcagtgggaggaatagtgggcattaatatgtgtcaacctgccaggcgcggtggctcacgcctgtaataccagcactttgggaggccgaggcgggtgg

SEQ ID NO: 4692 - DNA, 1540 bp, Artificial sequence
  DNA replication origin
ctccccatgaccctggcccccgcgacccaggcctagaccgccccctggggtttcggggccgctcaggatctgatcgatgccgaagctgattggctcgtggtgtgggaggttgtgtggacccagcatccccggctccatcggtctgggccgaggagaaccgccggaggttcggtggttggggaggatgcctcaggcagcgccagaagcccagcggcggcgcgctccggagagtggcctcaggggcccgcggggctggccaaggcagggcgccggggtccccgaaacagcagcatccctgtgcacccggagcagccgcgcccgtgccagccgctgccgggcgtcagcgcagggacttgcatcccgggggagcacggccagctggggcccctggagcttccttgctggctcttaagcgcaaatagacgctgggctgccggcgccgctgcccaagtcccgggtggagagggttggccagctccggctggggcagtgactgacggatcggcccgggtgggtagtgggggctgggggtagggcaggggcggggcccagcagttaaaggggaagggacgcctgtttgcgccaagcgcagggggaaggctggctggcggagatgtgcggggagggggacagggggccagggtgttaggagccaggctcagcgcgggaggggcccgagcatgggccgctgagtcagcggagatgctcaccgcgcctccatccttgctggcctccgcctttgggcggcctccgcctttgggctgcctccgcctcaccggcttcctccgcaggtgcctcctcccccagcccccactcttcgcctctcgatggatccttctggccaactcccggattcgttgtggtccccgcctaaatgctctcgaagaccaaatctcgttgtggtttcccggctgcgtaagaagcggctggggaacggcgcccggtgagctgcaggcccaggaagagaacaggtgtgggaaggggacggcaggggctaagggcggggaacggccgctttgggctggcgatcgtggtgcgccttctggcctctcctgtaggtccccccagccctgttcatgcgcaccggtaattggtgtcctgtgtttcctagaatttcgattttccaaaatccgtgtaaaacggaccatggctcaacccgggccaaatcaggccggcgggttcttggggctggcacttacccccggaccccaagtgcagggagtcctcaatgcaggactctgcccctccattctgtgcctaggaagtctgttctcacactcttcctcctcaacggcgggagggcgaaatctcgccacgggggacacgtgggacctcactgaggccttggttggatcctggccgccttgtttcccataaacattttaccccacccaaactcaaaaaatggcctggagctgtcagagaagggaggtggggaaagacctaagccgcttggtgaccttgtgacctctggccatgaatccaggagccgggagtgcgtgaactctgcgtccttcccggggatgggacccccgcgggc

SEQ ID NO: 4693 - DNA, 1107 bp, Artificial sequence
  DNA replication origin
gcagccgcgcgctccaccgctccgggcccggcgctccacgccgatcggacgggcgtcgctcacaccaccgaggcgagcccggacactgaagccactttgttgtcctcggcccagggctgcaggttctgcagcgcgaagagcgacgagttgtgcaggcagagagggtccgggggcagcggcggccgcagcggccgtggcaacgcgtcctgctgcagatgcaggagcagccggcccgcgcggtgccgctcggcctcgcgctcctccgccgtctggcgcctaagggagggagacgcggggtcagcggggcgcccgccgcgtcgcttctcaccaggccctgctcgggaaccccagtccgccctcgcccgcgccgcgcctcaccgccacttggtgcgtcggttctggaaccacgttttgacctgtgcgtcggtcatgcgcaaggccttggccagcgccgccctctccgcagaggccaggtacttctggcgcaggaagcgccgctccaactccagcacctgtgagcgggagaaggacgtgcgcggcttcttccgcttcggaggggtccggttttggtaggggtggcctatgcggcgcgtcccagagaagggcgagagcgcagctaccgggaggaagaaagaccagggcaggatttgcagggtggcccgaggtgccactgagaaggccgcgcggctgtccaggccgcagaactcccgcgccctgtccttacccgggccctaagcatcagccgagccctatagccaagaaaggcccttcccctgggatgcgagggagacgtcccctgtaacttcaccctcccctccccacgcgtggacagtgggactacagaggagggcgcgggcaccgacggcagctccctccccatcacctctcggaggcaggacccagagatttgagttgggggaggatcccctgggaggatctagtgggaggtgtgaaaggggtccttgagttggagcagaaagctaagaaatgaggagacggggtcagagtcgggcgtgacgctggaggggtcagacaacctcacccgtgagccggtccttggcaaagcggcggccgctgtccatccaggggaaggtgagtcccgctagg

SEQ ID NO: 4694 - DNA, 1459 bp, Artificial sequence
  DNA replication origin
gggcgagggcggactggggttcccgagcagggcctggtgagaagcgacgcggcgggcgccccgctgaccccgcgtctccctcccttaggcgccagacggcggaggagcgcgaggccgagcggcaccgcgcgggccggctgctcctgcatctgcagcaggacgcgttgccacggccgctgcggccgccgctgcccccggaccctctctgcctgcacaactcgtcgctcttcgcgctgcagaacctgcagccctgggccgaggacaacaaagtggcttcagtgtccgggctcgcctcggtggtgtgagcgacgcccgtccgatcggcgtggagcgccgggcccggagcggtggagcgcgcggctgcctgcgtccatggtctagtggcagccgggcgcgtgaggagcggcaggccttgaggctgtcgtcgagggctcctccaccaccggccggctcccaagccagcgttgcgcagatgcacggccagctcagaggcggcctttcccgccatttttcacttcactgccgttacgccctcgctggaacctgaggcgccgagagggcgggacctgcaggacagtagccaatgaggtgcggggagggggccgggctggccaatgggagctgctttcctgagggactcgaaattctccggcgggtggtcgggagctggggctctgaggggctctagcggcgttgcgcgcggtgccggctgggtctgtaccaaaggtgtgaaggaaagaagacaccgaccacggcgaagcaatagagggggtgctggagcgcgagaggctggctgattgtgaccgaaaccagagggttgtccaccccgggcatctcatccctcaactgtaaaataatcgctaaggattccttcctgactttgagcctcacgttgtcatgtgtgttcagcctgctggccacatcctccggcaacacgcccgggcaggaggcgagtcggatacttacacacccaacgaaagagaaaatctggctccggtgtcacatagggacagagaagggagaggaggaaacagtggacaaagttaatgggcccagtggagttagggtgaagagaatttggaaaataatttggaagtgacaagcttaagaagaatcaaaggtaattccaagactggaaatgtgcagcatcaggaaatcaatggtgctgtggatgatgaaagggaaattgggaagactggagcaaaattaactgtataggcaaaactaaatgttatacctagagagaataaatcctggagaagtgcctttgagggagatcagctgacatccacatagaggtggacctagatagaatgaatgagaacagatagaatctctgagggagggaactcttgaggagaaaagcagagttctaaggactaaacctttccaccaaattcgacaaccacctttgcaatgtgcaagatgatggagaatacctaagtcaatagtccaaggg

SEQ ID NO: 4695 - DNA, 624 bp, Artificial sequence
  DNA replication origin
aactctggaacccgttcgcgcgcgtggctggcggtggcgctgggcgctgggggggcagtgctgttgttgttgtggggcgggggtcggggtcctccggccgtcctcgccgccgtccctagcccgccgcccgcttctccccggagtcagtacaacttcatcgcagatgtggtggagaagacagcacctgccgtggtctatatcgagatcctggaccggtaatggtgggggtagaccgggaggcactgaagccacaggctggagggcgggcgggtaggaggggtcagagcctcctcttatctgtgctttccctccatttcaggcaccctttcttgggccgcgaggtccctatctcgaacggctcaggattcgtggtggctgccgatgggctcattgtcaccaacgcccatgtggtggctgatcggcgcagagtccgtgtgagactgctaagcggcgacacgtatgaggccgtggtcacagctgtggatcccgtggcagacatcgcaacgctgaggattcagactaaggtgggggctggggtaggccaggtctggttggagctgcttatttgctcgcatcttcagatgacaggtctcttttacccattctcccttaggagcctctccc

SEQ ID NO: 4696 - DNA, 1077 bp, Artificial sequence
  DNA replication origin
tgctggctgttcttggtgtcgtgtgtccctatggctgtgccatcctcgtgttccctttccctgcactttggccacacataggaaatatctaggatatgcctggatcattgctcacctgttccagggccatatttggcactgtgggtccagcctgtggcctctgtgaagcccagctcccggcagaggatgtgggcagcctgcagcgtgaagtcatcatcgcagatggtgccccattcaccagctcgctgtatctccacgcggccctcgtagggcttcctggggaagccagccagccggaaccgaagcccctggctcccggccttcttctcagggcccgtggaaggggacggagaccccaagcacgaactgcacagcaggcacagcagcagcccccaggggctccactgccagacactgacaggtcgcatggcagggaaggcctgggtgccccagagacaaagtgtgcgtgagagaaacagattgagtggggcccagagtcagaaagagagggagaagtcacgaaagaaaaacagacactgagtaagacagagacagcgagagacaacaggagagaaagagccccagggaccaagagacagggagagaaacacattaaataagggctgaggcacaggtcatagaggcacagcctgagagacccagagataagagacaactatgagagatcgagagtcagagaagggtcaataaaaagagatagagactgagcaagagacacgtagagagagaggaagacccagacagacaggatgtgagaggaagggagactgtgggaatgagagagagaaaaccagaaagacacagaggagagagacaacggatagaaagtgataggcaaagaactaagcactcagtataggggaaccaagcacaccgcgggtgagaaggagagggattgacaagagccaaggggcggacgtgggagggatccagatgaccccatttactcagagggaggacagacagctgtactgattgtgcagagaggcacgtaaggggccctaggcggccctgggatcacagatcccctgaatgggagcccagagtcctaaccca

SEQ ID NO: 4697 - DNA, 1196 bp, Artificial sequence
  DNA replication origin
ggggtcgcggtggggtgagggagaggagcgagaaggaatggtggagacccccggattagccgggagctgcagcaccccaggcccctacccgccgtcgtgggggcgcgccagtggctccaccgaaagtcctcggttttggcgcgagggccctggcctctgggcgtggtggctgcgcgtgacgtcatatgcccaaggtgacgtcagagtgaaagccatgacatcaccccgaaagcgccccgggcaccggagagacccacacgggcctccggggctttatttaccctggccgggcccgcccccagccccgcccgagccgggctgtttagactccgctggcccgggactcggagggagggctggggttgaaccgcttcccgccaccaccggggccgccccgccgcccggccgccgcttgcatgtcagctccctgaccgcagaggcctggcctccatgccgcgggaagagaaagcttcattgaacgagccgggagggccagggagggggagggggcgcggcagtggccagctccacggggagggaggacccagaggaggagaggagggaactggccgggaggaatggaaggagaaggcggaatgtgggagggctcagggggatgtgggagggacgaacggagaagggggagagaggggggtccagtctcccctggccgagcatttttttttttttttggaagtcctaggactgatctccaggaccagcactcttctcccagcccttagggtcctgctcggccaaggtagggggagtcacgctaaccgcagagggaatgagtaggggatggagaggatgtggagggaccagggaaaacgggtggtgtgggatggagtcgaggggaagccacccaactgagagtttgattcttgtcaaagggcaagtgagacagagtacacggaggaggcacataccggaggcgggggctacgggtgttcgaacagggccgccaggagcgccctaagggagggggctcctccgggaggcgctgcccctgggtccccaacccagaacaaagctgccttgttggattgattgtttgggttgggggaagcatgttgacgggggcttgctgtagaggggctgttctcagccctaggcagagaaggccttggctgaggagccatagcgcctggcctcccgttgcccggtgacagggatggtggtgttggcaggaggct

SEQ ID NO: 4698 - DNA, 871 bp, Artificial sequence
  DNA replication origin
ccccggtggtggcgggaagcggttcaaccccagccctccctccgagtcccgggccagcggagtctaaacagcccggctcgggcggggctgggggcgggcccggccagggtaaataaagccccggaggcccgtgtgggtctctccggtgcccggggcgctttcggggtgatgtcatggctttcactctgacgtcaccttgggcatatgacgtcacgcgcagccaccacgcccagaggccagggccctcgcgccaaaaccgaggactttcggtggagccactggcgcgcccccacgacggcgggtaggggcctggggtgctgcagctcccggctaatccgggggtctccaccattccttctcgctcctctccctcaccccaccgcgacccccccagcggctgccggcgggggccggggaggggcggaaactcctccagggaacccggccccgcctcccgccccgcctcccgccgcagggccaggaagcgcggaaggaaccgccgggggccatggacggagcagtgatggaagggccgctttttttgcagagtcagcgctttgggaccaaggtagtctggcgcatggatgccgaaccttatccgggctagtagtgggtgagagagcccagaaacagggagaggtgggcagcgggctggagagcggcgccgggagttggagagcctgtgactttcccgtgaagttgctttgcacactcccgggaagcgtctgtagtctaggggttctggtcctggggagacggagtggcatcgtccttgggaaacttcgcccccaaccccgtttggaagccccagatcccaaatcgacttgcgccgcaacctccttccccgtcgggacccgggccgcctgcgcac

SEQ ID NO: 4699 - DNA, 1959 bp, Artificial sequence
  DNA replication origin
cccctcaaactgcacccattctgaccatgcaccactttccacagacctggtcccacagccgtcccttcatttggggaagtagggaagggatggctttgggggatgcagagcccatcctcagccctgccatctgccccacttcttaggacttcctgggattgtccttcccttgactctcccatccctctggtcccctggtctcacacagcatggcccctcccaccctctggcttctgctggttctaaccatcttctttgatccctagtgccacctccccatggtcccccttagccacctcagccttgccgtccttctcaggtagagccctctgacttgaccccagtcttgtcagtccctactctagagagcccacagtcccagctccctgaggccccgctcttctggacctggctgtacagggctgagttgtggcttttgatgccactgccagttgcagtaccaggttcagggaaggctgggccctggggcttgggagcaaggaggggctttgtgctccgagggggtggcacagcgtagtcatcagtggcagggttgtaggggagctcatagccctcctccttcacccgagcttggcaccaccatgcatccttgggctcccgaggcagatcataaaggccctggggagggactggggccaggccctcaggttcatcatagatgggatcctctttggggtctgtcagcttggccttcagcaactgctgctgcgcatgctcatacaagtcccaatagagaggtttcttccgttgtactccctctcctgcctgagcagacgtgctgtccaaggggtctgagtatagggagtcctgggaagggcatggagcaatgcgcagggagtctaagggctcagcatacagggctgggggactgtcgaggagctcttgggggccaggtggggaaggcaacttcccctctgccacctccccttcatgggagtcagctctgagaacatcgtgcccctgtccggcctttccctgggccttctgccggtggatggcagtctcaactgcctggaagatgtcatttccctgtgccgtctggaaggtgaaggttccagggcctgaggggcagcggcggccggcctcgaaagagaacatgacctaaggagggtagagggggaaacacattaccaggagccatcagaggaagtgagtcacacgcctgcactagttagggtatctacaaagaagagaccacctgcgaacagacgcggggtcaccgggtaggcaagaaagggggatccaaaggtcagagcttcccactttctgtcctgccccacccctcccacagctgcccaacccaggaagccctcccggacagcccctgcaccttgtcccggccatagcgacgcaacagagtgtagggccaggacaggagtggctccagtatctgactctgggcccccacggtcaggagagtcagcctttcagcctccaccctcagcacgtaggagccatgcaggccacagcgctcggcggcctcagtcctctgcaccgttacccagaattgggatcctggaaggcatacacgattagacagctgcgggggagggacgggggcagcagtggggacccagaggactcatgagcatagtgtccaagcactcactcggaagccagatctcagggccttcctacttcttacttccccatgggcccctgggtatccacccacttcccaaaggccctcggccctcctcctcttcactccatccctgcccgggcttctgaggcgtctaccttcccaggtagggctgtacaaggagttctccagcatctccagggcagaaagcttaggtgggttatcggtaggcgccagagtccagctgcctttctgtagtagagagcatcgagaaacccgtaatttcctcagcggggagcgggggtcggtctgaggcagccccatttctctgcctctgtaactgcccccaccccgca

SEQ ID NO: 4700 - DNA, 747 bp, Artificial sequence
  DNA replication origin
taatttcccatcccttgggcatttcttttcccacctttccttcagccttttctttcacgaggactgtggttatagttcctgtgtagccagtttgcttaatgggacaatggtctgtttaatgagctatcataaacactacaattaaaacacctgaacattattatatgtaaatgccctagcaaacaggcctccctacccagtaagggttctaattttcccctccaccaggggtggatcctggaggaaggctactcccttggatgggggcggtgttgggatgggggaggagggttttctaggactctgggcatgaaggggagggaggggaagtaaggaagaggagggaaggaggggagcggtacctttctcggagctcggctctcccagtgtgggtggagccgcccctgaggcttggcatagatgctgctcaggtgtgagtacaggtggctttgaacatgcaaggggttgtaggtgggctccagctccaggctgtccagcatgctctgaggaaaagagaggaggggcctcactagggaacttaagatcacagaacacaagatgtcaggtagcgatccaggagtgtgaggggctggaggaagtgtgaaaccccagggctgccatgaaggctgtgaaatagatgctgtccccctgggtgttctggcctgaggtccagtgcttgtgatgtaagggccaggcatggataggagaagtaggaacaaccctaagtggttaggaacactgaacact

SEQ ID NO: 4701 - DNA, 871 bp, Artificial sequence
  DNA replication origin
ccccatccaggaggtgaggggcgcctctgcccagccgcccctactgggaagtgaggagcccctctgcccagccagccgcctcatccgggaaggaggtgggggggtcagccccccacccagccagccgccccatccgggagggaggtggggggtcagccccccgcccagccagccgtcccgttcgggagggaggtgggggggcgtcagcccccacgcccggccagccgccccgtccgggaggtgaggggcgcctctgcccggccgcccctactgggaagtgaggagcccctctgcccggccagccgccccgtccaggagggaggtgggggggtcagccccccacccggccagccgccccatccgggagggaggtggggggtcagccccccgcccagccagccgccccgtctgggaggtgaggggcgcctctgcccagccgcccctactgggaagtgaggagcccctctgcccggccaccaccctgtctgggaggtgtacccaacagctcattgagaacgggccatgatgacaatggcggttttgtggaatagaaaggggggaaaggtggggaaaagattgagaaatcggatggttgccgtgtctgtgtagaaagaggtagacatgggagacttttcattttgctctgtactaagaaaaattcttatcctgttgatctgtgaccttacccccaaccctgtgctctctgaaacatgtgctgtgtccactcagggttaaatggattaagggcggtgcaagatgtgctttgttaaacagatgcttgaaggcagcatgctcgttaagagtcatcaccactccctaatctcaagtacccagggacacaaacactgcggaaggccgcagggtcctctgc

SEQ ID NO: 4702 - DNA, 1327 bp, Artificial sequence
  DNA replication origin
ggggcggctggctgggcggggggctgaccccccacctccctcccggatggggcggctggccgggtggggggctgacccccccacctccctcctggacggggcggctggccgggcagaggggctcctcacttcccagtaggggcggccgggcagaggcgcccctcacctcccggacggggcggctggccgggcgtgggggctgacgcccccccacctccctcccgaacgggacggctggctgggcggggggctgaccccccacctccctcccggatggggcggctggctgggtggggggctgacccccccacctccttcccggatgaggcggctggctgggcagaggggctcctcacttcccagtaggggcggctgggcagaggcgcccctcacctcctggatggggcggctggccgggcgggggggctgaccccccccacctccctcccggtcggggcggctggcctggcgggggctgacccccacctccctcccggacggggtggctgctgggcagaggggctcctcacttctcagacggggtggctgccgggcggaggggctcctcacttctcagacggggcggttgtcaggcggagggtctcctctcttctcagacggggcggccgggcagagacgctcctcacctcccagacggggtcacggccgggtagaggcgctcctcacatcccagacggggtggcggggcagaggcgctccccacatctcagacgatgggcggccgggcagagaagctcctcacttcctagatgggatggcggccgggaagaggcgctcctcacttcctagatgggatggcggccgggcagagacgctcctcactttccagactgggcagccaggcagaggggctcctcacgtcccagacgacggacggccaggcagagacgctcctcacttcccagacggggtggcggctgggcagaggctgcaatctcggcactttgggaggccaaggcaggcggctgggaggtggaggttgtagcgagccgagatcacgccactgcactccagcctgggcaccattgagcactgagtgaaccagactccgtctgcaatcctggcacctcggaaggccaaggctggcggatcactcgcggttaggagctggagaccagcccggccaacacagcgaaaccccgtctccaccaaaaaaaatacgaaaaccagtcaggtgtggtggcgcgcgcctgcaatcacaggcactcggcaggctgaggcaggagaatcaggcagggaggttgcagtgagccgagatggcagcagtacagtccagcttcggctcagcatcagagggagaccgtgg

SEQ ID NO: 4703 - DNA, 1652 bp, Artificial sequence
  DNA replication origin
ggcggagggcgcgggtctccggagacgtgattttggcgtcacaactgctagaaggcgcctcagttctctcctggcgacgtgtccggttgtcccacgtcaaggcgctaacttcggccacaggatcactgaggctcaacttgagaagaatctcagcccggctccactcgggcagtgggacctctccgattcacaggcgcgtggctcgggcccgcggattttcttagctgggtgacacgatgttgccagcggcagcccgggactcctgcgccggagtttcatgcaacaatgtggcttattgaggggctgccggcccgcgggcctccggatcagtgacgtgcgcacgcccattggctgcgcggggagggtgtgtgcgcccacggaccgcccgccgccgtggcgcagccaatcatcgctcacggctcgcgggcgcggccgctcagacaccggagccggcagcctggggaggcgcgccgggggcggggggcgggggaggggcggggcgcctgagatgggacgtgtggtccgtggctaaaggctgggacggaaaggcgcatgagccaccgccgcgtcaggctcggctatgggtggggggagcgtgatcgcggacccggggtgtggggcgactggaaaaacgggcctctggaccagcacacgccctgtgcggagagacactgtctggcatctcgggatcatgtgaggggctcccactgcccagtcacacgtctaaagcatcctagttcttacctattgtagcacggccggaaagtgagccgccttagctgctgattgtactagagcaggcaatacaagagtcggcccatcctcaaaaccactgataggatgtgagtttcactaaccccgttttacagatgaggaaattgaggcaaggccagggctcacacctgtaatcccagcactttgggagtccaaggttggagggttgcttgagaccaggagttcatgaccagcctgggcgacatagtgagacccccatcttcccaaataaaaataaataaatcagccggacatggtggcatgtgcctgtagtccctgctgctcagaaggctaaggtggaaggatagcttgagcccaggagttcgaggctgcagtgagctatgatcataccactgtactccagcctaggtgacagagggagaccctgtctcaaaaagaaaagagacttacacgaggtcacatagctaataagtggcagatagggaagagaacccttgtccctctactttaaggccctattcgcttgccccattatcccatgctgcctctctaagagccagagaagtaggaggtagaaaaagagcatctctgcagctctgggactgatgatgtgaatgaactgggtagatggtaagtgtgtaactgggtgatcttggacatgggatggggtgggtgaggaggcttaccaatgctgagaggagtggaagctccaaccccagctaatgctagacaccagactccaaatttaaacacacagtggaaactggcaagaatgaaatactgacttcaatacagatttcaagagacatgacattagcactggtggagaatggcaagcctaaggttggaaaaggttcagggaaggaagatgaaggtctgccatgttctactgaggaggagtttttcaaacagtgggg

SEQ ID NO: 4704 - DNA, 1125 bp, Artificial sequence
  DNA replication origin
tgacccgggaaggagtaggaaaggggcagaggaactccgcccgccgcgccccctccccggaactgtggcgcccggaactgaggctcggcgaggggcgtcccccattaacccccgcccctccaaatcagcctcgggaccgcccagcctcgtgtcctcaggatctgcctctgagtaaggggaggactttggttgttactttctggtttgccctaaaagttactcggagaggccaacgcgccgcgttcctggattacttgagattcttgagatttatgtccttccgaaaacgagcttttttttccttaagcctcgacctgtctgttcccacctggctccgcagctccctatggctgagcgctcaccgcggccgggtcatttacataagaaagagcctcaggccaagccgggaagctctcattccccgcctcggggtatgggggtggggatggggccggggccggggacgggcagggccaggggcgcgctcagaattgagtttctgaaatgcccgggattaggggattggctcctggcccgggcctgggctacgatttgaggtaggggacaagttgggaggggattagctggagggaggttgttttaagagctgtgaggcaacggagcgttgctcagttacatacttggaatttcaatatctgatgggaacacatttttgggaaaatgtcttgccattaccgttctgtgcgacaacctgctcatattcccattctggcggtcccgagggcataggaggcatattaatgtagtgatggcgcgtgaacctccaagaaaagcagaagttacccagcctcaagtctggaggagcgagcagaggcggttgatttacttgggttttactgtttgtaaatggctgttattctctaattcctgggatgtggctctgcaccttgattcagtttacttaaaaacgtgcctttgatttgagctggcaggatcttggtaacttctcaacttctaagaactcttggggaaggctatcatctcttggcaagtcctaaaatacacagtggagcgtcattaatctcagggagttctcctttgggtattaccccaggacatttgaatccttgcataaatttactcttcctcaatccagaggagggc

SEQ ID NO: 4705 - DNA, 832 bp, Artificial sequence
  DNA replication origin
catgtgcgttagtgcataatgcattggtgagatattcaaccaagctggtcagggaagcttcctggaggaggaattgcatggctaagccctgatatacaagttggaggtaggcaggtgagttgggcactatagggaggggagggagcaagtgcaaaggcatgggggaggagcctggcatgaggcaggtactaagatgccattagaactgaaaaggacatggctgtgtgaagaagtgccacaagacttggctggaaaggaagacagaagcaaatcacaaagggccttttatgacagactggagagttgtgatttattttgaagttggtggaaaaccatgaggtggttttaaacagagaatgaacatggtcagatacttgtgctctggcaatagtggagcatggatggaggtggaaaagtccagaggcagtgagcctttggggtgctctgcgggcctggcaggaagtggcgctggcctgagtgagggctgtggcaggatggatggatgatatgaggggagagattcaggaagcactgtggcttgggggaagagctggtggacttggctgtggatggcagaatttacctgaatttctggcctgggtgaatgggggagtgaaggtgactgtcactagtgtggggacccagggaagaggaacaggcttgtcgggcaaagttggtagattgccttttggatatgttgactttgagggccagcagttagatgtctgtatctggatttgggctggtattagatttgggagtcctcatgtgtccaaaaaccataagaagacaagcggatgcaagatggccatgagaagagaggaggtccaca

SEQ ID NO: 4706 - DNA, 1220 bp, Artificial sequence
  DNA replication origin
aagcgggtggaggaggggggagatcgaaggaaatgagacaaccttttcctcccactgactcgggctcctgcagcttctgcggggcttggcgccgccgtccgtgagcacccaggccgggaccccacatccccaggccagccctgaccccggcggcccctccgccgggattcctttccgaggtactggtgccggcccaagacccgggcagcgctttgtcgtgtccgcccctcagtgatcagctccgggtccccctgctcggccccgcgcgccccaagcgcagtccccggaagtgcgcgccggggccccagcaaaggtaagaggtgcccgagagcgctccctgaactctgggggcgcccggcatccccagcgggctccggcttctccgaagcgccctcttttcggaaacacccagagcacttctgacctgaagcagctgctttgttcccaagtccctgcccaggtgttgtaggctgggtcccacagggaactctgcttcccagcgctttcttttttgcctcctcttcctcccactttcctgtttcttctctcgccccccctgcttctttctggatagaacaactctcaactccctgcctctgcagcccagcttcggaaagcaggtcgttcccaaatctagcgcttctctcctgtgcctctgggagctgggctgagcctgactggcttctatcccaagcctgcgcggggcggacctgccagaaatgtacgtgctgcaccgtggactatttacctggtttgtttcggaggcagccaactcgccgcgcgcatttggcgacccccaggaccccgaaagccgagtgcatcagggagtgaaaggctgttggcgccccctaaagtcccagtgggacgctttgcttttggagaggggcgcgcagacagtccacgctgctctatctgggaggtctgcgtgggggtccccacccctactattgaggggtaaggggaggtgttggcacgcagtacggagcgcgttgggacatggaggaaatgaggatgtcctggaaggagaggagtgccaaccacatcgtgctggcttgccatgttgttcttattaactgcctgagttctcataacaagcctgtgtgtagggactcttacccctattttacaaacgggcaaaatgagatggggccacacagctagctaggaaagggcccagccaggatttgggtcctagctggtctataccacacatacacttc

SEQ ID NO: 4707 - DNA, 917 bp, Artificial sequence
  DNA replication origin
cctcacctgtaacatgaagataatggcagggtcccaactctgtgcagggacaggatgagaggtgggagggaagacggacttcagatgatggtgattactgattgatctgtcccagcagcagtagggaggatgaaggagctaagtcagagaggaatggatgctagagaggctacagaggcagggcaggctgtgagcagaggggagacatgaggcactggagaggggctggtaccacgaagatggttggaggatggtggtgggagatggttggaggatggtggtgggagatggttggaggatggtgatgggagatggttggagggtgatggtgggacatgatggaggatggtggttggagattattggagggtggtagtgggagatggttggaggatggtggtgggagatggttgaaggatggtggtgggagatggttggagggtgatggtgggagatggttggagggtgatggtgggagatgatggaggatggtggtgggaaatggttggaggatggtggtgggagatggttggagggtgatggtgggagatggttggagggtgatggtgggagatgatggaggatggtggtgggagatggttggaggatggtggtgggagatggtgggagatggttggagggtgatggtgggagatgatggaggatggtggtgggagatggttggaggatggtggtaggagatggttggaggatggtggtgggggatggttggagggtgatggtgggagatgatggaggatggtggtgggagatggttggaggatggtggtgggagatgactggaggatggtggtgggagatggttggaggatggtggtgggagatggttggaggacggtggtggtaaagtaggggatctatcttctccttctcctcttctgtccttcaaagcctca

SEQ ID NO: 4708 - DNA, 854 bp, Artificial sequence
  DNA replication origin
gggagaacatttgggagctactgtatttgttaaagtggtgaggtctgagctgaggcagaagcagcagaaactaagaggaagggagggaatccaaggatgctgatgatgtgaggggtaagagacagaggcagcagctatgacagctctcagggttctggcttgggcccttgggtgtaagagtgtgaccattcactaggacatggaacacaggagcagaagagcctttgtaggtctggaggagcttcagaaaggcacttcattctctccccttctccgcggcctcatctctaaactgcaagtcatgcctcagctgtgcagggtaggaccccgtcccactgtgctgagttagaaatgcgagggctacggttgataactgaagaaatgtgaacagttgagaagtagaacaattgatagagaagatttaataatggaatgtgttctgttaagtgaatataccccaagccagagacaccctttgtagttctgacaccactaatcggcattcataagtcattgcccaccctgggtagaagatccggtctccctcacctgtaacatgaagataatggcagggtcccaactctgtgcagggacaggatgagaggtgggagggaagacggacttcagatgatggtgattactgattgatctgtcccagcagcagtagggaggatgaaggagctaagtcagagaggaatggatgctagagaggctacagaggcagggcaggctgtgagcagaggggagacatgaggcactggagaggggctggtaccacgaagatggttggaggatggtggtgggagatggttggaggatggtggtgggagatggttggaggatggtgatgggag

SEQ ID NO: 4709 - DNA, 1041 bp, Artificial sequence
  DNA replication origin
ctgcggccctccgccgtgtttgtgtccctgggtacttgagattagggagtggtgatgactcttaacgagcatgctgccttcaagcatctgttgaacaaagcatatcttgcaccgcccttaatccatttaaccctgagtggacacagcacatgttttagagagcacagggttgggggtaaggtcaccgatcaccaggatcccaaggcagaagaatttttcttagtacagaacaaaatgaaaagtctcccatgtctacttctttctacacagacaccgcaaccatccgatttctcaatcttttccccacctttcccccctttccattccacaaaaccgccattgtcatcatggcccgttctcagtgagctgctgggtacccctcccagatggggtggtggccgggcagaggcgctcctcacaccccagacggggcggtgggacagaggcgctccccacatctcagacgatgggcggccgggcagagacgctcctcacttcctagatgggatggcggcagggaagaggcactcctcacttcctagatgggatggcggccgggcagagacgctcctcactttccagactgggcagccaggcagaggggctcctcacatcccagacgatgggcggccaggcagagacactcctcacttcccagacggcgtggcggccgggcagaggctgcaatctcggcactttgggaggccaaggcaggtggctgggaggtggaggttcacgccactgcactccagcctgggcaccattgagcactgagtgaacgagactccgtctgcaatcccggcacctcgggaggctgaggctggcggatcacccgcggttaggagctggagaccagcccggccaacacagcgaaaccccgtctccaccaaaaaaatacgaaaaccagtctggtgtggcggcgcgcacctgcaatcgcaggcactcggcaggctgaggcaggagaatcaggcagggaggttgcagtcagccgagatggcagcagtacagtccagcttcggctctgcatcagagggagaccgt

SEQ ID NO: 4710 - DNA, 921 bp, Artificial sequence
  DNA replication origin
tgttggccgggctggtctccagctcctaaccgcgggtgatccgccagcctcagcctcccgaggtgccgggattgcagacggagtctcgttcactcagtgctcaatggtgcccaggctggagtgcagtggcgtgaacctccacctcccagccacctgccttggcctcccaaagtgccgagattgcagcctctgcccggccgccacgccgtctgggaagtgaggagtgtctctgcctggccgcccatcgtctgggatgtgaggagcccctctgcctggctgcccagtctggaaagtgaggagcgtctctgcccggccgccatcccatctaggaagtgaggagtgcctcttccctgccgccatcccatctaggaagtgaggagcgtctctgcccggccgcccatcgtctgagatgtggggagcgcctctgtcccaccgccccgtctggggtgtgaggagcgcctctgcccggccaccaccccatctgggaggggtacccagcagctcactgagaacgggccatgatgacaatggcggttttgtggaatggaaaggggggaaaggtggggaaaagattgagaaatcggatggttgcggtgtctgtgtagaaagaagtagacatgggagacttttcattttgttctgtactaagaaaaattcttctgccttgggatcctggtgatcggtgaccttacccccaaccctgtgctctctaaaacatgtgctgtgtccactcagggttaaatggattaagggcggtgcaagatatgctttgttcaacagatgcttgaaggcagcatgctcgttaagagtcatcaccactccctaatctcaagtacccagggacacaaacacggcggagggccgcagggtcctctgcctaggaaaaccagagacctttgttcacttgtttatctgctgacc

SEQ ID NO: 4711 - DNA, 1070 bp, Artificial sequence
  DNA replication origin
atttgggataaagagaaaggagcattaaccttgactatgcctttagctccagccacctttttaagagtaaattgctgggcaggagggggagggctagtcacggaacgaaactgtaagccggaccaggtgtgaggaggggaggtgataaaaagattatagggtggaggagcagaggctgaggaagaattgggacctagcttggcctggcaaggagcagccttgggaggaagggagaggtcagatgggtctgtagaaaaggaagattagaaagactcagcgacgcttggggttggtactgaggggacaggcggaagggaaagaaggaagatttgggatgagttgcactgggcacagagactaggaaaggactgatgtgtaaaagaatgcctggacatcaggcacctcagaccgtttgcctattttacgacaagaattatttagatcttgcaggatggaaaaattcaaagtgccattttctggctatttggaactgctgtcgagtttgtactggggtcaagcggcattgcacaagaaaataagccatttaggttttaggtcaggtgtgagttgaagaggttttaagtttttgagaacacaggccaagggagtagaaggaggaatggagggtggaacgttgcccgtagtgaaggaagcaagcctagagaaaagagagagtagagaaacagagggaaggggttcgggcattcttaccttccagaaaagtgggaaaaggggttggggtgcagagataagaggttggggcagggaaataagggatggggcgcagaaataagaggttggggcatggtattaagggactggggtgcagagatataagaggttggggcacggaaataagggattggggcacagagatgcgaggttgtggcacggaaataagggattggggcacagagatgttggggcatggaaataagggattgggggttcttgccccgtagaaaagcgggacttgccgctaagggtgaaggagaaggggttgaggggtacttgcccctgccccagaaaagcagagaaggggtagagacaaggagagaaggggttgaggg

SEQ ID NO: 4712 - DNA, 1023 bp, Artificial sequence
  DNA replication origin
gataaagaaaaaggagcattaaccttgactatgcctttagcaccagccacctttttaagagtaaattgctgggcaggacggggagggctagtcacggaacgaaactgtaagccagaccaggtgtgaggaggggaggtgataaaaagattatagggtggaggagcagaggcggaggaagaattgggacctagctcagcctggcgaggagcagcctggggagcaagggagaggtcaggtgggtctgtagaaaaggaagataacaaagactcagcgatgcttggggttagtactgaggggacagatgggagggaaagaaggaagatttgggatgagttgcactgggcacagagactaggaagggactgatgtgtaaaagaatgcctggacatcaggcacctcagaccgtttgcctattttacgacaagaattatttagatattgcaggatggaaaaattcaaagtgccattttctggctatttggaactactgtcgagtttgtattggggtcaagcggcattgcagaagaaaataaggcatttaggttttaggtcaggtgtgagttgaagaggttttaagtttttgagaacacaggccaggggagtagaaggaggaatggagggtggaaggttcccatagtgaaggaagcaagcctagagaaaagagagagtagagaaacagagggaaggggttcgggggttcttaccttccagaaaagtgggaaaaggggttggggcacagagataagaggtcagggcatggaaataagggatggggcgcagaaataagaggtcggggcacggaaataagggattggggcacagagatacgaggttggggcgcggaaataagggattggggcacagagatataagaggttggggcgtggaaataagggattggggtgcagagatatgaggttggggtacttgtccctcctctagaaaagtgggacttggtaagagtgaaggagaaggggttgaggggtacttgccccctcccagaaaagcagagaaggggtagag

SEQ ID NO: 4713 - DNA, 1597 bp, Artificial sequence
  DNA replication origin
attgtacaccttgaaggcgaggttaattaaatcctgttgtggggtttgagggtcggaatttaatttttggagttttatttaatgtcgggagcagattgggtaataaaatgtattttgagaataagacagccttttgaccttttagggcctagggctgtaaagtgtctcagggttgctgtcaaacgagtcatgaactgggctgaatttttatatttgatgaaaaagagcctaaacgctctctgatttgggataaagaaaaaggagcattaaccttgactatgcctttagctccagccacctttttaagagtaaattgctgggcaggtgggagagggctagtcactgaataaaaactgtaagttggaccaggtgtgaggaggggaggtgataaaaagattacagggtggaggagcggaggctgaggaagaattgggacctggctcagcctggcgaggaggggagaggtcagatgggtctgtataaaaggaagattagaaagacccagcgacacttggggttgggactgaggggacaggagggagggaaagaaggaagatttgggacgagttgcattgggcacagagactaggaagggactgatgcgtgaaagaatgcctggatgtcaggcacctcagaccatttgcccattttatgacaagaattatttagatcttgtaggatggaaaaattgaaagtgccatttcctggctatttggaactactgtcgagtttgtattggggtcaagcagcattgcagaagaaaataagtcatttaagttttaggtcaggtgtgagttgaagaggttttaagtttttgagaacacaggctaagggagaagaaggaggaatggaaggtggaagcttacccatagtgaaggaggcaagcccagagaaaagagtagagacacggagaaggggtggggggttcttgccctccagaaaagcagagaaggggttggggcatggaaataagggattggggcacagagataagaggtcagggtgtggatgtaagggattggggctcagagataagaggttgggatggggaaataagcgactggggggttcttgccccctaggaaagcgggacttgccgctaagggtgaaggagaaggggttgaggggtacttgcccctgccccaggaaagcgggacttgccactaagggtgaaggagaaggggttgagggtttcttgcccctcccccaggaaagcgggacttgccgctaagggtgaaggaccaaggcaggcgtccctgtatggtgtgacagctttgaaacgtgggtgaacaatcagagaggcatccctgcaaagattaaacaccaagggaaggctgccttcccagtccgtgaccggtgcaggagttttgggtccacagataaaacgtgtctcctttgtctctaccaaaggaattgaaaggaattgaaattaagagaagggagagattgaagtgtggcgccaagattgaaaggagaaagaggtggagggatagtgagggagcttggagaagagagtaaaaagaggccgcttaccagatttgaaattggtgacatgtttcttgggctggttggtctgaggacctgaggtcataggtgg

SEQ ID NO: 4714 - DNA, 1185 bp, Artificial sequence
  DNA replication origin
cttcggcagtcgatgcgaccgcgagcccctgagcagggggtggcgcccgtcagggaggctccggctgtactgtgcgggagcccaccacgcgggggcgctcgcgcatggcgggctgccggtcccgagccctgccccgcggggaggcggctgaggcctggcgagaattcaagcgcggcgcgggcgggctggcagtgctgggggacccggcgcaccctctgcagctgctggcctgggtgctaagcccctcactgaccggggccggcggggctggccggccgatccgaatgcggggcccgctgagcccgcgcccaccgggagctcgcgctggcctgcgagcgccgcgcgcacagccccggttcccgcccgcgccgctccctccacacctcccaataagcagagggagccggctccggcctccgccagcccaaagaggggctcccacagtgcagcggcggcctgaagggctcctcaagcacggccagagtgggcgccaaggccgaagaggggcccagcgcgagtgagggctgctagcacgctgtcacctctcaccagcacatcaagggaaatgtggtcttcaggagaagacagaggagtggagagtcatatggtaagtagcaaccaggaatgagcacacaaagaggatataacttcagaggagttaaaagagatttcccagatgaaatggcatttacactggtaccttgacaatcaattgtctttatcctgatgaagaaggaatgataaagccttttttaaaaataagacaaaatatttgcagatgtgcagattgtgtatctgatggattccaattagtaggactgaaagagaaaagggaagactgaaagaggaaagggtgagaggtgaaacttagatagcagataggacccacataattcgttttatatggtacgtcaacaaaagctgggctttatttgtaaggcacgatgacatgggcatgaaatggtcagatttttatttcataaaaatcagtttagctagattgtggcgatgatgatgcagaagtttgagttggaggaacaaacctgaagcccattaaaatactgcaaacaagagatgataccaccagatagggaaagtcttgacagatgttaggagaagagaagcaacagaacctgctgttcggttagatgagggatggcctgtgggggagggggagggaagaca

SEQ ID NO: 4715 - DNA, 1036 bp, Artificial sequence
  DNA replication origin
tgtgagttagggacgagagggaaggtagatcttggaacccggtaaagcggtaaagcaaggctgctctatcccccggcgatggcaagggcaccgatgcggagacgttggctggaggcggagcgcaccccatgctcccctagcagcatgggcacgggaccagcaaccggacctgtccagggacctggacgcagagcgggcgggacacgaggaggcctaggactgctgcgacatcacaaggagatttggagccggtgtcgggcatatgacatgggggtgttccggggccccgaggcgcggagaagggcgcgggaggctcagaggggagccagtgcctctgtggaaggacagagagcggccctgatctccgcgtctcaggtgtcttgagtgacagctggcggcggagtgctgtgagccggagggcagggtaaacagcagcgcgtctgaggggaggcaggtggatccttggccgccttccctgagaagggaggggcaggcattttgcttaagtgacaaggtgtggagggctgcggggcggggactcagcgcctcggagtcccggatatggtcttgacagtcgtcaaggtcatttcttagtgagttgcggcaggtagtggctgacaccgggactctagctagcctcggcggctaagaagagtggggaaaccagtgcctttggccctgaggaggtgcgggttctatggggccggaatggaaacaaagggtctttagagacctggggagcagaatatggggtggggcttagagaagcacagggtagcctcttggggctcggagagatggaaacttggggaattcagaagagaattggtcaagtgcagcagagtccttctagggcgcttagagccacagaatggaccgccgagtttcaggatcccctctggtggccgtttggtaaagcgcagaaatagttccaatgcttaaatgttaagaggcaaataacctttttagaaagagactgggggacaaacagaaaaaagaacaacgatacaggacaaaagatatgaagactggccgg

SEQ ID NO: 4716 - DNA, 1100 bp, Artificial sequence
  DNA replication origin
agcaaattgggtaataaaatgtattttgagaataagatggccttttgactttttagggtctaaggctgtaaagcgtctcagggttgctgctgaacaagccatgaactgggctggatttttatagttgatgaaaaagagcctaaacgctatctgatttgggataaagaaaaaggagcattaaccttgactatgcctttagctccaggcacctttttaagagtaaattgctgggcaggtgggggagggctagtcaccgaacgaaactgtaagccggaccaggtgtgaggaggggaggtgataaaaggattatagggtggaggagcagaggctgaggaagaattgggacctagctccgcctggcaaggagcagcctggggaggaggagagaggtcagatgggtctgtagaaaaggaagattagaaagactcagtgatgcttggggttgggactgaggggacaggcgggagggaaaggaggaagatttgggatgagttgcactgggcacagagactaggaagggactgacatgtgaaagaatgcctggacatcaggcacctcagaccgtttgcctattttatgacaagaattatttagatcttgcaggatggaaaaattgaaagtgctgttttctggctatttggaactactgttgagtttgtattggtgtcaagcagcattgcagaagaaaataagatgcttagattttaggtcaggtgagagttaaagaggttttaagttcttaagaacacaggctaagggagaagaaggaggaatggagggtggaagtttgcccacagtgaaggaagcaagcctagagaaaagagagagtagagacacggagggaaggggtttgggggttcttaccatcgagaaaagtgggaaaggggtcggggcacagagatacaaggtcagggcacagaaataagggatcagagcacagagatatgaggtcagggcacagaaataagggattggagcacagagataagaggtcagggcacagaaataagggattggggtgcagagatatgaggttgtggtacttgcccctccccccagaaaagtgggacttgccgctaagggtgaaggagaaggggttg

SEQ ID NO: 4717 - DNA, 1028 bp, Artificial sequence
  DNA replication origin
tgtcaggaccttgggtgatttctgaaagtttttcatagtttaccactttatgggcaccccttttgagtcctgcaaggagacacataattatgtggtcttgatggcgccatccagaggccccatcttaataatcccagtgggggtcctggctggggactgcctctgtgccagtagacagggcaggagcttggtgatgaattgtattagcatgtgcctgagctagggtccagatacggtccggtcctggtcttctggggtgagggtggaagagaggataaagtagaggtcatgccaggttagtttataagacttggtaaggtactgaaactctctaatataaaaggtagtgtcttctggaaatgaaccgagtcttttgttaatttgagagacattagtgagggaaaagggaacatgaactctaacaataccttcagttcctgccacttcccaaagggggcattctagcgcaggcgccgaagtaagggtagggtatgggccaaagatggtgcctgaacaaatatgggtgggagagaagaaagaagccagaagtggttcctgctcagggtttgaaggggaaggggggttgagttgacaggcagtggacgatagataggggcataatgtggtgggatggttttacaggcttcaggagagcggagtgaagaaggagaattagtacagacagtgctagagttgtcttgaggagaggatgttgtaggaaaagaagtgggtacttttggaggtgatgccagctgggaagatggtggctgagaagacaacaaggaggtttggagggttaaagaagacagttgagaggaagaggtactggctgggaggggtgaacagcagtcagctggatagaatgaggaaaaagagagagggtcgggggagaaaggtgatcagggcggcaagaatggaggggaaggatttgaacaggtaagcaaggattgcagaggtcgggtagtgatctgagtgcacaaaggcctggacataaggaatttttccccatttttccagtcgtcggcaat

SEQ ID NO: 4718 - DNA, 1628 bp, Artificial sequence
  DNA replication origin
tggagaggcggcggcagggacaagggcagcagctgctgcagccgcctctggccgaggtgcggtgccgcctgctctgcccgcccgcctgggtctccgcctcactcggggctggaagcgaagccgctcccccctccccccgcccgccccgcgtcctgcccaagcgcgagcggcagcggcccggatcgccgctaggggaggcagccagtgcgcatgcgcggccgcttgctcgctcgcgcgcccccgcggtccccgtggctccgcggcgcctggaaaggcaccgggcatcgaggggtggctgggtggggggccgcgggcgcgcgcggcctggggagcgcccgaaagggcggggcggggtagggcggagctctggaggcgcggcaggctcggcgccgcaggtggggggaggggacggcggcgaaggggcaccgccgtagggcgcaggtgccgtgtccatgacaaccgcgttaccctgcgggcggggacccggagctgaatcgccggagtcgcgaggcccggggagagggaccgggtgcgggagcgggcaggataggggcgggggggataggggtgtcgcagagtaggaaaggagggccagcccagcaggggtccgacacgtggcaggaggagggcagggccagagtgctgcaaaggtagtgactgccgcggaagggaggtttgttgggatgtggagtcccgaggggagaggaagggagatttggactttaaaagaacctagaagaggatggaattgttaaaacaactggaatatttgctcatttaacaagcctttgttgaatattttctccgtggaaggcattgtgattcttttcttgattcagtggatattacttggctcctagtttgtaccagacactgtacttaggcattttgagatatccaaaaatgttcgtcctctgagaggttatactgtagttggggaacttacatagctagggcagggagtgtttgcgccgccagccatcggcagctgggactcgatgttgctggaatgtaactgttacagaggtgctaacagtgaaaaaggtacacagctacatcagatgagaaatataagttacagtcatctttgttctgccacagtgccaaatgacaattttgttttgttttaaatcaagagagagaaacaaaaagaaaatctgtggaagtttagtatgacacaaccgacgctaagttcacaacatgctacctgtttggtatcctagtccactagcatcagtgcgtgtgttcatgccgacacttggatggctttatgtcacttagtgcatgcattttttaaattctccttcatcaatggctatgccattgatatttttccctccccccttttgcttccaagttcgcgtctgcaattgtttgaaaattacataaaatcctactatttttaattctctctagggaatgactggagagggatacctctgtccatgcctctatctttctctcccaatatctttttggctttcttttttcttgtccccaccactttaccaatttaaaaattcctgggaaaaagtgaacaggagtcaccggatattggcttaagaagaatcttagcacgcaaccatgtttcaggaccacggacagtgacaccgcgtgctcttaccacc

SEQ ID NO: 4719 - DNA, 1071 bp, Artificial sequence
  DNA replication origin
cagctccgggtccccgcccgcagggtaacgcggttgtcatggacacggcacctgcgccctacggcggtgccccttcgccgccgtcccctccccccacctgcggcgccgagcctgccgcgcctccagagctccgccctaccccgccccgccctttcgggcgctccccaggccgcgcgcgcccgcggccccccacccagccacccctcgatgcccggtgcctttccaggcgccgcggagccacggggaccgcgggggcgcgcgagcgagcaagcggccgcgcatgcgcactggctgcctcccctagcggcgatccgggccgctgccgctcgcgcttgggcaggacgcggggcgggcggggggaggggggagcggcttcgcttccagccccgagtgaggcggagacccaggcgggcgggcagagcaggcggcaccgcacctcggccagaggcggctgcagcagctgctgcccttgtccctgccgccgcctctccagtcccttctgtgattaccactccagctgctgggaacgggcgagaaagaggaggaggcgagaaactcccaccgacccacagaggtgagtcccgggcagagcatcctccatccctgcctgcctccctccctccccacctccctcccatcctctccatcctcccccctccccgctccccaaccctccctccctcatccttcccaacatccctctctcctctcccctcctttctcccttccagcctttctttcatccctttcttcctctctcccagccccacttccttcccaccctttctttcttccccgtcttccttgcagccactcgccctagagcacagctctgcatccctttcctcttgtctccatctcttcttcccccctttcttacctcttccccggtgggagggtgggagcatcccttgcctgctacaactgtccggattcaggggttccagaaaattgggtgcatatactgagagacacactcttaaacagcgggtgccctgcagattcctaaatttttaggatgaagggtcaagttgggtagagtactgggaactggagggagaagaggatcga

SEQ ID NO: 4720 - DNA, 949 bp, Artificial sequence
  DNA replication origin
aggccctgtctgggctggctgaggccggagccggctccctctgcttgcagggaagtgtggagggaaaggcgcaggcgggaaccggggttgtgggaggtgctcacaggccagtgcgagttccaggtgggtgcaggctcagcgcgccctgtactcggagcggccccgggcagtgagaggcttagcacccgggccagcagctgcagagggtgcactgggtcccccagcactgctggcccgcccgtgctgcgctggaattctcacccagcctcagccgcctccacacagggcagggctggggacctgcagcctgccatgcccgagccccccgccccaaggtgggctcccgcagggccgagcccccgccaatgggctccgctccctgctccacggcacccggtcccatcaactgtccaagggctgacgagtgcgggcacaaggcgcaggactggcaggcagctctgcccacggcccctgcacgggatccactaggtgaagccaacagggctcctgagatgggtggggacatggagaacttttatgtccagctggaggattgtatatgcaccaatcagcactctgtgtctagctcagggtttgtggatgcaccaatcagcactctgtatctagctgatctggtggggacttggagaacttttatgtctagctggaggattgtaaattcaccaatcaacactctgtgtctagctaaaggtttgtaaaagcaccaatcagcactctgtcaaaatggaccaatcagctctctgtaaaacggatcaatcggctctctgtaaaatggaccaatcagtaggatgtgggtggggacagataagggaataaaagcaggctgcctgcaccagtagtggcaacccgtgggggtcaccttccatcctggaggacatgtgttgttttgctcttcacaataaatcttgctgctgctcactctttgggt

SEQ ID NO: 4721 - DNA, 1169 bp, Artificial sequence
  DNA replication origin
ggcgggccagcagagttgggggaccctgcgcaccctccgcagctgctggcccgggtgctaagcccctcactgcccaggcaggcggggcgccagctggccgctctgagtgcggcgcccgccgagcctacgcccacccggaactcgcgctggctcgcgagcgccgcgcgctgcccgggttcccatccgcgcctctccctccacacctcccagcaagcagagggagccggctctggcctccgccagcccagagaggcttccacagtgcagcggcgggctgaagggctcctcaagcgcggccagagtggacgccgaggccgaggaggcgcggagagcgagcgagggctgctagcccatgcaatggactccatgaaggttcttatgctttaatgctttatttttgtgtggttgcctcctgccaggaggtggcgctttccagaaagcatcagctagtatagagagggactagaggtgggcagggctctagtactccgaagattatatgccctttgtcttccgctaccagggtggataaggaaggaccatttggcaagggcagagctaggcatgtctgagctcagactctccttaggggggtcttgctgcagctgctgtgggggatggggtgagattcccaggtcactggagttgtgtgcctaggaggattatggctgcctttgctgagtcatgccggttatcaggaaagtaggggaaagccagaagtcacaggcttcacccagctcccatacaaaacgaagggccggtctcactcccaccatgcccccaccaatagctccgagtctgtttccaggtcgagggtgtgatgggcttgaaaacttgccgcgggttacccacctccagctgccagagaaaagggcttagttcttcccctgcctgtggagtctgcacaccagatttgagccctccctcgagttctggccaggagacttctcaccctgttcaaagtgttacaaagttcagctagagatttccttctccctgtgaagtatactccacgctcctttgatcacccacctgatggatctctgtggtgccaggaaggaatgtccctagcaaggggacatagcgagctcccagggcgtttctgctgcttcctctacccctgcatttcagctctcaaaattggctcagctccaggtaaggtcggaaac

SEQ ID NO: 4722 - DNA, 1189 bp, Artificial sequence
  DNA replication origin
aacttttttctattattgtacaccttgaaggagaggttaattaagtcctgttgtggggtttgagggccggaatttaatttttggagttttatttaatgtcgggagcagattgggtgataaaatgtatattgagactaagacagccttttgaccttttagggtctagggctgtaaagcgtatcaggtttgctgccgaatgagccatgaactgggctgggtttttcatatttgatgaaagagcctacatgctcactgatttgggagaggtctgataaagaaaaaggagcatgaaccttgactatgcctttagcttcagccacctttttaagaggaaattgctgggcaggtgggggagggctactcacggaatgaaactgtaaaccagactgggtgtgaggaggggaggtgataaaaagattatagggtggaggagcaggccgaggaagaattgggacctagctcggcctggcgaggagcagcctggggaggaggggagaggtcagatgggtctgtagaaaaggaagattagaaagactcagcgacgcttggggttgggactgaggggacaggtgggagggaaagaaggaagatttgggatgagttgcattgggaacagagactagagagggaccgatgtgtgaaagaatgcctggacgtcaggcacctcagaccatttgcccattttacgacaagaattttttagatcttgtaggacagaaaaattgaaagtgctattttccagctatttggaactgtcgggtttgtattggggtcaagcggcattgcagaagaaaataagatgcttagattttaggtcaggtgaaagttgaagaggttttaagttcttaagaacacaggctaagggagaaggaggaatggaaggtggaagcttgcccatagtgaaggaggcaagcccagagaagagtagatacacggagaaggggtgggggggttcttgccctccagaaaagcagagaaggggtcagggcacagagatacgaggtcagggcacggaaataagggatcagggtgcagagatataagaggttggggcgtggaaataagggatcggggcacagagatacgaagttggggtacttgcctctcccccagaaaagcgggacttgctgctaagggtgaaggaccaaggcaggtgtccctgcgtggtctgacacctctgaaacctggg

SEQ ID NO: 4723 - DNA, 990 bp, Artificial sequence
  DNA replication origin
tcacttccccccaccccattctgactcagtgcttttccattcccagcttctctcaaccccacttcccctgccttgtcctgcaccagccccagggactataaatccgtagaagcctttttgttcagagcttttcaggcaaaaggtgagacaacctccacataagttgatctacctgattcttaaccattgtgctgtacaatggggaaaaatggaacagcgaggaattggtgaaaggcaatggaagggcaccgtggatcaataaggcccagaggcgagacaaagagggcaaaaatcttctttattgagctctcgggcgaggttcactggtccgcagggggagggccagggaagtcacgctgtgctacaggtgtggcacgcttatatggatgctgggtgaggaatgggtggggtaggggcggggtttgttgagtttcgcgcttctgagtgtgacgcgccctagtgggcatgcgcgttagtcagggtggcgggaacaggaaaaggtgaacccggaaatgctgagtcagggtacccggggtggctgtcgggaaggcgggaataaatggagggaataagcgaaaatgccaagtcagggtggccaagatggccactgggatggtgggaaccggcgaatctgggaatgccaagtcagggtagccaagatggttgctggtcgccatcttggagtcttcaccagagtccaatcagtccaacctctttttggttatagaaaaggggcaacgaaatcgtctggctacttcctgctgttaaggggcattgttggggagggggcctaaatagaggttggcagttggacataagggtgaagtaacatctggttgaaagtgaccctggtgatttcttgtatccactggcagaggaactgtactaggattggggcaaaacacattattatacagagaattataattgggataaggaaagggagcatctgttgaactacgggtgaaaaccaccaggaaggaccagggc

SEQ ID NO: 4724 - DNA, 1164 bp, Artificial sequence
  DNA replication origin
cccttctccctctggttcactcttcgcccttctgtgggactattctttccagtgtcctatattcaaaccctccgtggtttcatgttgttctttttcaaggtcattgtcttcacgcggaggtcttggcactcagaccctacccttccagcatggatctgctgcttgcttcagaagagcctccatcccgtccccgcctctcctttactgacgctacttcccccttctgaggagccctcctctcctccccttgaccgggaggatcccgcccctgcctgagtcagctctgttgcaggctcacgtctcctgcctctctccttcctgttctcctgcaggtctggaggagccagcccttaggggttctctgcgccctgcaggactgtgggtctttcctccctcactggcctctggtcccttctcagctcttcccgctgggctgactggcctggggttcaacgcactgtccttagggtgctggagagggccctacctggggagtgtgtacgtgtgtgtggtgtaatgtgtgtggagtatgtaatgtttgtgtttgtgtgtgtctggtgtgtggtgtgtgtgaggggtgtgttgtgtgtgatgtttgtgtgtagggtttgtgtggtgtgtatctagtgtggaatatgtgtggggtgtatgtgtgtgtgtgtagtgtgcatgtgtatggtgtgtgtgtggtgcatgtctggtatgtgtgttgtttggtacctgtgtgtgaggggtgtgtgtggtatgtggggtgtgtgtggtgtagtgtggatgtgtgtggaacatggctggtgtgtgcatgtgtgggtactgtgcatgtgtgtggtgcatgtttggtgtgtgtgttgtgtgtatgtgtgtggggtatgtgtgctgcatgtctgatgtgtgtgttgtgtacgtgtggggtttgcgttgtgttgtggtgtgtgtggtacgtgtgttgtgtgtgtacagtgtggtacgtgtggtgtgtatggtatgtgtggtgtgtgtattgtgtatgtgtgtggggtatgtgtggtgcatgtctgatgtgtgagttgtgtatgtgtggggtgtgcattgtggtatgtgtggtgtgtgtggtacgtgtgttttgtgtgtgtgtagtgtgtgtggtatgtgtggtgtgtgtggtgtgtgtgtgtgtgtgtgtgtgtg

SEQ ID NO: 4725 - DNA, 1263 bp, Artificial sequence
  DNA replication origin
gctctttgggaggccaaggagggcagatcacttgaggtcaggagtttgagaccagcctggccaacatggtgaaaccccgtctctactaaaaatacaaaaattagccggacatggtggcacgtgcctgtaataccagctacttgggaggctgaggcacaagaatcgcttgaacccgggaggcggaggttgcagtgagctgagattgcaccactgcactccagccggggcaacagagtgagatccgtctcaaaaaagaaaaaaaaaaaaaaaaaaaagctgcagtgacctgtgatcccaccgctgcacagagaccctgctaaaaaaaaaaaaagaaagaaaaagtatccactctatgcctcttctttatctcacctcagtttatgccaaggctattttatagatgaagaaactaaggaaaagatttgcccaaggtcacacaagcctatgctctcttcccactgttccaaactgaaggaacgtgagaaaagcaggtaaaatcaggaggggagaagcagggagtggtgctcaggcttgtaatcccagcactttgggaggttaaggcaggcagatggcttgagcccagaagttcgagaccagcctgggcaacatggtgaaatctcgtctctacaaaaagaacacaaaagatttgccgctagtggtggtgcacgcccgcagtcccaactgctcaggaggctgaggtggaagaatcacttgaaccggggaagtccaggctgccataagccgtgatcacaccactgcactccagcctgggtgacagagtgagaccctgtctcaaaaaaagtaaataaataaaatcaggaccgaatttaggatgtcaccaccaaatcccactttaaagagctcggtaatacttcacacttaaaaaaggaaaggtcaggacaaataaaagaatgaccagccttaactccggggctggtaatttatggaacttattacctaacggtgttgcacaggctgaaaatacaacttttctaagaaagatgtgaataattgcagtataccactcctacaatgggttaataagaaaaacaagaacgtttgtaggcatgtgggtctctattatcctcaaggttaacttcaaggaggaaaaccgcacccgctgatacagtgtttctaggagctcgacgagaaaaggcaaactgcgagccttctcgggacgccctgttcccaccacagcccttcacacaatgcgtctaacagcatttaaggaacacccgccacgccaacgatcctgctggaacc

SEQ ID NO: 4726 - DNA, 779 bp, Artificial sequence
  DNA replication origin
cgcgccaaggcgtgccgagcagccccaaggccgaggatctgggcgcgtcccgcacccctcttctcggtcccagggcgtggtcgccggcccctgcgtccggtccgagaagggcgcctgtcgcggttgcggcgcgcccgcccggtgcaccggatccgaccacaccctgggtgggccccccgccccggcgccgcactcaccgtgcagtctcgttccgagcccgagatcctggtgctcccactcgcgttgctgcagcaagaaacaaaagagcggcgcccgcccctagccttatatacgccgcgccccgccccgcccctcacccgccgcagcaggggcggtgctggcacccgaggggcgggagcagcgcgggctgctcctcgccctgccgcgccccccgctgggctaccagcccggctgggcgcggcttctcccgcgccgggcacccccagctcgcagtgtgcccagcgtgggggctgtagtcgccgccagagtgggcgccaggcccccggctttgcttttgcggctacatttccccctttccgggaatctgctgctcaccccgcagaaaggatatgggaccggcgtgggagggtgtgtggttttgtgcgtgtgcagatatgatgtgtagccgtgggtgtggatgtgcgggcgtgcacgcgcactctgcagcaatcctcgctctaggagacgccccaccccagtcgcccccaggcctcttgcttttgctcctccagagtccccttccctcccccacttttcctctccttagggaggctgagtcc

SEQ ID NO: 4727 - DNA, 1468 bp, Artificial sequence
  DNA replication origin
gtcaggcccccttgggctggtcctattccttccctgtgggtttgaggtgtcatcccttggagcttggccgccagcgccagcgccagcccacccttcctccctcccaccacatccccacccttcctgctgagcactgggtggtagcagatcagtctagcacttcctctaatggctaatgtttttgtgggaggttctgaactagggttaaaagacaaaagctcttcccccctcccctcccccagttctagtgttggttcttctagttctgacgttcccgttgctgtatccctagatcccgcctttgttttaagctcccgaagaaaggcttccggagactttgtgacctcacccaatttccaacattccagattgtcttttctttctttaaaatcagtgttcccttctgagtcagctaggaggaggccagagggaaacagtggggctttcgaagcttatcaaaagcaaaccttgctcttttgaaaaagcattttccaacgcaacctggggacaaagtggggttaaattttacacagattgcttacgagcaagagttaagtggctaacaagtcatgaaatcttacggagaagcaggtaaagccaaaattaaaaactccctccgagtcagcccattctgcgacccacctcctcccctttgcggcaggaactctactccatcgaggggctttgctgcagtggcactgcccacgcatactcaactaaaagactcagaccacgccagccatgccacgaggtgtgttttattttcattattcatacaaataattttctataatatcccggggcaaaccggagaatttggcagtccgattgggggggggtcccttcagagacccacaggccggtggcatcggcgcggagtgcccaggttcacagtgcagcttgtggctcgtgtccatcttgcaggtggctcttcctccacatcacgactggggtctcgaagaggacgggggtaggaaatcctccaggatcttaggaaatttcactccgcttctcctgctcaatggctgtggagagcgggaagcgggcgctggaggggagctgcaacccccacccgcaaccgaggtgcttcccggtgtgggcgaggcacccacgaggtgtggggatttagaaggaagcttggggctggggagaaacaaggcgctttgtgaaactgaaagagtggccggggccgcccacaccggggacaacggcggggtggggggtggaggagtgggtttgcaaggaagagcagggtgaggggctgggctggggcgcgggagaccgaggcacactcactctctttggtcggcagggtgttcttctcctgcgtctccgttttcttcagcttggccttatcgaagctggcgatttcccccatgtctggtttgtctgccattttcttaaaacaatcctagtgggcaaaccaaggcgcttgacctgggcctgggggccagcgtccccttccgcg

SEQ ID NO: 4728 - DNA, 1748 bp, Artificial sequence
  DNA replication origin
tatgactgggaagaggcattagggtgtgttcagtttgcaaagattcatccaactgtacagttctgtgtatttttctatatatatggtttttaaatttttgttttgtttttgagatggcgtctcactctgtcacccaggctggagtgcaatggcgcgatctcggctcactgtaacctccgcctcccgggttcaagcaattctcctgcctcagcctcctgagtagttgggattacaggcaccaaccaccatgcctggctaatttttgtattttaagtagagatggggtttcgccatgttggccaggctggtctcgaactcatgacctcagttatctgcccatcttggactcccaaagtgctgggattacaggtgtggccaccacacctggccaccatatatatgttataatacagtaaagagttaaaacaaagtcatgcatgagacaaatatttgatgtgtaggattgttctatgcatttcagaatgtcaaacatttctggtctctgcctatgaactgccaataatgtcccctaattattatgacaaccaaaccaaaacaaaatgtcctcacagatttttatattgctgaaccccaaagtgccttaaatttatactactcaagcctcatttcctgcactgggccctctgaagctcattgattgatatctgcataatattggtcttctattggccattgttcataggcagggtagaagaagatgatgtatgggtgttggtgttgatgtcgttattgttgttggtagtggtgatggtgatggtggtggtggtggtggtgatggtgaagatggtggtggtggtgatggtgaagatgttggcaatggcgatggtggaggtggtgatggtagtagtgatggtggcaatggtgatgatgataatggtagtggtggtgtgatggtggagatgatggtgatggtggcaatggtgatggtggtggcggcggcaatagggatggtggtggtggtggtgatggtgaaggtgttggcaatgctgatggtggaggtggtgatggtagtagtggtggtggtggcaatggtgatgatgataatagtagtggtggtgtgatggtggagatgatggtgatggtggcaatggtgatggtggtggtggtggcaatagggatggtggtggtgacgatggtggcaatggggacagggtggtgtggtgatagtggtgctgttgatggtgatgataaaggtggtggcaatggtcattggtgatggtgatggtagtggtgtggtggttgaggtgtgatggtggcaatggtgatggtagaggtggtgatggtagtagtgatggtagtgatggtggtggcaatggtgatgatgataatggtagtggtggtgtgatggtggaggtgatggtgatggttgcaatggtgatggtggtggtgatggcaatagggatggtggtggtaatgatggtggcaatggggatggggtggtgtggtcatagtggtgctgttgatggtgataaaggtggtggcaaggtcatggtgatggtaatggtagtggtgtggtggtggaggtgtgatggtggtaatggtgatgggtgctggtggcggcaatggtgatggcagtgatcacagtgatggtggtggcaatgatgatggttgtgatggcagtggtggttatggtgttaatggcagtgatggtggtggcagtggtggtagtggttgggtacgtagccatctgtatcagccacagcatcctccacatgctatcacataca

SEQ ID NO: 4729 - DNA, 1389 bp, Artificial sequence
  DNA replication origin
tcctcccctcccccggcccaccccccgcccctctcccccggctcccggccgccgcctcctcctcctcctcttcctcctcctccgcctccttccgccgcccgcacgccagccccgcctctcgctgccctcgccgggcccagccgcccggaggccccgcggccggcggtcgcgacgggggcgacgcggcgacggcggctcggggcgcggcgcttgcccgcgctagccagcaggccgcgatcgggcgcccgtgcccagcctcggcctggccgccgccgccgccgccgcgccgcgcgtagggaggaagaggaaatgcccggcgccggctcccgctgctcaccggcgcggcccgaggggcgcccgcccgccacgccgcccctagccccgcctggggcgggcctaggccgggctataggggccagggccttgggctgcgccggccgcgggaggtgggtgcttctcggcggcgagctgcgactcggagagactcctgtccgcaggtgcatggcttccgggcgggcctcgggcagcgagctccagccccactgagaggccgcggaccgcctggggacttgtgtttgtgtgtattttaagccaacagcccagaaagggaaggcgactggcccccggtcttcgccagtgtttcccggccgggttactggtggtcaggagggaagccaggaggctgccgggctccgaggccgattccttgcgaaccatctccgttaaagactccgcgccgggcagcccgggagtccggcggtacccgcgcaaactttgtcccagcgccttggctcaccgtgaatgccctgccttgaaaatttggagttttttgtttcctgaaagtggtctgcttttccgattttatctgtgttttccatttttaccttcttattgtcaatttgttttcaggcattattaattcaacaaatctttgtactgccccttaccacgtgtcgatggttccgtggtttggtggaaatagatcgcgctttgaagtcaagacggatcggccatggaattttggctctgagatcctctgtgtaaccgtggatgagctacaaggcctgctgagcctccatttgtctggtttttgtggttgttttaatttatctttttccatttgaagttgtgggttttgcataaaattgaactgttaccaggctaagtcaactgaaattggaatctggggtactgcttgctttgaggttactcttatactgtccaccatttgctggctgtgtgatctctaaacctctctgtgccctgacttttctatctttaaaatggacgtaacaacagaggtttaataataagaggtttggaggttaagtgctaaaatgcatataaaatacctagcacaggacacagtaaaaagattgttaccgtatt

SEQ ID NO: 4730 - DNA, 1063 bp, Artificial sequence
  DNA replication origin
gagggcggagagccgcggcgccgctgccgccacggccgcggcccttagctgggcctggtgctggaggcggggcggcccgggcggccggagggtttgcactgtcatggggcggagggggaggggaggcggcggggcccgttaccggcgggagctcggccttcgggactgataccggacgccaaggcccgcccggccggttcaggagccgcgggccccagcgcggcctagcgctcccgccgccccggaagagcccggtgtggtcgcagagccgggccgcgggcggcagcaggaggcaaaagagccggcccgggacccggcaggcgcgtccggtcgccgggagacgacggcgagtgtccccgcctgcgggcgaccgcggggctggcgggaaggctctgcggccaagggacgggaagccctcgccgcctggagcccgccccggcctcgcggctaggcctcggcgcgtccctgggctcgggtaaccaagttcccggggtggatccgaccccgccgcagcaagcaaactccctgctcagtcacccaggcggagcagggctcgctccccgcggccctggtgccctcgccggcatgtgctgcctaccagaccaggttttggaaaatgacgatggtgaggtctgttcatggtcgggggtcgttttggaccttgttttgccattttaaaacacgattggagtacagttgcaaataagcagacagctctaagcccagtcccagggcacaaagagacaaatgtttagggtcgatgtataggctttgagctggtaagaaataagttaactttaatttattgccatatggtttagaaaaggaggagggggttgtgttttctttgtttcactactacaggtttttggataaaaagtgttaagagtcttggcgaaaagtttgtcctgctaaggttaatacaagattgtagaagtggcttgaaagtttgtgtactccggattttaaaatcctgtataggtgatgtaggagtggagaaagtttagtgagtcagtttagtgtgtgcttagcactatgggaaggatattctttgggaaatacg

SEQ ID NO: 4731 - DNA, 882 bp, Artificial sequence
  DNA replication origin
cccaggctggtctcaaactcctgggctccagcgatcctcctgcctaggcctcgggagtagatggaactccaggcgcgggccgtggcgctcgcaccacaggcattacttaggtatgaggctggttgagcatttttctcgtgttcactggctactcacgcagctttgtgaatggcttcggagatcactggacaggcaattttccctctcaatgaaccaaatccaaattcttttggaacccaagaccgcgatttttcgatttaggacctagtcccaaacaatgaagaaaaggtgatcttcaagatttcagcagggaaatctgtatatctgtacaaggttgaaaacctgggccgggggtcgcgttggaaccccacaggaaaaaggcgcggaaagccgccgggcattttccggggttccatagatgtccccagtgtcctagtccgtgcatcagctcgcgcactcggagggactctaggcagggggagggccccgcggccagtatgtgcgtccgaggctttcccgcagggggcagtgccgcccgcccgcgcgccgatacggtgggagggggtgggaacctgcgcggagttctggaggttctttgggagaaagttaggggatgcggaggggtgggcgcaagacttccaggactccagggaggccgtggggagggccgccgagggtgcagtgtgaggcgcaggagggggttgggggcggtgcacgttgcagggagacgcagcccctggaagatgcgagtgtgaacgtgtgagtgtgagtgcgtgtgtatgtgtgtgtgtgcgcgcgcaccgcagctctccgggttccgcgaggcgcgcgggtgtcagcttgcagccggggctcctccctccggcccccctgcccagcccg

SEQ ID NO: 4732 - DNA, 1086 bp, Artificial sequence
  DNA replication origin
agttgaactactctctggcggccgagcgcgaggctgcgctggccagtgcctggatgaaagtaaagttactttaacttttcccctcttgcgggttgaggttttggagtccacctctgggatcttccttggcctccagaattcttcgcctgcaccgaaggaaacttggatttgtgcccgctttgggggggtctcgctttccttcttggaaatcggtcagctttctctggcagtggggcaaggggcctagggagctgggttggcgacgttgtcctccgactccgggttcactgggcggctgcaggctggttcctaagaaacccagttttcgtggcgggttattcacagcccccgttcccacccccagccctcgcaccggggcctcagcttttctgcggagctagctccgaattttaaactcgcgtagatgatttcgaggcgacccaaggcattcttcaagttgaggaacttggctttttcccccttttgtcgcctgcttttctcatttaaagcgagcgctgcgacactttaaacctgttaatgggcgcgtattgtgtgctgcccgctggcatttagagcggtgattaagcaaattgaccgggccccagacgacgtgcaaatgagggcggattccttcgccccctctctctggctctaaactcccgccccccgcgttgcgaggggcgcagctgggggctggcgaggcctttgtgtcccccaagccgccactccacccctaggctccctgcccaggtgctgggtccgatgacagatgttgggtgaacgcctacctactgtgtgccaggttcccgcgtgctgctgcttgggcgcgatgtgaatcgtagtagttctttgcttcccgcccagattcccattgcctgccacttcgctgtcgacggtgggtaagggggcagggagtgttagcctcttaggagcagggtcccagcaacacactttatgctaagactgccctaaaataacgacgataattaaagggtgctagagaaaggctaggtgctgaatggccattcctgctgtcattgtacagcggtcggtggagagccaagtcctccacatttggttcagcgg

SEQ ID NO: 4733 - DNA, 1323 bp, Artificial sequence
  DNA replication origin
tgcagtggtgcaatcacagctcacagttataacaaggatccttcactggatccttgttataactgtggcccctgattggagccctggtgactccgaggtctgcagtgcagccccctctcagcctgtcgcttgctgtctggggcttccacagtgtggagcagctgctcctttcctgggctacaggaaggctatgtacaacctgcacaggcatccacaggatcactcactctaagtggttcaacatgcttttccatcctcagaaaatgtcactatccatgtaccaactatttacaggagattgggttgggggcagtgttccctctgccccaagttgtggggagccagaaatacacatatattaaccctgggcttggagagtggagaagagagcatctcttcattctgcagctgtgtaaacagtggggttggggggtgggttgcaaagctaaggataatgggggagggaggaggggcatgaagaaggagggagggggctggtggggggctgccaaatcaggcagggtcagggaggagagggtaagaacaggaggcctaaagcggggttcgcgggctccctggctcttcacatatggaggacatgcctccgcagaagcgggaggcatgcaagcaaagtgtgagcggacaaagaggaaagtgacgcagggggaaggtgatgcgggcaggacccaacaggtggtggcattccaggcgaaggaggcttccgccctgggccgccagggtcagtgggaggaaaggctctccctgcctggctcagttgaagcagatgattattaggttcctgctgtatacccagagcagccctggcgcagtggcagcgagcgagggaggtggagattcagttgtgtaagacataggcactattcactaacagtccataagtgcatggggaagaaaggccagcacacagacgactccaggcttcggcactttgtgtcctgtgaagggttttggaggaaggggaggagccccgaagtcagggcaggcagcgggaggcgggcttaggagcttcagctggggcagggaaggccgttctccaggtactgggggaagggcacaagcaaacagagacacggagccttcagctgccttatctgcaaggaagatgactactcttttggggggattcagagcagcatcttatccggcacatggcacccgtggtaggaactgagtcatcccgcacagccggggccgtgattccttcattgattcttccttcaacgcttccttatggattgccttctgcctccagtcactgtcctaggagctgaggatggggcagaaaaccacacaggcaaagtc

SEQ ID NO: 4734 - DNA, 924 bp, Artificial sequence
  DNA replication origin
cctacccctaccccaaacttgggccaggccagtggctatggaactccagaaagaagggcctcagagagagagagggagaaggagagagtgtcatctacatcatgacagttgcaccttttccatgtgcaactggggaaagctgcggtccctcagcagccctttgccttcacttgggccaatgaccaaaggtacccagggtggtagtccagtcactggcaaaagcatggcagccttttggcaaaagacttgggggcataaatagtgaaacactcagagaatggaatgattggctggctagaaaatggatggagggtgttgttgggaataggcagttggagatgggaagggtaggccagggctttaatgcccactgagcaggcatcgggaaccgctggagcttttgttgggggtagggtggagggggggaagtaatgcaatcacaggaagggtgggctggcctggggaggggctgccggcaggagggcagctcagagtctttacagaggtccagggcagtgagcagcagagatgaaggggaacaattggagagacagtccaagttagaatgacaagacttggtcccctgtcagttgtagagagtgagggaaagagaagaggccagaatgatccccaaggtttgtacaatactcagggtgaccgcatgtcctggtttacatcatccatcataattgttaaaggtgttccctttcactttcaaaggagccttggttgataggatgtaggaaacaggatcagggctggattttgatgagtctgtgtgggattgagctgcctgtagcacggtgtcaaggaagcacttggagatgaggaggaaggctggagccagctgcagagatgagcgtgatcaccgcgtgggtgccaacctgcagggggaggaggagactacccagagaacaccagctt

SEQ ID NO: 4735 - DNA, 766 bp, Artificial sequence
  DNA replication origin
cctgtggtctccattctgacctgggggtggggagcgcgggacgtgagaagatgcttgatcaaagagaggtggggggagggtgagccctgtgcctgctcattaactggcaagaaaaagctgtttcgtggtcagaaatggcgtggttgctaagacaaacatgcggacagccccagccccgggactcacctggacatcgaggcgttcatggcgagggcggggtaagggtgccggaagccaccgggaggaagggagtacatgggctggccttgcctgtgagggggaggaaatctggtcagcatattgggaaagctcagggcagaggaagagaggcacttgggaagaagggatgagaaatatgggaaggaagcgggaaggtaatgctgggagcacgctgcctgggcgggggcagggaggcctagtcctgggcttgcctctgagggggctccactgtgcagggcgcgcagggcacagaggcagagctcagcgcaaggagggagcagggggaagagaggctgtgggttccttactgtgggacgagccagccgagggggtgggggatttgtccgacagctccgggagagagtgggtaatacggtgacagctcggatgggtgagggggccgggggattcctgcttccaaagagagatatgtcagactgttccctcgccctgccagagcaccttaacgaacatcaaatgggagcatcctgccctatgtccctggtgctctggagcctagcaggtgcttgtgtcattgtccttgccc

SEQ ID NO: 4736 - DNA, 794 bp, Artificial sequence
  DNA replication origin
cctgagacagaaatcccctttcaccgtctcctctcctgacatcatttcaggaaaaattcatcttctcccagtccctagcttcagtgtgatatacagacagtccgtgacttaggatattttgactttacgatggtgcaaaaacgatattaattcagtactctccttgacctagatggggttatgtctggataaaaccatcatatgttgcaaatattctaaggggaaagttgtgttttcaatgtacgacgggtttatcaggacgcggctccatcctaagtcggggagcatctgtcctcaaaatgcttcagtgccagagcccatggcaggaggcagagtgctagggctttgcaatccttctgttggagagatggggacagtgatcctgtggtctccattctgacctgggggtggggagcgcgggacgtgagaagatgcttgatcaaagagaggtggggggagggtgagccctgtgcctgctcattaactggcaagaaaaagctgtttcgtggtcagaaatggcgtggttgctaagacaaacatgcggacagccccagccccgggactcacctggacatcgaggcgttcatggcgagggcggggtaagggtgccggaagccaccgggaggaagggagtacatgggctggccttgcctgtgagggggaggaaatctggtcagcatattgggaaagctcagggcagaggaagagaggcacttgggaagaagggatgagaaatatgggaaggaagcgggaaggtaatgctgggagcacgctgcctgggcgggggcagggag

SEQ ID NO: 4737 - DNA, 1279 bp, Artificial sequence
  DNA replication origin
ggcgaggacctgacattacttccaaggctttcaagactaggaaactgcattcacaaatacccagagcacagagaagaggcaacgcccaaactgatgaagatccacccagcatcagatcggagagaagacggctcagtgtctcacaggaccaccctcctttcctaaagctggtaacttttgggatgaatctccagtttgctttgaaatctttggtttatggtattaatacagtcagagagagtgcatgcctgctgaacagcgtgccagacagcgggttctgtagcaggtacgggttccactcatgtgcgctcctatgtataatggaaggaaggaaggaagggaggaggggaggcaaggaaatagggagggagggaaggagaaagggagggcggaaggagaaagcgagggaagaagaaagggagggggggaagggagggaaggagggggagagggagggaaagagagggagggaaagagaaagggagggagaaaaggagggagggaaggggaaagggagggaaggagaatgggagggaaggtgaaagggagggaggaagaaagggagggagggaggaatgaagaagagagattgaaagcactttacatcgtgcaagcagcgatacacttgtcctggagtgagcatgagatggggggcgtgacctaaatattaataataatcgtcacagtgtgagcatctttctgtgctaggcatgattctggtaatatagagattttatacatggttttgacacaaagtgcctcctaaacccaagcaaactaattttttctggtgttcaaccaaagaaacatccaaggaaacccgggctcccctggatccactgacaggtgggatgtcaggggctcatgtgctgccttcctaagggtatttcaaagacaatttcaacctcattccattaaccctcaggtaggatgattcacttttcaatggaattagattgtctaggctttgaagtgacaaagtcctgggatcaaatcctaccaccaccactgaagcagagtgcctgggaaaatgccttcacatctcagagcctcttaagtggccacctcgagaaaggggtaataatacccgcccgcgaataccgaggcagaagccctgacccatcagggagctagagacagcatgggcaggtgtggctgtgacaaaaggaaaagcaggagaagaggccagtgccccgagacgcaccctctgcctcctggacttgctgctgtgactgtgtctgggacagctgcttttctctcttcctcttctttttcttac

SEQ ID NO: 4738 - DNA, 1125 bp, Artificial sequence
  DNA replication origin
tcggggaagctggggcaggcggcaggggcgagaagagacaggagacagaaagtgcaagagaggtaagagagagaagtgccctctgcccaggtccatccaccacagcacctacaggacgaatagcacgctacttttcagttctctttcttataaagatttttttttgttgttttgttttgttttttaaaaaagccttaagatcagctactggttacatctacaaactgtaaagtgctgttgttaccagccactttacagaacagtccagagtggtcaaatattgaccaataaagtctcctttttctttttcttctgaatcattactactcaatgagtcatgtgacagcctgcaggggtcggggggagcttagtgggcagacttggtgaccagggaaagaggctgggcctgtagcaccgggagggcctggtgggcatggagcgtggcggggaaggacgggggagaggccagcagagctgtgggcatggacccaagggggaggggccgggacaggaggggaggctggctgcccatctgcccagaggaggaggctgcagccttagccgacaggaaggcggcagagtggagagccagctgggcccgggtttctggtttggtggtgagggagaggggctgggcttgctccgaatgggtggcagcaggggcagctggtgaggccaaagctgcagagggagtggccggggagtccagcatgctcccgtgggaggaggcagggctgtcacagggcttctcggggggcaggtactgaacacatggcttcttgctcttggaggccagggcacctagggggaaaatacaagaaagagtgagcagctatagctctgtgagaggaggaggctgaggaacagccctggcgatacatgtgctttggagacacagggatgattttggcgaggacctgacattacttccaaggctttcaagactaggaaactgcattcacaaatacccagagcacagagaagaggcaacgcccaaactgatgaagatccacccagcatcagatcggagagaagacggctcagtgtctcacaggaccaccctcctttcctaaagctggtaacttttgggatgaatctccagtttgctttgaaatctttggttta

SEQ ID NO: 4739 - DNA, 1227 bp, Artificial sequence
  DNA replication origin
gctgttacaaaaaattaattgtggtgctagatactatggaaagtatccaaaagatgcttcctcacatcttggcaattacgagtcaaatgggtgatagaagcataagctgaatgtcattccaggcggcaaattcatttaaatcagctgtgaaaatgattaccccctttgcagctcagtcatggacactgactggcccatgcacatttgagacaggaagctgggttcaggttttctaagggtgtcaggcatgcctaacattcccctgtggcaagtggcaatcttcctttgcatatctgcgaaagtctaacacagggtttgggagtgaaacaaacaggtggtttgattcaacaaaagcactaaagaaacactcagaaaaggtcttgcaactgcaattttattttcttttgtgaaaataaacaactgggagtttaaattgctccaaaaaccataaaaacaaaaagaaatacacacagaagaagcatgtgaggtgatggggaagggaacagggtctctagaactttggcagattgtgctggcacggacccaggtgacaggagccagaccatggggccggtcccgcctgccactctgggattgtgaagggatgatcgccactggcaaggacggggaggaacacagacttcttcgctgaggaagtggcaggcaccttgagtccctttaaatgcgggggttgggaggaaaccatttcagaggaccgctttctccactgaaagctggggctggcgagttcgggcccactgagggaggggacgctggtggcagcaaatcaggccaagatgtcttctcacatggtgatggcctcacactgggcagaggacagaggacgaagaagaacccacggtattgagcagacgatgaaaacttgggctgggtaacaggaaatgtcacaatggcagagctgcagatggagtcggggaagctggggcaggcggcaggggcgagaagagacaggagacagaaagtgcaagagaggtaagagagagaagtgccctctgcccaggtccatccaccacagcacctacaggacgaatagcacgctacttttcagttctctttcttataaagatttttttttgttgttttgttttgttttttaaaaaagccttaagatcagctactggttacatctacaaactgtaaagtgctgttgttaccagccactttacagaacagtccagagtggtcaaatattgaccaataaagtct

SEQ ID NO: 4740 - DNA, 1134 bp, Artificial sequence
  DNA replication origin
aagatagaatcagaattgggattttttaaagacaatcaaatttagcaatggggtgttatatattaatacaaagtgtagtgatactaatgttagtaagttctgagaacccaataccatcagaccagctaagggttgggaatttttattattttttattttattttatttttgtttttagacggagtctcactctgtcacccaggcgggagtgcagtggcacaatctcggctcactgcaacctccgcctcctgggttcaagcagttctcctgtttcagcctcccgagtagctgggattacaggtgcccaccaccatgcccagctaatttttgtattttagtagaggcagagtttcaccatgttggccaggctggtctcgaaatcctaacctcaagtgatccacccacctcggcctcccaaagtgtcgggattacaggcgtgagccactgggctcagccaaatttttaaatattactctggttgtagcatgaagaacttcagtggggaggtatgtctggaattggtgggttcttggtctcactgacttcaagaatgaagccgcggaccctcggggtgagtgttacagttcttaaaggcgtgtccagagtttgttccttctgatgttcggatgtgttgggagtttcttccttctggtgggttcatggtctcgccggctcaggagcgaagctgcggactttcgcggtgagtgttacagctagctcttaaggcggcgcatctggagttgttcgttgctcccggtgggttcgtgttctcgctggcttcaggagtgaagctgcagaccttcgcggtaagtgttacagctcataaaggcagtgtggacccaaagagtgagcagcagcaagatttactgcaaagagagaaagaacaaaccttccaccgcacagaaggggacctgagtgggttgccactgctggctggggcagcctgcttttattctcttatctggccccgcccgcatcctgctgattggtccattttacagagagctgagtggtctgttttgacagggtgctgattggtgcgcttacaatccctgagctagacacaaaggttctccacctgcccactagattagttagatacagagtgtggaccaaaggttctgcaagtcccca

SEQ ID NO: 4741 - DNA, 997 bp, Artificial sequence
  DNA replication origin
gagagaagctgagaagccgtaaacccattccaagtgagatcactctgaccattggagaatgtccctatatttgtaaggactgatgccagcctccttctgccatctagacattgcctctgatgctctggagctttttccctcctcttggaagcctctgagttcactgcctgccagaccattcattaattcagtcatttatctcttcgttcagtgaatctatgatgctctctctgagccagcacagggaccataaaagctcgctctggggaggcagccaagatgggccagtcacttgccataacctgaggcaggatgtgatgagggctttaagggggacagctgccatgtgctgggggggtcttggggcagggaggggccctctagcctgagccgaagccagttgtcccaggaaggtgacattggactagacctataggaggggagatgccactccaggcaaagggagaaggtgagctgagccaccaaggtggggaagggtgcagacatgcacacaccaggggtctagtgagactgggacccgggctgggggacaggagcagggggagggaaattcctaagcaaggtggaaggtgagccctaggtcatgaggagattggctggctgaggagtatgggctgcgtcttgtggcgctgaagatttggggcagggagatcaatccaggagctcttggtgaggactacacgtgctgagacaaggaaggggacaggtgaacagacctcgccattaccagaaaaggagaggtgacaggggctctgcctggcagggcggtgggtagaagtgtgagatgctgcgctcaaggagccattcagccattcacccatccagtccttcactcagtcagtcaatatttattttgcgcctaaatccatgccgggctctgttttagcagtgggcccacagtggtgagcaaagccaaacaaaaccttcatgtcctaatgaagctcactttctagtaggtggagataggtggttaaga

SEQ ID NO: 4742 - DNA, 971 bp, Artificial sequence
  DNA replication origin
gtaagtgtgtccgggggtctgttgtggtgctcccgtccccgagggccctccggacctgggctcagcaaaggcaccacaggccgcagcttccgagaccccgccccgcggcccactgcctgctgggatttgtagttcttaggggtctagggcccaggctggggccgggttggggccttacacgcgtcctggcgtgtggctctcctgcgtcctcgtttttctcgtgagccctggatctggacagtgggcccggcgcgaggccctcaactccggctgggctcccggtggcactttctgccgaccctgagatgtacccgccacgcctgcgggactgacctctaggtgggcaaaccgaggcacaaagaggggcgcgctctggccggagtcggccctcttgtgagaatttgggctgggagacccagcccaggcctggcaggcaaggctgggtcaggcgagggtcctgggccctttcggtgtaagagtgtgcaaaataatgaacaggcctgcccaggactggctctgcacattagcgctagttaccttacaggcttgactgatcagatttttatttggcaccactacagaggggagcccagggagggaggaagtctctcgtgaccaagaaaacctatggtccaccctggcctacaactctgctttaacgacaaaaataaaccgagtttgggagggggtgaggaggaggggtgttttgtaaactgtgaagtccaggttatgagtgaggtgttattatcatcaggatcagacctcaaagcactggaggaaaggtctgggccttcaagagcctcacctcaaaagggagggtatggccgggcgcagtggctcacgcctgtaatcctagcattttgggaggctgaggcaagcagatcacctgaggtcaggggttcaagaccagcctggccaacatgtcgaaaccccatctctactaaaaatagaaaaaattacccgggcgtggt

SEQ ID NO: 4743 - DNA, 787 bp, Artificial sequence
  DNA replication origin
ccagagaaccagagaaagtgagtgtgagggagtccttggtgatccatctgcgctggggaaaaaggttttcagcagataaacagccgggacctcgggggattgtgcctcagcctaggcccggtagtcgaagacatatggacaggaaatgggcaagacacgggcctttcagagaagagagaccaaagatgtttgcagagaggcaggctttgcgcaacctgtaaagaatgagtaaggtttgaatagcagctacaacaaatattgattgagagcctgctgtgtgccagactgtgggcccggcacttggaatttggccgtgaacctagcagacacagtggctgcccatttacatagcgtgcagtcgagtgtgggagtttacagtctagctgtgaaataaacctgtaggtttaattatggtgggagctcagagagcggggtaggagactgtcctggtctgggacctccactgctgaggaagggtcacctaagctggggcctgcaggaggagggaggaaaggggccaggatgttccagaggaggaatagcaaatgtacactccagataagaagggcctggtggagattagaaagggtggaaagaagccatgtcacactgtgtttgcaaccactctcccccacacccaacctcacctgtgtatcctgtgtacttggtcacctcctgggctctcttgggggcagaatctgggcagcgggggaatggatcaagctgaaagacagctaaagagactgtggctgagtgcaggataaagagccaaggtggaagggagagg

SEQ ID NO: 4744 - DNA, 886 bp, Artificial sequence
  DNA replication origin
aaataagtatgagctgcccccctgtgaggctctgcccctcagtctagcccctgcccaccttcctggcactgaggaggactccttgtacctgggtgagggctaggaggtgggaggcagggagaccaggtgcttgggcagggcaggagggtccccacaagacaagaggacataggcctcgcctctcctcccctgcccgcactaaggcagcaaaggaggcctcagctggcagtcaccagggcctcttggctgggcagggagagagagagggatgaaggaacggagggagggagggtgggagggaggaagaagagtgggaagggaagaggaggggtggtgtaaccaaggcaacagcaggggcctggcattccccttctgagatcccaacacttcttcaggccaagggcgggggtgctgggagagccccggctgccgctggcatcccacccccactgctcagctcctcggccaggttggggcagggaaactgcccgcctccagttgccatggagactgggctgtcaggaagccaatgagcaaggggagcgaggaaaggaggaggaaatggaggctggtcggggggaggcgggaggaaaatgggaacccacctgggaggaacccaccaactcacaacaaatgcgatcttttccagatcactctggccccctgggtccatcaaagccatcgccacccctgcctcagcccaccatggtgagaggcctctccagaagtccctccttccccacccgccccatcccaggctgccatttcccagtgagtgaatcttagaggcatctcatttgcaagattcccccacatttgcattcaagaggcccctgaaaaatcagatgccagatgcatgagaagccagagccctgccgctgtcagt

SEQ ID NO: 4745 - DNA, 1210 bp, Artificial sequence
  DNA replication origin
agtggagcagggcactctcaacagcatagcggtcacagttccccgagtaccaaggctgagtcagcagatcactgtcctgtgcatacacacagtcactcagaaacatgccagggcactcaatcaggcatgcggagccgaggacccagggtgcagttatttatgttcccatctcctatgctcaactgagtccccctcaggcagaacaaagtggtgtccctgtctggggcacggcggggtgccgcacacgtgtgttcaatgtgttcttgcagtggtgcacccttcagcccaagagggttcctgggtaaggactctcaggctctgctcccggaacctctccctacagcctgctcccagcccctcctcacctcagcagctgaggcactcccagtgggggctacagagggaagagacgatttccttccttctagaagaagcagattattgagctggggtggggtggggtggggtgggggtgggcaaaggtggcttctaggggacagctgcgggggtggggggtaggaggaggcgtacatggccccgagcccaaaccccggcacccagtgcttcctccactctccagatccagtgccctggcaggacccaccagccaggcctcgtgtgacctccaaatgaggcgtgatcttggggcacagactaggagcttcctgatttggtgcaggcaccggaaaatgcccaagagggtcccctcaggcctgatctcagctggagtcagagcttcagggacatcctcagtaacttggggcctgagggagtctggcctgcagggctggggctggggcaggccctggcaggaccacctgcattcatgctgaagatgcctgcattcacctagttttttttttttttttttaagtctagtcaagtgcagtagtgagaagtggggaaagggtagaacaaggagtttgatctgtaactgactgtgaacaatcagttgggataactcactacctttggaccagcctttactcacctttagaggcagcatctgctgttccctggcatacaggaggtctgatcagaagaggccgggccccaggtcccaccctgagcctccctccctgcctccctctcttctcccctgaccatcagcctcttacattccgagtttcctggggggctgtggtaggcctgtgggaagcaaatcgggggacagaactcagggtctttatgtttttcaagagaaagggcc

SEQ ID NO: 4746 - DNA, 2066 bp, Artificial sequence
  DNA replication origin
ttatcttccccttattacaggcaagaaatgacggttccgaggcggtaatccgcaggagccggcactgacggagaccgtccacgccctgcagccccgccccccgcccccagccccccgcccccagcctcccgcttgcatcccagtgtcttcagtgccagtccgccggccccatcccccgcggggttcctgcgcctcccggccctgccagagcccggggtcggagggcaagaagggccgggaggcccgggggtgcggagtgggatgggggtccgggccctcggtgccagcctgagctcgaggcggccgcagagccgccctttgtttcgctgcgctcgcggcttctgcggagtcacggtcacatggagcttccggcacggggtgttccgggcgccacgccagggccccagacgcccccgccccctggcctgccctgcgccgcccgacgccctcgccagcctgcaggccgccggccacccggtgctccctgggcctcggggtctgcgccctgtcccgcagctccgcctggccccctggggacctggagtgcctctccacctcccatcgccccccaagctctcgcccgctgtcctgtcttctctgagcgccactgttcagctttccctagctttgactctagactggagcatcagatctagttgtttcccggggcccactgtctcccctcctctagacaacaccaagctcccaaaatcaggctcatcactcccccgggagcaaggtacagtaagtaggtgttggaggagtaggtaatggactccattctcctcatttaatagggtgtcagagacagcactgcgcctccctcccttccccactccaactcccacaaatcaaaacaaaaatcagccactcagcctggcctcgctcggcacagagcatctaaaagtaaaagccccaatctggggtagaaacggctggccctttctgcccgggcctagctcctgcatctccataactgcaggctagtctgccctgtgacacttgagaaccgtggggcctccctcgtgcaggacacctctgcttcatttagcagattcaataattcattcaacaaatgtttattgaatgtgaacttgtgcaaggtaggccagtccctctcagggtgccctaggcccacaagtagatgtgagaggatcctttgctgttccagcagtgcctgtgctgtcccctgactggtctaggccaccacggttccttcatccaggacctagtgaactgggcagacacctgcattcctggaggccaggaagagggtgtcagccttggagaggcaacagagagggcagtggaaggctctaggtgagcatggggtggggtctccaggacccttccctgggcctccaggcaggctttccccattaatgctgcttgtgggcactgggaaaggctagggtgaggaggggtggggaaggagagaggaagacagcccaaggtggggcgggacaagaagcaaactggggccaaaggcggtgtgtacttcgctgtggcctcaaggcttggtggggaagagcaggcaggtgagttcccggctgccgctgtgtctgtccacaaggggcagagggtgccacatgaagtgctggaccatggccgccacggaggagaagagctggccagggaggcagggcatccgtgagtcccatgagcctcatgctgggagcaatttcctgaggcaactgtgggactctggcaaggggacttttgacatttttctagatatcttccttcctgtttgccccatgccgctccactgccattttgctgccccgttccaggcctcaggcaactttcctgctgctgcacccatgggcacgccactggccagactcttatgtccaaggctagatcaaactgactctagggtgcgcctctgccctggtcctccagcgtggggagctgtgtgatgggtgtctctagtttgcatcctagcaaatgctgggtgcgacattgagtcctgggggaggtagacaagagtctgaagatcctggaccccgccctcctcccagctgggttcattaaaggcacaaaggccccacctcgaccctgtg

SEQ ID NO: 4747 - DNA, 1601 bp, Artificial sequence
  DNA replication origin
ggaggtggagaggcactccaggtccccagggggccaggcggagctgcgggacagggcgcagaccccgaggcccagggagcaccgggtggccggcggcctgcaggctggcgagggcgtcgggcggcgcagggcaggccagggggcgggggcgtctggggccctggcgtggcgcccggaacaccccgtgccggaagctccatgtgaccgtgactccgcagaagccgcgagcgcagcgaaacaaagggcggctctgcggccgcctcgagctcaggctggcaccgagggcccggacccccatcccactccgcacccccgggcctcccggcccttcttgccctccgaccccgggctctggcagggccgggaggcgcaggaaccccgcgggggatggggccggcggactggcactgaagacactgggatgcaagcgggaggctgggggcggggggctgggggcggggggcggggctgcagggcgtggacggtctccgtcagtgccggctcctgcggattaccgcctcggaaccgtcatttcttgcctgtaataaggggaagataatcgtccctacgtaatcgtcctccggttaggaggcttaagtgagacatgccacgtaaagggatgcctgcgtaaaggggtgcctgatggggagaaggaaacaccaaattcgggccaattagctgccactgtcaaaatcgctgggaagacacagttatcggccagggcaccaggaaggggcacgggctggggcagccgtcataggggtggggtgcggggggcgggtggacaccggtgtgtgtatgtgaggaagggaccagcagcggaggcctctagcagaaacaggagaataggagaccggcaagacacgccttcagccccactggcccagccctggctccctccagaacctggcctccgtcctccacaccctccccagcatcatcccgcaggcccgcaggggctgtggaggctggggagcttggcaccttgggctgggactcagggtacagtcagccccctagtatccccacaacagctctacaggttccacttccctagaggagctctccactctgtggccacaaaggcctcgggactcaggggcctgttgttactgagccccgcagccatgaggcatttggtgggggagtagaagttacagcccagagctcctgaagttaatggcccaacagggactctgatttttcccagcttagggactaacttcaaggaattagcctccattcctcccctccctggggagaaagagaggaggagcagctaggcagtgggacagtctgtaacccgggcccttgagggcaaaaaggaacctgttgcctgcccagtacctcctcagcttgcaggcctgagcagatggccccttgtccagggagccttcaccactcccccagcctgggcccaggtacttaggccgtcgtctcttcactcccaggacagaccggctactactgcccactattggatattctgggcctggaatacagcaggtggcgtgtatttattgaaagagtgatcaaataggtcaagtctattctggattcctctaaagctgataacattcttttatcagggcctcctttgt

SEQ ID NO: 4748 - DNA, 1327 bp, Artificial sequence
  DNA replication origin
gccgggcagaggcgcccctcacctcccggacggggcggctggccgggcggggggctgacccccccgcctcctcccggacagggcggctggccgggcggggggctgacctccctgcctccctcccggatggggcgtctggccgggccaggggctgactctcccacctccctcccggacggggcggctggcccggcagaggggctcctctcttcccagtaggggcagccgggcaaaggcgcccctcacctcccggatggggcggctggccgggcggggggctgacccccccacatccttcccggatggggcggctggccaggcagaggggctcctcacttcccagtaggggcggccgggcagaggcgcccctcacctccccgacagggcagctggccgagcggggggctgacccccccacctccctcccggacgggcagctggccgggcagggggatgacccccccacctccctcctggatggggcggctggccgggcggggggctaacccccccacctccctcccagacggggtggctgccaggcggagacgctcctcacttctcagagggtgtggctgccaggcggaggggctcctcacttctcagacggggtggttgccaggcagagggtctcctcacttctcagacggggcggccaggcagagacgctcctcacatcccagacggggcggcagggcagaggcgctccccacatctcagacgatgggcggcctggcagagacgctcctcacttcctagatgggatggcggccgggcagagacgctccttactttccagactgggcagccaggcagaggggctcctcacatcccagacgatgggcggccaggcagagacgctcctcacttcccagacggggtggcggccgggcagaggctgcaatctcggcactttgcggggccaaggcaggcagctgggaagtggaggttgtagccagccgagatcacgccactgcactccagcctgggcaccattgagcactgagtgaacgcgactccgtctgccatcccggcacctcgggaggccgaggctggcggatcacttgcggttaggagctggagaccagcccggccaacacagcgaaaccccgtctccaccaaaaaaatacgaaaaccagtcaggcgtggcggcgcacgcctgcaatcgcaggcactcggcaggctgaggcaggagaatcaggcagggagtttgcagtgagccgagatggcagcagtacagtccagctttggctcagcatcagggggagaccgtggaaagagagggagagggagaccgtggggagagggagaccgtggggagagggag

SEQ ID NO: 4749 - DNA, 1330 bp, Artificial sequence
  DNA replication origin
ccgccccatccgggaaggatgtgggggggtcagccccccgcccggccagccgccccatccgggaggtgaggggcgcctttgcccggctgcccctactgggaagagaggagcccctctgccgggccagccgccccgtccgggagggaggtgggagagtcagcccctggcccggccagacgccccatccgggagggaggcagggaggtcagccccccgcccggccagccgccctgtccgggaggaggcgggggggtcagccccccgcccggccagccgccccgtccgggaggtgaggggcgcctctgcccggccgcccctactgggaagagaggagcccctctgcccggccagccaccccatccgggagggaggcaggggggtcagccccccgcccggccagccaccccgtccaggaggtgaggggcgcctctgcccggccgcccctactgggaagtgaggagcccctctgcccggccaccaccccgtctgggaggtgtactcaacagctcattgagaacgggccatgatgacaatggcggttttgtggaatagaaaggggggaaaggtggggaaaagattgagaaatcggatggttgccatgtctgtgtagaaagaggtagacatgggagacttttcattttgttctgtataagaaaaattcttctgccttgggatcctgttgatctgtgaccttacccccaaccctgtgctctctgaaacatgtgctgtgtccactcagggttgaatggattaagggtagtgcaagatgtgctttgttaaacagatgcttgaaggcagcatgctcgttaagagtcatcaccactccctaatctcaagtacccagggacacaaacactgcggaaggccgcagggtcctctgcctaggaaaaccagagacctttgttcacttatctgctgaccttccctccactattgtcctgtgaccctgccaaatccccctctgcgagaaacacccaagaatgatcaattaaaaaaaaaaaaaaaagaaagaaagttggaaaggcttcaggattgtcagttaaatctaattgtttttgcctgggtctactgacagacaggtttacatcgtctctattaccttttttttttttttttttttaatttgttttttgtttttgagctggagttctgctctcattgcccaggctggagtgcagtggtgagatctcagctcaccacaacttccgtctcccaggttcaagtgattctcctgcctcagccttccgaatagctaaactacacatgtatgccaccatacttggctaatttttgtatttgtagtagaaacaggatttcaccatgttggcca

SEQ ID NO: 4750 - DNA, 1440 bp, Artificial sequence
  DNA replication origin
ccaatgcaccacttgcgcgggggtcgggggaggaagggcagctcgccccgcggagtccgggctgaaccacactgcgcggccgcgggaggtgccgtggcaatccggccctccagagaccgttcagctatcttgagccgctagagctaggagaaaaatgcagacgcgaggagacgtgggggattgctcttccttgtttgatgtgggagaaaaagcgactggggcttgctggacccgctcccctgtgcggtgacatggcacctcccttccgaccgttggccgggatagctttcccggaggtcgcgtcccccagcggaggcggcgggaatcgcggaggttttgtgctgcggctggggtctttctggccgtcccgcctctagatgccgggtggcagggagccggtggcggtcggccatgtgaaggtggccatcttggccggccagcgagggctcctcacggccttccttcggcgtccctgcccggctcgttgccggccccgggatatctgaggggcgcaggcccaccttctagtcgtttcctggtgaatggctctgctgaagatggccggaaagcagattaatgaaggtgctgccatcgatttaaacaatcgccctcctgcccgctcccctgcgctaaagtttctgagggatcctcacccttcgtggttcgtggacttaaaagtggaggcagcgctccagcctttccctccagagagaaaggaggccgctcccaagtccgtccttgccccgtggccttcctgttcctttgaagggggggggaatcgatgtttcaatcctctgttcaggagaatatggaacgaacatttcttttttggtgggtgggggctattcgttcccttgaatgtgcttaagcagatctcttgacggcgtggaatgggctgtttcatgaagctttcactttaaaatgtccacctgcgtttgtcccagttttgcccaataaaggaattacagggaaaaagagcgaaacaaaacttgagccagcaaggagtatggagtcccgtttggagggagcccgccttgggggcgggggtctctgcagcctgttctggggctgggcctcggtgcaggtctggtcgggctggtggcctggtggccctgagcggagcgcgtgacaagaacgccgggtttaatgaggttctcagggaacggcctgctcctagcatgggatgtactttacgctggggaggtgaaggagacccctagtaacagtctccagctgcctactgctggcggcagtagaacaaggtgcattcccaagaacaatcctctccgtcggtgcaggaggaaaggtgggatttgctaaaggctcagtgggaaacaaaggaagcacttgggctgtgctgggggcatccacaaagaagataaagggctcctccccagactcagtgaccacatccacggtcgctcaaagcaggcagcaaga

SEQ ID NO: 4751 - DNA, 1195 bp, Artificial sequence
  DNA replication origin
gtcggggaaggccacccaggtgaggggacggcctgaagcgaagcgtggggcggggcagaaggcagcgccaaggtccggctggctgcggccggccggtggtggggcccgcgcgggtcgtcctcgtccgccgggtgatggaagagcggcgaccgcgcgctttcctcgtggcgccgccagggcctggcgcgtggccgccgctcctcttccccctcccctctccacccttcccttcccccctcccttttcattcggtcgcgcgcctaggcatgcggaaggttccagaaaacgtgaagggcgggggctgtggtcgctagtgagttctggccgggaagggagggcactgttaacccctcccggccctgccgtctgacaaacctggagtgggcgacccgccccgcgtgctcgcgtccggccctcgggagcgcgcgccccgcattgcagcggcgaccacgtgtttgccgcatgtggtatctgggcgagggggagccgtgagcctccccggctgtcctggccctcagtttgaggggtggggggcctatgccttgggacgtcgtctggctccactgcctcagtggttaggtcttgactacacactggagaatacgcacatgcccttcggcggatatggccttgcctccaaggtgacggcctctgactaaatatagctcatgtccaagaaggcagtccttatttggaccccttgtgaaaaggatgggaagcatgaattaggagctgccattgctttgggttcgcatttaaagtcttcggtgcagggttttacttgaggctttgtccgctcaaccgccattatggggatcaattggcacgtgaaggaggagtaaagctatatttccaggaactgaaaatctcagcctgagcatatcggctagtaaagatgattatttggctcttttggctgtttctgcccttaggatgaccgcagtagttatctatctggtggctttagggtctggtcagtttactgtgcccatgatgaaatcccacaagtaacttagtggtatgagaggacaaacccaggatcttgatgagtgctgaaggttagctgttacaccagttagtagtagaccgaagttcagagcctgcagtctggcttccacattatgtttggattctgttttaggcggttatagaaaattcagaaaaacgaacttgaattagggagatatttgttctc

SEQ ID NO: 4752 - DNA, 1303 bp, Artificial sequence
  DNA replication origin
ggggtcggggaggacccaaggaagttggggaactcagactcttttcagtgtttaaaaagcagaggccccctcggaaggcataacaggcgagtctaacaatgcccctggagatcaacggcactaaggggtacctttgccccgctccaaggctccttgttccgccccctgccgccaagcaaggaatccggcgccgccggtcgtgggtagtatttacgacagtgctggcgctttgcggccggccgcacagccgctgacgcgtcgggaggcggagcctagggaagcaaattctcctggcggcctccgttcagacgcggcagctgtgacccacctgcctcctccgcagagcaatggcggtgtctgccgggtccgcgcggacctcgcccagctcaggtaggcttaggaccccgccctccggcggagagttcctaggagcgctggtctcagaggggcgggggcgggaggacgcccagtgtctcccggtgaggcggggggggggtcctctgtggggaagggggcgtgctgtgagacatttgcagcctgcggcttctgaatgatgatgacattcgggaacactgcggttaggggactgtagtctgaggggttctgggacattaggggatcgtggagagggggctgcactgcagggatgtttcctatagtcagatcattgaggcaacctcattgagccgacccgggtgggcggaagctctgagctgttggtgcagtgatttctttgatttgaggtggagcccacccccgcacacatattttctccatttattgattgcagataaagtacagaaagacaaggctgaactgatctcagggcccaggcaggacagccgaatagggaaactcttgggttttgagtggacagatttgtccagttggcggaggctggtgaccctgctgaatcgaccaacggaccctgcaagcttagctgtctttcgttttctttttggtgagtccagtttatgggtgggagcaatttggttgagagtggagaatgacaatctctattttttggttgcaagtagacttagctcccttttcctcagagctgaagacattggtataaaagaagaggtctttgcgaagtttaggattaaacctgctttgtctcctacagttaggatttacttggtggccagaaatgcttttttttttttccttagacggactttcgctcttgttgcccaagctggagtgcaatggcgctatctcggctcactgtaacctccgccacccgggttaaagcgattctcctccctcagtctcccgagtagctgggattacaggcgcc

SEQ ID NO: 4753 - DNA, 1674 bp, Artificial sequence
  DNA replication origin
gcctcaatgatctgactataggaaacatccctgcagtgcagccccctctccacgatcccctaatgtcccagaacccctcagactacagtcccctaaccgcagtgttcccgaatgtcatcatcattcagaagccgcaggctgcaaatgtctcacagcacgcccccttccccacagaggaccccccccccgcctcaccgggagacactgggcgtcctcccgcccccgcccctctgagaccagcgctcctaggaactctccgccggagggcggggtcctaagcctacctgagctgggcgaggtccgcgcggacccggcagacaccgccattgctctgcggaggaggcaggtgggtcacagctgccgcgtctgaacggaggccgccaggagaatttgcttccctaggctccgcctcccgacgcgtcagcggctgtgcggccggccgcaaagcgccagcactgtcgtaaatactacccacgaccggcggcgccggattccttgcttggcggcagggggcggaacaaggagccttggagcggggcaaaggtaccccttagtgccgttgatctccaggggcattgttagactcgcctgttatgccttccgagggggcctctgctttttaaacactgaaaagagtctgagttccccaacttccttgggtcctccccgaccccattagtcctctccgtccctgcgtccctgcggtgctctctggtgtgagggatcgggcgcaaagggcaaactttttgtcagagtgacgccgagttgaggacgcgcctggaaatgttgcctgggttttgagccattgcacgaccccttcactttcttttccaggacctgcaaagaaccgaggtttcaaagcagtaggggccgggcactgctctcgcttgtaatcccaacagtttggaaggccaatgcgggaggatcgataaagaaaaaaaaaaaaggcaacaacaaaaaaagaaaaaacactaaaaaaaaagttagctgtgtgtcgtggcgcgctcctgtggtttcagctactcgggaggctgaggtgggaggttcgcttgagcccagtagttcgaggctgcagggagctgtgatcgcaccactgcactccagcctgggggacacagtgagaccccgtctcaaaaaaaaaaaaaaaaaaaaacaagccgggtgcggcagcaagcctgtaatcccagcactttgagaggccaaggcgggcggatcacttgaagtcaggagttaaagaccagcctggccaacatggtgaaaccccgtctgtactaaaaatacaaaaataatccgggcatggtggcgtgcgcctgtaatcccagctactcgggaggctgaggcaggagaatcgcttgaacctaggaggcggaggttgcagtgagccaagatcgcgctactgcactccagcctgggcgacagagtgagactccgtctcaaaaaacaaaaaacgaaaaagaaagagaaagaaaagaaaaggcgggaagaaaagaaagaaagaaaattaaaagcagccagggaaacaggaacaacataactgaagaggggatacagagcaagggcagtgagtagagtgtggcccatcagggaaggttctcagaggtgagtctggagcagaattaaatacctaaatctctccactgggattagccagcaggaaaagaagaaggcatccca

SEQ ID NO: 4754 - DNA, 1863 bp, Artificial sequence
  DNA replication origin
cccgttcaccaggcagaggtgtcatccgaattcaggctcctggggcccgggagggtccgactctacggacccaggtcgctgtggcccatcgctttcgatttgacttggtttctgtcgccactcgcggaaggcgcgccccccgccctcgctcggcggcccgccccgccccgcccctgctcttcctccggggccgctggcactgcggccgctccgcaggcagagaagccgggagcgggcgaggcggcggcggcagcagcgatggtgagggcccaggcggggccggccagccctgcgacgggcagagggcgagtggcgagggtgggagagaggagtccaaagtccgcgggctggggcctcccctggggcccacgagggccagacctgaggcggtgaccactgctggagcaggacggggcggaccctccactccctgcgcgccgcatgggagagaaatgcgtgagccccgtcctggctgcaccgcgcagagcgagcgggactcgggctccccattctcctgaagcaaagcggttaagagcaccgactttggagtcggactccgggctgggatcccagctctgtgacccgggacaagtcacttaacctccctgagcctccttttccgcgtctgtgaagtggggtcagtaatacctgccttgttgggtccttgcgaggttaaaggagccacagtggcagagacccgcctggcactcagaacccactgctaagaagtggtaggaaatgtaacgacctcgtcagccctttccgcagctgtgaggagccaagcctggctcaggagttggaaacttgagcagatggggtggcagaggccattccagccccatggcagggtgttggagggcgaactcctcccctagagaaagagaaagggagatgtttactctgaaagttccactgaagttatcagtgtatggcacaggcctgactccctgctaacctctacctagtgacacattcctgagttgagtcatccccactcctgctgcagatcctggcctttgtcctcacttgccatctccaaggcaaagatgtcaggaacagctggtgccagtttctccctttccctagggctcctgggaaaatggactgggcaggaagtaggcttggtgctttaagattttgccttggagaaactgacagaggtgtgatggatgtggcctggctaggggtcaatgcctggatggccttatctccagggaacttggaggcaggaagaggaagtggggcaggaaggtagcactgagctctgaggccaggccaggaagctgaggaaggctctgagaatagggcagagcccagagcccacttaagggtgtgcagggcaaggggtcaggcaggggtaggggtgggcttcagccggcccttagctctttgggagaagctcctgaagtgaaggctgaaggcaggatattttattgggggaggaggatactgggaaacctggggattctcacgggtacatttgaggcagtctgtggaggagaggctggggaggtcgctcctccacccatccatctcctagcctcttcctgtttcttctttcactcttgcccctttagcgctttccttccttccacccatcccctttccctccctggtccttcttcctttcacttttcttttcttctctatgactcattcaaccaacaaggatttcttggaaatgtccttcatgccagcatggtgacaagtataggggacagagcaggaacaaagcagtgatgggaaagatggaaatggaatgaataattacttgaattcattaatcttgtagatgatcctctctccaaagaatgtgtgtgttgagccacaggcctccctcatatgcacacaaattaggttggt

SEQ ID NO: 4755 - DNA, 681 bp, Artificial sequence
  DNA replication origin
aggcctctagcatctgtactgtcgaagccctctgagcttcagggcagactgaagagccttacacaccagacacttggacgcgatcgcgccagaaatccccgggaattcagtcttggctccgactccaaaacaaatgattcctcaccagccagatctccatcattggcgttagtctctggtcacctgacttgttcaagccaatgagagggggccgaattagtacttccgctttccgtgctgtttaacgagccactatgcccgtccctcggatactctgattggccagcctctctcagctcgtcagtttattggccagcgccgctaggccgctatcgagcagggtccgagggctgtgtcagaaggctgggcagccatggcgtcctatttcgatgaacacgactgcgagccgtcggaccctgagcaggagacgcgaaccaacatgctgctggagctcgcaaggtgggtgcgcggggcttggggatagggtccaaccagcaggtttctgggctggggctggctggagaaggcggattaccaggggcagcggattctggggaggacagatgagtaatctggagtgttagtacgggcggcgagactgaggggtgtggggatgagcatctcgataatttgggccgtccgttgggccggcctggggcaaggggattgcgggaaagattg

SEQ ID NO: 4756 - DNA, 1067 bp, Artificial sequence
  DNA replication origin
ctcgggagttgtagtctcgggcagggcgcgggcaccgaggccggggctgcgcggactccacgtcccggcgggcggcgcggcgaggcctggggcctccaggggcggggccgctcggccctttaaacctttcagggctgctccgagggccgcagctagagtcggcgccacgagggggccgagcagggtgcggcggcggcggggcgctccggggaggtgcgtactgggctccttcccttcctccgggcttccaggaatcacctggggactctcgcgtcccgggtcctggggggtcgccggccgcagggtccggccccagccggggtccccgcgcccaggcgagcgggggccgggccgggctgggctttccgcgtgaacccgcccctcgcccagggcgccgatggtcaggtggttgcctgcgcgccgccgactcgccaccgctccactgggccggcacccagcctctccttggcgtggcctcttcggttgtccagcccttctcccagccctggtccctcagaaggagggtaactcccttccagatgttacggtccgcctgcgtctctcagcacgccggtggcatttgggttgaccgcggaggcccccagtgccagagggtgttcacgttctgccgtgggctcagcccaaactttggacgctcagagacccaacgggagcgctggataaggtgttgacccccttcccctcccccttcccggccagttacccactcctggactttgatctctctccaccaggccaggacagctgatggttgtggcagaaacatctcaaggtagctggtccgcccccacttccccatctacctcttgtcctccccccaacaccaccaccaccctggctcccctccctcatgaccgcctggatcctcctgcctgtcagcctgtcagcgttctccatcactggcatatggactgtgtgagtaaaggggggtgcccggggggcaacaggagcttgatgacgcacacaaagtctcttgtcctgtcatagccacggtggtacccagggtcactctgggtgtctcaaaagcctgacttggtgcctgggca

SEQ ID NO: 4757 - DNA, 1143 bp, Artificial sequence
  DNA replication origin
ccggcccagtggagcggtggcgagtcggcggcgcgcaggcaaccacctgaccatcggcgccctgggcgaggggcgggttcacgcggaaagcccagcccggcccggcccccgctcgcctgggcgcggggaccccggctggggccggaccctgcggccggcgaccccccaggacccgggacgcgagagtccccaggtgattcctggaagcccggaggaagggaaggagcccagtacgcacctccccggagcgccccgccgccgccgcaccctgctcggccccctcgtggcgccgactctagctgcggccctcggagcagccctgaaaggtttaaagggccgagcggccccgcccctggaggccccaggcctcgccgcgccgcccgccgggacgtggagtccgcgcagccccggcctcggtgcccgcgccctgcccgagactacaactcccgagcccccgcgcccgcgtcacgggggaaacgtgggcggtgtcccaacttcggaggacctgggcgcggagggctgtggcgtgaagaccgctctaaaaccgagatgactagaggttccgtttaaccgattcctgccggggaagcgtcagcaggtggggatctcggggcagcctgcattccagctctacctgggattgtcgccgtgcacatggctggaggagcgtctctccgccactgcgcacattttgcagcctgcaccggccaacggtgagtcctctaggaagctctctcaacgtggcgccccatgcctgcctctggccagggctgcggtgggtccagagaagcagacacaaagacttggctgtttcttaagaaatccaagcgcctgggatttggcttatggttcctgtggctcagcaaactccggaggagggctgctttcattagatactttttgctttcctgcatacaagtacacaatgtactagccagaaatcagtgtccaagacgtgtttcccgactgatcaacacttatttgaaataagacggcagagaccagaggacatccattctaaatagacacatgtaggtgtcagtgtagagtaggtaaggattaacatggccagtgttggtaagcaaagaggggaaggtgagagacccggaggaatctgggaaaaggaaacaggatagtgtggga

SEQ ID NO: 4758 - DNA, 1067 bp, Artificial sequence
  DNA replication origin
gatgtgcttcatggcgcgggcggcgcgcgaggcaggggcgtggggctgcccgggccgccgccgcgctcagcgccgaggagtctctggctctcccgcttcgcccgccctccccctccctctctccctttctccccctcgccccgggcagctgcgccgccggcttcgggaagccgccgggctgtccgttcccggagcgctcagagtgtcatctgaagtcgctgcctccttgccagcatttctggagaacgcccgctgcgctccatctgtgtttgtttagcctcagtttacacagaagcccagttcgcgagatcagtcagcgccgccgcccggagaggaggcagctcccgccgccaccgcctccccagcccgggccgcccgagccgcgagcgcctttaaagaaacaggaagcatttttcaaaacagctgggccgccggccgcctcctttgtccgcgggctccctacctcccccccacccccatccccttggcccagaacctgcctcctccggcgctccctccccgcccctactctagtcgggggcgcttctatgttcccagaggacagtccgctcctgcacaaccgccccgagcacgtgacttatgggcccccggcccttccccaaatcacagcggggccttttctccctggccttgccggcctctcggtgacgcagctccgaccttgcccacccggcaccttcccgccgctccctccgccccaactcgccacgagacagaaaacgccgggagctgggacttctgctgggggccgatggggaaggggagactccggagttgcccggcgacccacacccgcccggcacggcaacccagtccactctcacttgctggagcgggaaagcaagaggagcagagggcttaagacagggaaactgagtttccgaaagctccaaagtcacgcagcaagtcacagaggcagaggagggtggaagcttcggatttaggcagacctaacgtctgcgagcctccgcagtcacctcactccaggcgccctgctaaaccgggatttactcatctgtgaaatgagaaattcggagaacaacgcc

SEQ ID NO: 4759 - DNA, 1747 bp, Artificial sequence
  DNA replication origin
agctgaacggccttaagaagctcaagcggaaaggcaaggagccggcgcggcgcgcgaacggctataaaactttccgactggacttggaagcgcccgagccccgcgccgtagccaccaacgggctgcgggacaggacccatcggctgcagccggtcccggtaccggtgccggtgccagtcccagtggcgccggccgttcccccaagagggggcacggacacagccggggagcgcgggggctctcgggcgcccgaggtctccgacgcgcggaaacgctgcttcgccctaggcgcagtggggccaggactccccacgccgccgccgccgccgcctcctgcgccccagagccaggcacctgggggcccagaggcacagcctttccgggagccgggtctgcgtcctcgcatcttgctgtgcgcaccgcccgcgcgccccgcgccgtcagcacccccagcaccgccagcgcccccggagtccactgtgcgccctgcgcccccgacgcgccccggggaaagttcctactcgtcaatttcacacgtaatttacaataaccaccaggattcctccgcgtcgcctaggaaacgaccgggcgaagcgactgccgcctcctccgagatcaaagccctgcagcagacccggaggctcctggcgaacgccagggagcggacgcgggtgcacaccatcagcgcagccttcgaggcgctcaggaagcaggtacccgctcgccgccgcacgccctcactgcgccgggggacgactgcgggaatgggtgggcgagtggccggggcgggatagaggtgtgtttaaggggcaagctgccccgcccggtccgaccctggtgcccagacaggtgtgggcagtcctagggtatggatcatagttttcaaagtggctataagagttggttatctctggcccgagcaccccccgccctcaacccccgcctcgggggtaacgctgtctgcgcttctgacttcagcctccatagttcacttttatggcagcgagtatttgcctgccggagtcccctgggcgcggtgcggagtggagaggggaaatgtgggaatctgtcagcggaggaaggggggagccttctccagttggtggtggcaaggtccggaacgctgcggtgggacagtccgggggagttgtcagcccctcttcaggccccagcggtgatgccccgaacactcaggttgcttccgggctatgcactccttgccctggcatcctcaagaacccgcgctacaagcctgtgccctctccccaggggtgggctcaggaatcggctggtgggagtctttctagcagatcccttcctttcacccgtggtgaagcaggcagctctgccgaggggactgcctaggttggggattccctctggagcatcttcagagcctagttctggggtgggtccgggactttttagtttggggctggtgcgggctgccctcaccagacagtgcccctgcgcaggtagcggaagaatacttaacccaagaattacccgtggtggggcgggacaatcgcttgggcttctaggcttcttattttcttagcgagaaggagctctaggaaggaggtggtgagttctctcccacccccacacagggcgtggggaagggttagggtagatgtggctggtttgaagggtgttttttttttctttttatttgcatactctgcagctgacttgctgtgtgactccaggaatgttgctcaacttctctgggctttatccagcaaca

SEQ ID NO: 4760 - DNA, 1131 bp, Artificial sequence
  DNA replication origin
acaaagctctgcagggaggcaggcctcaaggcaggctcaggacctggggctgggggctgcagatgggccctgggaggaatgaaccctgccaccttgtcgtgtgcgcgagacattcacttcagtctctccagatggctttgggctggagaagcgcagtacttctcggggttcccctcactgtgtgttccgtctggctccagctccttagccattttgtgccgagagcattcatcctacttcatacttccctcccacacctgactctactgggctctgcaggataaccccagggccgggctgggctgcattggggtgggcaggaccctgcagccactcgccagggcagagaatcgcgaaaaacttttctagcccaggccagcagcgctgcatcaacgcaggtcctgagggccgttctgccctggggagatgaccacactctctgccttccaggagtgcacgacggagccaggaagacagatggaggtgcaaggaaccaggccacgggggagagaggacatgtcctgggaggcccaggcacagggaggtctggtccaaggtcaaagcagctttagttgagcagcaagtttgaggtctggggaggggagctttatccagatttgaagggtgaatccccatttatttgtaattcctctagagatggtgtgttgttttgtttaacaactctggaaggtctttgctctttcaaataattctctggctcaaaagaaaatctctcaggaggggaaatacagctgtttcagcaagaacagggtgcaccctgggtctccgggggcagtagagccagtgaggggagttttaatctgaccctgaaccccagcatcggggcgggacaaggcagtgtgaggaccaggtgggagactgccaagccaggagcgacctcagaggttgcaggcatggagtgaaggatcgggccaagctggagcccaggccttcgggttcccagagggacccatgttgtctgcgtggacaacatggaggctcgactctgggcgtctcctcacttgcctgaactggggttctgggccccctaacccattaatccccagcttgtctgcccgctagaaaggggtctccgtgggaggtgctgacagggaagggcaggggcagttg

SEQ ID NO: 4761 - DNA, 1244 bp, Artificial sequence
  DNA replication origin
gagcctcagctcacacactccgcagaccctcctgcgcccacacccaggaatcttggttttaggcgacacatcgtgatgcctgctaaaagcagagcagggaaaaggagcccttaaacagtccaaatgtgtccctcgccgcgcctgattttcccagagccccggcgcgcccagacagaagttgtgtacacaggattttagtatttcctctccggctccagccccaatttgagggcctgtaaaagcttgaatggcgtccagtgcggcgtggtttgcctaagctcggctcccggcgctgagtcaaagcagcccacacagggaccggggcgcctgctaggggggtggggggcgcctgcgggggcggggggaggccgggggcgcccacacccacgtccaggcccagccgccgccttccagccgccggggctggccctgctgcggctgagcaaacctggtgactcggggtacactcgtggcgggaggcaaggacgtggttgcatgacccctttcctccccctgcgcctgggaacctctcccacttcattggggtgggggcggggggtgctccgtgtggctcagaggctgcttcagatgtcttctctgaggctgagaggctcttccagtccctgatttttaaacatgcctccagcacccctctccctgccaggaatcatccagtacagtgcccagactgacctgctgtgtgagtctaggtaattcactcactctctctgggtctcagttccctcatctgtaaaaccagggcgggcctgggctccgtctctggctcctgccagacccagcaccttggagtctaagaagattaggagccacctgggctgcagataaggtgcccatgctctctggaggggacaaaggttggtgggggttgggggattttctccaggggctgtgacaccacgacacccacaaccagccagtaacgggaggagtgtgtttcagggtccagcagatctaggggcaagtggccaggtgtgaaggtgacagctggggaagctctgagcccctcactctcaggagcctgggatccctggcaccctgaggcgcagtggcctcttgtccacacaacccatgggtcagacaaggcctgggcctggcacccgaggagtcacggtaggcacattcggccatgctgcacagcctctgctctgcaattcccagatccaaaagctcggaaaaccagccgtgcgtgcatgcgtgtgagcacgtgtgtaatgtctagggct

SEQ ID NO: 4762 - DNA, 1524 bp, Artificial sequence
  DNA replication origin
cgtcctcgtgacgtcagaccccgcccacgcgcccctcctccgcatctgagcgggggagcggcggcccccagctgaatgggcgcgagagcggcgctgggggcgggtgggggcgcggggtaccgggctggcggccggccggcgccccctcattagtatgcggacgaaggcggcgggctgcgcggagcggcgtcccctgcagccgcggaccgaggcagcggcggcacctgccggccgaggtacgtggcgcagccccctcctcggcgtcgcgggggcccgcgggctgggggctgcggcggcgacttgtctcttcccgggccggctgggcgcggcgtttccgcctcgaaccccgcgggcagcgcccagggcacgacaccctcaggcgagcccggctggggcgcgggcggagggtcgtggtcccgggccgtgtggaccgggcggggggtcccacgcaggtgtgtacgcggtagagggtggggcggaccgccgggtgtcgggtcccgccgcagtggccctttccccgccgctttccgctgcagctcgggatttaattcattgctggaagcttcggagttagcagagccgagttaactcgttttcctgggatgggcttagggaaccccctgcaaggttactagcagctcctgaaacctctctctgcatccatcggggaggcgtgatgtggggccgctggtagaaatttgccggtgaccttccctgcaccctctctgcagccagccttgcggagaagacaggttttggcgaccttttgatttcttctgaattgtaagccgtggcttgacgcgggtgtgcattcattgtacgccttgcgtgtgtaagtaacgcagggttttccgagagcatccccgaggagccctgcccttgcctcacacccgcttggtgaccttggcagacactgatccccctgtggggctcgggctcatggtctctcctgagaagcttaccctgccgatggccgaggtcccttccaggccccgggtttttctaatcataaaaaaatacgtttacgagggtagaggatcctgcagaatctctagctgactcggaagacgaattttatatcctcatgtcttaagtcatgcatgcggcttttgcttaattaggcatcgttcatttgaaggggaaaatggttttatgtgctgcgcttcatctggcaccagtggttgcctgctcctcgtggcagggccgtgctgggtgtcacagagaggaaggagactcatctcctgccctctggtgtttagctgccctcccccgggcttatggctgctaatccttttccacggaaggatacagctgctgaaactgtggaagaggaatccatttctgctgcatgaaggggcacagacttgaatacagtcaggacaggttgtggtttcacttgtgtaatcctgagagcttgacagcttcgaggagtgtctaacattgctagtaacagagcctagaagcacctgaattccagctgtcacttggagaaggagagattcatacgaactgcgagagcatata

SEQ ID NO: 4763 - DNA, 1673 bp, Artificial sequence
  DNA replication origin
gccgcccgggcctcgcccgcccgcctgcccgccatggtgtcatggatcatctccaggctggtggtgtaagtggccttctcccccgcgcccctccgtcccctccctccccgcccccggccccgggctgcgcgcgcccctacagcgcccggtcccagtggctcgggctattaatacccggcgcagctaaatttagcaggtacagtagccgccgaggacgcctgcgggcggacgggcggcgcaggacgcggctgctgcccaggaggcagccggcgccggcggccgcttgcggggggctgggccgggacggcgagggctggggcgctcgggggttccgtgggggctgcgtctcgccgcgcgctggccgctttgttcctcagctcggtcgatttgcagaggccccgaatgggcgcaccgcggacacgcgtctctctcctttggcagaaatgtgaggtcgcccggcgccgcgccccgccgccccagcttttgtcaggtggaaaggacagcgcagacgaaccaggggcgctgcctggagggtcagcgcggaacgggtggagaggcagaggcggggctcccagtggggttggaaaaatcctcctttttaggtgtctgcatcgacagcggcaaaggcagctgggacatgggaagacgcatgtgaatcttggagtaaacgcctggagcccccggctccgactccttttgcaggggattgagagacaggggcaggtacctccaggaatgcacgggaaattttcaagtgacagccacccgcatggtggcgatgacacctcccaggccttgcaggagagcgcagagtcatctagggtgaggtctgtgtgaagtcattgggggtgggcgtgggggccgattttctccttcaagccccaggacctgtaggcgtttgaagagcttccccggtggatttattctcctttggagatagacgtggctgttccaagtccctgttcttccctaaccatcctggcctgagtcagaacagatttgccacctgctgtagctagcaggggctgaaatgggtgtggggagtctaaggcggggaggagggtggcaggcacctcgggctttttctttgtctgagaacacggggctctggaccccagtgattgtgcaccatcactccccacgttttgaaacaccacccatctcccttcccttctttactgattttcccttccgaagtggatctcagcattgtctcccgccaccattcagggctttcctcccaaagccagtgtctgtgcctctcagcccccaagtcattccgtgaaggcctctccacagctgttcctgactgcggggtgtttgcgctgcaccttgaggtggcatgttaaatatttagaagatttctgctggcagagccgacatgaataatacaggaaagtggctgacacgccttgcccagcctcatgcctgaccaacactgtcttgccttcagggtggtgtttcctctctgggatcgatattgccagtggcttctgggaagccctcagggtggggctggagagttgagctggcctggctggtgggctctctgtaggtcctgctgggctgggagtgagggcatctgatcctgggtcatgtgactatcattagttttattagcactgggtcatgtgactatcattagttttattagcacctccctcacccctgcc

SEQ ID NO: 4764 - DNA, 932 bp, Artificial sequence
  DNA replication origin
ggggcgcgcgcagcccggggccgggggcggggagggaggggacggaggggcgcgggggagaaggccacttacaccaccagcctggagatgatccatgacaccatggcgggcaggcgggcgggcgaggcccgggcggcgcggctcggctaggctgcgggcggcgcgggctgctgcggcgttcccggaacgtcagtcagctcacggcagccgccgccagactgagcgcgcccgccgccctgcccggcgttcgcgcgttggcgcagccgcggcacgttctggcggcggcggcggcggccccagccccccggggctcggcgggcccgcagcgattgggcggtgagctggtcagggcacccgcgggcccgccccgtcccgctcgccctggcccccggctgaaggcgggcgcgtcctgcgcgctccccggggcaccggccccgccaaaggaaccctgcagcggccccgtttgcagggcagggacccgggtgctgccccaccctcagcgttccagcggagaaactgaagtccgaacctgaacctcgggaatctgtctgcacctgtctaggtgggatgctgtcatccctcattcagctagtgcgttagcctcataaagggtttacctggatccagacctaacctcttcagtctgtccgttgctcagcactttctgcataagaaacaaacctgggcgcttgcctccctacttaaaattctacagagtccctatatgatcgtggtacctgcctagaaccgtgttgccaagaccattcccccaaatagtcctctagctcttttccctccaggcatcttggactcaaatatttgctgtttcttcttccctgtcagtacacgccacgcctcatcgtcctgccttggtttgattcagctccttcttctaggctgggctgaagggctacttcttcctagggaaggcc

SEQ ID NO: 4765 - DNA, 1178 bp, Artificial sequence
  DNA replication origin
aggcgctcctcacctcccggacgaagggcggccgggcagaggcgctcctcacctcccggacgaagggcggccgggcagaggcgctcctcacctcccggacgaagggcggccgggcagaggcgctcctcacctcccggacgaagggcggccgggcagaggcgctcctcacctcccggacgaagggcggccgggcagaggcgctcctcacctcccggacggggtggccgggcagaggcgctccccacttcccagacggggtggccgggcagaggcgctcctcactccccacttcctggacggggcggccgggcagaggcgctcctcacatcccagatggggcgactgccgggcagaggcgctcctcacttcccagacggggcgactgccgggcagaggcgctcctcacttcccagacggggcgactgccgggcagaggcgctcctcacttctcagatggggtggccgggcagaggcgctcctcagttcccagacggggtggccgggcagaggcactcctcagttcccagatagggcggccaggcagaggtgctcctcacatcccagatggggcggctgggcagaggcgctcctcacttctcagacgatgggtggccgggcagaggcgctcctcacctcccagatggggtggccaggcagaggcgctcctcacttcccagacagggcggcagggcagaggcgctcctcacttcccagacagggcggccgggcagagcggctcctcacatcccagaggatgggcggccaggcagagacactcctcacttcctagacggggtggtggctgggcagaggctgtaatcttagtactttgggaggccaaggcaggcggctgggaggtggaggttgtagcgagctgagatcacgccactgcactccagcctgggcaacgttgagcattgagtgagcgagactccgtctgcaatcccagcacctcgggaggccgaggcaggcagatcactcgaggtcaggagctggagaccagcccggtcaacacagtgaaaccccgtcgtctccaccagaaatacaaaaaccagtcaggtgtggcggtgcgtgcctgcaatcctaggcactcggcaggccggaggcaggagaatcatgggagcccaaggcagggaggttgcagcgagctgagatcacggcagtacagtccagcctcg

SEQ ID NO: 4766 - DNA, 1034 bp, Artificial sequence
  DNA replication origin
ggaagtgaggagcgtctctgcccggccgcccatcatctgggaagtgagaaatgcctctgcccggccgccccgtctgggaggcgaggagcgcctctgccctgccgccccgtctgggaggcgaggagcgcctctgcccggccgccctgtctgggaggcgaggagcgcctctgcccggctgcccagtctgggaagtgggcgcctctgcccggccgccccgtctgggacgtgaggggcgcctcttcccggccgccccgtctgggaggtgaggggcgtctctgcccggccgccaccccgtctgggaagtggggggcgcctctgcccggctgcccttcatctgggaggtggggagcgcctctgcctggccgccccatctgggaggctaggagcgcctctgcccagctgcccatcatctgggaggtggggagcacctctgcccggcccatcatctgggaggtggggagcacctctgcccggctgcccatcgtctgggatgtgaggagcgcctctgcccggccaccaccccatctgggaagtgaggtgcgcctctgcccggccgccccgtctgggaggtgaggagcacctctgcccggctgccccgtctgggaagtgaggagtgcctctgcccggccaccccatctgggaagtgtacccaatagctccgaagagacagtgaccatcgagaacaggccatgatgacgatggcggttttgttgaaaagaaaagggggaaatgtggggaaaagaaagacagatcagatggttactgtgtctgtgtagaaagaaggagacataggagacaccattttgttctgtactaagaaaaattcttctgccttgggatgctgttaatctataaccttacccccaaccccgtgctctctgaaacatgtgctgtgtcaactcagggttaaatggattaagggtggtgcaagatgtgctttgttaaacagatgcttgaaggcagcatgctcattaagagtcatctccactccctaatctcacgtacccagggacacaaatactgcggaaggccgc

SEQ ID NO: 4767 - DNA, 962 bp, Artificial sequence
  DNA replication origin
tgattctgggcaaatgacttaaattatctgcgcctccgtttgctcgtgggtaaaatgcggacagcaatcaacccgcgctccagggttgctggttcagcccgggagagaggccaggtgcaggggagctggctcctgcgctccggctctgggcgccgggtgcgctgggctgagccgaggcccgagcacaggggtccgcgcgcatcccggggtccccatcctgtctcctctgctatcccttctcccaggaaaaccggggggaggcgtccccgtggggaaaggtgcgcgaggccggggctggggcgcctccataaccccagcctggcccccaaccacgctctgttgctcttgcagcgaagcccaccacgacgccagcgccgcgaccaccaacaccggcgcccaccatcgcgtcgcagcccctgtccctgcgcccagaggcgtgccggccagcggcggggggcgcaggtgaggcgtgcgggggcccggggcgggggcggcacgcaccgcggggagagcccatgccagggacagccctgatactgtaggtagagtcaagggctgtccaagtggtgggaaaccgagatctgaggcggagagacgttcccgggacggtggggcggttgggaggtcccgggccctctcctaaatgtcggcgtctttggtgtcgtcagtgcacacgagggggctggacttcgcctgtgatatctacatctgggcgcccttggccgggacttgtggggtccttctcctgtcactggttatcaccctttactgcaaccacagtaagtcccgaggaatcgcggcgggaaggagtcggccccgctcctgcccttggctctgctagctccaggcggaccttgcgaggggggagcttggggttgagttttctgggactcccgagctgccccgcaggtacaggcacttctttctgggagatagaatgcgagaaagcccttcccgctcct

SEQ ID NO: 4768 - DNA, 983 bp, Artificial sequence
  DNA replication origin
gcgaaaaggagggtgactctcctcggcgggggcttcgggtgacatcacatcctccaaatgcgaaatcaggctccgggccggccgaagggcgcaactttcccccctcggcgccccaccggctcccgcgcgcctcccctcgcgcccgagcttcgagccaagcagcgtcctggggagcgcgtcatggccttaccagtgaccgccttgctcctgccgctggccttgctgctccgtgagtttgagacgcccgggaaggcaggggatggggcgggcggggggcggggggcgcgggactgcgggctcagcctcgctgcttgccgcctgcagacgccgccaggccgagccagttccgggtgtcgccgctggatcggacctggaacctgggcgagacagtggagctgaagtgccaggtgctgctgtccaacccgacgtcgggctgctcgtggctcttccagccgcgcggcgccgccgccagtcccaccttcctcctatacctctcccaaaacaagcccaaggcggccgaggggctggacacccagcggttctcgggcaagaggttgggggacaccttcgtcctcaccctgagcgacttccgccgagagaacgagggctactatttctgctcggccctgagcaactccatcatgtacttcagccacttcgtgccggtcttcctgccaggtccgcgcgccgggttgcggcacctctccgcgtggggcttggggttcacctcaacctgttttccacacctgggccctgctttcaagcctcttagcgcacctggaagcgacttagatactgttcccatttcacagacacagcaaactgaggctaacgcgaggctgagtagggactggggatggctttttacgtccggccgatctggactcgagttcggattcttgtgtgattctgggcaaatgacttaaattatctgcgcctccgtttgctcgtgggtaaaatgcggacagcaatcaacccgcgct

SEQ ID NO: 4769 - DNA, 1124 bp, Artificial sequence
  DNA replication origin
cactggagctggaaggtttcaggacagcaacagtcaaaaaggaaagatgagcctgtagtcccagctactcagggggctggggtgggaggatcactggagctcaggagtcccaaggccagcctgagcaaaacagcgagactccagtcttttttattttattttattttttaaagaaacaaaaaggaaggggacacacatgtgttagggacagaaaagagaaaaccgcctctacccaagcattcacccacatcacccacacctccctgcagagcacccagagctgggggtgaaagaaatgaggtccaaatgagacagcacaggagctgcctccagggcttaaacagaccagcattccaggccgagggaccgcaagtgcaagggcgtgaaagcacagagcgcaggggttgaatgacttcaagcctgtgaagctgcagctgcaggtgtatgggaaaggcagggcagggggctgtgcggaggctgggaggagccagcacccaagggctggtcaaccaagctgggggttgaatttccatccagcaatgcaggccatgggaggctgcagcagtgacgctgtcagatcccctttgtgagaataataatttttataacaacgtggctggaggactgatcaggagagagactggtgtgaattgaaggctgttgcaatggctccaagaagagatgaggctgtgtggtgagtttagccgctggatgaaaggccggaagaatgaggtcagcagcgcactgacaccgacacccaaagcttcggctgctgccgctctcatggaaatctcctgggggaagggagagggtccttcctcggtgaaaactggggctgctctagcgagttcctcagaagcgggcaggtcgctagttcctcttccttttcagccctcagtgcccattttgccaataaaaagtcccaaggtgacagtacaagagacgcctttagtgaaggcaaaggaagggacactcccctcctttgctgcctactctcgccctcacttcttgaaatctttggtctcccttcacccactctgtcactctcacaagacaaccatttccaaggactatttccaagcccttttcctcatccccaaacccgcagttttcagctgccccca

SEQ ID NO: 4770 - DNA, 1446 bp, Artificial sequence
  DNA replication origin
acctcccggggcagggggcgatgacacacatgcagctgcctgggggaggccggcggtgtcccctcctttctggaaagcggagggtcctggtgggctctggaaacgcagcccagacctttgcaatgctaggaggatgagggcggagacctcgcggtccccaacaccagactcccgccgccaccgcgcccggtcccgccctccccactgcccccccagctccccgacccaggcgccccgcccggccagctcctcacccaccccagccgcgactgtctccgccgagcccccggggccaggtgtcccgggcgcgccacgatgcggccgcggctgtggctcctcttggccgcgcagctgacaggtaaggcggcggcgcgcgggctacccaagggtctgcgctcccggggcctgagcggggaggtgataagtggctgtcctggccctggtcctggcagggtgcagcgtcgagcccgcggtggcggggcgcccgggaggcagcttggcaggcacggtccctaagggtggaaataaaatacccccatatcgcattaccccgggggaccggagagcccctggactgaggccacctcccctcaaaagcctggacgcaggagaaggggaggcagtgaaaaggggagcgagtgagggaaggaaagagagggtcgctggaggtcaccaggggaaggaaacaggtccctgcccagggtccccgcaggatgtgctcggaggaaggttggccaggccatgggtcctgtggacacatttttattacttccggggaagtgtttgtagtacaatcagacaaacatcgggcgttctcagttctcggagggctagggcagggtgatccctctggctcccgttctccctgatgtcgctggtgttgggtgtcatgggtagcgtggctccctaggaagcagcctggaggttgggttgttggagttggatggggcatctggattgtccttctgaataagcccagccagactgccttttggaagaagcctccacacacccggaaaactacccaaactggtcgatttgctctcgtgcccaaaaagcccaaagctggtcatcttgccagggggtgacaaggcctgcccgccgggggttctggcccagtgagtgcaacatcataaatagaaacagcccaggccgttcagagcactaaagtcattactgatggatctagaaacatcaggtccctctgagaatggaattcctgggttaccgaggggaacatgcagtgaggcctggctccatgtccagcacacagcagggccttggccacagcccggagtattcagttcctaggggacaaaaagcaagtgggccccgggaagagccggggtgtgtctcagccaggagaggaaatgcacactcacagcccaggccttgctcttacaggagtcgcttctgggttttcccggaagggcttcgggcacctgt

SEQ ID NO: 4771 - DNA, 980 bp, Artificial sequence
  DNA replication origin
cgctccccttttcactgcctccccttctcctgcgtccaggcttttgaggggaggtggcctcagtccaggggctctccggtcccccggggtaatgcgatatgggggtattttatttccacccttagggaccgtgcctgccaagctgcctcccgggcgccccgccaccgcgggctcgacgctgcaccctgccaggaccagggccaggacagccacttatcacctccccgctcaggccccgggagcgcagacccttgggtagcccgcgcgccgccgccttacctgtcagctgcgcggccaagaggagccacagccgcggccgcatcgtggcgcgcccgggacacctggccccgggggctcggcggagacagtcgcggctggggtgggtgaggagctggccgggcggggcgcctgggtcggggagctgggggggcagtggggagggcgggaccgggcgcggtggcggcgggagtctggtgttggggaccgcgaggtctccgccctcatcctcctagcattgcaaaggtctgggctgcgtttccagagcccaccaggaccctccgctttccagaaaggaggggacaccgccggcctcccccaggcagctgcatgtgtgtcatcgccccctgccccgggaggtgctcaggaaagggttgtgaccccgagtgacagtagaggctcagagaggtcaggatgtgtagtgcatggtggagctggccactaactcgggccgcttcttgtcttgtttgagtagcaattgaggggctcctgggtgccccgggctgggctgggcctggagtcagcaagccccaagtcttgccctcccttgccagggaggaaggaaaggtaaccggctgtgacactgagggaggtgagctgggaactggaggtgcagagaaggccccgacgctgtttgtaggttgtgggggtgcagcaagacctagatcttaagaatttcgaaggactgtgacgatcaccggctg

SEQ ID NO: 4772 - DNA, 978 bp, Artificial sequence
  DNA replication origin
ggcctcccccaggcagctgcatgtgtgtcatcgccccctgccccgggaggtgctcaggaaagggttgtgaccccgagtgacagtagaggctcagagaggtcaggatgtgtagtgcatggtggagctggccactaactcgggccgcttcttgtcttgtttgagtagcaattgaggggctcctgggtgccccgggctgggctgggcctggagtcagcaagccccaagtcttgccctcccttgccagggaggaaggaaaggtaaccggctgtgacactgagggaggtgagctgggaactggaggtgcagagaaggccccgacgctgtttgtaggttgtgggggtgcagcaagacctagatcttaagaatttcgaaggactgtgacgatcaccggctgcgccctgccggcgagtgccctggggctggctctatttgttgcgcgatccagccctggtggggagatttgtgaggggagacctggctcaggctgtgtcttcctgttcaaacgggggttagtagagagggggttggggaggtccagggagaactgggcatgcagcctgcaggggagagggaccccttggagggctgcgggagaggctccttgtaaatgtcaacaaagacccagccaggcaggtccatgggttaccctaagagcttagagtttatcggagaggaaatggcgtgtcccctgagatctaaagcaggcagccgggcaaggacactgtcacatttggtctccacatccagtattctttccatcccactcttgccccagcccctctgcccattgctggtgacagcattgctcatggctgagttgggtgcagagagttcaaaggcactgggggaaaagaagtcactcagcccagccagaggccagagtctcgctggatactgccttggctcccatacaatgtgtggtctttagcgaatggcttctttgactcagcgcaatgtttttcaggttcatccccatta

SEQ ID NO: 4773 - DNA, 1007 bp, Artificial sequence
  DNA replication origin
caccgccaacctggctcccgagacgcgtgaaaccagcgctcagccccgcagcagtcgccaattccaacaggaaagcgcctgaaagccactgacgtagccggcggaggaccactgtgacgcacttgtgtactgcgtcagcactgtgtatccttggcgacgtcggcgctccagctgcactcggccgggctcttggcagcaccctgtgctctgagggtgtcttgcccgccgggcgccgtggctcacgcctgtaatcccaacactttgggaggcggaggcgggcggatcacctgaggtcatgagttggagaccagcctggccaacatggtgaaaccctgtctctaccaaaactacaaaaattagccgggcatggtggcgggcgcctgtaatcccagctattcaggaggctgagacaggagaactgcttgaacctgggaggcggagattgcagtgagctcagatcgtgccactgcactccatcccgggcaacaagagcgatactccgtctcaaaaaaaaaaaaaaaaaaaaaaaggaatataccatggaacctgatacgattgagaaccttaatttaaaaaacactgcataaaaaaggtaaatgctgtcatttcaggtgatcagttgataataaaatgtctacaaacccaaactgaaatcatgcagtaatacatacattaatttttggataatcattaaagaccctagaaaatgtaacagatcctactcttcaaaataattgctattcagtattaaaataaataaagtgaaaggtgttggaaagatagaggaattgataggaataccacagaagtggaagaatagtatgaatatccataaattaatttatattagcaagaaataataatgcttacatcatcagatccagtctcagaaggccttgcttttttgggtgcaatgacaggggaaagtgatccttcaaagtcaaactgaaaagtaaccccaaaagaaaagataaaaatcataaatgcattcctgtcaactgatcaac

SEQ ID NO: 4774 - DNA, 1005 bp, Artificial sequence
  DNA replication origin
gccgccgccgccgccgccgccgccgcccggccaggtcgaggccgccgccgccgccgccgccgccgcccggccaggtcgaggccgccgccgccgccgccgccgccgccgccgcccggccaggccgaggccgccgccgccgccgccgccgccgccgccgccgcccggccgaggccaaggccgaggccgaggccgccgccgccgccgccgcccggccaggccgaggccgccgccgccgcccggccaggccgaggccgccgccgccgtccggccaggccgaggccgaggccgccgccgccgccgccgccgccgccgcccggccaggccggggccgaggccgccgccgccgccgccgccgccgccgcccggccaggccggggccgaggccgaggccgccgccgccgccgccgccgccgccgccgccgccgcccggccaggccgaggccgaggccgccgccgccgcccggccaggtcgaggccaccgccccgccaggtcgaggccgtcggtctcttcgagatccactcacctttccaggcgacggggcggagccctgcaccgaggcgaggtaccgctccccgtaggccttgctgcgcctcatcgcaccgccaacctggctcccgagacgcgtgaaaccagcgctcagccccgcagcagtcgccaattccaacaggaaagcgcctgaaagccactgacgtagccggcggaggaccactgtgacgcacttgtgtactgcgtcagcactgtgtatccttggcgacgtcggcgctccagctgcactcggccgggctcttggcagcaccctgtgctctgagggtgtcttgcccgccgggcgccgtggctcacgcctgtaatcccaacactttgggaggcggaggcgggcggatcacctgaggtcatgagttggagaccagcctggccaacatggtgaaaccctgtctctaccaaaactacaaaaattagccgggcatggtggcgggcgcctgtaatcccagctattcaggaggctg

SEQ ID NO: 4775 - DNA, 973 bp, Artificial sequence
  DNA replication origin
gcggcggcggcggcctcggcctcggcctggccgggctgcggcggcggcggcggcggcggcggcggcggcctcggcctggccgggcggcggcggcggcggcggcggcggcggcctcggcctcggcctcggccttggcctcgacctggccgggcggcggcggcggcggcggcctcgacctggccgggcggcggcggcggcggcggcggcctcgacctggccgggcggcggcggcggcggcggcggcggcctcgacctggccgggcggcggcggcggcggcggcggcggcggcggcctcgacctggccgggcggcggcggcggcggcctccacctggacgggcggcggcggcggcggcggcggcggcggcggcggcctcgacctggccgggcggcggcggcggcggcggcggcggcggcggcggcggcctcgacctggccgggcggcggcggaggcggcggcctcgacctggccgggcggcggcggcggcggcggcctggcctaaggtacttctgttggggaatattgtgcagtataataatatatggacatgcctgctgggcatggtggctcacacctgtaatcccaacattttgtgagactgaggcaggtggatcgcttgaggtcggtcgttcgagaccagcctggccaacgtggtgaaaccctttctctactgaaaatacaaaaatcagcggggtgtggtggtgcacttctgtaatctcagctacttgggagtctgaggcaggagaattgcttgaacccagaatgcggaggttgcggtgagccaagatcgtgccactgcactccagcctaggtgatagagttagggttagggttagggttaggcaagacattggcagattgtagacaagaataactttttcattttaggaattttcactgctggtaaatggtattccaagttgctatagagattccttgccttctaaaaggtatttcgtaatcacaaggccag

SEQ ID NO: 4776 - DNA, 994 bp, Artificial sequence
  DNA replication origin
cgccgccgccgcccggccaggtcgaggccggcgcctcaacagagcgcgccagggagcagcgcccgtcgggagccatgacgcctgagccatcgaggccgccgcccggccaggtcgaggccgccgcccggccaggtcgaggccgccgcccggccaggtcgaggccgtcggtctcttcgagatccactcacctttccaggcgacggggcggagccctgcaccgaggcgacgtaccgctccccgtaggccttgctgcgcctcatcgcaccgccaacctggctcccgagacgcgtgaaaccagcgctcagccccgcagcagtcgccaattccaacaggaaagcgcctgaaagccactgacgtagccggcggaggaccactgtgacgcacttgtgtactgcgtcagcactgtgtatccttggcgacgtcggcgctcgagctgcactcggccgggctcttggcagcaccctgtgctctgagggtgtcttgcccgccgggcgccgtggctcacgcctgtaatcccaacactttgggaggccgaggcgggcggatcacctgaggtcatgagttggagaccagcctggccaacatggcgaaaacccatctctactaaaaatacaaaaaattacccgggcgtggaggtgggcccctgtaatcccagctactcgggaggctgaggcacgagaatcgcttgaaactgagaggcgagggttgcagtgagctgagatcgcgccactgcactcaagcctgggcgagagtaagacttcctaaaaaaaaaaaacaaagcgcattctcaaatcccgcagtcagtcctgcgggtggaacacttagaggaaaagtcagacctctctatatgcaggcccctccaatactgtattttctgtcagcttataagtggacccaggcagttcaaacccatgttattcaagggtcaactgtgtatataggaacagccattcgcctggcacagtggctcaagccggtagccccagcactttgg

SEQ ID NO: 4777 - DNA, 1127 bp, Artificial sequence
  DNA replication origin
cgcccaggtgtccgcagccgttcggcccgggccccgccgaggccgcgtcctgctcctcgttccccaagcgggcggcgcgggaggctgaggcggccgaggcggcgggcgcactagccgcggcgccgggggagccccgcgcagccggagcccgcctgccccatggcgccctagccccctggcgagtcgccgctgctcccgttcgctcgctgcactcggccccgcgtccccaggccccgctcgcgacgttcgggtgcctgcgacggcgcggccgattgtttttgttttcacgggaaccgaccgatgacctggttctcccgggcggcaccaagtgccgccgactggggggagggggatggccacccgggcgaggaaaggaggcggagcgggccgtaccaagtacaccctcggggtggggggtgcgacccggcgagaacgggcggaggaacgcgacgggcgcccacacgcgccgccactctaatggtgtgcgccgtaccacacggaaggcgtgcgagggagagggcgagggtggagcgaggccccaattggcctgaggagctaaatagggaactttggagacagccccagcgctcggagagcgcaacaactacgcgctccataaacaaggaggcggaaaccggccctcaccactccgcccagaagcggggaatcccaaccaatgggcgcggggagtggtaagaagccaatccctggccgaggcgtaagccttcagccaatccgggctgaggggccaaaccaacgggctcgctgttggagggggtgacttggagagcgtaccgagaaacgagtagtttatggaaagccttgggggaaaactagacaaaaatacaaagggctgttttccataggacgtagccctgatcccaatttatttcgtctcctcatcgatcttaagggaaaggggtaccgtcattccgaacttttgggcgacggatccatctcccgggatgaaaaaccaagccaggccgcccgggggctggttctgcgtcggcggggggtccctaatgggaattaaaggcgggggtgattgggcccgggtgaggggagccgcttgctgctcgcgaaaggcccgcgccggctgtcagcgctgccccgggcttgcgacaccc

SEQ ID NO: 4778 - DNA, 1186 bp, Artificial sequence
  DNA replication origin
ggagaatgaggatgagggtgtgtcttaggtgggctgccatagcaaaataccatctactgggaggctaaaacaacagacactgatttcacatgctcttggtggctggaggtcagagatcaaggtgtcagcaagttttattctgaagcctcttcttttagcttgtaggcagccacatctcactgtatgctcacatgacctcttctcagtgtttgagcagatagagagagagagagtgctttgatatctcttcttacaaggatgttaatcttattggaccccatccttatgacctcatttgaccttaattatctccacgaaggcttcatctccaaatcacatcacactgaggcttggggcttcaacatatgcattttggggtgggcacagacattcagtcatgacagagagggagaagatctacttcctatggggtgacgcaggaagcccactctgcagagggcaacatgcatgctggaatggaaaggataagaatgaggtggctgtgggagaggagggtggggaggcatgtgagggcgcgaggtggagagaacagccagggcagaggccctgaggctccctgagcagctggtgtggtcgcagcttactcaggagtggagagtagcacaggggaggatgtgagatgagtggggcacgagtgtgcagagccttgtaaaccagctatggtgagggttttgggtttcctactacatccagtgcaacgttactgaaagattgtaagcagagggatgtcatgatctggcttaggcttaaggagctgtgtggacagtgggctggagggattgggaatggaggcaggagactgcttgtcagttttggtaagaggctgggaccatggtgatggccacgttctagaagagagagtggaatctgttgatggaggaaatgtgagagacagggagagggagcacttaagggcaactcctaggctctaggcagaacatttaggtgcatggcgatgctgtttactgagctgaggggatgcggaagggagcagaggcaacgtgtatgtaatgggtaattgcatgtgtcaatttgactgggctaagggatgcccagatagctggtaaacattgctttggggtgtgtctgtgaaggcatttccagaagagactagcatgtgaatcagtagactgagtaaagaagattaccctcaccagtgtgggtg

SEQ ID NO: 4779 - DNA, 1059 bp, Artificial sequence
  DNA replication origin
tgtgcatcctcaggcaccctgacgcgttcacatgcacgtacacgcgtgtgcacacgcacagtctttcacaagagtatgacgcattcacacaagagtgtgacgcgttcacacgcacgcacactccctctccctcgagcctggaaggtgcactgggctcataggggtggaaacctctaccgcggcagaggcacagcaccagggccaggatgctcgcttttatttcagacgtgaaaaccgaggcccgaaagagacagccagtgtccaaccctgtccaacgtctctgctgattgcgcctcctgtgtgtggccggggccggtgtgagggcagcgggcccaccgcatgcctggcccgccccagggcctcgagccacttcctcaggagctgctggcagctgcagcgacggcgcacccagagcccgagggtcccatggagccaggcttcccagcacacaggcacggtggagcctcggggtgggcatacaccccgcgagctcgcgggggctgggcactgcgggtcctcgggtggggactctggagttcagtcttgaaggacacagtcactgagggtcagggaaccaggagggtagggagggtagggaggggtgcctaggcctagtgggagaagcatgtgaaagttccctaagagggctgggggtgaacaagctctcggcccggcctctccgggtagactgctctggtgccctggagcctcccttctccaaggccccatggacgcccccagaggggtgacgccctcgcccacgctgagctctgagtgctgcacgagaactcccagagccgtgtgcacacgcactccccttgttataaccggcattaagtgcactcacattgtcgcatatcccctaccaccgtccatctccagaacttcttcatcttcccaaaaggaaaccatacccactgaacaccaactccctccttttgttaaccattgctctttctgtatttgaatttgcccattctgggcccctcatgtaagtgaaatcgcaatgtatttgtccttttgtggctggcttattccatctagcacaatgtcctcaag

SEQ ID NO: 4780 - DNA, 1128 bp, Artificial sequence
  DNA replication origin
cggcggagagacggacagcggcggagaggcggacagcggcggagaggcggacagcggcggcgcggcggagagacggacagcggcggagaggcggacagcggcggcgcggcggagagacggatagcggcggagaggcggacagcggcggcgcggcggagaggcggacagcggcggagaggtggacagcggcggagaggcggacagcggcggcgcggcggagagacggacagcggcggagaggcggacagcggcggcgcggcggagaggcggacagcggcggcgcggcggagagacggacagcggcggagaggcagacagcggcggcgaggcgcgcagcggcggcgcaggcgcggagaggcgctggcgccggctctggcgcggagaggtgcaggcccaggctccactccccagctgtgaaagggtaagaaccgagggtggctgagactcggggttgttcagggcggggtgggctctggacccagcaggcccggcacccaggtcagggctccaggggaggccaggtgggcgaaggccaagaaggggctggggctggtcaggaagggctcctggtgaccagagcactttgcgtgagccagcgtgggaggaaggtgggctagatgagccagggaggcgccgggaggggccttggcagaggcgaccccctccgtcacccccaggccactgaaccctgggtagcgagaaccgacaggggaggctgcagacagaggagtggaggctccccggctttgggggctctgagtagaagcatctagggggtccctcaagaggcccccaaacgcttccccatggtgagaaaagaaggcgcagagaggggcacggcgccggcgcagaggggcacacagcgagatttgctgtgagttcttttattgccccaagtgtacctcatcttggtagatttctattggctttaaaaatgtgtgtgttttgctgttggggagtggggtgttatacggatgtcagattttgctggttgactgttcagatcttttgtaaatccttgctccttttctgcctagtttcactctgtcacttacactagagtgcggtggcacgaacatgactcactgcagccttgacttcctagggtcaagtactccccctggctta

SEQ ID NO: 4781 - DNA, 2059 bp, Artificial sequence
  DNA replication origin
cagcgcctctccgcgcctgcgccgccgctgcgcgcctcgccgccgctgtctgcctctccgccgctgtccgtctctccgccgcgccgccgctgtccgcctctccgccgcgccgccgctgtccgcctctccgccgctgtccgtctctccgccgcgccgccgctgtccgcctctccgccgctgtccacctctccgccgctgtccgcctctccgccgcgccgccgctgtccgcctctccgccgctatccgtctctccgccgcgccgccgctgtccgcctctccgccgctgtccgtctctccgccgcgccgccgctgtccgcctctccgccgctgtccgcctctccgccgctgtccgtctctccgccgcgccgccgctgtccgcctctccgccgctatccgcctctccgccgcgccgccgctggccgcctctccgccgccgtccgcctctccgccacgccggcgccagcgctgtgtgcctttgcgagggcggagctgcgttctcctcagcacagacccggagagcattgcgagggcggagctgagttctcctctgcacacacttcggagatacagcgaaggcagagcaatgttctcctcagcagagacccgggcgggcgggccggtggcaccgcgagggcggagctgcgttctgctctgcacagaccttgggggcactgcctcgctttgggacaactcggggccgcatggacggtgaataaaatccttcctgtttgcagccctgtttgtggttggtggcagcgatggacactgcagccagccagagcgtagaaaggcgtcggggtaagtgcgctatccaggctgcactgtgggtggcctgggacgggttgggagccctatctcaggcgtcactgcccgtcttgggtggccggttgggtgtgctatctggggctgtgctgcctgcaccgggcggggggtggggggtggtttgggggccaaaccggggctgcactgcctttggtggggagccggttgggggcactatcccagactgtattgctggcaacagtgaggtgggctaagtgtgctatccggggctgcactgtgcggctgtcgggggggtggcggtttcgggttgagggcgctatggggtgctgtaatgcccatggtgtggggaggcggggcagtttgggtatgttgggtgtgctattgggggggtgacactgctggtggtagggggcagggtgggttgggggccatatcaggggctgcactgatggctttagctaggatttctggtactatgttaaacaacagtggtgacagggggcatccttatcatgttccagatcttagaggaaaagctttccatttttccccattccatatgattctagctgtgggtgtctttcctgtagtttttattatgttgcggtatgtttcttctgtgcccgtttctttgaggatttatagcatgaagggatgttgaatttcatcaaatgctttttcggtttcagttgacgtgatgatactgtttttgtcgtttatttggttgatatgatgtatcacattgtatgttgagtgacccttgggtcccagggatacatcccacttgatcatgatgaattatctttctaatgtattactgaatttgattcactggtattttgttgaggatttttgcatccatattagagatcctggcctgtagtttccttctttgatgcttttgtctgattttggtatcacagtaataatggtctcacagaataagtttggaagtattccctcctgtttttcaaaatagtttgagcaggattcgtactaggtctttaaattgtttggtgtgaagccatcagcagtgaagacatcagttcctgggcttttctttactgggagactttttctgatggcttcaatctcattacttgttaccaatctgttctggtcttggatgttttcattgtttaacctaagtaggttgtatgcatctaggaatttgccaatttctactaggctttccaatttattggcatatagtagccagttatgatcctttgaatttctgaagtattagttgtaatgtctccttttttaatctgtt

SEQ ID NO: 4782 - DNA, 959 bp, Artificial sequence
  DNA replication origin
tttccagaaaaccaacttttcatttaatcttgtatgttttttatttcaattttgtttgtgctacgatcttatttattttcttattttcggtttagtttgttctttactagttctttaagatgtattatttgaaggttttcttttgtttggatggtaggcacttatagctgtaaatctctgcctttgtactgctttctgcataacaagttttggtatactgtgttttcattaccctttgtttcatgaaatttttgaatttctgtcttagtatcttcattgatccgctagtcatttattcaggagggtagtgtttaacttccatgtgattgtattgtttccaaaattgcttttcttattgatacctagttttattcctttgtagtgaaagaagatggccacggagacagacagcagcgtggtcagagtggtaggagccggccatcagcgagagctgctccatgcctggctgctgggtcctagagcctgtggcccactggcttgcctcactgtggttggtggtggtggtgacagagactgcaggacgaccagatggtaggacaggggctatccagggctgcacctttcgcagtgtggggtgggttgagggcgctatccagggtgtcattgcctgcattaggggtactggttggtagcactgtacagggctgcactgcccacggcagggagggtgggttatgggtgctttctggggctgcaatgcccatggaggaggacaggttagggcactatcggttatacgctactggcggcattgggggacggaggtggggggcgctattgagggcaggactagcagtggagcgggggcgagttcggtgctatcaggggctgcactgctggtgtcggtcaacagagttggcatcccaggaaggagtggttctcctctccctgactccacactccagagggcgacccactcttggtcatactggagtgca

SEQ ID NO: 4783 - DNA, 1476 bp, Artificial sequence
  DNA replication origin
aatgattctccaaacttggcctctcaaaatgttgggattacaggtatgagccaccatgcctggcctaaaaatagtattatatttttgtatcatataattttcaattaggtaatatgaatattctgtacaggaaatacgcccttaattacataggaataaacatttgttacactgagaaaaatctaatagagctaaaaataaaaattaatttggaaaggtaattagatactgatacattcttacatttacacattctttcatatattcatatattcttttaacagtatcaatggtttggagttatgtgtacaaaaccatgacctatatgtaatacaactaataacaggcatttacaattcaaggcatattatatacaaagctttaacttcttatcaaaatattttgttttttttctttctgttttggcagatactatgaacacaacattcaactcacagacaccatggagcccttactaagcataaagtactgtgaaaagccagggctaggacagaactaagacagggccagggataggacagaacaggggcagggtcatggccagagaaaaaccaggggcagggtcacggccagggacatgagaggaccaaggccagggccagaagcagggcagaaccagggccagggcagggacatggcagggccagggccatggcaggatcagggtcagcagaaggccagggcaaggctagggtagcacagggccaaggcagggcagggtcagtgtagagcaaggaacgggccagggtatggcagggcagggacagggaggtccagggccagagtcaggtccaggacatggacaggacagggccagaaatatggcaggaccagaaaggggacagggcaagggcaaggccagagaaggaccatggaaaaaacatggccagggagggtccagggcaagggcaaggccagggcagaaccagagccagagcaggccaaaggcagggccagggcagggcaaggccagggtagggcggggccagtgtagggtgagggtagggccagggtgagttcagggccagggcaggactaagatagcacagggccaaggcagggccagggcagggccaaaaggaggggccagggccaagcatggccagtgtcagacctggggattgtcagggccagggtcagggtcaaggctgggccagggacagggccagagcaagggcagggccagggagaaagcagaaccagagaggatccagagcaaggccagggtcagggcagaaccaggaccaggataaggcaaagccaaggccagggcagggcaaggccagggcaaggcaagaccaggggaagggcaaggccagggtagaaaaggccagtgtagggccaggccagggtaggagaaggccatggtagggccaaggccaaggcagggcagggctagggtagcacagggcatggccaaaaacagggcagggccataacagtggcaggactagc

SEQ ID NO: 4784 - DNA, 1211 bp, Artificial sequence
  DNA replication origin
tggcttagctggctggatggcttggctggcatgcctggcttggctggctggctggcttggctggcttggctggcttggctgcctggctggcttggctgacatgcctggctttccttgctggctggcttggctggcttcgctgcctggctggcttggctagcatgcctgtcttggctggttggcgggcttggctggcttggctggcttggctgtctgggctgactggcttggctggcttggatggccgggtggcttggctggcttggctggctgggtggcttggctggctgggtggcttggctggtttggctagctggctgactgggtggcttggctagctggctggcttggctggttggctggcttggcaggcttggctggcttggctggctggcttggctggccgggtggcttggctggcttggctagccggctggcttagctggctggatggcttggctggcatgcctggcttggctggctggctggcttggctggctttgctggcttggctgcctggctggcttggctgacatgcctggctttgcttgctggctggcttggctggcttcgctgcctggctggcttggctagcatgcctgtcttggctggttggcgggcttggctggcttggctggcttggctgtctgggctggctgactggcttggctggcttggatggccgggtgacttggctggcttgagtggctgagtggattggctagcttggctggccggctggcttggcaggctggctggcttggctggcttggctcgctggctggctggctggcgggcctggctggctaggtggcttggctggcttggctggctgggtggcttggctggtttggctggctgggaggcttggctggcttggctggctggctggctgactggcttggctggcttggctggctggctggctgactggcttggctggcttggctggcttggctgggtggccggcttggctgacttggctgactggcttggctgggttggccagcttcgctggctggcttgggtctcttggctgcctgggctggctgtctggctgggctgtctggctggttggctggcttgtctggcttggctgggtggccggcttggctggcttggctgactggcttggctggtttggccagctttgctggctggcttgggtctcttggctggctttgctgggtggctggcttggctgggtggct

SEQ ID NO: 4785 - DNA, 1461 bp, Artificial sequence
  DNA replication origin
tgtgtcttggctggctggctggcttcattggcttggatggctggctggcttggatggctgcctggcttggctagcttggctggctgactggcttggctgccttggctggcttggctggcttggcttgctggttgtcttggctggcttggcaggctgacttggctggctttgctggctggctggctttgcaggcttggctggctggctggcttggcaggcttggcaggcttggctggcttggctggcttggctggctcctggcttggctggcttggctggcttggctggcttgcttggctggcttggctggctgggtggcttggctggcttggctggctggctggctgggtgtcttgggtggcttggctggctgggtggcttggctggtttggctggctgacttggctggctagctggcttggctgacttggctggctagctggcttggctggcttggcttggctgcctggccggctggctggctggctggcttggctggcttggcaggctggctggttgggtggcttagctggctggctggctggctgggtcgcttgactggcttggctggttggcttggctggcttggtttgccaggctggagtgcaatggtgcaaacttggctagctgcagcctccacctcctgtgttcaagtgatcctcctgcgttggcctcccgagtagctgggattagagatgagtgccaccacgcccatctattttttttgtatatttagtggagacgttgtttcaccatgttggccaggctggtgttttttttcattttgtttttttttctgagtgggagtctcgctctgttgcccaggctggagtgcagtggtgcaatctttgttcgctgcaacctccacctcccgggttcaagcgatcctcctgcctgggcctcccgagtagctgggattacattcgtgtgctaccatgctcagctaatttctttgtgtatttagtactgacggggtttcaccatgttggccaaggtgctctttttttttcttttttctgagatggagtctcgctccattgccctggttggagttcttcttttttttcagatggagtgtcactctgttgtccagggttcagtgcagtggtgcaatcttggctggctgcagcctctacctcccgagttcaagcgatcctcctgcctgggcctcccgagtagctgggattacaatcgtgtgccaccacgctcagctaatttctttgtatatttagtactgatggggtttcaccatgttggacaggctggtctttttttttttttttttttgagatggagtcttgctatattgcccaggctggagtgcttttttttcagatggaatctcactttcttgcccaggctggagtgcagtggtgcaatcttggttcgctgcaacctccacctcccgggttcaagcgatcctcctgcctgggcctcccgagtagctgggattacaggcgt

SEQ ID NO: 4786 - DNA, 1393 bp, Artificial sequence
  DNA replication origin
ttggctggcctgtcttggctggctggctggcttggctggcttggctggctggcttgtctggtttggctgcctgggctggctgtctggcagggctgtctggctggttcgctggcttggctggcttggctgggtggccggcttggctggtttggctgactggcttggctgggttggccagcttcgctggctggcttgggtctcttggctgcctgggctggctgtctggctgggctgtctggctggttggctggcttgtctggcttggctgggtggccagcttggctggcttggctgactggcttggctggtttggccagctttgctggctggcttgggtctcttggctggctttgctgggtggctggcttggctgggtggctggctggcttggctggctggctggtttggctggctgactggctgggctggctgggctcgctgtctggcttggcggctcggctggctggctggctggctggctgggctggctttgctggctggctggcttggctggcttggctggccgggtgacttggctggtttgagtggcttagtggattggctagcttggctggccggctggcttggctggctggctggcttggctggcttggctggctggctggcttggctggcttggctggcttggctagattggctggctggctggcttggctggcttggctggctggctggcttggctgtctgggctggctagctggcttggcaggcttggctggccgggtgacttggctagtttgagtgggtgagtggattggctagcttggctggccggctggcttggctggctggatggcttggctggcttggctggcaggctggtttggctggcttggctggcttggctggctgggtggcttggctggcttggctgggtcggtggcttggctggcttggctggctgggttgcttggatggcttaagtggctggctggctggcttggctggttggctggctctgctggctggcaggcttggctggcttggctggtggcttgcttggctggcttggctagttggctggcttggctggctggctggctggctgtcttgggtggcttggctggctgggtggcttggctggtttggctggctggcttggctggctggcttgctggcttgcttggctggcttggctgtctgggctggcttgttggcttgcatggcttggctggctgggtggctggatgtcctggctggctgcgtggctggctggcttggctggcttgtctggcttggctggctgggtggcaggctggcctggcttgctgggtggctgcctggcttggctggctgggtggctggctggcttggctggcttggctggcttggctggctggctggcatggctgccttggcgggctggcttggc

SEQ ID NO: 4787 - DNA, 1917 bp, Artificial sequence
  DNA replication origin
gccggctggcttagctggctggatggcttggctggcatgcctggcttggctggctggctggttttgctggcttggctgcctggctggcttggctggcatgcctggcttggctggctggcgggcctggctggcttggctggcttggctgcctggctggcttggctggcatgcctgtcttggctggctggcgggcttgactggcttggctggcttggctgcctggctggctggctggtgggcctggctggctaggtggcttggctggcttggctggctgggtggcttggctggcttggctggctgggaggcttggctggcttggctggctggctggcttggctggcttgtctggcttggctggctgggtggcaggctggcctggccggctgggtggctggctggcttggctggctgggctggctgggatggctggctggctggctggcttggctggcttggctggcttggcaggcttggctggtttagctggcttggttagctggctggcttggctggcttgactggctggctggcttggctggcttggctggctggctgagttggctggcttggctggcttgggtggcttggctggctggctggcttcattggcttggatggctggctggcttggatggctgcctggcttggctagcttggctggctgactggcttggctgccttggctggcttggctagctggcttggctggctggcttggctggcttgggtggcttggctggctggctggcttcattggcttggatggctggctggcttggatggctgcctggcttggctagcttggctggctgactggcttggctgccttggctggcttggctagctggcttggctggctggcttggctggcttggcttgctggctgtcttggctggcttggcaggctgacttggctggctttgctggcgggctggctttgcaggcttggctggatggttggcttggcaggcttggctggcttggctggcttggctggctgggtggcttggctggcttggctggctggctggctgggtgtcttgggtggcttggctggctgggtggcttggctggtttggctggctggcttggctggctggcttgctggcttgcttggctggcttggctggctggctggcttggctgtctgggctggctggctggcttggctggcttggctggctgactggcttgactggcttggctggcttggctggcttggctggctgactggcttggctggcttggctggctggctgagttggctggcttgggtgtcttggctggctggctggcttcattggcttggatggctggctggcttggatggctgcctggcttggctagcttggctggctgactggcttggctgccttggctggcttggctggcttggcttgctggttgtcttggctggcttggcaggctgacttggctggctttgctggctggctggctttgcaggcttggctggctggctggcttggcaggcttggctggcttggctggcttggctggctcctggctgcgctggcttggctggcttgcttggctggcttggctggctgggtggcttggctggcttggctggctggctggctggctgggtgtcttgggtggcttggctggctgggtggcttggctggtttggctggctggcttggctggctggcttgctggcttgcttggctggcttggctggctggctggcttggctgtctgggctggctggctctcttggatggcttggctgactgggtggctggcttggctgtctgtgctggccggctggcttggatggcttggctgactgggtggctggctggcctggctggctgggtggctgactggcttcgcaggcttgtctggcttggctggctgggtggcaggctggcctggctggttgggtggctg

SEQ ID NO: 4788 - DNA, 1305 bp, Artificial sequence
  DNA replication origin
tggctggctggatggcttggctggcttggctggcaggctggtttggctggcttggctggcttggctggctgggtggcttggctgacttggctgggtcggtggcttggctggcttggctggctgggttgcttggatggcttaagtggctggctggctggcttggctggtttggctggctggctggcttggctggttggctggctctgctggctggcaggcttggctggcttggctggtggcttgcttggctggcttggctagttggctggcttggctggctggctgtctgtcttgggtggcttggctggctgggtggcttggctggtttggctggctggctggcatggctgccttggcgggctggcttggctggcttggctggctggctgacttggctggcttgtgtggctggctgggctggctgcggtggctgggttggctggctggctgggctggctgggctggctggctggcttggctggctgggctggctggctggcttgaatggcttggctggcttggctggcctggctggctggctggcttggctggcttggcaggctggctggtttagctgtcttgggtggctgggtggctggctggcttggctggctgggctggctcctggcttggctggcttggctggcttgcttggctggcttggctggctgggtggcttggctggcttggctggctggctggctgggtgtcttgggtggcttggctggctgggtggcttggctggtttggctggctggcttggctggctggcttgctggcttgcttggctggcttggctggctggctggcttggctgtctgggctggctggctctcttggatggcttggctgactgggtggctggcttggctgtctgtgctggccggctggcttggatggcttggctgactgggtggctggctggcctggctggctgggtggctgactggcttcgcaggcttgtctggcttggctggctgggtggcaggctggcctggctggttgggtggcaggctggcttggctggctgggtggctggatggcctggctggttgggtggcaggctggcttggctggctgggtggctggatggcctggctggatggctggcttggctctcttggctggctggctggcttggctggctggcttggctggcttggctggcttggctgcctggctggcttggctggcttggctggcttggctgcctgggtggcttggctggcttggctggcttggctggcttggctggctggcttggttggcttggatggctggctggcttggctggcatggctggct

SEQ ID NO: 4789 - DNA, 1263 bp, Artificial sequence
  DNA replication origin
ggctggcttggttggctggcaggctggccggcttgactggctggctggttggctggcttggctagctgaatgtcttggctggttggctggcttggctgggttggctggctggcttggctggccgggtggcttggctggcttggctagctgactggcttgactggttggctggcttggctggcttggctggctggctggcttggctggcatgcctggctttgcttgctggttggcttagctggctggatggcttggctggcatgcctggcttggctggctggctggcttggctggcttggctgcctggctggcttggctggcatgcctggctttgcttgctggctggcttggctccctggctggcttggctggcatgcctttcttggctggctggaggtcttggctggcttggctggcttggctgcctggctggcttagctggcttgactgggtggcttggccatcttggctggctgagtggcttggccggcttggctggctggctggcttggctggctgagtggcttggccagcttggctggctgggtggcttggctggcttggctggctgggttgtttgcctggcttggctggctgggtggctggctggcttcgctggctgggtgtcttggctagcttggctggctgggtgtcttggctggcttgggttgctgggtctcttggcaggcttggctggctgggtggcttggcttgcttggctggctgggtgtcttcgctggcttggctggctggctggcttggctggcttgactggctggcaggcttggctggcttttctggctgactggcttggctggcttggctggcttggctggctgggttggctggcttggctggtttggctggctggctggcttgactggcttggctggctggctgtctggcttccatggcttgcttggctggctggcttggccggcttggctggctggctgtcttggctggcttggctggctgggttggctggcttggctggctcgctggcttgcctggcttgactggcttggctgtcttggctggctggctggcttggctggcttggctggctggcttgtctggtttggctgcctgggctggctgtctggcagggctgtctggctggttggctggcttgtctggcttggctgggtggccggcttggctggcttggctgactggcttggctggtttggccagctttgctggctggcttgggtctcttggttggctttgctgggtggctggcttggctgggtggctggc

SEQ ID NO: 4790 - DNA, 2732 bp, Artificial sequence
  DNA replication origin
ccccgcttggctggctggctggcttggctgggttggctggcttggctggctcgctggcttgcctggcttgactggcttggctgtcttggctggctggctggcttggctggcttggctggctggcttgtctggtttggctgcctgggctggctgtctggcagggctgtctggctggttcgctggcttggctggcttggctgggtggccggcttggctggcttggctgactggcttggctggctggctgtctggcttccatggcttgcttggctggctggcttggcggcttggctggctggctgtcttggctggcttcgctggctgggtgtcttggctagcttggctggctgggtgtcttggctggcttgggttgctgggtctcttggcaggcttggctggctgggtggcttggcatcttggctggctgggcggcttggccgcttggctggctggctggcttggctggcttgactggctggcaggcttggctggcttttctggctgactggcttggctggcttggctggctgggttggctggcttggctggtttggctggctggctggcttgactggcttggctggctggctgtctggcttccatggcttgcttggctggctggcttggccggcttggctggctggctgtcttggctggcttggctggctgggttggctggcttggctggctgggttggctggcttggctggctcgctggcttgcctggcttgactggcttggctgtcttggctggctggctggcttggctggcttggctggctggcttgtctggtttggctgcctgggctggctgtctggcagggctgtctggctggttggctggctttgctggcttggctgggtggccggcttggctggcttggctgactggcttggctgggttggccagcttcgctggctggcttgggtctcttggctgcctgggctggctgtctggctgggctgtctggctggttggcaggcttggctggcttggctgggtggccggcttggctggcttggctgactggcttggctggtttggccagctttgctggctggcttgtgtctcttggctggctttgctgggtggctggcttggctgggtggctggctggcttggctggctggctggtttggctggctggctggcttggctgtcttggctggcttggctagcttggctggctggctggcttggctggcttggctgcctggctggcttggctgtctgggctggctagctggcttggctggcttggctggccgggtgacttggctagtttgagtgggtgagtggattggctagcttggctggccggctggcttggctggctggatggcttggctggcttggctggcaggctggtttggctggcttggctggcttggctggctgggtggcttggctggcttggctggctgggttgcttggatggcttgagtggctggctggctggcttggctggcttggctggctggctggcttggctggttggctggctctgctggttggcatgcttggctggcttggctggtggcttgcttggctggcttggctagttggctggcttgtctgactggctggctgtcttgggtggcttggctggctgggtggcttggctggtttggctggctggcttggctggctgggtggcttggctggcttggctggctggctggcttggctggctttgctggctggctggcttggctgtctaggctggctggcttggctgtctgggctggctggctggcttggctggcttggctggccgggtgacttggctggcttgagtgggtgagtggattggctagcttggctggccggccggcttggctggctggatggcttggctggcttggctggcaggctggtttggctggcttggctggcttggctggctgggtggcttggctggcttggctggctgggttgcttggatggcttgagtggctggctggctggcttggctggcttggctggctggctggcttggctggttggctggctctgctggttggcatgcttggctggcttggctggtggcttgcttggctggcttggctagttggctggcttggctggctggctggctgtcttgggtggcttggctggctgggtggcttggctggtttggctggctggcttggctggctgggtggcttggctggcttggctggctggctggcttggctgtctgggctggctggcttggctgtctgggctggctggctggcttggctggcttggctggccgggtgacttggctggcttgagtgggtgagtggattggctagcttggctggccagctggcttggcaggctggatggcttggctggcttggctggcaggctggtttggctggcttggctgtcttggctggctgggtggcttggctgggtcggtggcttggctggcttggctgcctggccggcttggctgccttggctgtctggctggcttggttggctggcaggctggccggcttgactggctggctggttggctggcttggctagctgaatgtcttggctggttggctggcttggctgggttggctggctggcttggctggccgggtggcttggctggcttggctagctgactggcttgactggttggctggcttggctggcttggctggctggctggcttggctggcatgcctggctttgcttgctggttggcttagctggctggatggcttggctggcatgcctggcttgg

SEQ ID NO: 4791 - DNA, 1855 bp, Artificial sequence
  DNA replication origin
tggtttggctggctggctggctgggtggcttggctagctggctggcttggctggctttgccggccgggtggcttggctggcttggctagccggctggcttagctagctggatggcttggctggcatgcctggcttggctggctggctggcttggctggcttggctgcctggctggcttggctggcatgcctgtcttggctggctggcgggcttgactggcttggctggcttggctgcctggctggctggctggcgggcctggctggctaggtggcttggctggcttggctggctgggtggctggctgcctggctggctgattggcttggctggcttggctggctgggtggcttggctggctgggtggcttggctggtttggctggctggctggctgggtggcttggctagctggctggcttggctggcatgcctggctttgcttgctggctggcttggctggcttcgctgcctggctggcttggctggcttcgctgcctggctggcttggctgcctggctggcttggctagcatgcctgtcttggctggttggcgggcttggctggcttggctggcttggctgtctgggctggctgactggcttggctggcttggatggccgggtggcttggctggcttggctggctgggtggcttggctggcttggctggctgggaggcttggctggcttggctggctggctggctggctggcttggatggcttggttggcttggctggcttgggtggctggctgcctggctggctgattggcttggctggcttggctggctgggtggcttggctggtttggctggctggctggctggcgggcctggctggctaggtggcttggctggcttggctggctgggtggcttggctggcttggctggctgggaggcttggctggcttggctggctggctggctggctggcttggatggcttggctggcttggctggcttgggtggctggctgcctggctggctgattggcttggctggcttggctggctgggtggcttggctggtttggctggctggctggctgggtggcttggctagctggctggcttggctggcttggttggctggctctcttgttcggttggctggcttggctgccttggctggctggctgacttggctgacttggctgtctgggctggctgagtggctggctggcctggctggctgggtggctggctggcttggctggcttgtctgccttggctggctgggtggcaggctggcctggctggctggatggctggctggcttggctggctgggtggctggctggactggctggctgggtggctggctggcttggctgtctggctggcttgctggctggcttggctggctgggtggcttggctggcttggctggctggctggcttggctggcttggctggctggcttggctgtctgagctggctggctggcttggctggcttggctggccgggtgacttggctggcttgagtgggtgagcggattggctagcttggctggccagctggcttggcaggctggatggcttggctggcttggctggcaggctggtttggctggcttggctggcttggctctcttggctggctgggtggcttggctgggtcagtggcttggctggcttggctgcctggctggcttggctgccttggctgtctggctggcttggttggctggcaggctggccggcttgactggctggctggttggctggcttggctagctgaatgtcttggctggttggctggctgggctgggttggctggctggcttggctggccgggtggcttggctggcttggctagctgactggcttgactggttggctggcttggct

SEQ ID NO: 4792 - DNA, 1030 bp, Artificial sequence
  DNA replication origin
aaggatacacagtgctgacgcagtacacaagtgcgtcacagtggtcctccgccggctacgtcagtggctttcaggcgctttcctgttggaattggcgactgctgcggggctgagcgctggtttcacgcgtctcgggagccaggttggcggtgcgatgaggcgcagcaaagcctacggggagcggtacctcgcctcggtgcagggctccgccccgtcgcctggaaaggtgagtggatctcgaagagaccgacggcctcgacctggccgggcggcggcctcgacctggccgggcggcggcctcgacctggccgggcggcggcctcgacctggccgggcggcggcctcggcctcggcctcggccgggcggcggcctcggcctcggcctcggccgggcggcggcggcggcgacggcggcctcggcctcggcctcggcctggccgggcggcggcggcggcggcggcggcggcctcggcctcggcctggccgggcggcggcggcggcggcggcggcctcggcgtaggagcccgagaagattagttgtggcaataaaaatgattaaggatactagtataagagatcaggttcgccctttagtgttgtgtatggctatcatttgttttgaggttagttggattagtcattgttgggtggtaattagtcggttgttgatgaggtatttggaggtggggatcaatagagggggaaatagaatgatcagtactgcggcgggcagacctaggattgtgggggcaatgaatgaagcgaacagattttcgttcactttggttctcagggtttactatagttttttatttttatgggctttggtgaggggggtagatggtaatttgtatttaatatttttagctgagtgatgaggaatagtgtaagaagtatgggggcaattatggtgggccatacggtagtatttagttggggcatttcactgtaaagaggtgttggttctcttaatctttaacttaaaaggttaatgtgcggcggcggcggcggcggcggcggcctcggcctc

SEQ ID NO: 4793 - DNA, 1482 bp, Artificial sequence
  DNA replication origin
gcaagcagcaaggcggggctcaagaggcttcctgggcgctgggctggccgcgcaagcgcagtagcgcgtctcgccgccatggcgtctgtgctgtccagtcataagccggtagtggcggcgacttcccctcaggaagccgggtctccgcctcctcctcccatccagcctgctcggcggcggaggcggcggtggcggcagcggttgttcctgcctctccgccacctccaccgcggcttatcccctggctggcggcgttggcggggcgggggacagtagttgtagacgcccgcccctgcctcagagaaggtgagttcccgccccggcggcgggggcggcccggtcttcagcccctcaactcctgcgctccaggacaggcctcgcgcgcccagcccgccgggcgcgccccgagtgtgcgaaatggccgaccagggcgcggcccgagtcccgcgcacccctcaccggccgccgcccccggaaagagacgccagggcttccgagtggagtgcggagggaaggggcgctcggcttgcggaggaagccgaggtcggagtgggaaactaggggcgaccaagaggaaatctagacccggaggaaatctagacccggagcgtcagggaaagggaagtggggtgaggaaactcgaaaattgaggggacagggataaatagagaaaagcccaaacgtggaagagagtaagcttccgtttggtgaagttcagcatcctggaaagtagagactttgacgtaggacgcttagggagaggtggatttaggaatcggggaaagcaggaagtagcggggcccttgggggaagagaagaggggatgaggtttagggggggatcactttggagttatcctaggcttttgaggatatggccctataagacaagcttctaagatttataggcccgtcttgatagtgatctggggttttatgtgtgtgtgcttttaatcctctaatttagagacggaggtctcgctgtgcccaggctggagtgcagtggcgcgatcatagctcgctgcagcctccagctcctgggcttaagcgatccttctgcctcagcctccggagtagctgggactacgggcgcgagctaccgcgcccagctgagttttaatatgtacctaccaatgtcagagatacacgaagctggacgttaaagcgttgaaaaaggattttattccgcaactcctgacagaggggaaagactgagctccattcctattttcaccgagatgactgcgagttttaaagggagatgaagggagtagggagtgggaagagagggctcaagtagagtcagggaggtgaaaaattacaaagtgctgatcattgtaaaaacgcaagtaggccagctgtgtctcctatctgggaattatctaagataaaatactatcctcccacagagactgggagtcaggcccagtccttcctggttacatttcagagcgatggctttcaggtccttgagaaagacact

SEQ ID NO: 4794 - DNA, 1767 bp, Artificial sequence
  DNA replication origin
cacgtttctagcaagagttgatgagaatctgaaataaggcaacggcaatgtgacaggaaagtagagaatacccaaaataaactcttccacagtataccaggagacgtgcccatcaacaggaaaatcagtggagtcgtgtccagcagtgaaatgaacaaattacagctgtcttcaacagcttagacgaaattcaaaatattaagtgaaacaaacgagtcccagcgtactgcataaaggtgtaaatcttataacgtttaaaaacaatctaaatgtgttttagccatgcctatgtgtgataataaatagagaaaggaaatgatgaatacaaaccaggttagtgatttctttgggaaacaggggatgagatgatgagatatacacatacatacatatttgtgtgtataatgtatattatagatgtacatgctgaaagagcaacagggagagagagaaaaaggtcatttatggaccaatgatgacgacgtatgatgacaaaggattgtgcttaatctactctgtgtatttagggcataataaaggaaagattataactgaggctttattgtaaagatcataaaatgttttgttttacttatattccttttctttgtctttttcttcctccatgcatgcttgcttgcacgtagtcatttcagtagagggtagtcactagtgattgattaacttcatatcctaaccccagagtgcaggcaagattgatgaacttgtttttcttttaaagaacaatggacctggcacggtggctcacgcctgtaatcccagcactttgggaggccgaggttagtggatcacttgagcccagaagttcaagaccagcctgggcaacatagtgagacatccccaccccctgcccaatctctataaaaaatgaacaaaaatcacccgggcatgtgtgcatgcctgcggtcccagctacttgggaggctgaggtgagaggatcgcttgagcctgggaggtcgaggctgcagtgagtggtgatcccaccactgcactccagcctgggcgacaacgcgagaccctatcacaaacaaaacaaccatgacccttaggtcacgcagacctccttgatggtccagatggggcatcatctaatggggcagatgagacctagagtcccagggaggaaacagctttgatcatgggggatcccaccctctgtattcttaccttactcataaaggccccccagttacgttctaaggcatgtcagtatttgagagacttcttctcccgctctctcgctttggccaaacggaataaaccttcccccgctcctaagcactgaatatgtcggtgtttggcttactgcgcatttgttacacgaacctatattgtaggttctgttgataaggcaacagatcatgtatttttgagatactttgagggtggaactgtaaatttccagtttttttttttttaatcagttggctttatattcattctcccaaggcgagcgagcgacccccacgaacttttccttgccccaaaaaggagggcagacggacaggatcaaaaccagtcgcgccagcaagacattagagccgcgccgggaactgccaggccaagcgggcgaagcaagcagcaaggcggggctcaagaggcttcctgggcgctgggctggccgcgcaagcgcagtagcgcgtctcgccgccatggcgtctgtgctgtccagtcataagccggtagtggcggcgacttcccctcaggaagccgggtctccgcctcctcctcccatccagcctgctc

SEQ ID NO: 4795 - DNA, 1668 bp, Artificial sequence
  DNA replication origin
ggagccgcagggttggcccccaaagggatgctctcgcccgagcggcgagaccagccccgctcgcccctcgccgcggccgcgccgcagccgcccacggccgccgacatggccctctactgcggcgacaacttcggagtgtattcgcagcccggcctgcccccgcccgccgccaccgccgccgccccgggcgcccccccggcagccagggcgccttacgggctggccgactacgccgcgccgccggccgccgccgccaacccctacctgtggctcaacgggcccggcgtgggaggcccgccctccgccgccgccgcagccgccgccgcgtacctgggcgctccgccgccgccgccgccccccggggccgcggccgggccctttctgcagccaccgcctgccgccggcaccttcggctgctctcagcggcccttcgcgcagcccgcgcccgccgcgcccgcctcgcccgccgcgcccgcggggcccggggagctgggctggctgtccatggccagccgcgaggacctgatgaagatggtgcggccgccctactcgtattcggcgctcatcgccatggccattcagagcgcgcccgagcgcaaactcactctcagccacatctaccagttcgtcgccgatagcttccccttctaccagcgcagcaaggccggctggcagaactccatccgccacaacctgtcgctcaacgactgcttcaagaaggtgccccgcgacgaggacgacccaggtgagggccgctggcaggtgcttcccagccggggagggcggacgcgggtcgcaagggccggcgcaggggtcggtgtgcggctggaagatctgccaggagtcttcttgtccaggctgcgggtgggagcggatggaggaataaccacccaacccagaggacaaagggaaggagcaggagatcttcggaaggaagactcagtgagaaaggagcttgacctttacatccacattcgcagaggcgggccaattagagaaacgaaaaaaatctgtatcccagaacagaaggctacccctgggtggtgttccttaggccttttgaagggagggtctacttacaagggagctctcagataagggatggttataaagggatccgtgtgagctgggatttccatcacgtttcgcagaagacgcggtgggagaactggggtccagcccggctgtccctaggtgcacttcctcctcatcgggttccagagaggttcgctgtgtcctgaatagagcaagtacgatgcctacctctagagatagtggcacgggcatcatgagacgggggtctgggatgggagaactttaagcagagaggttctgcaaattgcagtttgggtaccttaactagttagaaatttagaaatgaatatcccatatttgctgcgttctggtctaagcccaattgctcctggagtgaggaggtctgtgttacagtggagtgagtgttaaccttctctgagaggtagaggtggagaaatgattaacaagaagagagaaacagagaatcctacttgaggttttcagaaggaacccagaacaaggaaaggaaaggggattgtgataggaaaaagagaaaagagatgaaaccattttagttgcacattacagagatccaggattttgtgtaaattatgtgactattctggagctcag

SEQ ID NO: 4796 - DNA, 1486 bp, Artificial sequence
  DNA replication origin
atgggcttcggcccgggttgcaggaggcgtgcaccctccggccggataggcggcgcactcagggaccaggaggccatcccaggtgagccccgccagccccagccggagcccgagctgcagctgccacctgcaagtggtgctctggctgcagcggtggcaaccccggatccagtccttccgcctcgcgcccatcagcgcggacccgggggcgacgcagtggcgaagtcgggctgtgggcccggcggcggcaccaggcggagaagcgccactcaaccccatccctgggctgcagagggcccagcgcggagggctccgcgcgtcgggagccggtggaagaggagaagagcgcgcgggcgacagtcatacaggccttggggcagggcgcgcctcgcgctccagggagccacgccagcccgctgcgcctccgcagcaaccgccgcctgcacgtggcggggcgagagagctgctagggcggtttctccgcctcgggcctgttgggcggggccggctaaggtgcgcgtgctcgctggtcctaacggttctgttgggcgtttctgctgagaggcgggaggggctgagagtctgtgcgaaggtaggtggacagactgcattgcttgttgttgcgcttcggaggcggcgatccccgaaggcgagctgaaatacggctggagcgttcccaggctacagtttgtagccgacgattgtggaagactaggagccggagaggtggcccaccctcagggagcgcttgtgctcggagggcttctcatttccccaataccacattaaatcgtctcatctgaggaggatccacagagctgtcttctatggtaatctggagaaactggagtaccttctgctcacgtatcatgacaccaatgagagagacaaggaggaaaggtaatgggggccgggagccggggctgcgggaggaggcctgtggatgtggagaagtacccccttccaggctgagggctgtggggcggatggtccggagctcggggtatggacgggggctagggggtgcctggctggggtgggagtgagtggaacggggcctggggagtgggggtatatggggtggcggggtgtggagtgagttgggggatgggagtggggagtagggggtgcatggggtgggggtgtgaatgggctgaggtggatggaatgaaggcttggggggtaggggtgtggacagtgtggggtggggagatggggtgagggttcagtgggatagaggactggaggtgggggtgaggtgtaggggtgaatggggtgggggaaaggggtgcagaggtgaggggggcgagtcctgtcaccaaaggggctggactttctttcctggcaggctcagccgcacctgggatgtggaaaccttggcgggggtgagcacccaggccattttcactagcagcaaaacaaaaacaaaacttcagctggtttccaatcactcaccatgcttcttctttataaatcattttaaagt

SEQ ID NO: 4797 - DNA, 990 bp, Artificial sequence
  DNA replication origin
tccgaagctgtatcatgaacgctgtggtgggcggctggtggggagcggggttgccgtcccactaccctctggaaacctcagccatgaagggcccctgtgggcaccttttcccggcacacggtgctgtgtctctccactcttgggctctgcagtgacttgaggggtcaagtctatgatcccacgggaggctgggctaatgaggggaccagagacctcagtgctgtgcagggagtcccgaaccaccctggtggaaggccctgcccaactccccagtcctcccgccagctccctgtggtgtccaggagacctgtggtcaggcctggaggagaagctcctcctcccctcgacatcctccctgcagcccttgctcttcaccagagcctcctgactccccaggaccccagagaggaccgaccctctccagccgacctctgggctcaggacagctgggtggggcagccacaggagctgcctgtagggagcagagtcaggacggggaccgagccggacacccattctggaagtgtctgcacttccaggcaggggaaggacggcagtgggtagctgggagtgctgggccgaagatgggcattgtcaggccctcagtggggactgggaggtagaggtggggaggtctgtggaggaaggagaagaagggccagtgtcccgagtcgggggtggttggcagtggacgaggccgacaggaacagacctgagcttggggagctccactcagaacgaggcatccttcagggttctgtgcatactggtgtccctggctgggggccaggccccgaagtggagcctgggactgtgagggtgggggtgtgtgctgggatgggaggtggatggagcccccccgtaaccgcctggccgcttgggctgaaccttggacttcggagccagaacagacataggaaatggcctaattgcatttgcgcaggaacaccaaatccctcgcagctgcacggggctgagccggggccacag

SEQ ID NO: 4798 - DNA, 1217 bp, Artificial sequence
  DNA replication origin
cagggtggttcgggactccctgcacagcactgaggtctctggtcccctcattagcccagcctcccgtgggatcatagacttgacccctcaagtcactgcagagcccaagagtggagagacacagcaccgtgtgccgggaaaaggtgcccacaggggcccttcatggctgaggtttccagagggtagtgggacggcaaccccgctccccaccagccgcccaccacagcgttcatgatacagcttcggagtgtgggtcggggtctatctgggaaaccagggcaaaggcggtggcagctggcagcacccacacccacagctggggcactgctcacatgagcccccatcagcaggccccttggttgtgccacaggcaggggtcctgccccagggagggggtagtccggggggggggggctcgagggtgtggcacaggccagctgtcactcctccctggagaggcagctggggacgcagctgggaggggagccaggagcagagacagcccggggccagcaggtgggtgacaggtggggcagcgggaggggcacgtgctgtccgcctggggctggggtatagagacgggaacctgccccccaatgcctggtgctggcccagcctccccccggggcctctagcaccttcccagttgtgtctgcatcctcctgggcgtggcgggggagggtgggggtcaacccctttccttgtagtcccgcgccagtgggcaagggagacgccccagtgagcaggagcctagcctctctgcctggggaggccaggtgatgagccacccggagtgggaggaggccttgaacttgggtctgaaagatgagcaggggtttgctgggccgggtacaggcaaaagctaatgcaggaaggcagagagcaggagcgcttagagggagtggctctgtgcagccggagtcagatgggtgaccctcacgcaggaggaagcactgggaccctctctcctcacgctgggtcccccgcctccctctaggatccccacacccaggtccttctgggcctctgccacacagatcaggtctggaaggctccctggaggaggcggcgcctagacttggacataggcctgcagagctgatttctctcacaaccctgggaagacagaactcctcagcgggttgatgtggaggagagcggagcctccctccaaggcaccagtccagtgctgggggcgacacagagagccagaagct

SEQ ID NO: 4799 - DNA, 1368 bp, Artificial sequence
  DNA replication origin
ggaaaggcatgtatttgcttgtgtgtgcatgcttgtcaatgtctgtgtggttatgcagatccatgagggggtttcttaatgcagtttaatggaatccatttggggtgaaaggcgttattttgtctaaagaaatctccccctcgcagtccagctctcagacagactctgcaacagggtcaccatctggggatgtctgatagatctgggacatgcgatcgaaaggactctcctcctcctcatcgttgtccacctcttggtccccggggggaacggcgttgggcatcatgtggatgcaggcagctgcgatttccttgtggaagaccatgtcttggttgtaggagatgagctcattgctgatgttcaccgtctccaccggcgtgcgggagcagacgtggctgcaccccagcagctgggcaaacaccttccagaagtcggcgttgaaggcatagtgactgggttgagtgaggagttggcccagcagaaccagatgaagacatcgaatgtggtctcactgacgcaggggaagccggccggagggcctttggggtgtccactgcggaaagggaccatgcagttaaggatgaagaagggcagccagcaacacacgaagacccccatgatcactgacagggtcttgagaaccttggtctccttcttgatggaaaaccgcaggctggtgtcgggcgtgcagcctgcgctgctccggcagctctgcacgtgctctgcggccctctccaaggaggaaatcctgcagatctgcacctgggcgatgcggtagatgtgcgtgtaggtcacgatcatgatggccatggggatgtagaagttgatgagcgaggaagagatggcgtaggttcgattcaggctggagtcacagttctctgccctcacgtcaggctcccaaacggcctcctcccagggcgtccagttggccaggttgtttggcaggtccagcccacctcaagagaccgcctggtccctgtgccagttgagctggaccggaatgaaggagatgaggctggacaaggtccaggccgggccgaccatgaccaaggccatgcgctgggtcatcttgcgctcgtagcggaagggcctggagatggcccagtagcggcccacgctgatgacctgctgacgcacaggttcaggatggaggcggtggagcacatgatgtcgaaggccacccagacgtcgcagaacgcttcaaagggccaataaccggccacctcggcgactgccttccagggcatgaccagcagcgccacgaagaggtctgacacagccagagacacgatgaagacgttggtcatcttggcgcgcaggtggcggctccgcacgatggctgcggacatcagcacgttgcccagcaag

SEQ ID NO: 4800 - DNA, 868 bp, Artificial sequence
  DNA replication origin
cgggtcccggagcgcgcggggacttctcttgcctcctgaagcgcctctggctcggtggccgtggtgcgcccctccagtctccgcgatgggcacaggaagcggctggtgcccgctgacagccagggctgttctcgggagtctgcggcgcgccagatggcagcgacagcggctgtgtctggttcggagcgagagaagagagcaagccgccactgaggggctggggcaggcagtcgccggcgctgggctggcactgcggcgctgccgcggtccctggccgatccccggccccgcgtcccgccccccgcgcctccgcgctggactccagccccacctgtgccttggcgccctagctcaccgcgctcagcgcgccagagtgtagtggtgatcccgcaggtcccaggagcgccccagcgccagaccctagccccgggccggggaaaattcttcccgggaagaccgaagggtgcttggcgtagccctggagccctagccctagccacgcttggggaacaagaggtggggtagggatgaggacgcgagggcttccggagggggaaagagcatttgaagtgtaaagggggcggccttggattgcccacagacctgagtcccaatccggactttattcctggctctgcaactttaagcgccctacataactttacctggccttggtttccttctccatagcgtgggataatgattcctactcctagaacagtgtcagaactcagggaagccgtctaggatgaggtgtccagtagacagtgtctcctaggaacaggctcccgcttcccccagcccctccctcaacaccatgaggctggggcttcacctgacctcttgggagactgtccttttccccacc

SEQ ID NO: 4801 - DNA, 1055 bp, Artificial sequence
  DNA replication origin
tggcagtaggaaattagattttgagtgaaattaaggttgcaaaggcggcgggggacaaaaagccgcagcagcaaaaatccgcggcggcgggggcaaaaagcagcggcggacaaaaagccgtggcagcgggtggggggggggcaaaaagctgtggcgggtaaaaagtcgcggtggcagggggcaaaaagccgcagcggcagggggcaaaaagccgtggtggcggcgggggcgcaaaaagccgtggcggcggggggacaaaaacccagggtgggcaaaaagccgtggcagcaaaattcgcagcggcggggggtcaaaaagccgcggcggacaaaaacccgctgcgccgggggtgcacaaagccgcggcgggcaaaaagcctaggctgggtggagggaaaaagcctcggcggcggggggtgcaaaaagccgcggcggcggaggcaaaatgccgcggcggcggggggcgaaaagccgcagtgggtaaaaagccgcggcggcgggggaggggaacaaaaagccacggaggccggggggcaaaaagccagggcgggcaaaaagccagggcggcggagggcaaaatagtggagatggggtagaatgccagcatagcctggcattgctggagtgtgatgtgataggaaatgtgcagccaaagacaaaaaaagatgtaagtaggcttgactcattgcagctaagaacccagatgttatcttgagggattaactaataagcagttcaaatcagaatggcacattctgatttgttttttgtatgttcacatttggcaggcatagatactgtttgaaaagagaaaagtcagtagatacaggtaacaaacttaaatatgtgccaagtctagaaacaagagacgagggggataaggacctttcgaaataaaatgcaagatttgaaaactgattggctgggggatgaggaaaaggcaggtctttaaggtcaatccctgttttgctttaagttcttagggggtggttttatcacatattgtagaatacgtcatttcagttttgaacatcttgagttaaattgtcctaacat

SEQ ID NO: 4802 - DNA, 1780 bp, Artificial sequence
  DNA replication origin
gccagcggcggagaggcggccagcggcggagaggcggccagcggcggcgcggtggagaggcggacagcggcggagaggcggacagcggcagcgcagcggagagacggacagcggcggagaggcagacagcggcagcgcggcggagaggcggccagcggcggagaggcggacagtggcggagaggcggacagcggcggcgcggcggagaggcggacagcggcggagaggcggacagcggcggagaggcggacagcggcagcgcggcggagagacggacagcggcggagaggcagacagtggcggcgaggcgcgcagcggcggcgcaggcgcggagaggcgctggcgccggctctggctcggagaggcgcaggcccaggctccactccccagctgtgaaagggtaagaaccaagggtggctgagactcggggttgttcagggccgggtgggctctggacccagcaggcccggcacccaggtcagggctccaggggaggccaggtgggcgaaggccaagaaggggctggggctggtcaggaagggctcctggtgaccagagcactttgcgtgagccagcgtgggaggaaggtgggctggatgagccagggaggcgccgggaggggccttggcagaggcgaccccctccgtcacccccaggccactgaaccctgggtagcgagaaccgacaggggaggctgcagacagaggagtggaggctccccggcttttggggctctgagtagaagcatctagggggtccctcaagaggcccccagacgcttccccatggtgagaaaagaaggcgcagagaggggcacggcgccggcgcagaggggcacacagcgagatttgctgtgagttcttttattgccccaagtgtacctcatcttggtagatttctattggctttaaaaatgtgtgtgttttgctgttggggagtggggtattatacggatgtcagattttgctggttgactgttcagatcttttgtaaatccttgctccttttctgcctagtttcactctgtcacttacactagagtgcggtggcacgaacatgactcactgcagccttgacttcctagggtcaagtacttcccctggcttaacttcctgagtagctggtactataggtgtgtgccgccacacctggctaaatttaaaattttttggagagatgaggccttgctatgttgcccaggctcgaactcctggcctcaagctatcctttgtttttgcctcccagagttctgggattacaggcatgagccactgtgcccggcctctgcctagttttaacagttgctaagaggaggatgttgaagtagatgtcttcttggtgggttaatccttttgtcattaagcagttgttatggtcacttccttttcaccccattggtgaaggaggggtccctgccctaaagtgtaggagatggctgaacacgacacctggcgtggatggatgagattgacagcagtgttttagtcgcatatacccacagctcagaggaggacactgcatgccacacagggtcagatgggcaccgcactctgtagcggagtgagggctgcgggctgaggaagcaggcgggcttggtagtaacaagagcacacaatgaccaatggttcccaagggggaatgcaattggcttgtttgaataaattcatgggctcgcagacaggtgaagtgaaacttcttaggctgaggtgcaactgttctggctgataaaagaactagccaggtggggagcctttcctgttgggtggcagggtagggggtg

SEQ ID NO: 4803 - DNA, 2039 bp, Artificial sequence
  DNA replication origin
tcagccacccttggttcttaccctttcacagctggggagtggagcctgggcctgcgcctctccgagccagagccggcgccagcgcctctccgcgcctgcgccgccgctgcgcgcctcgccgccactgtctgcctctccgccgctgtccgtctctccgccgcgctgccgctgtccgcctctccgccgctgtccgcctctccgccgctgtccgcctctccgccgcgccgccgctgtccgcctctccgccactgtccgcctctccgccgctggccgcctctccgccgcgctgccgctgtctgcctctccgccgctgtccgtctctccgctgcgctgccgctgtccgcctctccgccgctgtccgcctctccaccgcgccgccgctggccgcctctccgccgctggccgcctctccgccgctggccgcctctccgccacgccggcgccagcgctgtgtgcctttgcgagggcggagctgcgttctcctcagcacagacccggagagcattgcgagggcggagctgagttctcctctgcacagacttcggagatacagcgaaggcagagcaatgttctcctcagcagagacccgggcaggcgggctggtggcaccgcgagggcggagctgcgttctgctctgcacagaccttgggggcactgcctcgctttgggacaactcggggccgcatggacggtgaataaaatccttcctgtttgcagccctgtttgtggttggtggcagcgatggacactgcagccagccagagcgtagaaagacgtcggggtaagtgcgctatccaggctgcactgtgggtggcctgggacgggttgggagccctatctcaggcgtcactgcccgtcttgggtggccggttgggtgtgctatctggggctgtgctgcctgcaccgggcggggggggggggtggtttgggggccaaaccggggctgcactgcctttggtggggagccggttgggggcactatcccagactgtattgctggcaacagtgaggtgggctaagtgtgctatccggggctgcactgtgcggctgtcgggggggtggcagtttcgggttgagggcgctatggggtgctgtaatgcccatggtgtggggaggcagggcagtttgggtatgttgggtgtgctattgggggggtgacactgctggtggtagggggcagggtgggttgggggccatatcaggggctgcactgatggctttagctaggatttctggtactatgttaaacaacagtggtgacagggggcatccttatcatgttccagatcttagaggaaaagctttccatttttccccattccatatgattctagctgtgggtgtctttcctgtagtttttattatgttgcggtatgtttcttctgtgcccgtttctttgaggatttatagcatgaagggatgttgaatttcatcaaatgctttttcggtttcagttgacgtgatgatactgtttttgtcgtttatttggttgatatgatgtatcacattgtatgttgagtgacccttgggtcccagggatacatcccacttgatcatgatgaattatctttttaatgtattactgaatttgattcactggtattttgttgaggatttttgcatccatattagagatcctggcctgtagtttccttctttgatgcttttgtctgattttggtatcacagtaataatggtctcatagaataagtttggaagtattccctcctgtttttcaaaatagtttgagcaggattcgtactaggtctttaaattgtttggtgtgaagccatcagcagtgaagacatcagttcctgggcttttctttactgggagactttttctgatggcttcaatctcattacttgttaccaatctgttctggtcttggatgttttcattgtttaaccaaagtaggttgtatgcatctaggaatttgccaatttctactaggctttccaatttattggcatatagtagccagttatgatcctttgaatttctgaagtattagttgtaatgtctcctttttttaatct

SEQ ID NO: 4804 - DNA, 885 bp, Artificial sequence
  DNA replication origin
aaccaacttttcgtttaatcttgtctgttttttatttcaattttgtttgtgctatgatcttatttattttcttattttcagtttagtttgttctttactagttctttaagatgtattgtttatttgaaggttttcttttgtttggatggtaggcacttatagctgtaaatctctgcctttgtactgctttctgcataacaagttttggtatactgtgttttcattaccctttgtttcatgaaatttttgaatttctgtcttagtatcttcattgacccactagtcatttattcaggagggtggtgtttaacttccatgtgattgtattgtttccaaaattgcttttcttattgatacctagttttattcctttgtagtgaaagaagatggccacggagacagacagcagcgtggtcagagtggtaggagctggccatcagcgagagctgctccatgcctggctgctgggtcctagagcctgtggcccactggcttgcctcactgtggttggtggtggtggtgacagagactacaggacgaccagagtggtaggacaggggctatccagggctgtacctttcgcagtgtggggtgggttgagggcgctatccagggtgtcattgcctgcattaggggtactggttggtagcactgtacagggctgcactgcccatggcagggagggtgggttatgggtgctctctggggctgcaatgcccatggaggaggacaggttagggcactatcggttatacgctactggcggcattgggggacggaggtggggggcgctattgagggcaggactagccgtggagcgggggcgagttcggtgctatcaggggctgcactgctggtgtcggtcaacagagttggcatccaagg

SEQ ID NO: 4805 - DNA, 1369 bp, Artificial sequence
  DNA replication origin
ttaattacataggaataaacatttgttacactgagaaaaatctaatagagctaaaaataaaaattaatttggaaaggtcattagatactgatacattcttacgtttatacattctttcatatattcatatattcttttaacagtatcaatggtttggagttatgtgtacaaaaccatgacctatatgtaatacaactaataacaggcatttacaattcaaggtatattatatacaaagctttaacttcttatcaaaatattttgttttatttctttctgttttggcagatactatgaacacaacattcaactcacagacaccatggagcccttactaagcataaagtactgtgaaaggccagggctaggacagaactaagacagggccagggataggacagaacaggggcagggtcatggccagagaaaaaccaggggcagggtcacggccagggacatgagaggaccaaggccagggccagaagcagggcagaaccagggccagggcagggacatggcagggccagggccatggcaggatcagggtcagcagaaggccagggcagggctagggtagcacagggccaaggcagggcagggtcagtgtagagcaaggaacgggccagggtatggcagggcagggacagggaggtccagggccagagtcaggtccaggacatggacaggacagggccagaaatatggcaggaccagaaaggggacagggcaagggcaaggccagagaaggaccatggaaaaaacacggccagggagggtccagggcaagggcaaggccagggcagaagcagagccagagcaggccaaaggcagggccagggcagggcaaggccagtagggtggggccagtgtagggtgagggtagggccagggtgagttcagggccagggcaggactaagatagcacagggccaaggcagggccagggcagggccaaaaggaggggccagggccaagcatggccagtgtcagacctggggattgtcagggccagggtcagggtcaaggctgggccagggacagggccagagcaagggcagggccagggagaaagcagaaccagagaggatccagagcaaggccagggtcagggcagaaccaggaccaggataaggcaaagccaaggccagggcagggcaaggccagggcaaggcaagaccagggaagggcaaggccagggtagaaaaggccagtgtagggccaggtcagggtaggagaaggccatggtagggccaaggccaaggcagggcagggctagggtagcacagggcatggccaaaaacagggcagggccataacagtggcaggactaacaacagggccagggcaagtgctggaccagagcatggtg

SEQ ID NO: 4806 - DNA, 1650 bp, Artificial sequence
  DNA replication origin
gccggctggcttagctagctggatggcttggctggcatgcctggcttggttggctggctagttttgctggcttggctgcctggctggcttggctggcatgcctggctttgcttgctggctggcttggctgacttggctgcctggctggcttggctggcatgcctgtcttggctggctggcgggcctggctggcttggctggtttggctgcctggctggcttggctggcatgcctgtcttggctggctggcgggcctggctggcttggctggcttggctggctgggaggcttggctggcttggctggctggttggctggctggcttggctggcttggctggcttggctggctttgtggcttcactggcttggctggctggctggcttggctggcttggctggctggctggctggctgtcttggctggcttggctgcctggctggctgagtggctttgctggctggctggctggctggcttggctggcttggctggctagctggcttggctgacttggctggctagctggctagctggcttggctgacttggctggctagctggcttggctgacttggctggcttggctggcttggctggctggctggctggctggcttggctggcttggcaggctggctggttgggtggcttagctggctggctggctggctgggtcgcttgactggcttggctggctggcttggctggcttggtttgccaggctggagtgcaatggtgcaaacttggctagctgcagcctccacctcctgtgttcaagtgatcctcctgcgttggcctcccgagtagctgggattagagatgagtgccaccacgcccatctattttttttgtatatttagtggagacgttgtttcaccatgttggccaggctggtgtttttttcattttcttttttttctgagtgggagtctcgctctgttgcccaggctggagtgcagtggtgcaatctttgttcgctgcaacctccacctcccgggttcaaacgatcctcctgcctgggcctcccgagtagctgggattacattcgtgtgctaccatgctcagctaatttctttgtgtatttagtactgagggggtttcaccatgttggccaaggtgctcttttttttttcttttttctgagatggagtctcgctccattgccctggttggagttcttcttttttttcagatggagtgtcactctgttgtccagggttcagtgcagtggtgcaatcttggctggctgcaacctctacctcccgggttcaagcgatcctcctgcctgggcctcccgagtagctgggattacaatcgtgtgccaccacgctcagctaatttctttgtatatttagtactgacggggtttcaccgtgttggacaggctggtcttttttttttttcttttttttgagatggagccttgctatattgcccaggctggagtgcttttttttcagatggaatctcactttcttgcccaggctggagtgcagtggtgcaatcttggttcgttgcaacctccacctcctgtgttcaagcgatcctcctgcctgggcctctcgagtagctgggattacaggcgtgtgccaccacgcccagctaatttttttgtgtatttagtagagacggggtttcaccacgtcggcc

SEQ ID NO: 4807 - DNA, 1017 bp, Artificial sequence
  DNA replication origin
cggaggcaaaaaaagccgcggcgggcagaaagtcccggggggggggggcaaaaacccgcatccggcaaaaaaaccgcggcggcaggggcaaaaagccgcgtcgcccggggtcggggggtggcaaaaagacggggcgggcaaaaagccgcgtcggcaggggggaaaaatccgcgggggcgggggggcaaaaagccagcggcgacaaaaagccgcggcggcggggggcaaaagcccgcggcgggcaaaaagccgcggcggcggggggacataaagccgcggtggcgaggggggtcacaacaaagccgcggcgggcaaaaagccgaggcggggtggggggcaaaaagccgcggcggcagtggggcaaaaagccacggcggcggggggtaaaaagccgcggcgggcaaaaagtcgcggcggcgggggacagaaagccgtggcgggcaaaaagccgaggcggggtgggggggaaaaagccgcggcggcggggggcgaaaagccacggcggtggggggcaaaatagtggagatggggtagaaggacggcacagcttggtattgctggagtgtgatgtgataggaaatgtgcagccaaagacaaaaaaagatgtaagcttgactcattgcagctaagaacccagatgttatcttgagggtattaactaataagcagtttaaatcagaatggcatattctgatttgttttttgtatgttcacatttggcaggcatagatactgtttgaaaagaggaaagacagtagatagaggtaacaaacttaaatatgtgcgaagtctagaaacaagagaccagggggataaggacctttcaaaataaaatgcaagatttgaaaactgattggctggggcatgaggaaaaggcaggtctttaaggtcaatccctgttttgctttaagttgttaagggttggttttatcacatattgtagaacatgtcatttcagttttgaacatcttgagttaaattgtcctaacatatcttatgaatttgattttcttccct

SEQ ID NO: 4808 - DNA, 2791 bp, Artificial sequence
  DNA replication origin
ggtatcatgaaaattatgcacaaacctttttttctttaagctcctcagctatcattagcagtagtgtattttatctgtggcccaggagcattcttcttccaatgtggccctgagaagccaaaagactggacacctgtgcactagatcaaaaggctactccttctggaagcaattgtaaagaatttctgacattatcttgacatgaaaaccaatcgatagtgagacagaatgcaaaatcttcaagaatttttcttgttggtttttcttttttgagtcaaggtgttgcgtgtggcccaggctggaatacactggtgagatcacagctcagtgcaggctcaagtgctcctccctcctcagccacagtagtaggtaggactacagatgtgcacaaccacccctggctactattttttttttttttttgtagagacggggtctcactatgttgtccagattggtctcaaactccttgactcaagtgatccaggacaggataacaggcgtgagccaccacacctggccatgtgcatgaacttttaagacaaacacagggccccacaaaagttaaggttttcccacctaatttccaggagatcttttggtgcaaggatgagaaacccttaaaagtacacagaaaactccaaagattcaagagagttcattcgggctgagccagcccactgggcagactgaccttcaaacaaggcccacccatgacatacaccagatggctctccaagaatctctctagttctcagggtccctaaggtactggacagagctagggaggcaaacccatttgcttcttcctgcaggaaaccccttgaggtcaagaccccacaatcagacgaggatggagtggctcaccctcagtcaacaggccagactcaaggtgttataatgtcttaaccaagggtgcgggcctccaggtctgactcccaactcactgctcctttagtaaccactctttgttaattctccttaacaggggttcctggcaagtcatttctccctcaggccttcggtttcctcacctacaagatgagagggctggaccagatggcaattcgggaggtaaggggatgtccgcgtgcagcccaccccgcccatgggcccctcgagcatccatcacagttcccaacacgcaaccgctccacaaatcctgcccaaggtgagggctggtcccaggtcctccggctgccgcatcagcgagtgcaggagggaggagaagcctccaaaggggcgacgtgggctcaaggatgcaactcggccaggagtgaactggggcccagatggaggtgtccagtctggtgctggagcccagccctggtccctgacccccttacctccagggtccgtatctcctgctgggtgaggtccttggacacagcgcacttggtgcgcagcccgcgcaggctgccaatggagatgccgatgagcttctggagctgcccgcactgctgcagcgcccggctggccgcggcccctgtgcctccctacgcgatagccgcgtcacccccgccactgccctccttcttctctcccattgcagccgagcgcagcgccgctctatgcgggctgcagcagcccaggagcggagccctgggcgccggcgtctaggcaaggaacccctgattcgggagagctggaccaggagcgccccttggcgctgccttagtcaggacgccggtagagctggcagccaagtctgcggatccagccctcagacccgcggcggtgggggcaaaaaactgcagcggtgggcgcaaaaagccggggcggtgggggaaaaagccagggcgacgggggcaacaagccatggcggcggggtcaaaaagccgtggttgcggacgcaaaaagctgcggtggcggaggcaaaaagctacggtgatgggcgcaaaaagccgtaaaaagccgcagcattgggggcaaaaagccgcgacggcgggggcaaaaagcccgggcggtgggggcaagaagccggggcaggaaaaacctgcggcgacaggggaaaaaactcgcggcggcgggggccaaaagccgcggcggcaaaaagccgcaaaaagccggggcggcgggggcaagaagccgcggcgggaaaaacctgcggcggcgggggcgaaaagccgtaaaaagccgcggcgccgggggccaaaagtcataaaaagccgcggcggcggtggcaaaaagccgcagcggaaaaagtcgcggtgacgggggctaaaagctgcagcggcgggggaaaaaagccgcggcggcgagggcaaaaagccgcggcggtggggggagaaagacgcaaaaagctgcggcggcaaaaagccgcggctgcgagggcaaagatccccaaaaagccgcggcagcaggggctaaattccgcgaggccgggggcagaaagccgcggtggcgggggcagaaagcaacggaggcgggggcaaaaagtcgaggcggcggaggcataaagccgcaaaaacccgcagcagcgggggcaaaaatccatggcggcaaaaagccgcgtcggcgggggcaaagtagtggaaatggggtagaaggccagaacagcttggcattcctggagtgtgatgtggaaggaaaagtgcagaggaagacaaacaaagatgtaagttggcttgactcagtgcagctaagaacccagatgttatcttgatgttatctatcagctaattttttgtagtttagtagagaaggggttttaccacattggccaggattgtctggatctcctgacctcatgatccacgcacctcagcctcccaaagtgatgggattagag

SEQ ID NO: 4809 - DNA, 2163 bp, Artificial sequence
  DNA replication origin
taaggggatgtccgcgtgcagcccaccccgcccatgggccccttgagcatccatcacagttcccaacacgcaaccgctccacaaatcctgcccaaggtgagggctggtcccaggtcctccggctgccgcatcagcgagtgcaggagggaggagaagcctccaaaggggcgacgtgggctcaaggatgcaactcggccaggagtgaactggggcccagatggaggtgtccagtctggtgctggagcccagccctggtccctgacccccttacctccagggtccgtatctcctgctgggtgaggtccttggacacagcgcacttggtgcgcagcccgcgcaggctgccaacggagatgccgatgagcttctggagctgcccgcactgctgcagcgcccggctggccgcggcccctgtgcctccctacgcgatagccgcgtcacccccgccactgccctccttcttctctcccattgcagccgagcgcagcgccgctctatgcgggctgcagcagcccaggagcggagccctgggcgccggcgtctaggcaaggaacccctgattcgggagagctggaccaggagcgccccttggcgctgccttagtcaggacgccggtagagctggcagccaagtctgcggatccagccctcagacccgcggcggtgggggcaaaaaactgcagcggtgggcgcaaaaagccggggcggtgggggaaaaggccagggcgacgggggcaacaagccatggcggcggggtcaaaaagccgcggtggcggaggcaaaaagctgtggtggcggaggcaaaaagctacggtgatgggcacaaaaagccgtaaaaagccgcagcattgggggcaaaaagccgcgacggcgggggcaaaaagccgcggcggcaaaaagatgcggcggcgggggcagaaagcggctgcggggggaggggggcaaaaagcaggggcggcaaaaagccgcggcgggaaaaatctgcggcggcgggggaaaaaagccgcggcggcgggcaccaaaagccccaaaaagcggcggcgacgggtgccaaaagccgcaaaaaaccacggctgagggggcaaaaagccacggcggcaaaaagccacgacagcggggatataaagccgcaaaaaccctcgtcggcaggggcagaaagccgcagcggcgggggtaaaaagcaacgggggcgggggcaaaaacccgcggcggcgggggcaaaaagcggcgggggtgataaaaacccgcggcggcgggggcaggaagccgcatacggggcaaaactccgcggtggcaggtgcaaatagccgcaaatagccgcggcggtgggggcaaaaagcccgggcggtgggggcaagaagccggggcaggagaaacctgcggcgacaggggaaaaaagtcgcggcggcgggggccaaaagccgcggcggcaaaaagccgcaaaaagccggggcggcgggggcaagaagccgcggcgggaaaaacctgcggcggcgggggcgaaaagccgtaaaaagccacggcgccgggggccaaaagtcataaaaagccgcggcggcggtggcaaaaagccgcggcggaaaaagtcgcggtggcgggggcaaaaagctgcagcggcagggggaaaaaagccgcaaaaagccgcggcggtggggggagaaagacgcaaaaagctgcggcggcaaaaagccgcggctgcgagggcaaagatccccaaaaagccgcggcagcaggggctaaattccgcgaggccgggggcagaaagccgtggtggccggggcagaaagcaacggaggcgggggcaaaaagtcgaggcggcggaggcataaagccgcaaaaacccgcagcagcgggggcaaaaatccatggcggcaaaaagccgcgtcggcgggggcaaagtagtggaaatggggtagaaggccagcacagcttggcattcctggagtgtgatgtggaaggaaaagtgcagaggaagacaaacaaagatgtaagttggcttgactcagtgcagctaagaacccagatgttatcttgatgttatctatcagctaattttttgtagtttagtagagaaggggttttaccacattggccaggattgtctggatctcctgacctcatgatccacgcacctcagcctcccaaagtgatgggattagaggca

SEQ ID NO: 4810 - DNA, 1413 bp, Artificial sequence
  DNA replication origin
tgcccccaatgctgcggctttttacggctttttgtgcccatcaccgtagctttttgcctccgccaccacagctttttgcctccgccaccgcggctttttgaccccgccgccatggcttgttgcccccgtcgccctggccttttcccccaccgccccggctttttgcgcccaccgctgcagttttttgcccccaccgccgcgggtctgagggctggatccgcagacttggctgccagctctaccggcgtcctgactaaggcagcgccaaggggcgctcctggtccagctctcccgaatcaggggttccttgcctagacgccggcgcccagggctccgctcctgggctgctgcagcccgcatagagcggcgctgcgctcggctgcaatgggagagaagaaggagggcagtggcgggggtgacgcggctatcgcgtagggaggcacaggggccgcggccagccgggcgctgcagcagtgcgggcagctccagaagctcatcggcatctccgttggcagcctgcgcgggctgcgcaccaagtgcgctgtgtccaaggacctcacccagcaggagatacggaccctggaggtaagggggtcagggaccagggctgggctccagcaccagactggacacctccatctgggccccagttcactcctggccgagttgcatccttgagcccacgtcgcccctttggaggcttctcctccctcctgcactcgctgatgcggcagccggaggacctgggaccagccctcaccttgggcaggatttgtggagcggttgcgtgttgggaactgtgatggatgctcaaggggcccatgggcggggtgggctgcacgcggacatccccttaccccctgaattgccatctggtccagccctctcatcttgtaggtgaggaaaccgaaggcctgagggagaaatgacttgccaggaacccctgttaaggagaattaacaaagagtggttattaaaggagcactgagttgggagtcagacctggaggcccgcacccttggttaagacattataacaccttgagtctggcctgttgactgagggtgagccactccatcctcgtctgattgtggggtcttgacctcaaggggtttcctgcaggaagaagcaaatgggtttgcctccctagctctgtccagtaccttagggaccctgagaactagagagattcttggagagccatctggtgtatgtcatgggtgggccttgtttgaaggtcagtctgcccagtgggctggctcagcccgaatgaactctcttgaatctttggagttttctgtgtacttttaagggtttctcatccttgcaccaaaagatctcctggaaattaggtgggaaaaccttaacttttgtggggccttgtgtttgtcttaaaagttcatgcacatggcc

SEQ ID NO: 4811 - DNA, 1011 bp, Artificial sequence
  DNA replication origin
gggggggcaaaaagccgcggcggcgggggggcaaaaagccgggggtgggcaaaaagccggggcgggcaaaaccccgcggcggcagtggggcaaaaagctggagcgggtaaaaagccgcggcaacaaaaagccgcggcggcgggggcgcaaaagccgcggtggacaaaaagctgcggcggcggggtgcaaaaagccgcggtgggcataaacccgaggcggcggggggcgggggggtgcaaaaaaccgccgtggggaaaaagccacggcggcggggggcaaaagcccgcggcgggcaaaaagccgcggcggcggggggacataaagccgcggtggcgaggggggtcacaacaaagccgcggcgggcaaaaagccgaggcggggtggggggcaaaaagccgcggcggcagtggggcaaaaagccacggcggcggggggtaaaaagccgcggcgggcaaaaagtcgcggcggcgggggacagaaatccgtggcgggcaaaaagctgaggcggggtgggggggaaaaagccgcggcggatgggggcaaaatagtggagatggggtagaaggacggcacagcttggtattgctggagtgtgatgtgataggaaatgtgcagccaaagacaaaaaaagatgtaagcttgactcattgcagctaagaacccagatgttatcttgagggtattaactaataagcagtttaaatcagaatggcatattctgatttgttttttgtatgttcacatttggcaggcatagatactgtttgaaaagaggaaagacagtagaggtaacaaacttaaatatgtgcgaagtctagaaacaagagaccagggggataaggacctttcaaaataaaatgcaagatttgaaaactgattggctggggcatgaggaaaaggcaggtctttaaggtcaatccctgttttgctttaagttgttaggggttggttttatcacatattgtagaacatgtcatttcagttttgaacatcttgagttaaattgtccta

SEQ ID NO: 4812 - DNA, 1466 bp, Artificial sequence
  DNA replication origin
tttctttcttctttcttcctttctttccctgtctctccttccttctgtcttcctttctttctctctctccttccttccttcttttttctctttctttcttctttctttctctctctccttccttccttctttcttccttgctttctctccttccttccttacttccttctttctttctctctctccttctttctttctttctctctttctttctttccttccttccttcctttctttcctttctttctctctctctccttctctctctctcccaatctctctctttctctctccccttccttccttccttcctccttctttccttccttccttccttccttccttcccttttctctctctctctttccagctggcttggctggctggctgacttggctggcttgtgtggctggctgggctggctgcggtggctgggttggctggctggctgggctggctgggctggctgggctggctggctggcttggctggctgggctggctggctggcttgaatggcttggctggcttggctggcctggctggctggctggcttggctggcttggcaggctggctggtttagctgtcttgggtggctgggtggctggctggcttggctggctgggctggctggctggcctggctggctggctggcttggctggcttggcaggctggctggtttagttggcttggttggctggctggcttggctggcttgactggctggctggcttggctggcttggctggctggctgagttggctggcttggctggcttgggtggcttggctggctggctggcttcattggcttggatggctggctggcttggatggctgcctggcttggctagcttggctggctgactggcttggctgccttggctggcttggctggctaggcgggcttggctggcttggctggctggcttggctggcttggctagctggcttggctagctggcttggctggcttggcttgctggctgtcttggctggcttggcaggctgacttggctggctttgctggctggctggctttgcaggcttggctggcttggctggcttggctggcttgcttggccggcttgcctggctgggtggcttggctggcttggctggctggctggctgggtgtcttgggtggcttggctggctgggtggcttggctggtttggctggctggcttggctggctggcttgctggcttgcttggctggcttggctggctggctggctggcttggctgtctgggctggctggctctcttggatggcttggctgactgggtggctggcttggctgtctgtgctggctggctggcttggatggcttggctgactgggtggctggctggcctggctggctgggtggctgactggcttcgcaggcttgtctggcttggctggctgggtggcaggctggcctggctggctgggtggctggctggcttggctggctggg

SEQ ID NO: 4813 - DNA, 787 bp, Artificial sequence
  DNA replication origin
ctggctttgcaggcttggctggcttggctggcttggctggcttgcttggccggcttgcctggctgggtggcttggctggcttggctggctggctggctgggtgtcttgggtggcttggctggctgggtggcttggctggtttggctggctggcttggctggctggcttgctggcttgcttggctggcttggctggctggctggctggcttggctgtctgggctggctggctctcttggatggcttggctgactgggtggctggcttggctgtctgtgctggctggctggcttggatggcttggctgactgggtggctggctggcctggctggctgggtggctgactggcttcgcaggcttgtctggcttggctggctgggtggcaggctggcctggctggctgggtggctggctggcttggctggctgggtggctggcttggctggctgggtggctggctggccttgctggctgggtggctggctggcttggctggctggctggctgggtggctggctggcgtggctggctggctggctggctggctggctggcttggctgtctgggctggctggctctcttggatggcttggctgactgggtggatggcttggctgtctgtgctggctggctggcttggatggcttggctgactgggtggctggctgggtggctgactggctttgcaggcttctctggcttggctggctgtgtggcaggctggcctggctggctgggtggctggctggcttggctggctggctggctgggtggctggctggcctgg

SEQ ID NO: 4814 - DNA, 1365 bp, Artificial sequence
  DNA replication origin
tggctgcctggctggcttggctggcatgcctgtcttggctggctggcgggcctggctggcttggctggtttggctgcctggctggcttggctggcatgcctgtcttggctggctggcgggcttgactggcttggctggcttggctggctgggaggcttggctggcttggctggctggttggctggctggcttggctggcttggctggcttgtctggcttggctggcttggctgtctttgtggcttcactggcttggctggctggctggcttggctggcttggctggctggctggctggctgtcttggctggcttggctgcctggctggctgagtggctttgctggctgggtggctggctggcttggctggcttggctggcttggctggctagctggcttggctgacttggctggctagctggctagctggcttggctgacttggccggctaggtagcttggctgacttggctggctagctggcttggctggcttggctggcttggttggctggctggctggctggcttggctggcttggcatgctggctggttgggtggcttagctggctggctggctggctgggtcgcttgactggcttggctggctggcttggctggcttggtttgccaggctggagtgcaatggtgcagacttggctagctgcagcctccacctcctgtgttcaagtgatcctcctgcgttggccttccgagtagctgggattagagatgagtgccaccacgcccatctattttttttgtatatttagtggagacgttgtttcaccatgttggccaggctggtgttttttttcatattctttttttttttctgagtgggagtctcgctctgttgcccaggctggagtgcagtggtgcaatctttgttcgctgcaacctccacctcccgggttcaagcgatcctcctgcctgggcctcccgagtagctgggattacattcgtgtgctaccatgctcagctaatttctttgtgtatttagtactgacggggtttctccatgttggccaaggtgctcttttatttttcttttttctgagatggagtctcgctccattgccctggttggagttcttcttttttttcagatggagtgtcactcggttgtccagggttcagtgcagtggtgcaatcttggctggctgcagcctctacctcccgggttcaagcgatcctcctgcctgggcctcccgagtagctgggattacaatcgtgtgccaccacgctcagctaatttctttgtatatttagtactgacggggtttcaccgtgttggacaggctggtctttttttttttttttcttttttttgagatggagtcttgctatattgcccaggctggagt

SEQ ID NO: 4815 - DNA, 983 bp, Artificial sequence
  DNA replication origin
ttggctagcttggctggctagctggcttggcaggctggatgtcttggctggcttggctggcagactggtttggctggcttggctgtcttggctggccgggtggcttggctgggttggtggcttggctggcttggctgccaggccggcttggctggcttggctgtctggctggcttggttggctggcttggctagctgactgtcttggctggttggctggcttggctgggttggctggctggcttggctggctgggtggcttggctggcttggctagccggccggcttcgctgacttgatggcttggttggcatgcctggcttggctggctggctggctggcttggctggcttggctggcttggctgcctggctggcttggctggcttggctcactggctgggtggctggcctggctagctgggtggcttggctggcttggctggctgggcggcttgggtgggcggcttggctggcttggctggctgggtggctttgctggcttggctggctgggaggcttggctagttggctggcttggctgtctgggctggctagctggcttggctggcttggctggctggctggcttggctggcttggctcgctggcttgtctggtttggctgcctgggctggctgtctggctgggctgtctggctggttggctggcttggctggcttggctgggtggccggcttggctgacttggctgactggcttggctgggttggccagcttcgctggctggcttgggtctcttggctgcctgggctggctgtctggctgggctgtctggctggttggctggcttggctggcttggctgggtggccggcttggctggcttggctcactggcttggctggtttggccagctttgctggctggcttgggtctcttggctggctttgctgggtggctggcttggctgggtggctggctggcttggctggctggctggtttggctggctgactggctgggct

SEQ ID NO: 4816 - DNA, 1409 bp, Artificial sequence
  DNA replication origin
caaatgattctccaaacttggcctctcaaaatgttgggattacaggtatgagccaccatgcctggcctaaaaatagtattatatttttgtatcatataattttcaattaggtaatatgaatattctgtacaggaaatacgcccttaattacataggaataaacatttgttacactgagaaaaatctaatagagctaaaaataaaaattaatttggaaaggtaattagataatgatacattcttacatttatacattctttcatatattcatatattcttttaacagtatcaatggtttggagttatgtgtacaaaaccatgacctatatgtaatacaactaataacaggcatttacaattcaaggcatattatatacaaagctttaacttcttatcaaaatattttgttttttttctttctgttttggcagatactatgaacacaacattcaactcacagacaccatggagcccttactaagcataaagtactgtgaaaggccagggctaggacagaactaagacagggccagggataggacagaacaggggcagggtcatggccagagaaaaaccaggggcagggtcacggccagggacatgagaggaccaaggccagggccagaagcagggcagaaccagggccagggcagggacatggcagggccagggccatggcaggatcagggtcagcagaaggccagggcaaggctagggtagcacagggccaaggcagggcagggtcagtgtagagcaaggaacgggtcagggtatggcagggcagggacagggaggtccagggccagagtcaggtccaggacatggacaggacagggccagaaatatggcaggaccagaaaggggacagggcaagggcaaggccagagaaggaccatggaaaaaaacatggccagggagggtccagggcaagggcaaggccagggcagaaccagagccagagcaggccaaaggcagggccagggcagggcaaggccagggtagggcggggccagtgtagggtgagggtagggccagggtgagttcagggccagggcaggactaagatagcacagggccaaggcagggccagggcagggccaaaaggaggggccagggccaagcatggccagtgtcagacctggggattgtcagggccagggtcagggtcaaggctgggccagggacagggccagagcaaggccagggtcagggcagaaccaggaccaggataaggcaaagccaaggccagggcagggcaaggccagggcaaggcaagaccagggaagggcaaggccagggtagaaaaggccagtgtagggccaggtcagggtaggagaaggccatggtagggccaaggccaaggcagggcagggctagggtagcacagggcatggccaaaaacagggcag

SEQ ID NO: 4817 - DNA, 904 bp, Artificial sequence
  DNA replication origin
tttaatcttgtatgttttttatttcaattttgtttgtgctatgatcttatttattttcttattttcggtttagtttgttctttactagttctttaagatgtattatttgaaggttttcttttgtttggatggtaggcacttatagctgtaaatctctgcctttgtactgctttctgcataacaagttttggtatactgtgttttcattaccctttgtttcatgaaatttttgaatttctgtcttagtatcttcattgacccgctagtcatttattcaggagggtagtgtttaacttccatgtgattgtattgtttccaaaattgcttttcttattgatacctagttttattcctttgtagtgaaagaagatggccacggagacagacagcagcgtggtcagagtggtaggagctgaccatcagcgagagctgctccatgcctggctgctgggtcctagagcctgtggcccactggcttgcctcactgtggttggtggtggtggtgacagagactgcaggacgaccagatggtaggacaggggctatccagggctgcaccttttgcagtgtggggtgggttgagggcgctatccagggtgtcattgcctgcattaggggtactggttggtagcactgtacagggctgcactgcccacggcagggagggtgggttatgggtgctttctggggcttcaatgcccatggaggaggacaggttagggcactatcggttatacgctactggcggcattgggggatggaggtggggggcgctattgagggcaggactagcagtggagcgggggcgagttcggtgctatcaggggctgcactgctggtgtcggtcaacagagttggcatcccaggaaggagtggttctcctctccctgactccacactccag

SEQ ID NO: 4818 - DNA, 1623 bp, Artificial sequence
  DNA replication origin
cagcgctgtgtgcctttgcgagggcggagctgcgttctcctcagcacagacccggagagcattgcgagggcggagctgagttctcctctgcacagacttcggagatacagcgaaggcagagcaatgttctcctcagcagagacccgggcgggcgggccggtggcaccgcgagggcggagctgcgttctgctctgcacagaccttgggggcactgcctcgctttgggacaactcggggccgcatggacggtgaataaaatccttcctgtttgcagccctgtttgtggttggtggcagcgatggacactgcagccagccagagcgtagaaaggcgtcggggtaagtgcgctatccaggctgcactgtgggtggcctgggacgggttgggagccctatctcaggcgtcactgcccgtcttgggtggccggttgggtgtgctatctggggctgtgctgcctgcaccgggcgggtgggggggtggtttgggggccaaaccggggctgcactgcctttggtggggagccggttgggggcactatcccagactgtattgctggcaacagtgaggtgggctaagtgtgctatccggggctgcactgtgcggctgtcgggggggtggcggtttcgggttgagggcgctatggggtgctgtaatgcccatggtgtggggaggcggggcagtttgggtatgttgggtgtgctattgggggggtgacactgctggtggtagggggcagggtgggttgggggccatatcaggggctgcactgatggctttagctaggatttctggtactatgttaaacaacagtggtgacagggggcatccttatcatgttccagatcttagaggaaaagctttccatttttccccattccatatgattctagctgtgggtgtctttcctgtagtttttattatgttgcggtatgtttcttctgtgcccgtttctttgaggatttatagcatgaagggatgttgaatttcatcaaatgctttttcggtttcagttgacgtgatgatactgtttttgtcgtttatttggttgatatgatgtatcacattgtatgttgagtgacccttgggtcccagggatacatcccacttgatcatgatgaattatctttttaatgtattactgaatttgattcactggtattttgttgaggatttttgcatccatattagagatcctggcctgtagtttccttctttgatgcttttgtctgattttggtatcacagtaataatggtctcatagaataagtttggaagtattccctcctgtttttcaaaatagtttgagcaggattcgtactaggtctttaaattgtttggtgtgaagccatcagcagtgaagacatcagttcctgggcttttctttactgggagactttttctgatggcttcaatctcattacttgttaccaatctgttctggtcttggatgttttcattgtttaacctaagtaggttgtatgcatctaggaatttgccaatttctactaggctttccaatttattggcatatagtagccagttatgatcctttgaatttctgaagtattagttgtaatgtctccttttttaatctgttgattttatttatttgaatcttgtctc

SEQ ID NO: 4819 - DNA, 848 bp, Artificial sequence
  DNA replication origin
gagcacagctgtggaagggaggtcctcccagctagtctcagccaccctgggttcttaccctttcacagctggggagtggagcctgggcctgcgcctctccgcgccagagccggcgccagcgcctctccgcgcctcgccgccgctgtctgcctctccgccactgtccgtctctccgccgcgccgccgctgtccgcctctccgccgctggccgcctctccgctgcgctgccgctgtctgcctctccgccgctgtccgtctctccgccgcgccgccgcgccgccgctgtccgtctctccgccgcgccgccgctgtccgccgcgccgccgctggccgcctctccgccgctgtccgcctctccgccgcgccgccgctggccgcctctccgccgctgtccgcctctccgcctcgccggcgccagcgctgtgtgcctttgcgagggcggagctgcgttctcctcagcacagacccggagagcattgcgagggcggagctgagttctcctctgcacagacttcggagatacagcgaaggcagagcaatgttctcctcagcagagacccgggcgggcgggccggtggcaccgcgagggcggagctgcgttctgctctgcacagaccttgggggcactgcctcgctttgggacaactcggggccgcatggacggtgaataaaatccttcctgtttgcagccctgtttgtggttggtggcagcgatggacactgcagccagccagagcgtagaaaggcgtcggggtaagtgcgctatccaggctgcactgtgggtggcctgggacgggttgggagccctatctcaggcgtcactgcccgtcttgggtggccggttgggt

SEQ ID NO: 4820 - DNA, 869 bp, Artificial sequence
  DNA replication origin
ccccaaggtctgtgcagagcagaacgcagctccgccctcgcggtgccaccggcccgcccgcccgggtctctgctgaggagaacattgctctgccttcgctgtatctccgaagtctgtgcagaggagaactcagctccgccctcgcaatgctctccgggtctgtgctgaggagaacgcagctccgccctcgcaaaggcacacagcgctggcgccggcgaggcggagaggcggacagcggcggagaggcggccagcggcggcgcggcggagaggcggacagcggcggagaggcggccagcggcggcgcggcggacagcggcggcgcggcggagagacggacagcggcggcgcggcggcgcggcggagagacggacagcggcggagaggcagacagcggcagcgcagcggagaggcggccagcggcggagaggcggacagcggcggcgcggcggagagacggacagtggcggagaggcagacagcggcggcgaggcgcggagaggcgctggcgccggctctggcgcggagaggcgcaggcccaggctccactccccagctgtgaaagggtaagaacccagggtggctgagactagctgggaggacctcccttccacagctgtgctcttgctctgcccatgctgtcgcctccatctccacctccctctccatcctcaccaccagccctcgagtcagtggggagctttccactcaccaagcccaggcaagtgcatcgcgtgaatttctcttgcgcctcccgctagaggtagaggcgctgttgtcaccctatctgctgaggatatgctggggctggcaggggccacccaagaccaagggtgtcactgtctccatcctgtgcccacccagtcctgc

SEQ ID NO: 4821 - DNA, 1146 bp, Artificial sequence
  DNA replication origin
cagttgcctccgacatgctcgggggccacatccacctccaacctctgccctgttcacactttcctccacccagattcccctcttgccctggcactccaggaattgtttgatgtcctggaagctccctttctctgttccatagcccctgaggctggtacctccctgcatgcgtgtccacctcacccactgagttccaggagcaggtgtctatcctgctcgccctgactcagcagggagggctgagctctggagcctgagtgcacccagacctgccccatggcctcctgtgcctctgtgtcctcctcaccctcgactcaccaaggagccctgaggacgtgagaactggaacatgcccaagacccacatcggggcctggcacacaccaagcgcctagtgaacgcttgatgactgaggacagcatcgcttcttctaagaggggaaaaaaaggaaagtcaaccagagacaatttgtaaaagatggcttttgactgaggccttgaaggatgggcaaggatgggcaaggggaggggggactcaaagtgcaggatgagaaggctctaggtgcctgagtgcctgtgcatgtgagcatgcatgtgcatgtgtgtgcatgtgtgtgtgtgcatgagacttgcagccttgcatgtgtgtgtgcatatgcatatgtgtgttcatatgcacatgcatgtgtgtgtgccctagtccagacagggttctgagtgcactgtgggggacagatgatttcacactccgccctgagtctgaaatcagtgggacagatgaccttgaagaaggccttatggctcacttagtgtgagccagacttcatagagacagtgacggcaggacacatgcatgggggtccaccttcccagagctggagcccacatagctccaggacctcaagggaagcccagggtctgaggggcccaggaggcccatccatgggatggacccaaggagactttggtggcttctctgttaagatttgaagggggccaggtgtggtggctcacgcctgtaatcccagcactttgggaggctgcagcagggggatcacgaggtcaggagttcaagaccagcctggccaacatagtgaaaccccatctctactaaaaatacaaaaataaaaataaaaaattagccgggt

SEQ ID NO: 4822 - DNA, 2366 bp, Artificial sequence
  DNA replication origin
acgcccccgacaacctgccccgtctcctgtcacttcccgacgcccgccctcccctcttctgccccttcgtcctcagtcaaggtaccaccctgtccacttacccagcgccccaccccgctgacccgggattctaagagctcccttgcccactgcccctcactgggcaacgcccggggcagccatctgtcccctccgggacccacgcggaccgctcccccctcctgatccctgggacactggccagccctgccccgacactagcgcgtcctcccgcacctccgcccgcgcgcccggcccccgcccaccgtctgcagccctcacccctgcgccgacgcccacccacccagcccctgtccgggcgccccagaaacgctgggtgacgagagatgcctcccagagtcccggggttgcggggctggggagagggggtcttccagagccagcccgaagtggggtgtgcacggggggcgtggctgctgccaagtggggcgcacggggctccacaggggcgtgcgatgctccgggccttccccgagggtctccgttggggaacccagaggtccaggtgatcctgcctgggtccgtgtccgagcgtccgatggtctgtccttgtccctgcgtatttctgtattgtcttctctgtgcgggtcactctgtgtctggccgtctgttttcgggtgtgtctggttaggggtggaggagtgccagtcactggctctctgaattgggggaggggccgccttctgtgggtttttctgtttgtccatctggtgtgcctgtgtgtcggctgcgagatgcccaggcgcagaataagacctgagccactttctaagaaaagagaccatcccgcaccctcccccaaaggagcggcagccattctggacgcagaggagctggaatgagggaggccccagggtctgccctggggctaccggcacccaagcatctccaccagccccttccaaagccccggtgcctgccttgcacctgcctgctcccggaaggagactgtgtctgccagggtgccctgcttgggtgccattaagtggaggtctgggaagtttctgcagaagagcgttctaccggtcgggcgtggctgacaggaggcggtggaccccagccccccagctgcaggttggagaggggagttgggagcgagcccccatcccaccatgcagcagcccggggctgggccccggaagacaccctctccctcttggtttaaggctcttgcagtcttgaaattcttaatttttgaacaagaaggcccaggtttttgttttgtgctaagcgcagcaaattgcaatagcaggtcctgactagtaaaggaggggtggggagtcctgggccggcaagaagtcaacctgagggaccttgccttgccgccatcattcttccaattcatgcattcattcatttgatcaacacacatgtatgtgttgacatgtgaatcatttgctggtctctgttgtaggcgctggggtttcagctatgaaaggctctgttcaggtggagctgatgttcaggcagagaaacagcaataaacaaacagctaatgagccttgactgggaagctggggagcgtgacctgtgagacttagccctcaacttctaagaccttgggggtggggacagagtaagcagcacagcacacttgagcagggctaccaccaggggcctgggaggagcccaggtctgcaggaaggctgcgaggttcagggaggaggcaacacctgcacagtcttctttctttctttattttatttttatcttttaataaggacagggcctccctatgtctcccaggctggaatgaagtggtgtgataatagctcactacagcctcgaactctggggctcaagtgctcctcccacctcagcctcccgaatagctgggactacaggtgtgtgctaccacgcctggctcatttttttaaaattgttttttgtagagacaggggtctcgctgtgttgctcaggttgatctcaaactcctgggctcaagccttcctcctacctcagcctcccaaagcactgggattacaggctccagctaccacgtccagcctcctgcacattctttaggcttaggagtggatggccaggcggaagggagcaggggtctggaaaggcagtccagagagaggatccagcaaacctactgggaatcttccaccttctcccctcctcttcctaccaacagccagagcaacctgggaggctgagctgaagatggaagagcctgtctgcgtgtctccccagtgactagtgaggcggcttttcctcccgaagctggaccttacatcagtgagaaataaacttccattgtgctaagccaccaaagtctgaaatgttacagcagctag

SEQ ID NO: 4823 - DNA, 809 bp, Artificial sequence
  DNA replication origin
agagagccagtgactggcactcctccacccctaaccagacacacccgaaaacagacggccagacacagagtgacccgcacagagaagacaatacagaaatacgcagggacaaggacagaccatcggacgctcggacacggacccaggcaggatcacctggacctctgggttccccaacggagaccctcggggaaggcccggagcatcgcacgcccctgtggagccccgtgcgccccacttggcagcagccacgccccccgtgcacaccccacttcgggctggctctggaagaccccctctccccagccccgcaaccccgggactctgggaggcatctctcgtcacccagcgtttctggggcgcccggacaggggctgggtgggtgggcgtcggcgcaggggtgagggctgcagacggtgggcgggggccgggcgcgcgggcggaggtgcgggaggacgcgctagtgtcggggcagggctggccagtgtcccagggatcaggaggggggagcggtccgcgtgggtcccggaggggacagatggctgccccgggcgttgcccagtgaggggcagtgggcaagggagctcttagaatcccgggtcagcggggtggggcgctgggtaagtggacagggtggtaccttgactgaggacgaaggggcagaagaggggagggcgggcgtcgggaagtgacaggagacggggcaggttgtcgggggcgtggggtaggaatcggaggggagttgaaaaggggggtgctggttggcagaggcgtcggggcaaggacaggagccaggagcgcaggcgggg

SEQ ID NO: 4824 - DNA, 1332 bp, Artificial sequence
  DNA replication origin
tgtgtgatgtgtctggaccacgtggtgtgaaatgcagtcggcttctcctgggaaggtgactcagacagaagctttcttcacaagcatgctccccacggcctcctccctttcacctgcaccatgtctgtctcccattcaagactggcaaccccagccaggcacagtggctcatgcctgtgatcctatcattttgggaggccaaggcaggaggatcccttgaggccaggagtttgagaacaggagacaacacaacgaggctctatctgtacaaaatataacaaaacttagccaggcaaggccatgtgtacctatagttccagctattcaggaggctgaagtgggaggattgcttgagcccaggaggaagaggctgtagtgagctgtgactgtgccactgcactccagcctgggagatagagcaacattgtctcaaaaaaaaaaaaaaaaaaaaaaaaaaaaaaaaaaaaaaaaaagatgtggcagccccttgagaaaggaagagctcctatcttgacgatttcagccaatgcccgtgagtaccagcaggagcctctatccctctctgccccaccctgtatccacgcattcattacatcattcatcccccctcattttctcaaaacccacttgtgcccaggccctgaggtggctctaggaccgagagacagggatcacagagctccccagtggagtggagggtacagacatgtggacaagaacactggaacccagtgcgggctgggagcgtgcggtcagacctgcaaagcggggaagagaagggggtcggagaagcttcgcggggagaatggggtgaggcctgaggcctgtctcggaaagcagaggggcaggtgggagagtggaaaagacattcctggaggagggaaccaaaggtgctgaatgtgcagaggcagagatcctgcgacgggagagaaagtcctcgagaatgaccccagcataggatgagaacaaaggaggggatcaaaggaaacgggccctcgggggccgggtgctagaaggctctgagtgtcaggagagggaacgtgacctccatcatggggtcagtagggccactgtatggctttaagccagggaaggacaggagaggtttctgtaactgtggctgtaatgatggaagcgtctggaggcggagaggaggctcccgcggcgacccaggcttcagagagagagagagagagaggaaagaaggaagggcagataggaaagctaggaaagatgcacagagagaccaaggcagaaaaggctgaagggaagacggcagtggtaggaagggggcagagccgtctcaggatgcagccagcaggcaaggaggca

SEQ ID NO: 4825 - DNA, 1469 bp, Artificial sequence
  DNA replication origin
atgtagcatgtccataagagaactgtaacatgtcattggttttgtgtccccaccctgctcttccctttggcttcccaatcttgggaaatggtgcaaccattcacccatagactcaggcgccaatgctcggagtcaacctgaaaggaggcagagagagaggaagaacaaaaaaacacagatggatggatggacagatggatggatggatggatggatggatggatggatggatgatgaataagtgtggatgggtggatggatgcatggtggataaataagtgaatgatgatagaagctccagggaagaggatgatggttctgggaagttaactgcacttcaatataaagaagagcattccttggataaggatagactgagtagaaaaaagaagaaagaggaagaagaagaagaagagggaggaggagggggaaggggagggtaggaagggggaagggagggggagggagagggggagaaggagaggagaaggagaaggaggaacattctaaatgcaccaggctgggcgtggtgtctcatgcctgtaatcccagcactttgggaggcaaaggcaggcggataacctgagctcaggagtttgagaccaactgggccaacatggtgaaacactgtctctactaaaaaatacaaaaattagccgggtgtggtgacatgtgcacctgtagtcccagctaatcaggaggctgaggcaggagaatcacttgaacccaggaaatggaggttgcagtgacccatgatctagccactgcactccagccttggcaacagagtgagattccatctcaaaaacaaaaacaaaaacagcaggggagagaggaagagaggaaggaagagaaagagaggagagagggaagagggatagtggagggaaggctagaggaaggaagagaggaaggaaggatgaaggaggagaagagagaaagaaaatgaggaaaaaataaggaaagggaggctgggcatggtgactcacactggtaatcccatcactttgggaggctgaggcaggcagatcacgaggtcaggagttcgagaccagcctggccaacatgatgaaaccccgtctctactaaaaatacaaaaaatagctgggcatggttgccagcgcctataatcccagctacttgggaggctgagtcaggagaatcgtttgaacccgggaggcggaggttgcagtgagccgagatcgcaccattgcactccagcctgggtgacagggcaagactccatctcaaaaaaaagaaaaaaaggaagaaaagggagagaaaagggaaggggagggaatagggagggagggaagaggaagaaaggaaaggagaaagagggaaggaagaagggagaaaaaaggatggaggagaaaaagaagtgaggaacaaaaaagggggctttgactgtaggaaaacacaggtaaaggctcatgtgtataatactttttagcctgtgtaagtcaata

SEQ ID NO: 4826 - DNA, 983 bp, Artificial sequence
  DNA replication origin
tccgaagctgtatcatgaatgctgtggtgggcggctggtggggagcggggttgccgtcccactaccctctggaagcctcagccatgaagggcccctgtgggcaccttttcccggcacacggtgctgtgtctctccactcttgggctctgcagtgacttgagggttcaagtctatgatcccacgggaggctgggctaatgaggggaccagagacctcagtgctgtgcagggagtcccgaaccaccctggtggaaggccctgcccaactccccagtcctcccgccagctccctgtggtgtccaggagacctgtggtcaggcctggaggagaagctcctcctcccctcgacatcctccctgcagcccttgctcttcaccagagcctcctgactccccaggaccccagagaggaccgaccctctccagccgacctctgggctcaggacagctgggtggggcagccacaggagctgcctgtagggagcagagtcaggacggggaccgagccggacacccattctggaagtgtctgcacttccaggcaggggaaggacggcaatgggtagctgggagtgctgggccgaagatgggcattgtcaggccctcagtggggactgggaggtagaggtggggaggtctgtggaggaaggagaagaagggccagtgtcccgagtcgggggtggttggcagtggacgaggccgacaggaacagacctgagcttggggagctccactcagaacgaggcatccttcagggttctgtgcatactggtgtccctggctgggggccaggccccgaagtggagcctgggactgtgagggtgggggtgtgtgctggggtgggaggtggatggagcccccccgtaaccgcctggctgcttgggctgaaccttggacttcggagccagaacagacataggaaatggcctaattgcatttgcgcaggaacaccaaatccctcgcagctgcacggggctgagccggg

SEQ ID NO: 4827 - DNA, 1823 bp, Artificial sequence
  DNA replication origin
ctggggagttgggcagggccttccaccagggtggttcgggactccctgcacagcactgaggtctctggtcccctcattagcccagcctcccgtgggatcatagacttgaaccctcaagtcactgcagagcccaagagtggagagacacagcaccgtgtgccgggaaaaggtgcccacaggggcccttcatggctgaggcttccagagggtagtgggacggcaaccccgctccccaccagccgcccaccacagcattcatgatacagcttcggagtgtgggtcggggtctatctgggaaaccagggcaaaggcggtggcagctggcagcacccacacccacagctggggcactgctcacatgagcccccatcagcaggccccttggttgtgccacaggcaggggtcctgccccagggagggggtagtccgtgggggggggctcgagggtgtggcacaggccagctgtcactcctccctggagaggcagctggggacgcagctgggaggggagccaggagcagagacagcccggggccagcaggtgggtgacaggtggggcagcgggaggggcacgtgctgtcctcctggggctggggtatagagacgggaacctgccccccaatgcctggtgctggcccagcctccccccggggcctctagcaccttcccagttgtgtctgcaccctcctgggcgtggcgggggagggtgggggtcaacccctttccttgtagtcccgcgccagtgggcaagggagacgccccagtgagcaggagcctagcctctctgcctggggaggccaggtgatgagccacccggagtgggaggaggccttgaacttgggtctgaaagatgagcaggggtttgctgggccgggtacaggcaaaagctaatgcaggaaggcagagagcaggagcgcttagagggagtggctctgtgcagccggagtcagatgggtgaccctcactcaggaggaagcactgggaccctctctcctcacgctgggtcccccgcctccctctaggatccccacacccaggtccttctgggcctctgccacacagatcaggtctggaaggctccctggaggaggcggcgcctagacttggacataggcctgcagagctgatttctctcacaaccctgggaagacagaactcctcagcgggttgatgtggaggagagcggagcctccctccaaggcaccagtccagtgctgggggcgacacagagagccagaagctggcgggggtgggaggctctgccccccaagggctttacatgccgaagccccatggccgagctgggacccagggtcagcccaggcaggccgcgagaaaggagactgtgggccccaccccatcacagagggaggaggtgctgtgcccgctgggggggcagctgcccctctctgggccctttgggtgggaagaggcttggtgaggtagaaagcccagcccctgccagcagcgttgccttctcacagtggcagccctttgtaacccgggggggtccctgcagggcctctccctgtcttctcaccatggggcagcatttgggggcctcttgagggaccccctagatgcttctactcagagcccccaaagccaaggagcctccactcctccgtctgcagcctcccctgccggttcttgctacccagggttcagtggcctgggggctgacagagggggtcgcctctgccaaggcccctcccggcgcctccctggctcatccagcccaccttcctcccacgctggctcacgcaaagtgctctggtcaccaggagcccttcctgaccagccccggccccttcttggccttc

SEQ ID NO: 4828 - DNA, 931 bp, Artificial sequence
  DNA replication origin
caagggaccctcgagccccaaagggcgctcaccatgagctgcgccgggtcccggagcgcgcggggacttctcttgcttcctgaagcgcctctggctcggtggccgtggtgcgcccctccagtctacgcgatgggcacaggaagcggctggtgcccgctgacagccagggctgttctcgggagtctgcggcgcgccagatggcagcgacagcggctgtgtctggctcggagcgagagaagagagcaagccgccactgaggggctggggcaggcagtcgccggcgccgggctgcactgcggcgctgccgcggtccctgaacgctccccggccccgcgtcccgccccccgcgcctccgcgctggactccagccccacctgtgccttggcgccctagctcaccgcgctcagcgcgccagagtgtagtggtgatcccgcaggtcccaggagcgccccagcgccagaccctagccccgggccggggaaaattcttcccgggaagaccgaagggtgcttggcgtagccctggagccctagccctagccacgcttggggaacaagaggtggggtagggatgaggacgcgagggcttccggagggggaaagagcatttgaagtgtaaaggggacggccttatattgcccacagacctgagtcccaatccggactttattcctggctctgcaactttaagggccctacataactttacccggccttggtttccttctccacagcgtgggataatgattcctactcctagaacagtgtcagaactcagggaagccgtctaggatgaggtgtccagtagacagtgtctcctaggaacaggctcccgcttcccccagcccctccctcaacaccatgaggctggggcttcacctgacctcttgggagactgtccttttccccaccaccgcccccagtccttcagt

SEQ ID NO: 4829 - DNA, 1436 bp, Artificial sequence
  DNA replication origin
gaaaatagtaaagacagtgggcattcaattcaataatttcagttgtacagtattcagcgagcacctactctatgcaaagcaccatgctaggcattgcagggcggaaaaggctaagaaacaaaataatttcaagataattaggtggagcgggcgggcgggctgctgaggacgcgccgcctgtgcctccctccctgcgtgcctcgccccgggccgcctggggctgccgcggtgcgcgggtgccgggccctgccttgccggccatgggggaagggggcaccatggggcgccgccggcccttccccggggcgccgccgcggcgctggtggcggcggcagcagcagcagcagcggcagcggcagcggtggtggccgggccgcggcggcggcggcgagggtgcggggcgcgctgccatgggccttggccgggctgcaggcaagaagatgtccaagccccgcgcgctggaggcggcggcggcggcggcagcgacggccccgggcctggagatggtggagcggaggggcccggggaggccccgcaccgatggggagagcgtatttaccgggcagtcaaagatctattcctacatgagcccgaacaaatgctctggaatgcgtttcccccttcaagaagagaactcggttacacatcacgaagtcaaatgccaggggaaaccattagccggaatctacaggaaacgagaagagaaaagaaatactgggaacgcagtacagagcgccatgaagtccaagaaacagaagatcaaagacgccaggagaggtcccctggtaccttttccaaaccaaaaatctgaagcagcagaacctccaaaaactccaccctcatcttgtgattccaccaatgcagccatcgccaagcaagccctgaaaaagcccatcaagggcaaacaggccccccgaaaaaaagctcaaggaaaaacacaacagaatcacaaacttacggatttctaccctgtccgaaggagatccaggaagagcaaagccgagctgcagtctgaagaaaggaaaagaatagatgaattgattgaaagtgggaaggaagaaggaatgaagattgacctcatcgatggcaaaggcaggggtgtgattgccaccaagcatttctcccggggtgcctttgtggtggaataccacggggacctcatcgagatcaccgacgccaagaaacgggaggctctgtatgcacaggacccttccacgggctgctacatgtactattttcagtatctgagcaaaacctactgcgtggatgcaactagagagacaaatcgcccaggaagaccgatcaatcacagcaaatgtgggaactgccaaaccaaactgcacgacatcgacggcgtacctcacctcatcctcatcgcctcccaagacatcgcggctggggaggagctcctgtatgactatggggaccgcagcaag

SEQ ID NO: 4830 - DNA, 972 bp, Artificial sequence
  DNA replication origin
cgggggcaaaaagccgcggaaggcaaaaagccgcggcggcgggggtcaaaaagccgcggcgatggggggcaataagccgcggcggcgggcggcaaaaagctgcggtggtgggggtgcaaaaagccgcggcgggcaaaaagctgcggtggcgggggggcaaaaagccgggtcgggcaaaaagccgcggcggcagggaactaaaagccgtggtaggcataaacccgaggcggcggggggggcaaaaaaccgcggtggggaaaaagccgcggcggcggaggtgcaaaaagccaaggcgcgcaaaaagccgcggtggtgggggaggcaaaaaagccgcggcggcggagagcaaaaagctgcggcgatgagggtcaaaaagccgcggcggcggggggcaaaaagccgcggcgatgagggtcaaaaagccgccgcggcggggggcaaaaagccgcagcggcgggggggggggggcaaaaagccgcggcgacgcggggcaaaatagtggagatggggtagaaggccggcacaggttggctttgctggagtgtgatgtgataggaaatgtgcagccaaagacaaaaaaagatgtaagtaggcttgactcattgcagccaagaacccagatgttatcttgagggttttaactaataagcagtttaaatcagaatggcacattctgatttgttttttgtatattcacatttggcaggcatagataccgtttgaagagaaaaaagtcagtagatagaggtaacaaacttaaatatgtgccgagtctagaaacaagagactagggggataaggacctttcgaaataaaatgcaagatttgaaaactgattggctgggggatgaggaaaaggcaggtctttaaggtcaatccctgttttgctttaagttgttagggggtggttttatcatatattgtagaatacgtcatttcagttttgaacatcttgagttaaattgtcctaac

SEQ ID NO: 4831 - DNA, 902 bp, Artificial sequence
  DNA replication origin
ccccgtccgggagggaggtgggggagtcagccccccgcccggccagccgccctgtccgggagggaggtgggggggtcagtcccccacccgccagccgccccgtccgggagggaggtgggggtgtcagccccccacctggccagccgccccgtctgggacgtgaggggtgcctctgcccggctgcccctactgggaagtgaggagcccctctgcccggccagccgccccatccgggagggaggtgggggggtcagccccccgcccggccagccgccctgtccgggagggaggtgggcgggtcagccccccgcccagccagccgccccgtccgggagagaggtgggcgggtcagccccccgcccggccagctgccccgtctgggaggtgaggggcgcctctgcccggccgcccctactgggaagtgaggagcccctctgcccggccaccaccccatctgggaggtgtgcccaacagctcattgagaacgggccaggatgacaatggtggctttgtggaatagaaaggtgggaaagggggggaaaagattgagaaatcggatggttgccgtgtctgtgtagaaagaagtagacatgggagacttttcattttgttctgcactaagaaaaattcttctgccttgggatcttgttgatctgtgaccttacccccaaccttgtgctctctgaaacgctgtgtccactcagggttaaatggattaagggcggtgcaagatgtgctttgttaaacagatgcttgaaggcagcatgctcgttaagagtcatcaccactccctaatctcaagtaatcagggacacaaacactgcggaaggccgcagggtcctctacctaggaaaaccggagacctttgttcacttgtttatctgctgaccttccctccacga

SEQ ID NO: 4832 - DNA, 1237 bp, Artificial sequence
  DNA replication origin
ggcagtgtgggaaagtggccgaggggtcaggtctggggtggtctgcagagaggcaggcggcggtgcggaaccgggaaccacgcgctcacccgccaagtcggacaggcccggcgtgggtgggtgagacactgggaacagcggccagctccagagggcgcgaggcagggcgcgcggggaggggggtcgagcgcggttggggggcagtgagggtcgccgcgggggcgcgcagcagggcgggaacatggcgcgcggaactggcgcgcgcgcctacctggcgggaccgttagctcgaggccgacgcggccaggaccccgtggatatggagcagtcgtcgccgccggcgcccgagccgacccaagggccgacccccgcaaggagctgaaggcggcgggagcccgagtcgcagccggcgtcagcgccggtgagtgcgtgaggggctcgggccgggagactttctttgtgaaactccggcggtggcagccaggccaggcctcagcggctgaggagcgcctgtgaggcggaaggcgtcttgcagtccgggttcgatcccagccgcgagctgtcaggcggctggacctggtctaccgcctgtctgcctcagtttccatgggagtgtgtgtgggtgtgtgtgggtgtgtgagggtgtgtatgggtgttggcctgagcacaccggagggggggtcggtatacagtcggggcctaatgcgcgcggcgcctcccccctccccccagtccctgtggggcggaatctggggactggagtccaccagagcagtaggcggcacccgcggggagacaagtgtcggcgcagcccaggaggctcaggtgctacctttcccaggtggggtttgtgaggagtgagctcttcgtccctggaggcgagcaagtctgtcggtggctcatcacagagtgccattttggaaagcgttctacccacctcagcttcgtgctgtgtttgggccactagtcagggggaaggatgctgagcgacatggactttagaggtggggctcccgctggacgggatggctctgggctctccagcttacccccacccttgcctcccaaacccgttagagtgtaggaatcattgggagcgcctgataaaaatgccacggattgtggctcaccaaagcagggaagccgatttggaacttaagctcccaagttgtgatcagtcgagcttggcaagcactgttttagagagtaggcttcctgcaagcaggagccagttttg

SEQ ID NO: 4833 - DNA, 1028 bp, Artificial sequence
  DNA replication origin
gccgcgggggcaaaaagccgcggaaggcaaaaagccgcggcggcgggggtcaaaaagccgcggcgatggggggcaataagccgcggcggcgggcggcaaaaagctgcggtggtgggggtgcaaaaagccgcggcgggcaaaaagctgcggtggcgggggggcaaaaagccgggtcgggcaaaaagccgcggcggcagggaactaaaagccgtggtaggcataaacccgaggcggcggggggggcaaaaaaccgcggtggggaaaaagccgcggcggcggaggtgcaaaaagccaaggcgcgcaaaaagccgcggtggtgggggaggcaaaaaagccgcggcggcggagagcaaaaagctgcggcgatgagggtcaaaaagccgcggcggcggggggcaaaaagccgcggcgatgagggtcaaaaagccgccgcggcggggggcaaaaagccgcagcggcgggggggggggggcaaaaagccgcggcgacgcggggcaaaatagtggagatggggtagaaggccggcacaggttggctttgctggagtgtgatgtgataggaaatgtgcagccaaagacaaaaaaagatgtaagtaggcttgactcattgcagccaagaacccagatgttatcttgagggttttaactaataagcagtttaaatcagaatggcacattctgatttgttttttgtatattcacatttggcaggcatagataccgtttgaagagaaaaaagtcagtagatagaggtaacaaacttaaatatgtgccgagtctagaaacaagagactagggggataaggacctttcgaaataaaatgcaagatttgaaaactgattggctgggggatgaggaaaaggcaggtctttaaggtcaatccctgttttgctttaagttgttagggggtggttttatcatatattgtagaatacgtcatttcagttttgaacatcttgagttaaattgtcctaacatatcttatgaatttgattttcttccctgggaagctaatatttcaaaaactg

SEQ ID NO: 4834 - DNA, 1491 bp, Artificial sequence
  DNA replication origin
ggggaataaagccgcaaaaagcagcagcggtgggggcaaaaaccacggcggcaaaaagcctcagcggcaggagcaaaaagccacggcagtgggggcaaaaactgcggtggcaaaaagcctcagcagcaggaacaaaaagccacggctgcgggcacaaaaagccgcggctgcaaaaagccacggtggtgggcccaaaaagccacggcggtggggataaaaagccgcagctgcaaaaagcagcagcagtggggataaaaagcagtggcggcaaaaacccacggcggcaggggcataaagccgtggtggcgcaggcaaaaagccacggtggcgagggcaaaaagctgtggcttcgggcgcaaaaaaccaaggcggcaaaaagccgtagttgtggggcaaaaagccgcagcggtgggggcaaaaagcagtgggagcgggtgcaaaaaacccacaaaaacccgcggtgacgggggggataagccgcgggggcaaaaagccgcagcggcggggtggggcaaaaagccgcggtggtaggggggcaaaaagccccaaaaagcagcagcggcgggggcaaaaaccgcggcggcaaaaagcctcagcagcaggagcaaaaagccatggcggcggcggcaaaaagccgtgtcagcaaaaagccacgggggcaaaaacccgtggcgacaggggcaaaaagctgtggcttcagaggcaaagagccacagcagcaaaaagccatattggcgggggcaaaaagccgcaaaaagccacagcaccaagggcaaaaagccgtggcttcaggggcaaagagctgcagtggcaaaaagccgcaaaaagccatggtgacggggggcaaaattccacggcggtgggggtaagaagccacggcggcaggggcaaaatctgtggcgggagaaacccgcagcggcgggggcaaaaagccgtggcagtggtgatgaaaagccacaatggcgggggcagaaagccgcgaggcgggggaaaaagccgcagtcgcgggggcaaaaaggcacggcggcgggcgcaaaaagccacaaaaagctccggtggtgggtcaaagagccgcaaaaagccccagcgttgggagcaaaaagccgcggcggcggtggcaaaaagcagcagaggcaaaaacccgcggcagtggcggcaaaaagcctcggtggcaggggcacaatagtggaaatggagtagaaggccaacagagctaggcattcctggactgtgatgtggaaggaaaagtgcagcggaagacaaagatgtaagtaggcttgactcagtgcagctaagaactcagatgtgaacttgatgttatctatcagctaattttttgtattttagtagagaaggggttttaccacgttggccaggattgtctggatctcctgacctcatgatccacgcacctcagcctcccaaagtgatgggattaaaggcatgagccacaaagggctcaaaaaatctattaattaaaaaatgtgtatg

SEQ ID NO: 4835 - DNA, 1909 bp, Artificial sequence
  DNA replication origin
ccttcttttctcactttctttctttttctttcttgagttcttgctttgttttttctcctttcctgcctttctcccttcctccctcccttctctcatttcctccttttctttcttctttccttccttccttcttttttctttcttttctttctctttactacaattcatattatttaaaaaaaattaagaaagagaggcagaaaaataaagaacactttaatctgcaggtaaatagattatgtctgttgtagacaaaataatggcctcccagaaatgttcatgtcttaattcccagagtctaacatacaaatatgttaggttgcatggcagtgggaaattagatttcaagtgaaattaaggttccaaaggcagcgggggcaaaaggccacggcggcaaaaaggcgcggcggcaggggcaaaaagccatggtggcggttggagaaagatgcagcggtgggggcaaaaagccgcgctgaggggggtaaaaagccgctgaggtgaaggcaaaaaggagcgggagtgggggcaaaaaaaacacaaaaagccgcggaggctgggggaaaaagccacggtggcagggggcaaaaaagctgcagcgacgggggtgaaaacctgcaaaaagccaaggcggtgggggcaaaaagcctcggtggcggaggtgaaaaaccgcggtggcggggacaaaaagctgtggcggtggcggttaaaaaaaaagccgcggcggcaaaaacccacggcggcagggtcaaaaacccgcggtggtgggggaaaaaacagcggtggcataaatccgcggaagcggggacaaatagccccagtggcgggtgcaaaaagccgcagcggtgagtgcaaaaagccgtggcttcaggggcaaaaagctgcaggggcaaaaagccatagtggcaggggcaaaaagccgtggcggcagggggcaaaaagccgcaaaaagcagcggtggtgggaacaaacaccgcggcggcaaaaagcctcagcggcgggggcgaaaagccacaaaaagccgcggtggcgagggtaaaaagctgtggcttcaggggcaaaaagccacagtggcaaaaaaccgtagcggtggggcaaaaagctgcggcggtgggggcaaaaagcagcaggagcggggccaaaaaaatcacaaaaacctgcttagaagggggaaaaattcacgggggaaaaaagccgccctggcggggtgcaaaaagccgcaaaaagcagcggcggtaggggcaaaaagcgcggcggcaaaaagcctcagtggcaggagccaaaagccacggtggtgggggcaaaaagccgcggctgaaaaagccgtggtggtgggctcaaaaagcctcggtggtggggataaaaagctgtgactgcaaaaagccacggcggagggcccaaaaagccatggcgatggggataaaaagccacagtggggacaaaaagccaccgtggcggatagtaaaatgccgcaaaaagccgcggcggcaagggcaaaaagctgtggcttcaggggcaaaaagctgtagcggtggggcaaaaagccgcagcagcgagggcaaaaagctgtggcttcaggggcaaaaagccatagcggcggggcaaaaagccgcggcagcggcgggggtggaaaaaccacaaaaacccgcagcaacggggggaaatagctgagggggcaaaaagccccggcggcggggggaataaagccgcaaaaagcagcagcggtgggggcaaaaaccacggcggcaaaaagcctcagcggcaggagcaaaaagccacggcagtgggggcaaaaactgcggtggcaaaaagcctcagcagcaggaacaaaaagccacggctgcgggcacaaaaagccgcggctgcaaaaagccacggtggtgggcccaaaaagccacggcggtggggataa

SEQ ID NO: 4836 - DNA, 1281 bp, Artificial sequence
  DNA replication origin
cagcggcggagaggcggccagcgttggcgcggcggagaggcggccagcggcggcgcggcggagaggcggacagcggcggagaggcggatagcggcggcgcagcggagagtcggtcagcggcggcgcggcggagaggccgacagcggcggcgcggtggagaggcggacagcggcggcgcggcggagaggcggacagcggcggcgcggcggagaggcggacagcggcggagaggcggatagcggcggcgcagcggagagtcggtcagcggcggcgcggcggagaggccgacagcggcggcgcggtggagaggcggacagcggcggagaggcgcacagcggcggagaggcgcacagcggcggcgcaggcgcggagaggcgcacagcgcaggcgctggcgcggagaggcgcaggcccaggtccactccccagctgtgaaagggtaagagctgagggtggctgagactcggggttgttcagggcggggtgggctctggacccaggaggcctggcacccaggtcagggctccaggggaggccagatgggcgaaggccaagaaggggccggggctggtcaggaagggctcctggtgaccagagcactttgcgtgagccagcgtgggaggaaggtgggctggatgagccagggaggtgccaggaggggccttggcagaggcgaccacctccgtcagcccccaggccactgaaccctgggtagcgagaaccgacaggggaggctgcagacagaggagtggaggctcccctgctttgggggctctgagtagaagcatctagggggtccctcaagaggcccccaaacgcttcccccggtgagaaaagaaggcgcagagaggggcacggcgccggcgccggctcaggctcagaggggcgcacagcaagatttgctgtgatttcttttattgccccaagcgtacctcaccttggtagatttctattggctttaaaaatgtgtgtgttttgctgttggggagtggggtgttatacggatgtcaaattttgctggttgactgttcagatcttttgtaaatccttgctccttttctgcctagtttcactctgtcacttacactggagtgcggtggcacgaacatgactcactgcagccttgacttcctagggtcaagtacttcccctggcttaacctcctgagtagctggtactataggtgtgtgccggcacacctggctaaatttaaaattttttggagagatgaggccttgctatattgcccaggctcgaactcctggcctcaagctatcctttg

SEQ ID NO: 4837 - DNA, 1935 bp, Artificial sequence
  DNA replication origin
tgcgcctctccgccgctgtccgcctctccaccgcgccgccgctgtcggcctctccgccgcgccgccgctgaccgactctccgctgcgccgccgctatccgcctctccgccgctgtccgcctctccgccgcgccgccgctgtccgcctctccgccgcgccgccgctgtccgcctctccaccgcgccgccgctgtcggcctctccgccgcgccgccgctgaccgactctccgctgcgccgccgctatccgcctctccgccgctgtccgcctctccgccgcgccgccgctggccgcctctccgccgcgccaacgctggccgcctctccgccgctggccgcctctccgccgcgccgccgctggccgcctctccgccgcgccgccgctggccgcctctccgccgcgccaacgctggccgcctctccgccgctgtccgcctctccgccacgccggcaccagcgctgtgtgcttttgcaagggcggagctgcgttctcctcggcacagacccggagagcattgcgagggcggagctgcgttctgctctgcacagaccttggggcactgcctcgctttgggacaactcggggccgcatcgacggtgaataaaatccttcctgtttgcagccatgtttgtggttggtggcagcgatggacactgcagccagccagagtgtagaaaaaggcatcggggtaagtgcgctatccaggctgcactgctggtggcctgggacgggttgggagccctatctcaggcgtcactgcccgtcttgggtgactggttgggtgtgctatctgaggctgtgctgcctgcagcgggggggcggtttgggggctcaaaccggggctacactgcctttggcggggagccggttgggggcactatcccagactgtattgctggcaacagtgaggtgggttaagtgtgctatctggggctgcactgtgcggctgtggggggggtggcggtttggggttgagggcgctatggggtgctgtaatgcccatggtgcggggaggcggggcagttagggtatgttgggtgtgctattggggggggcgacactgctggtggtagggggcagggtgggttgggggccatatcaggggctgcactgattgctttagctaggatttctggtactatgttaaacaacagtggtgacagggggcatccttatcatgttccagatcttagaggaaaagctttctatttttccgcattccgtatgattctagctgtgggtgtctttcctgtagtttttattatgttgcggtatgtttcttctgtgcccgtttctttgaggatttatagcatgaagggatgttgaatttcatcaaatgctttttcggtttcagttgacatgatcatacagtttttgtcgtttatttggttgatatgatgtatcacattatatgttgagtgactcttgcattccaaggatacatcccacttgatcatgatgaattatctttttaatgtattactgaatttgattcactggtattttgttgaggatttttgcatcaatattagagatcctggcctgtagttttcttctttgatgcttttatctgattttcgtatcacagtaataatggtctcatagaataagtttggaagtattccctcctgtttttcaaaatagtttgagcaggattcgtactaggtctttaaattgtttggtgtgaagccatcagcagtgaagacatcagttcctgggcttttctttactgggagactttttctgatggcttcaatctcattacttgttaccaatctgttctggtcttggatgttttcattgtttaacctaagtaggttgtatgcatctaggaatttgccaatttctgctaggctttccaatttattggcatatgatagccagttatgatccattgaatttctgaagtattagttgtaatgtctcctttttttaa

SEQ ID NO: 4838 - DNA, 884 bp, Artificial sequence
  DNA replication origin
agaaaaccaacttttcgtttaatcttgtgtgttttttatttcaattttgtttctgctacgatcttatttgttttcttattttcggtttagtttgttcttactttactagttctttaagatgtattgtttatttgaagtttttcttttgtttggatagtaggcacttatagctgtaaatctctgcctttgtactgctttctgcgtaacaagttttggtatactgtgttttcattaccctttgtttcatgaaatttttgaatttctgtcttagtatcttcattgaccagctagtcatttattcaggagggtagtgtttaacttccatgtgattgtattgtttccaaaattacttttcttattgatacctagttttattcctttgcagtgaaagaagatggccacggagacagacagcagcgtggtcagagtggtaggagccggccatcagcgagagctgctccatgcctggctgctgggagctagagcctgcggcccactggcttgcctcactgtagttggtggtggcggtgacagagactgcagcatgaccagagtggtaggacaggggctatccagggctgcacctttcacagtgtggggtgggttgggggcgctatccagggtgtcattgcctgcattaggggtactggttggtagcactgcacagggctgcactgcccacggcagggagggtgggttatgggtgctttctggggctgcaacgcccatggaggaggacaggttagggcatatcgggtatacgctactggcggcattgggggacggaggtgaggggcgctattgagggcaggactagccgtggagcgggggcgagttcggtgctatcaggggctgcactgctggcagcagtcaacagagttggc

SEQ ID NO: 4839 - DNA, 975 bp, Artificial sequence
  DNA replication origin
caggttccaggccagggccagggcagcagcaggggcagggcctggataagggcagggccagggatatggcaggaccagggctagggccagggccaggccatagtgagggcagggcaaaagccaaggcagggtcagggcaggtccagggcaggtccagggagcggccagcaccaagcggggccaaggcacaaccagcgcaaggtaaagcagggcaatggcaccactgggccatgacagggcaaagtcgtgccaggagagggcagaacaggcaggcccatggtggggccagggcagggatgggccaaagcagggccaggacatttacaaggccaggtcagggccagaacaggagcaggaccatgaccattggcagggccagtgccatgacaggaccagggtcaggacaaggggcagggccagagccagggccagagccaaggtcaggccagtgcaggatcggggcagggccagtgccagggcaagaccagggcagggacagggtagcacggggccaagacagggacaggatgggaccagagcaggacagggccgagagtccaggtaacagtagggcaggtacagggcaaggcagggcagtacagggccagatccacggcaggcacagggcaaagccaggcccattgccaatgcaccagccctccctacaaggctcctaccacctggccactgctgcagcccgtccatcgctgtaagcctgactcccaaccctgcctgcagccgcctgccctcctagcacggccgctctcctaccgttctggtgcactgcagtctccgtcactgccacccacccgcagcgaggcgagccgtggtgttgcacgctctaggtgtctcctcctcctcctggcacggagcagctgggtgggcaaagccagaaaagcctagaggaagttgtgaggagtggaagcgttagagcctcaacttgtcatgctggccactgggtggcaggggccagtt

SEQ ID NO: 4840 - DNA, 1534 bp, Artificial sequence
  DNA replication origin
aaggtctcactatgttgcccaggctgatcaactcctggactcaaatgattctccaaacttggcctctcaaaatgttgggattacaggtatgagccaccatgcctggcctaaaaatagtattatatttttgtatcatataattttcaattaggtaatatgaatattctggacaggaaatacacccttaataacataggaataaacatttgttacactgagaaaaatctaatagagctaaaattaaaaattaatttggaaaggtcattagatactgatacattcttacatttatacattctttcatatattcatatatccttttaacagtatcaacggtttggagttatgtgtacaaaaccatgacctatatgtaatacaaccaataacaggcacttacaattcaaggcatattatatacaaagctttaacttcttatcaaaatattttgttttcttctttctgttttggcagatactatgaacacaacattcaactcacagacaccatggagctttactaagcataaagtactgtgaaaggccagggctaggacagaactgagacaggtccagggataggacagaactggggcagggtcatggccagagaaaaaccaggggcagggtcacagccagggacatgagaggaccaaggccagggccagaagcagggcagaaccagggccagggcagggacatggcagggccagggccatggcaggatcagggtcagcagaaggccagggcagggctagggtagcacagggccaaggcagggcagggccagtggagagcaaggaacaggccagggtatggcagggcagggacagggaggtccagggccagagtcaggtccaggacatggacagggcagggccagaaacatggcaggaccagaaaggggacagggcaagggcaaggccagagaaggaccatggaaaaaacatggccagggagggtccagggcaagggcaaggccagggcagaaccagagccagagcaggccaaaggcagggccagggtagggtggggccagtgtagggtgagggtagggccagggcgagttcagggccagggcaggactaagatagcacagggctaaggcagggccagggcagggccaaaaggaggggccagggccaagcatggccagtgtcagacctggggattgtcagggccagggtcagggtcaaggctgggccagggacagggccagagcaagggcagggccagggagaaagcagaaccagagaggatccagagcaaggccagggtcagggcagaaccaggaccaggataaggcaaagccaaggccagggtagggcaaggccagggcagggcaagatcagggaagggcaaggccagggtagaaaaggccagggtagggccaggccagggtaggagaaggccatggtagggccaaggccaaggcagggcagggctagggtagcacagggcatggccaaaaacagagcagggccatagcagtggcaggactagcaacagggctagggcaagcgctggaccagagcatg

SEQ ID NO: 4841 - DNA, 982 bp, Artificial sequence
  DNA replication origin
ggggaaaaagccgcggcggcgggggtgcaaaaagccgcggtgggcaaataaccgcggcaccgggggcgccaaaaagtcgcggagggcaaaaagccgcgtcggcggggggggcaaaaagccgcggcgggcaaataaccgcggcaccggaggcaggggtcaaaaagccgcgtcggcggaggagcgaaaagccggggcgggcaaaaagccgcgagggcggttgaggggcggggaaccgcggcggcaggggggcaaaaagccgcggcgggcataaacccgaggcggcggggaaaaggccacggcgtcagggggcaaaaagccgccgcggcaaaaagccaccgcggcgggggtgaaaaagccgcggcggtcgggggggcaaaaagccgcagcgggcaaaaagccgcggcggcaaaaagccacggcagtgggggtgaaaaagccgcggcggtgggggggcaaaaagccgggtcgagcaaaaagccgcggcggcgagggggcaaaaagccgcggcgacgcggggcaaaatagtggagatggggtagaaggccggcacagcttggctttgctggagtgtgatatgataggaaatgtgcagccaaagacaaaaaaagatgtaagtaggcttgactcattgcagccaagaacccagatgttatcttgagggttttaactaataagcagtttaaatcagaatgacacattctgatttgatttttgtatattcacatttggcaggcatagataccgtttgaagagaaaaaagtcagtagatagaggtaacaaacttaaatatgtgccgagtctagaaacaagagactagggggataaggacctttcgaaataaaatgcaagatttgacaactgattggctgggggatgaggaaaaggcaggtctttaaggtcaatccctgttttgctttaagttgttagggggtggttttatcacatattgtagaatacgtcatttcagttttgaacatcttga

SEQ ID NO: 4842 - DNA, 1312 bp, Artificial sequence
  DNA replication origin
ccgctcccttccctctctaaccgaacaccaagcctgtcagcttgactgtgctcttgtggccattggcactgccatctctgtggctcaggctgccaccacttctccacccatctgtggagaagctgatgctcaccctgcctccactccacttcctccatcctggcctccgcaggggaggcagctctcctgctgaaatcctccacttggcccatggccctctggtagagttcagactccctaatgtgggccatgaggccttctgccacctggctctggcccctctctgcccatctcatgccacctccactcctccgtggccagcccattcctgcacattggatactgccttagttgcaggcctttgcacatgtcagtcctacgcccagagtgatccctgcctccctggaggctcctttaccctccagccttcttttcttgacctaaatttctctttctctgggagcctcctaccccctcctctaggccattcacttcctccacatgccccacagtgcccactctttcagctggggcaatgctcatcacactgcatagtaattgctcaattgattgcttttcttcccacgggctggattgtaccagtgtcctttactgcagtgactgaacattctaggcatagtggattcaagaaatcttgagttcattggctggttggtggttatctgttgcttactgtgtcttgcctgctgtgtggtgatgaggaaggagccaggcttccaggactctcttggtgttcttgtctttctgctctgtccacttctctctcctcttctgtggttacctccagcatgggaggtggggttggatgggagccagtggagggtcacctcgccctgctagggagagcagcagcattcctcagggctcctaaattcccctgacctcgcagcagcaaaaagtaagcagagggaatgagagacgtccaggcatggaacaaaacatcttccacttttcagctgagaccctctgttcatagctcacccatcccagtccttgctgtattccttaccccagagaaacaaaaccagggatgagtagattgagggggatgcagagttgcgtggatattccactggcccccatccaactccagctcccatgcagcatcgtatagggatctcattatcccatgaccagcctcctcagccctgaagaagagaccctaccaatgcaagcagcagcccaaagacagtcctgggaaggtaccatagaggcaggggagaggtagacagagcagggagccaagaacaccaagggaatcctggaagcctggctcctttctcatcagcac

SEQ ID NO: 4843 - DNA, 1637 bp, Artificial sequence
  DNA replication origin
cattagtgccttccctagtattcttctagattttttttttcttaatcacatgaaattttaataccacagatatactatatatctgtttatgttctgtatatgttctgtgctttatacgtaaaaaagagtaagattttttttcacctccccttttaagaatcagttttaattccattgagaatgcttgttatagattgaaggctggtaaggggttgggctcctctttcttcttcctggtgccagagtgctcccacatgaaggaataggaaaggaagatgcaaagagggaaatccttcgaacacatgaagacacaggaagaggcctcataggcctccaagggctccagggaagcagctgcagaggttgggtggggtggggggccaggatccactgaccctggggccaggcaggaaacactctattgcctggggctcagaaggcagcatcacccatggttcctgtcattgctcatgcattttgcctttcaacaattattgtgcacctactgtgtgcaggccctgtctggacactggggatgcgcagtggatgcactgggctctgcctttgagggctgcagtttaatgggcgacaggtaattataaggaagaaggtgagtgcagagtgggaggcttggaggcagtggggcttggggtgggagagctcacatccagcctctgagccaaggccaggaggcttcccagaggaggagacagagcagggtattgtggtggggggtgtcctttttggggctgggagctgcactttacagtttgaggggatgggcagaggaggctgggcttcgttctggaggtggggacatggtaaggtgaggtttagaaagcacacctgagccacagtgtgtaggatgctggaaatggtggagatgggcctgcaaagagagtgctgggaagtgatgacccaggagcagcagccaggcacctaacaatgggtcagcaccatgggcgtggagacgagggccgggattgatcaatacccgagaagtacaatgtacaggacttgggttccatttggatggagtgggtgagggagagggaggagtcagaaatggcttccagtttccagcttgggcctggggattagagatgtccccactgagagtagggcacaagtgaggaaatggtttggagagaaagatgataagttacatcatggatgtgctgagtctgagttgcctatgggacttggaatggggggtggaaaaaggtgtgtgatcttgagcaagatattcaactcttctgggccttggtcttctcatttgtaaaatgatgataagaatattacttcccatttgtgttgctgtgaatattaagtgcgctaccacatgtaaaatgttgagaatcgtttctagctcagagtaagtgctcaataaacacagttatgccttttatatggtctggagctcagaagtggaagacagggttttgtgaagtcatggctttgtggatgtagctagagtgtggagtaatgacaggagggtcgggggcacggcacaaggtaggtggtcaagagacactggacacaacccaaatgtccatccacaggggaacagatacatacactgctgtgcaattgcacatagtagaatcctctacaatagcaaaaattaaggcacaaca

SEQ ID NO: 4844 - DNA, 1620 bp, Artificial sequence
  DNA replication origin
ctccttaatgctgtctgtgtgatagtgagttctcttgatgactatggagcttaaagattgagtgaataccgtcctgctgggttttggacttgcctttgtgttattttcctggggaatttcttccctttggattgagaaactttacccaatgcctgttgtaccttgaaagaaaagaaatcccttttaaattcagggacttattgacagaagggactatagccttgtctcagatgagactttgaaatttttacatttggcatgagttaagacttttggaacttttgaaaaggcatgattgtgttttgctctgtgagaaggacatgaggttctggagtatcaggggtcagaataatatgggttggctgtgtgttcctataaaactcacatggaattgtaatccttaatgttggaggtggggccaggtgggaggcgatttgatgttggatgggagggggttggggtggaaggaaaaggaggggtagggtggggaggagtaggctgtcagtagggtggtgggagggtagagggtagtaggaagggggactaacctgctgcagaggcagaggctcatggaaaaactactaggacagtgcacctgtggctttgcaggcttcagcccccatggctgctttcatgggctggactggtgttaagtgcctgttgcttttccatactgagggtttgagctgttggtgggcttatgaatctggggtctggaggatggtggcctcctgtgtggggcctccaagcccatattttccttctgcactgccatagtggaagtttctcaagaggctctgcctctgcaggaggcttctgcctggaaacagtgggcggtggtgtgggtggaggatccttcaccagtggttaatcttcttgacgctgatctcctgatagtgagttctcatgagatctggttgtgtaacaggatatggcacctctttcttctctctgttttgctcctactcctgccatgtgaaacatctcattgccgcttggccttctggtgtgtttaggagggccctgatcagtgtgggcctgctcagtggacctagtcagttgggacttggtcagtgaggcctatttagttgggagcatggtcagcaggggtctgcatagagagggtctcattagggggatctagtagtgcaggtcttggtgagtggggacctagtggcagacaaatgtttggtgtctggtcagtgcaaacctgggctgtgggacttggtcagtggtgacctggtcagctggggcttagtggtggccttgtcagcatgggctgggtgactggtgaccaggttaaggggtgctactcagtggaggcctggtcacatgggacctagtcagcagaggcccttgtcagtggggccctggtcagggcagcctggtcagtggaacctaatcagtgggggcctggtcagagaggacttgatcagtggtggcttttgtagcactggtctacggggtgacctggtctgtggggatctgagcagtgcgtgcctgttcaggggggcctactcattagggtcccgttcaggggcatctggtcacctcagtcctggttagtaggggcctgttcactggcagcctattccctggaggcctggtcagtggggcttc

SEQ ID NO: 4845 - DNA, 884 bp, Artificial sequence
  DNA replication origin
cctttgaggccaggtgggctgtgcgctctgcggccctgaggccatccaagggaagctccgccatcctgcgccagtgccagatctgcagttgcaaaccgcgcgtgtggcactggcagcagtgagggcgggtgggggaaggagcagcccctgactctgcctccatgcctctccagctaccttacactagccacacagactccagggccagagcctcagcgttcagccagacaatccgcgaagccactcaggtggccgcggagggcccttgccagcaccctctcttccgaggaggagcggggcgggctgcaaggccagacaggccctcctcctcaggccgggctggctgcgcgcctgcgattctggggccgcccgggcgatcccaggagaaccggagagcccatcggcgcctgcccagagctgcagccctacctgccggcgcgcgccgccagggagcgtcttccgggagcctggcagcaaccgcggtgcaggcgcgcgcccaacggctttgcgaggctcactcggtctgagaggtcggaggctgccagtgtcgctgctgaaggctgtggtggaccgggctggatcgcggattgtggagtagatcatagatttgaaatagcggatttggggttggatcggggctttggggttggataggcgatttggggctgggtcggccggggtcgggggaggggggtggtgaaaaggtgacagggagctgcccccgctcaagagccggtggttgggggtctgagaagtagtcaccgccatgaagttattcggcttcgggagccgcaggggccagacggccgagggctccatagaccacgtctacacgggttccggataccgaatccgggactccgaattgcagaagatccacaggg

SEQ ID NO: 4846 - DNA, 1104 bp, Artificial sequence
  DNA replication origin
gagctgcccgccgccatctgaatatgttgcaaagacagtgctggcctggcaaccggtgaagctccacgccccaccccgacccccacttctacccaagtagcagcaacgctagagacagatgcctgggcggcagcggttaagtctggcagttggccaggcggccaaaggacgggaactggcctttcaccccatcccagtttccatggagaactcaaccactatggcccctgagcagaccttcaggtctggtgggctgtgctctgtgcccgcaaacctgacgccatccaggggagctccaccttcccgtgccagcgcctcagctgctgcacaaaactgcaagttgcacacgggcagagatgacggagcaacccccggccctccgcgccactcaccctacctgcacacctgccacgcggaccctggggccggtgcctgggcgcccaagtcaggcagtccgcacagcagcggcaccagggtgaaaacctgctgctcagtaccatcccggttaccacgaagagccagccccggcggcccctgcgttcttggaggaggccaagtcagagcaacccctcaagtgggagggcgatgcacttgaccctgaggacatcaggtaccaggcccgccagctcacgccggcatcggagccgcagctgcagtctagacgtggtgcaccggcagcaagtggctggacactccagaccatgcccgccccccagtagcgtggatcctgaggccagacccccaggcggcaaaatcaggcaaccggccccgccagcagccgctgtttcatccgtgtggatacagagtgcccagcgccagggcccaggatccagaaaggtgtccaagaggagcggacctttgaggccaggtgggctgtgcgctctgcggccctgaggccatccaagggaagctccgccatcctgcgccagtgccagatctgcagttgcaaaccgcgcgtgtggcactggcagcagtgagggcgggtgggggaaggagcagcccctgactctgcctccatgcctctccagctaccttacactagccacacagactccagggccagagcctcagcgttcagccagacaatccgcgaagccactcagg

SEQ ID NO: 4847 - DNA, 1285 bp, Artificial sequence
  DNA replication origin
ctgggcggggtggtgggaatggcccaggaggagctccggctcctgtggctggagtgagggtgtgggctgtggtgggagagggggtgaaggtggagagaacaggggcccagaggtctgtgctgtaggaagggtatggacttcctagtgaggactttctggtggggggctctcagagaagaggaggccggaggggctgggggtccccaggactgcatgcgccaggcagacggaggggaggccgagccaggagccgcaggcttctcagtgccagaccaacgtcgccctccgctggccgtgtggggaatcgcgcctaggctggggctcccctggccccaggttagggggactccgatgtgtcctggggcgcttcctgcccatccagcctccgccaggcagcctggccctgaatggctttgagggcagcctccgcagcacaggacctgcctccgccctgtggggcagatttgggcgtctgactctggacacttacccagaggctgaattcaactccccagcgaagagcacactcagactccctccccgctgtgcccagcctgaggggaccctggcttggacttgggaggagaaggccagaggccagggcctggctctcaggcactaggtgcaggagaaaatggagcagagttcctgcaggaactgcctcagactgcccccgaggggacctggcctggaaccctccctgtgctaccaggctgctgttggggccaggagggcagggagagcagccacctgtacggcatcaagtaacactatcagtcagcacacccaacacccacacgacagccacagccctctgccctgaggtggctgcaactgagcagagtctcctgtcttgttcaccctgagcgcggagctccgcacaggacaggatcagagcgcaaaccaggaacaaatggatgaaccaaggaaggggccagggcagtaggtccccacccacaccctgaaccctaagggtgggactcagaggctggagacgggctggccccaggatcctctaagtgacaggaacccttggccactgttgattgccccgaggcggggacagggatggtggggctggggctgcctggccctttaagagggcagttctgcccaccaccctgaatgcccctcccctagctactggagaagagatcccgtttcttggcaacaggaagctcttggtttacacagtgtcacccaagcgactgggagccgcgtcctgctctgggactgagccgttggagctgccccgctgaccgcactaggctgaccgcaaccggct

SEQ ID NO: 4848 - DNA, 1380 bp, Artificial sequence
  DNA replication origin
ttcagcagctcctgaatgttccggatgagctcggcttcctgagggaggagacgccctgagcaccagagccagtccctggtgaggatcccaggaggcccagctgctgcaggccttggtcaacacctgagcaaccacaaggagttgaatgccgggcctgagctctgactgtgtaagttctgctctctcactgggtttatcttgggcttttgggcattctccttggtgcgttgtaagtggggtgttttcctccagggccttctgtgggctgctgggaaggtccctcagcggcagttcccacgccccaggcttcaggagtcatcgctgctgctcactcagtgcacctgggaacgttggcctgcccttggcctctggacagcccctgaggacccaaactctgggggcccagatgcccgcccaggctgcccctcagggctctgtgctgggaaaggccatcttcacaccaagaacaggagaaggaccctgtgtttcttcttattgcctggccagtttaatttgctgtgtgtaggaacaagccttttctctgtgattggggtctttgcctcaaccactgggtacttccttgtgtgccagggcccgggtcctgcgcccctctatccctgggtttgcctctccgtgcactgtcagtgtctccatcagttggcaggtgcccttgttgcgggcagagagtttgcgggagctgcaggagttcttgaggcactgagagagtgcagggggaagggcctgcagaagggtaaagaagggaggagggaaggcatgaggggagggagggactcaagggttcttgcctgagcttggggtatggcaggagaccagctgcccccaccccacatctttcacgaatgtctacaggcctgtagtggttctcagggaggccccaggctctgagaggtcagagaattctccagagccagcatctgggccaggactgagttactctctcaccctgtggggctgccccacagacaagctggggtggattgggaagttataggggacatggaggagaggggacctgtgggtgcagatctttgtgtccccggctctgtataggatgaatgggagcagtggctcccagcccaccccaccttacctgtccacacctgcagtgctggcccagacctgggtttccaccttgggagcaactgtcccagcgagggagggtctctggggaggtgccttgtggcttagcccagggagcccagggtcaggatgactgtgccaggactcaaagggattagaggaggagaggagaaacagctgcttggaagtcaggggtcttctggggcaaagctgcctcctgtcactaaggggccagatttcgggactcaggggtctcacgtgcagagggctgggctcccg

SEQ ID NO: 4849 - DNA, 1463 bp, Artificial sequence
  DNA replication origin
gacgtgcatggactccgatgcaccccatgctgccccacaaagcccagtccctcaggctccctgcccccgagtgccccctggccacaacttctctgagtccccccacaccctacccaccccgggcacttagtcccctcgtgcccccgcgaccccgttcccagcaccgctgccccggaggccccctctgcagcacctccggcccccgcagccccccttccctagtacccagcgcccgcgccctctttttgctcccaggagtttgccgccctctagtgggcggtggtcaggctccctctgctggccttgggcggaaacgcaatcctgccagcgcctgggtctgaccccaccctactctgtcctgtctgccggcagccaggctgtgcacgcgctggacatttgaggaggtcttggtcgcttgctcatgccaggggcagacagttgcccaagtgccctcgggggcgagggcctccgggccaggctggtgaaagcagcgccgctggggcccccaggcagagggaggcgagaccacagccagggcaagtgcaggggcagagctggggcccacctctcttggaaggtggtggagtacggatgagcctgcacctcggtgctctggctgtggtggcgcccgcaggtctcgtcgatgttgtaggcctccatcttgtctgaccagtccatctcgcaggtctccttgtgctcccggttcagtctggggcggggtggggcagggccttgatgtgtgcccagggagggccctgctggggaccctctgtgctgcaggctgggccccaatgcctgcctcaggagggagttctgggtgggcctgtcccgggcagccctcgtgctcagcagtgaccaggagctgcggcccaggctgggaggctgcagatcagatgtggcactgggctctggccactcaacctcaggctgcgccggaacctcccccacccagtcctgcgctccactgtgacctggggcagcccctgctggctctgagtctcagggtcctgtcgttcaatgccttgccccaggaccagctgtgggtagggtcaggaatcatcccttgggcagccctctacccaccggatctggctcactgcttgcatgatggttctcttcagcagctcctgaatgttccggatgagctcggcttcctgagggaggagacgccctgagcaccagagccagtccctggtgaggatcccaggaggcccagctgctgcaggccttggtcaacacctgagcaaccacaaggagttgaatgccgggcctgagctctgactgtgtaagttctgctctctcactgggtttatcttgggcttttgggcattctccttggtgcgttgtaagtggggtgttttcctccagggccttctgtgggctgctgggaaggtccctcagcggcagttcccacgccccaggcttcaggagtcatcgctgctgctcactcagtgcacctggga

SEQ ID NO: 4850 - DNA, 2857 bp, Artificial sequence
  DNA replication origin
tacaacatcgacgagacctgcgggcgccaccacagccagagcaccgaggtgcaggctcatccgtactccaccaccttccaagagaggtgggccccagctctgcccctgcacttgccctggctgtggtctcgcctccctctgcctgggggccccagcggcgctgctttcaccagcctggcccggaggccctcgcccccgagggcacttgggcaactgtctgcccctggcatgagcaagcgaccaagacctcctcaaatgtccagcgcgtgcacagcctggctgccggcagacaggacagagtagggtggggtcagacccaggcgctggcaggattgcgtttccgcccaaggccagcagagggagcctgaccaccgcccactagagggcggcaaactcctgggagcaaaaagagggcgcgggcgctgggtactagggaaggggggctgcgggggccggaggtgctgcagagggggcctccggggcagcggtgctgggaacggggtcgcgggggcacgaggggactaagtgcccggggtgggtagggtgtggggggactcagagaagttgtggccagggggcactcgggggcagggagcctgagggactgggctttgtggggcagcatggggtgcatcggagtccatgcacgtcctccaggagcatggggcgcggacagggcatgggggcgcagcagggctcccagccttcggcagagcctccccgaccctctcctggctgtcccccgccccgcagcgcctccaccccggagacccgggccaagttcacgcaggacaatctgtgccgtgcccagcgcgagcgcctggcctcggccaacctgcgggtgctggtggactgcatccttcgcgacacctccgaggacctgcggctccagtgcgacgccgtgaacctggccttcgggcgccgctgtgaggagctggaggacgcgcggtacaagctgcatcaccacctgcacaaggtggggcaccctgaaccccgaagacggccccctctcatcacctggcctgggccctcaacacctttctcctctgtcccatttatcccgagggaccccagaagcaagtgtctcctctccgtaaacctatgtaaaaccaggtgacactgggtatgatcgaccggtgttgccacccctatgactcagcaggaggagctgtggggaggatggaggcaggaggtggtctggggaacactgaccgcccgggaggtccccaagagtcctggcctggcaggcagggctctgaatctagggtctcagcgtggcctttaccacctctgagtccccagtccttgagcaggattcaggtcctggtgaccaccaaggatgggggttcttggaccacagctaagggacaacaggcttcctgactctccagagcccactgggggccccgtgcacattgttcccctcatccacgcctccccagggccactggtcaggactgccctctggacacagccccaagacctgggtaggaccagcctggtctcggcgttctatatacccgggcatgggggcacaggcccaaggagaactgtcctgtctgcagacactgcgggaaatcacagatcaggaacacaacgtggcggcactgaagcaggccatcaaggacaaagaggcacctctgcacgtagcccagacccggctgtacctgcgctcgcaccggcccaacatggagctgtgccgtgacgcagcccagttcaggtgctgcctgggcctctgaggcagtcccaggtggccctgtccacctcctccctgtgactctctccaataaacactccaacaccccgcacacacatcccccgcaggtgctgagaggggagggagactttggggccacacacaacaagcaggcatgccttaaacacacagacatacacatgacactgggcaggtcatgggtcggggggctcccagtgccagggacctgtgcccacgtggtctcaccccaccctatgctacctcatcttcccgggaggaagctccttcagacaaggtgagctccaggaggccacagagccagagaggccaggcagggccattccctgctgccctgagcgtgctgtccacacctctggtgggaagtatgacctacgcctgcgctacaggcatagatgtgccgtccttttgtttcccttgataacggatgcccggtggccccttctaagtacctttcttctttccctgcccctcagttccttcaaggaactgggggcctccttccatcaagtatcaggaatggaaagaactgagcctggtcggctgaggccagtcctgtcctgccagggtcgagattgcacacgggtcactcattcccactcaggcccacgctccctgggaggaccctcgtaatttatgctctgccctagagctgctttcctgatggggttctttcatggagtcttcccaggacctcctgccagctcccattgggagttttgggtcccctacaccccggtaggtgcatacttctgccctccctagccccggctcacacccccccaacacccccaggctgttgagtgaggtggaggagctgaacatgtccctcacagcactgcgagagaagcttctagaagcggagcagtccctgcgcaacctcgaggacatccacatgagcctggagaaggacattgccgccatgaccaacagtctcttcatcgaccgccagaagtgcatggcccatcgtactcgctaccccaccatcctgcagctggctggctaccagtgagcagcggcacggtgcttccccccagtcccccaaataaacagcgcgttagctttctgcacagtgtgtgtgtgtgcacggtgggacctcgagttgctgtccatctgaactgg

SEQ ID NO: 4851 - DNA, 2117 bp, Artificial sequence
  DNA replication origin
ggactacatgttctgattggatgagagaaaaacctctaggcctactctgattggactttattttcatgctgtgattggttatcttaagacttgctctcatccaatcagaacatgataataaagtccaatccgagtaagcctggagtttttttctcatccaatcagaacatgcagtccaggaaccatcatgcgcaaaacctcagtatatatgtaatgccgaagagaggttagggtttctttaggtttccgtactttcctgttgagcactgcggcgcaactcgccttgctgcggttggtggtggcgatggagattgcagcgcggctgaaggggtaggagaatgaaaatagttttgggatagatagaggtgggtagagagtgtggtgttagtgcaaagggaaaaaaggatagcgaggaggagaaggcgttgcaaaaagacgatggggacaagatggtggggaaaaaagtttttgggtagatggaggtggaaaaacggtgcagagcgggagggagggatggttttgcagaaagacggtgggtagaaagtttatgggtggatgaagggggaaaagagggtggcaattgggaagaggaaagagagtggtgaggggggacaacgggcgagcagtagggagagaaagttttgtgaaaagagggtggggagaaaagtttttgggtagatagaggagcaaaagaagatagcaagtgggggaaggaaaaagagggtaaccagcgggaggaagacaaggttttgcgaaaagacagtggcagaaaagaaagatggtggagaaagaaaagatggtaggtaaaaagtgagtagatggaggggggaaagagggtgaagaggaggagaaaagagggtggcgagaagggagcagggcaagaaggttgggaaaaagatgggaaaatagtttggggtagatggagggctaaaaagagggtggcaagcaggataggggagagaagaggacgagtgggaagggggggaagactgaaaagatggggaaattttggggggtagatggagggggaaaagggaggtgagcaggagtggggagaaggccttgagaaaagatggtggggaaatgttcttgggtagatggagaagggaaagagagtggcaaggaggagcggggggaaagaagatgaggaaaagagtttttgggtagatgaagggggaaaagaggatggtgagcagcaggagtagggaaaaggttttgggaaaagatgggggacaatgtttttgcgtagctgaaggagcaaaagggcgtgatgacatcgggagggggaaaaagggtggccagagagaaggggaaaatacggtgggaaaaaatgggagaaagtgtttgggtagatggatggggaaaagcgtggtgagcgggagcgtagagaaggctttgcaaaatgatggtggggagaaaacggtgagaaagtttggggataggtagaggaagagaaatggtggtgagagggagagggccaaatgcggtcgggaaaagaaggtggggaaatggtgggggacaaaggttttgggtagatttttaaaaataagattatttgtattttcacttttgagtagtttgagttctttagatattttgtgtattaacctcttgcctgatgcatagtttgcaaatactttcttccattctctgggttctgtcttcattatactgattgctaactctgtgtcagaaaaggttttaagtttaatgtaattacatctttgcttttgttacttgtgcttttgatgtctatttgaaaattccttgtcctaaccaatttcatgaagcgtttatcctgttttcttctctggtagtttaatagtttcaggtcctgcatttaaatctttatattgagtagatttttgcatacggtaagggtaatggcctagatgtattcttggacatgtgggtgttgggttttcctagtacagtttattgaagagattgtccttcccgaatgtgtgttcttggggactttgttaaaaaagaattgaccgtaaacgcttgaatttatttctgatttctctattctgtttcacttgtctgtcattcgttcacctctctctctcccaccccttttattgatagtaccatactgttttgatagtaccatg

SEQ ID NO: 4852 - DNA, 970 bp, Artificial sequence
  DNA replication origin
cagtctcctggcccctgacaagctgttcctagaaaatactagctgggccccagagtgcagcctcagtggggccaggtaccatgggtctgggactccagaatctttaggcctcagccactcacctgggctggattttctgcgctttgcttctctacctcggcactgttcgcagcttccccccgcccgcccatagggaccctgtctctgccgcagtgacactgggggaggtgtggcaggagtgtgtgtatctgagcgccatcctctctgacagcacatttttgtgtagtccatcctaggtaccagggtggtagggtgtctcaggatgacgaggggtgcaggtggggtcggggacgaggcagagaagtgggaaaaaaccttccctggaagttcagagggaagattgcttcctactgggagaatgtctaggggctaggtggtcatggagcaggaaatgggtggggacgaaacaaataagcatctgtccccatctggtccaggctcctgacaggaacgggatctgaggctgggccacagtggaaggccaagaaggcaccaggtgatgccaccttcacaggcatctgtcccaggaagctgaagctgtgagttgctagtgagtggcgtgtccagcagctgccttctcctttcttgagtgggtgagtgacacgtatcaaacacctgctttatgccaagctccatgctgtactccagggacacagggacctcagggcatggtgctgcctccaggagctcagggtcctggcaggaggcagggaagagacaaagagagacaatgaaagtggagagtgacccaatgaaagtggaggtgtgctgggggcttggtagtcaagggtggcttccaggaggaggtgacattggtgacactggcccttgccttgcagggtctggtcatagataggctgggggtgggcttggggaagcagagcaggcaatcaatcaatcaggactaagt

SEQ ID NO: 4853 - DNA, 883 bp, Artificial sequence
  DNA replication origin
aggcatgttgagggtgacagccctaccccgagaaaacagcagcgccatcgcacggcttcagcatggggcacacgatcgtgttttcctctgggggctgattcgaggggcaaggcaggcagaagtggatgagtgaggccacaaggagtcctggtgggatgctggtggctgaaatgagggagaagtgcatgtccccagagaccggcaggaaaaccagtagcctttggagtggctttgcacatggctggcaagggagggaggggagtcggggcacaggcgtctggctcagggagctgggtgagaggaggacccgggggcccactgggccccttaggcttgtgaggaacgtcgggagctcagtgtgggccgggaagagctggagcggcatctgaacattcacagggagctgagaagcaggcgctcagagcacagttctgggccagcaagtagagctgagggaggctgggcagaggtgggcagaggagagcgggcctcgggtaggtcagcaagggatgagggcccaattggggtggagatgagcctgcttcacggccaggtgcagatgagatggggactgtgcggtaacggcaggacaccaggttggccccagggatgccctgggggcagagtttccaggagagggagtcattggccagtggttgctatctcaggccaggcaggaggctatgagacagggttacgtgtggcttcctgggcttcagggctgagggtccctggggtggagcaggagctggcactgccatctttaacagtcactctgcctccttccagctcttcaccaccttcaacaccatcaccttcatcaccacgctgctctacattctccagccttcagcatctattaccactgatgcacaggcgccag

SEQ ID NO: 4854 - DNA, 1017 bp, Artificial sequence
  DNA replication origin
ccccaaaagcagcttccaatgtttgctgtccggatgataaacagagtcaggcagccacgccaaagacttgaggccagtctctcagctgtgggtcagattctgcccatctctcaccccagatcctttcctgccctcaggatgaagcccaagctttttgaaaagtgacctcccaggtcttacttgcagatctgaccctgccctatgtccagctgcatctcctgctaccctgctgcccagccctgatggtccagcgtcagcacggctgctatggccagctcagccctgctgctgcatcggtgcacgctgtggacattatgtcccctctccccgggaacacggaggcctgaccctcctctttactacatgaaaaactcttcttacccggaagtttttctcaaactgccccccaccctcaggggcctctgagcctgtgctatatatgctgtgctgtgtgtgtgtgctgtgtgggctgtgctgtgtgtgctgcgtgtgtgtgttgtgtgtgctgtgctgtgtgtgctgtgttgtgccgtgtgtgctgtatgtgctgtgctgtgtgtgctgtgtgtgctgggtatgctgggtgtgctgggtgtgctgtgtgtgctgtgctgtgctgtgtgtgctgtgctgtactttatgtgctgtgtgtgctgtgtgtgctgtgctgtgtgtgctgtgtgtgtgttgtgctgtgtgtgctgtgttgtgccatgtgctgtgctgtgctgtgtgtgctgcgctgtgctgtatgtgctgtgtgtgctgcgctgtgtgtgctgtgctgtgctgtgtgtgctgtgctgtgtgtgctgtgtgtgctatatgtgctgtgtgtgctatatgtgctctgtgtgctatatgtgctgtgtgtgctgtgtgtgctacatgtgctgtgtgtgctatatgtgctgtgtgtgctgtgctgtgtgtgctgggctgtgctgtgtgtgctgtgctgtgtgtgctgtgctgtgctgcggtgccccacatgcagtgctgatctcacccacaaca

SEQ ID NO: 4855 - DNA, 1395 bp, Artificial sequence
  DNA replication origin
cagatgtaggcagcggggcagggggggacggctcttggttcgctggtcccaaagctgcgcgcggggcccacttgacgcgcgcagcgccaccgaagctcccgccgcgctttgcgcggttgggtagaagtgcgcagcttttacaagggagaaggtttcgttaaaaaagaaaaaaaaatcagcaagagaaacattagtattaccaaccgagatttggagatgagagggagctgaatccggtttattttcttctggccttttaaagtttctggcgagggaacgtatttgcgaccaattcgatctggaaatgaggccatcgtttgcttggccgcagtccttctgccccgtgtgcggggtgggggtggaggagatggggggtggggggtggggggtggcggcgagagcgatccgcgcgcctcgactgaccttgggcaggcccggggcctctgcacctgcggtcggtcccgccttgcacgcacggtctctgcctgaggctgcaggaaagcgcttcctactgagaactcctgataagcgctcacggtgtcgcgaagccgaagtgacctccctcagcctcaactccccgggggccgctggccttcacctgggaggggtgtgccctgtatgtcctgtgggtgcggtccgtcaccgcctgagggacaccttttccggcaccccaccctcagaagtgtcagcgtggagagttgggcgggaaagaaaatgtcggagcctggctgtttaaaaattggaccccaggttgttattgcctgattggagggggagggtgtgaataccaaagggagcaggtcagttcatccaaagagggcttgcgggcagaggctaagagggctgcggcggcctgggagcagggctaccattgaacttagggtgaaagtccagtcgaacccaaacctgggtggaaccggtgacttgaaatcctagggataggcggaatcaaagcagttacatttagaagaaaccctggacgccaatgaacgcagccccaccgtttacagagagccagccccccgctggcctccttttagaagttcagcatacaagaaggagtgcccctgagagtaggaacagtccagttagacggggcgatctgatctgcgggaaaggtgaccggagactcccacccaacccgccaatgctgcagaaattacaggggcgtgggaaaccttggaaccatctactactggcagcttgctcttccagcgtggctttgtggcctgccggtagcggggcttccagaagaaacaactccccctcgcccagaacgcttctctcagctgacttagaaagtcacttctccacctcacccctgttccccacctcccttcctcacttcccaggagacccgcaatgcatagtcatctccaggcatcttccacatgc

SEQ ID NO: 4856 - DNA, 1195 bp, Artificial sequence
  DNA replication origin
cttacagagctgggtgtgtccctccgagtgccccccgctagggactgtgcaggccggagctaggcagggacagcggggcgaaccgggctgatagagtcggtccctgctcctgtgaggctctcaccgaatccctgctgtttccgggcagctgaagagcgctgggccctcgcgtcgcgggcgtggctgtggccgtgtctcctggtagtctgagcccactgtgcgtgtggatccacgtgggagctgggttccagagcctggtcctgaggaggagccgagccgggggtaggaggccggacttggcgagggaagagcacgaccccgggcagcagtgcgccgcgctgggcgcaccggggtttgccggccctgctctgggccctgcaggtccgctggccccgccgcgcctagtggggatgccccgtgtcccccaggcagccccagcctgcgtcccgctccctgaaccctcgggaggaccacagggctgtggccgaaagacagagatttggacctagtgaaaggacgccgctccttagccccagctatggactccacagcatcaggtttggctctggagcgtgcagagggccaggagccctcttggggagctagtaccgagcccgatatcaggaggaccccaggaagaggccggggaatcccactgaagggtgaggctgtacttcatctgccttccgtgtggcgacatctaaccttccagacccagaaggctgaagccgcagtctcctgggtctggcaggggtctctagatgaccgtggcggaggtggaggggatggccatggaaaattgtcccaatggccagaggagagcagaagaggatctgatctcttcctgctgcggcagggagagggcaagcaaacccaagagggagtggcccttggccagggatcagaggacgatagggccatttggagccttgtcatccacctccttaatcacctcactaataaggttcttccagtcgttctagctcagcggtgtataaggtcagcagtgtacatggtgggtatctcctctgagccccttcccccaatagcgttgggggcagggcaatccaggtgacccaggaggttttaagccagtcctaagtttagaacgtcctatctctaaccaggtgggcattttaatccgactgttcatccttcagtgcacatgctcaaggacacataactggccagtgga

SEQ ID NO: 4857 - DNA, 1371 bp, Artificial sequence
  DNA replication origin
acatcttgcaccgcccttaatccattcaaccctgagtggatacagcacatgtttcagagagcacagggttgggggtaaggtcacagatcaacaggatcccaaggcagaagaatttttcttagtacagaacaaaatgaaaagtctcccatgtctacctctttctacagagacacggcaaccatccgatttctcaatcttttccccaccttcccccctttctattccacaaaaccgccattgtcatcatggcccgttctcaatgagctgttgggtacacctcccagacggggtggtggccgggcagaggggctcctcacttcccagtaggggcggccgggctgaggcgcccctcacctcccggacggggcggctggccgggcggggtgctgacccccgcacctccctcccggacagggtggctgccgggcggagacgctcctcacttcccagacggggtggctgccaggcggaggggctcctcacttctcagacggggcggctgctgggctgaggggctcctcacttctcagacggggcggttgccaggcagagggtctcctcacttctcagacggggcggccgggcagagacgctcctcacatcccggacggggcggcagggcagaggcgctccccacatctcagacgatgggcggccgggcagagatgctcctcacttcctagatgggatggcggccgggaagaggcgctcctcacttcctagatgggatggcggccgggcagaaacgctcctcactttccagactgggcagccaggcagaggggctcctcacatcccagacgatgggcagccaggcagagacgctcctcacttcccagacggggtggcggccgggcagaggctacaatctcggcactttgggaggccaaggcaggctgctgggaggtggaggttgtagcgagccgagatcacgccactgcactccagcctgggcaccactgagcactgagtgaacgagactccgtctgcaatcctggcacctcaggaggccgaggctggcggatcactcgcggttaggagctggagaccagcctggccaacacatcgaaaccccgtctccaccaaaaaaatacgaaaaccagtcaggcgtggcggcgcgcgcctgcaatcgcagacactcggcaggctgaggcaggagaatcaggcagggaggttgcagtgagccgagatggcaggggtacagtccaggttcggctgggcatcagagggagaccgtggaaagagagtgagagggagaccgtggggagagggagaccgtggggagagggagagggagagggactccaggtttggtaaattttcttccatccctttattttgagcccatgtgtgtctttgcacatgagatgg

SEQ ID NO: 4858 - DNA, 932 bp, Artificial sequence
  DNA replication origin
tgcccagtctggaaagtgaggagcgtttctgcccggccgccatcccatctaggaagtgaggagcgcctcttcccggccgccatcccatctaggaagtgaggagcatctctgcccggccgcccatcgtctgagatgtggggagcgcctctgccctgccgccccgtccgggatgtgaggagcgtctctgcccggccgccccgtctgagaagtgaggagaccctctgcctggcaaccgccccgtctgagaagtgaggagcccctcagcccagcagccgccccgtctgagaagtgaggagcccctccgcctggcagccaccccgtctgggaagtgaggagcgtctccgcccggcagccaccctgtccgggagggaggtgcgggggtcagcaccccgcccggccagccgccccgtccgggaggtgaggggcgcctcagcccggccgcccctactgggaagtgaggagcccctctgcccggccaccaccccgtctgggaggtgtacccaacagctcattgagaacgggccatgatgacaatggcggttttgtggaatagaaaggggggaaggtggggaaaagattgagaaatcggatggttgccgtgtctctgtagaaagaggtagacatgggagacttttcattttgttctgtactaagaaaaattcttctgccttgggatcctgttgatctgtgaccttacccccaaccctgtgctctctgaaacatgtgctgtatccactcagggttgaatggattaagggcggtgcaagatgtgctttgttaaacagatgcttgaaggcagcatgctcgttaagagtcatcaccactccctaatctcaagtacccagggacacaaacactgcggaaggccgcagggtcctctgcctaggaaaaccagagacctttgttcacttgtttatctgctgaccttccct

SEQ ID NO: 4859 - DNA, 1005 bp, Artificial sequence
  DNA replication origin
gcaagcccccactgtggcccaggtcccaggtcccttccttgggagccagcactcagagagaagctaagtgctggtacccccatttctaacttgggtgcaggcagggaggctcggccttcagacaggcctccctcaccccactggacaccaataaatcctggatgagatctgcagagggcccaaggccctggggcagtggagggctcagaggccatgaggcagggcctgcagccagcccagacctaggccatggtggcccctgcctgattagtggcgttacctgagtggtttggttgggcagggtggtctctggggccagcaaggtagcagtggagatatggtgaagaggggactaagggaggaagcaaagggccaggaagggcataagagggaagtgggggccaggggggaggccagatgaggacggtgtggggggcgaggggctcagagaggggcagggggaggcttggcagggggaggcttggcagggggaagacacacgggaaggggagtggggttggacgaggcctctgtcccaccccagggtccaggctccagcaggtggagaacaggctcttcctgtgaggatgccaccagcatgggggtaaggggtgacacctggagggacttgctggctctgcagctgcacagaagtcccatgtgattctgagcgtgaatgatgggggtcgtgagcagaaaggggtggaaaggagcaggcaaggtggggccaggtaagccggaactggggacagtccaggcctggatgccagcctgggctctggggcaagagctaccgaagtcctgtggcccaggctaaatcaaaggggaggacaggcagcctcagggtcacctcaccctgtcagggattaagaaggaaacgggtgaaggggagggaggggagaacagggctgtcagccccactgctggatgggccacacccaatacccagactccaccatgtccccaagccttcctgccctcctaggccctggaaaccccagaccc

SEQ ID NO: 4860 - DNA, 986 bp, Artificial sequence
  DNA replication origin
aaaagggcaaggagcagagaaagaggcagcgggcaggggaggcacagagagccgctggtgacagggtaggggagaggccaggagagccagacagaggcttggacaggctctgagagaccaggattaggggccatggagagagagagagaaagaggggagagagagagagagaaagaggggagagagagagagagagagaaagagagaaagggagggagcgaggaggcagaggggtggagcgatagaagccggcagggaggaaggggtgggcagggggagggcgagaagccgccgttgacaattacgtctgggtccaagcaaacatgaggcagctgccagccggcctgggcagtcttgtctgcctcggctgtgaagtggggaggctggcaacagttttcttcagcgcccaggatgcagccggctaaggtaggtgctgggggaatggggtcttgctctggaggggggtcggggggaggaatggaggcttctgggggttgctctggaccaggaagcctttttctttgacccttgtcccctcttgttccactttcctttggggaaagtgagcgttggggcgtcctggctggcgctggggtgtcctggctggtgttggagtgtcctggctggcgttggggtgtcctggctggtgttggggtgtcctggctgggaggctgaactcctagggctccctttggatgggagaggtttataagtgtttgcggaagaaaagctggacagaggaggagcttggggtcagcccacgactcatcctgctcagttaggtccctgggtcaggtgccagcgtggctgacactgagcccgggccccacagccttcaggtttgggggaggggtgagcctgggagggagtcacttgtgcttggaggttggtcaatgaacgcatcttctaatcaagcaatcaagtaacgaatgagtgcccacttcctctgaaagggctaggagcccctaacaagagcacttcccaca

SEQ ID NO: 4861 - DNA, 978 bp, Artificial sequence
  DNA replication origin
agggatgaggccagtggatagaggtcagaggtcaagagacagcctaaggctagggccctacctatgcccccgtcctactcagggcccctggccctgagcctcctaggcaggggactgtgtgagagcaggctgttccctgtctggctgcagagaagccctggggcccgggtgaggcccctctgcagtgagatcacaccctcagctgataatcacaccagtgtcacctcctctgttggtgctgggagctcaggagtgacgcccaccccatccccacgcctcccagcccaggaagccgcaggggcccttctgcctccaggaacagtgagctccgggggcctggaggctgaggccaggcaccaggtgaaggggccagccctgtggcaggggcaggggctacctgagaaggcaaacccaaggcaggaggactgagtgcactctggctgccccggggctctgggctgaggggcaggcagtccccggaaaggctgggagagccagaagcagggacagaaagcagaggagagaaggacaggcccagagcgcccaagacactggggacaagctgagaccaagaggagagacgctgcttttgagagacagagacagacagacagaccaggagtggggagtcctagaaaaagaaaggtgttgagtgtcaggctgaggagaggctggcagaggaggtcagggagcaggcttgtgggggtaccgcctgcacagtggcaggcagggcagagctgagggcaggagtcgggcggattaagccaggcccaaggatggcagggtgcggccctggcccgaggctgcaggagtgccagcatggctgtgggaagcacctgggaggcatcatcagcgtcttcttccgcttcatctctgggaacctggctggaggtgagggttgctttggtggggctgggatggggctacagaagggacagctttgggccgggtcaaggattgggcctgccttatctgggg

SEQ ID NO: 4862 - DNA, 1332 bp, Artificial sequence
  DNA replication origin
cccttcttccactgcaccccagacttgtctctggggctccatccggggcgcctgccctgtgatagggtgagtgacccagagcacagggctgacgctctcttgacgtgaactccatgcttatatctggtattaaatgtaacttttcctgttgagtttgagagaagtcccaacagccaggaacagcacgagagatacaggaccagctctgcaggccacactaaggtgctgcgaaaccggctctgtgacccaccccttcatccacagagggtggcgtagggaaggctgggggtgccggggaggaaagggcctagacttccctaggcttgggggactggggaggggagggcctagggaaggctcggggggcagggccagggaggagaggcttggggtgtggggaggagaggctgggggtgtggggaggagaggctgggggtcagggaggagagggcctaggaaaggctggggatgccagggaggagaggctggggaggggtggggaggagagggcctagggaaggctgggggggcagggaggagaggctgggtggggccgaggggggcggggaggagagggcctagggaaggctgggtggagtgctgagcattttccctccttctcccaccctggggagcttcagtccatcctccctccaattcagggacttctgagaaggccatggtgatctgaatgtgtcccctggagtttgggggatgcagggccagttgggtctgacgtactcctggaggaggtcgggtggtgactgtggctacactggccagtggccgccagggtgaggacagtgaactggacacccacccagaggccttcatggagccggaggggatgctcccagggaatccatcttcaaagtcccatcctccccacaagaaagaccacgggagaggggcaggctcagcacctgggagacaggccgaggggtggcaggggctgctgaggggtggcggccttgggcaggtctgggaagggcatagagacccgggacccgcccacaccccaccacaccctgcctcctcctccccgacccctccaggctgccgtgagtggcaggagggagtcctgaagcaaagaaggggtgccgggctggaaaggattccctgagtacttgctgacacctgaaaggtgaccacaggatctgcagaaaatttaatgcaaatggcagggaagagcagccacaccgagtggactgagggtcagaggccacagcgcctcaggctccctccgtgtggttccataccttggcagcaggcagtggtgttttcagcagcacccacctcattctcagccgcgcctccgggtccacacccagc

SEQ ID NO: 4863 - DNA, 913 bp, Artificial sequence
  DNA replication origin
atcccagttcactgggctggcactgatccctcctctgctctctggtctgagaacatcccattgtgaagccgtgggtctccttgcctcctctggcaggcaatgtcccaggctctggggacacagcagggaaccagacagaataaaaacccctagagcttataggctataaaatgagattgatgagtaaacgatatattgcaagggaatagggctgcagaaattacctaggactgggaagaagggaggggtgcctagggcagggcctgcagggcacatggcgttcaaatacagatccgaggggtgagggagagtgaaagggaagctgtccaggcaggcagaggggcagcaagggccagagctcagggtgaggtgagctggcaggagaggcccctcctgctgatgaggggtggaggctgagcccgaggggtaggcgagggagtggcagggatttgtggctgtccagggtggcagcggaggcgggagggagcagcggtacatttggaggcactctgaagatgggaccgaaaggatttgcagatgtcctgggtgtctgttgcgtgagaacgagaggagtcaggccaaggcttttgtcctgagctgctggaagaaccaagctgttattcactgtggtgggaaaaacagaagctggcctggcgtgaggggaggagggggcttggtggtagcatttcaagtctgagacatctaaagagatcctagcagaggcttcaaggaggcaggtgggatctgcaagggttggaagtggagggatacatttgggggtcatcagcacatagacggatttgaagccaaaagaccgagcagaagaggcccaggactgagccagtcgtgcacgctgatgtctaaaggcctccttgctcccgctgcctgcgcccatcctcagagcttggcttgg

SEQ ID NO: 4864 - DNA, 833 bp, Artificial sequence
  DNA replication origin
acggcccgcacctcatccttcccgctgtgttagccaagggagaaatccagctccgctccacgcctataagcgcgagtcctgtttggactcacggcctgagcaattgcagcttccatctagggagcctctgccactcactcggccattcattcagctgatgttgagcgtaacacggtgcttggtcccaggcacagagctcgctgcctgggtggggtgggagccgcggcgcgtggctgcgagggccccctggagcgcgcctacgtgtgccaagcctttgagcttacgtgtgattcttaaagggctccccccgtgggctttcctcttcctccattttacgggggaggaaacctaggctagagggctaattacgtgaggggcacagggacagccaggcctgctggagtccggagcggggactttcccgtgacaccagcctgtttctggtgggaaatgaccgggagaggggctgcgcagtgcagcttcactgtatcacatgcctagttaaatgtctgagccgttggcgttagttttaaagaactgtaaatgcatagcttttaattctagttaattgggatgtggtgattctccactgaccaaaggcaaaagtcctaagcagagaggctaacaatccccagagaaaacagctctgttggagcagagcttttaaggttaaagagcctcctgcaatgtaatttacacacttaagtgctgaacaagatccagcctgtgcccaggtagtgccggctcagcctccattagtgacctgtaaaagtgtagtggtacataacccctctaagcctcagtttcctcatccataaaatgggaacaataat

SEQ ID NO: 4865 - DNA, 655 bp, Artificial sequence
  DNA replication origin
tgaaaatgcagaagttggtctccaaagttctcccgttctggaaacgcgcgtgcactcggggctttagggaaagtgtgggctttggccctggcgtctgcggaacagagcttggtcgctgactttgctgcgtgaccttggtcgagtcacggactcgcagccgccgccgcctgctccgcagagagggggagacgcccgccttcgggcggcggggaagagctaagcggatgcggagtgccacgcacgggcagggcaagggcatgcttattcgtttgtgggtggctttcttcctgccgggtctggtagaggagggaaagccgcgaaaaggaaggagaaaataggggaggacgaggcgtggccgggcggagcccggggtccttggagccgcgaggccggagacctgagccgggagcctggccctctgctgccctccagcgggcgcggcgcactgtgggcatccccgccggacggactcagcgcggcagcgcggctacggcccgcacctcatccttcccgctgtgttagccaagggagaaatccagctccgctccacgcctataagcgcgagtcctgtttggactcacggcctgagcaattgcagcttccatctagggagcctctgccactcactcggccattcattcagctgatgttgagc

SEQ ID NO: 4866 - DNA, 1326 bp, Artificial sequence
  DNA replication origin
tgcgctcgggctcggccgccgcgtccggtccccgcgtccagcctccggcctgacccgctcgccgccgccgccgccctccacggggccccggcccagccaacccagcagccccgcctgccgggggcatgtgagccgtcgccgcccccgagaggccgtgcgggctgcaggggccccggtgcctccgaggcagcgcgtgggcgaggggtgcgcccgggccccagggccccaggcagcccggcttgccatgggcatccagggcatggagctgtgcgccatggccgtggtggtgctgctgttcatcgccgtcctcaagcagttcggcatcctggagcccatatccatggaaggtaacgcgtggccacttgccccttcgccgcctccgccgcagaccagtggtctggagggagggaccagtacccgcacgccggggtgcactggtctggcgaggagcggcctgggccgccgccccctcccggctccggagggttgggcctgggactaaggagacgtagtcccaggaagccccagaggggacgaagccgcagcgcttgggctgggtgtgagtgaggcgcctggtgacaccttgagcggacagctcctgccatcctaggcctgcagtccgggcgcccctggtgagcacaccggcttgggtcgccctgtagcgggaggtggcgcagggtgcagatgacaggaaggaccctcagcccagggcacctggcagccggcggtggggagagatttgaggcctctgccctgtgatggggcctcccctttcgccccgcacctggtatccagttacccctccccaagcaaggttcaagcccatgggatcagtaaccaaacccgcaggcgccacatttctgtctcaataaaatattaactgaggagacagacccacacttggatcagacactgacggccccctggggcccttccatggtacacctggttctgaaggggaccctgaagccagggatgtagcttttcccctgttcaaagaggccctgcacctctggccgtggggaaggggctagctcgtcctgttctcgtccctgttgccctctccgaggacatgggcatcctgcctgccccagcactctgctgaccttgccgggctccaactctcagtactgagacccagaggcctgagaatgagagagagcgagcttgcccctgcctgggagctgcccagcagcccctcgggcatggggaagtgccccaagttcctgcgaagggctgctgagtgcgggaaggggcaggaagcaaggcttccctccattctaccttcgatgtccagggctggcccttttcccaaagtccacagcc

SEQ ID NO: 4867 - DNA, 1390 bp, Artificial sequence
  DNA replication origin
tttgagatagaggagagaataaataatagttcattaattagtctttattatgtgaaaagacttttctaaaattcttccataataattgaagatataaattacaataattaaaatttacaaaagaataaaagcattaaaataaagtgtgaaaaatttaaaaagggtaaagatgaaaattatttaatttttaatctcaaaaatccgaaagtgattttatcaatgtcctaagaaaattaaaatgaaaacaaacttaataatgtaaagaaaggaggtttctgccgggctgggggcgggagctacggcttctctggggacgcggaagcgagaagcagggaccttggggcgcgcccggttttccgggacggtgccccggcccccagcccacgcctccggccgctggcatggtgctgctggctgggacccggccgcagggtggctgggagcgctgcatgaccccgccaccgccgtccccactcctaggcgcacaggtcgaggaggaccgcgctgactacaaagagttccagggccccacacctgcagcatagcctgggacgactctgtaccctttccaggacgaggaggagcacggcgtcgagggcttggagagcgtcccggaggagggcgtccaggaggcatggggctgctgcggacgctggtgcggcgaggggtgagcgttgagaaggcgcaggagactgaccacaatggctggaccagccttaatgtcgcctgctaccacggctttgtggatataccgtggtggccttagctgagtaaccccacactgacgtcaactggcaggacagggaggggaacgcagccctaaatacagctgcacaggcaggagctgcctctggccccatgggcaccgttgccttggacactggctctcagccttgtgcttcctggtcagcatcacgtgggctggttcatttgagctttaacacagatctggtggaaacacaggctgccaggccctgcccctggagtctttctttgaataggcctggggtggggcccaagaatgagcagaagaacaggtttcctggtgaggctgatgccgctggcccagggttctcacgttgaggaccgagagctttgaggttttcatacctgatgatgtccaggaacccttctcagtaggcactgaagaccatcagcagaatcacagaccccaggagagatgtcgtcagacagacacagaggcatcaccgaattaaagtgaaaatgaagaaaggagctgagcatctgtttcatgactttcgtggctgttttactaaagaggctatcctggcccagtcagggcacgctatcatcaccaactacttgttgaactacgttcagggtcttgatcttgaaggagggacgcgttcgggttgaaagccgccatgca

SEQ ID NO: 4868 - DNA, 1044 bp, Artificial sequence
  DNA replication origin
ttctacccttttcagcgccacatcccagggaaggaagaaacatgctccagggctggaagtttgtctttgaggggaggaagttccctggagtctgcagcagatgggggaggccccagtggggcgcacgtggatgcatttctgggaggaaaccaagtaccatccgctctcgctcgctcccttccagtgttttcttcccccggcgagtctcttaattttactcatttatcttaaagagctccgtaagcgccgtgggctctggtacggggtggggggacgcacggggcctccgacacccgacccccacgcctgcttcccagaggagccgtccagcgcggaccaaatctcattttcctacaaatagtttgtcagaagcaggagggcaagcactaaaccacggagagcgagagcggagagagaacggggaagactggcgaggggagggcgggcccgagggggcggagggagggttggctgcgcagagggagtagcgcgagggagggtgcgagcggcggggaggggcgcaggccggggagagacaaacggaaaaggagggaaggagatcgaagagacaaacaggaaaacacgagggaggatgagaaagggagaaggagccaggggagtccagggaaaggaagcaaagggagagggagagactgaagagaggaacggaaaagactggaaaagatagcaaagggtgaatcaggaagcagagaaggggaaatgagaggagaaaatgaatccaaagaggatgcgaaaaaggaggaaggagagaggtctggtagagaggcagacccggaaaaggaacgtgggcaagggggtgctccatgtgtcctgagccccctctatgccctgagccacaggggtgcctgtagtctgactccttgaccctgtcttccccatccttatccctgctgcctgctctccgtggactgatgcaggatgcagataaggatgggctcatcttggtccactgttagccagcctaggagacagtcattgcagtgtgtgtgtgtgtgtgtgtgtgtgtgtgtgtgtgtgtgtgtg

SEQ ID NO: 4869 - DNA, 1446 bp, Artificial sequence
  DNA replication origin
gccgggggtgcaggaggcgcgcaccctccggccggatggcggcgcactcagggctcaggaggccatcccacgggagccccgccagcccccgccggagcccgagctgcagtgccgcctgcaagtggtgcgctggctgcagctgtggcaaccccagatcccgtcctcccgcctcgcacccatcagcgcggaccccgggggcgacgcagtggcgatgtcgggctgtgggcccagcggtggcactaggcggagaagcaccactcaaccccatccctgggctgcagagggcccagcgcggggggctccgagcgtcgggagcctgtggaagagaagagcgcgcgggcgacagttaaacaggccctggggcagggcgcgcctcgcgctccagggagccccgccctcccgcggcacctccgcagcaaccgccgcctgcactgggcgcgcgagagctgctagggcggtttctctgcctcgggcctgttgggcagggccggctaaggtgcgcgtgctcgctggttctaacccttctgttgggcgtttctgctgagaggcgggaggcgctgagagtctgtgcgaaggtccgtggacagactgctttgcctgttgttgctcttcggaggcggcgatccccgaaggcgagctgaaatacggctgcaggctacaatttgcagccgaccattatggatgacaaggagccgaagaggtggcccaccctcagggaccgcttgtgctcggatggcttcttatttccccaataccccattaaaccgtatcatctgaaggggatccacagagctgtcttctatcgtgatctggaggaactgaagttcgttctgctcacgcgttatgacatcaataagagagacaggaaggaaaggtaatgggggccgggagccggggctgcgggaggaggcctgtggatgtggagaagtacccctttccaggctgagggctgcggggcggatggtccggggctcggggtatggacgggggctagggggtgcctggctggggtgggagtgagtggagcggggcctggggagtggcggtatatggggtggcggggtgtggagtgagttgggggatgggagtggggagtagggggtgcatggggtgggggtgtgaatgggctgaggtggacggaatgaaggcttggggggtagggggtgtggggtggggagatggggtgagggttcaatgggatagaggactggaggtgggggtgaggtgtgggggtgaatggggtggcggaaaggggtgcagaggtgaggggggcgagtcctgtcaccaaaggggctggactttctttcctggcaggctcagccgcacctgggatgtggaaaccttggcaggggcgagcacccaggtcattttcacaagcagcaaaacaaaaacaaaacttcagctggtttccaatcactcaccatgctgcttctttataaatcattt

SEQ ID NO: 4870 - DNA, 973 bp, Artificial sequence
  DNA replication origin
gcgcccagggacaaactttcaggcagcgcccactctcggtctcgggcaattgcagggtccctccgagagcgaccgtctccagaaaacgcggccggcgcctgcctatgccctgagcctgaagagcccccggcgccgcccgccccgcactgggcccgcccctccgggattggtgccctgctaggggtggttgcctgtgacgtcaccggacgcgcccgcttctcgctggagtgcgcaccgagcggcagtgacttcgccgctgctgtagttccccggctggatgcggtgactggtgccagtgctcaggcgcccgctgcccttgacctcccgccccgcgagccctaactcagcgcaggaggaccggctgccgccgccgccgccgccaggtagaccaggcctggctgggttaggccagaagggtgtccctggcgcaggtctcccgcggagggcagaactagaaccaggttcccggccgtttccgaccacacggatggggcggacccatgtgagccctcactaattgcaggggacgaagctgggcatatggggaaactgggggtttccaggcgagtggacggtgggatgggatccgacgtgcacacccacgtttcaggctactgtttccacctcacgtcgccgcccctttgcttatggactcttgcagagttggattgagctcggactgtgtgacatagtggttgttgcagaagccccagggccactttctgactagtaccttgggcacctgacgtcatccctttgagtctcagtgtcctcttctgtaaagtgagggcgctttacctgaggggattgctgtaaggttggaatgaacctgcatgtgtgagtcatgtgggaagggaacagtcaatggggcctggggttctcttggagagctggtaaccagcctcgtccctgaggcaacagccagagggcgcctgtagtttccccacgcatggctgttagcagggcctctgca

SEQ ID NO: 4871 - DNA, 1134 bp, Artificial sequence
  DNA replication origin
gtgggccttggggtataggtggggtttagacgatggacgtgtggaatggaggagaaaggggagaagcttctagttacaggcaattgtgtgtgcacaggcccagcacaggggaagctcaagccaccagggagtggccctgagtctgtttttggagtgtctagatgtgggaagaggaggtgcaggtgctgaggctgcaaaggcaggaagacccctgggggacagtgccaggcgcccagctaggctgggcaacccagactctccttttggtatgaggccaagtttcacccctgagcagccaggaagagagtggagccaggcactttctcaggacaggaagcattgctgaccgccagtgccaggcgcccagctaggctgggcaacccagactctccttttggtatgaggccaagtttcacccctgagcagccaggaagagagtggagccaggcactttctcaggacaggaagcattgctgaccgccagcaatgcaggcctgggctgcagagggagggctgggactgaggggcaggggtggggatggtgatggcagaggccccagaagagggtctgactgcccatgggaagaatcaagtggatgtgggaaagcaaccaaagagagaccctgggaacccgtcatgcaaggggcagaaggtgagagagatggagatgtggtcaggaggccaaagaaacaggcagggatgcccagtgaagaggggttcctggaagcagaaagggcagcatctccatggggctgctgagaggccctggggtttggagattggaggtcactgtgggcagcgggggtggctgatgacgcagaccgcgcttctctctgtgaggatggacgggggcagaggaaagggaagggctctgtttgcctgcctggatcaaagaggccaggtctgcttgagatgaggagcgaggcatcagaaaggcagagaggcaggagggaccaaggagagttcacagggaagcccaagggccagggccaagggatggagggacgggccgtccaggtgctgggctgctgggtagctgggccctccccacttcctcctcacccagctccacctctggggatccaggccttccacagctgcaggggagtacctggataccacccatcaggcttt

SEQ ID NO: 4872 - DNA, 1014 bp, Artificial sequence
  DNA replication origin
aatcaaggagacggagggacttgggtgtgtgtaaagcccacatccttgtcccacagatgcagtcctctctctgctgccatcccctctgcatagcactcagggctaagagcccaggctctggaggcagatagacctgggttcaaatcctaacacagccctaactacagtgagacttgagaaagttacttaacctctctgtgccctgattctctcattgataaaatagataactgtggctctaaccttgtagggttgctacgaagctagatgagttcccagtgttcctaaatgcagggcccgacacacagtaagaaagaatgaggaggaggagaaggaggaggtggaggaaggggagggggagatgaagggggaggggagagaaatgaggagggggagaggcagaaggaagagaaggggaggggaggaggaggaatgggaggaggggagaggagtaggaggaaggggaagaggaaggggagggggaggaggagaaaggggagggggaggggaagaaggacaaagaggagggggagggtgagaaggagaaagaggaaggggaccgagaggaagaagtcgtccatccagcatcctggttaagagcattggctatggagtggaatttcatgtcccacttcctctactgaccagctgtgtggccttgagccagttgcttgacccttctggtctctaatttcctgagctgtaaaatggaaagatgacccctcctggaaccattgtgtggcctctgtgtgggtgcccttaggatggtgctgagcagaagtcggcactggacaagtgtgtgaagccccagtcaggacagcaggagagctggaaccccagagactgttgagctgaagctggggcggggttggggttggggtaagggcagctcccttggccacacttctgcaagagcagttaggccttcctggccacgcacaccacagaggctggaagctcttgggcgtgcagcaacatgcccaccctgggctcacctcaccccaggctggagag

SEQ ID NO: 4873 - DNA, 1097 bp, Artificial sequence
  DNA replication origin
gaccgagaggaagaagtcgtccatccagcatcctggttaagagcattggctatggagtggaatttcatgtcccacttcctctactgaccagctgtgtggccttgagccagttgcttgacccttctggtctctaatttcctgagctgtaaaatggaaagatgacccctcctggaaccattgtgtggcctctgtgtgggtgcccttaggatggtgctgagcagaagtcggcactggacaagtgtgtgaagccccagtcaggacagcaggagagctggaaccccagagactgttgagctgaagctggggcggggttggggttggggtaagggcagctcccttggccacacttctgcaagagcagttaggccttcctggccacgcacaccacagaggctggaagctcttgggcgtgcagcaacatgcccaccctgggctcacctcaccccaggctggagagcccgaggggcttcctgaggctcctgcagagcagacccatccaaggcagcaggccccgcctgtccccaccagccaccttcccacaaccccactgcatgcagggatgcgggcagaaggagggagggagagcgagaagggaccgagggaaaccaagagaggaggctcagggtccaggaagaaggaaggagagaggagagagtgagggaaagggagcggagagagacccaggaacacaaagggagacagagaagaaatttagaaacagaggagtgatctctctaaaaaactaaaatgggagggaggaagaccagctgtggaaccccaaggagggctgtgagggacagtgatggagcttggggagctggagacagcctgacccccctgcaaacagggcttttatctaaggatgggtaagatgttgttatgacaacagatgtagcatttagggtaattcctggtgaataaccaagagaagaggtggcagctctggtgggtgctgcagtccaaaaacagggtctcagaggcagccccaggccccattcgcccctgcctcattccagacccttccctccacctgagcctagccaggaccttcctagtccctgaggccaggccaccccaggacagaccttctgagccac

SEQ ID NO: 4874 - DNA, 1249 bp, Artificial sequence
  DNA replication origin
gagcagggaggagggtctgtgggagggtggcaccctaccgagggcttgaggccagcttcacaggcaggagaaggggaacagggggcatgctatccagattgtggcttgggtgtgggcttgctcatgttctgaggtgacttctggccccaggctgccccctcaggggcaagggacagggcagggaggccccaggccagcgaggccccaggccagcagccaggctccaggaggcagctgactaaaataagctaggatatcagagtctcctgtctccaggaagtggagaagagtgatgagtgtcaggagctgccctcgagtgcagaggagcaggggaagttggggaaaggagggagaggaaggaggaggagggggaagagggaggggatgggggaggagggggaaagagggggagaggggggggaggagggggagaggaggaagggaaggaaaaggaggaggaggagggggtaggagggggagaggaggaagggaaggaaaaagaggaagaggaggaggaggaggaaggggggagaggaagaagaaggggagccagagatggagggggaagaggaggagggggacaagacagggaggaggaaaaggggaggagacagcagtcacagctgaaggcgtccaacaaacttgttttcttttctctggcctgaagtctcaggctgttaccccctggatctggtaagggcacgggtcttctggagccctgctgcacacccagcacccttgtgtcctgagaatgtcttagaaacccagtcagtggagggcgggagacaggaccccgttgagtgcaggcaaaaggaaccaggtttccaagagcctgcttggaggaagagaacaacgtggtgctttgaatttgatttctagcccttctgttctgcaaatgaagaaatctggcccaggtggtttagggatgtatcccaggtcctgtgtctgatgatgcttggagccactctagagcccaggtctgtacacacacagggcacagccgtctgcgtggggcatcagcccacactactatgaggagcagcagcaggagggaagggtggcctgcagttgtgagaacaggcctctgggtgtggatgggagtgccgggggcaggcgggccctagctgtcccgcagccatcgggttcacatgacacccatctcagcctacctgccaggcttccagatatcactgaggggtaaatgtgtgggggccccaagccctctgcctttcatggccagtggggagcc

SEQ ID NO: 4875 - DNA, 989 bp, Artificial sequence
  DNA replication origin
gggccgtgagccgcgcgctggagtacaactccaagcgcaccccgcgccgcatcaagtgcatcatcctcactgtgtggctcatcgccgccgtcatctcgctgccgcccctcatctacaagggcgaccagggcccccagccgcgcgggcgcccccagtgcaagctcaaccaggaggcctggtacatcctggcctccagcatcggatctttctttgctccttgcctcatcatgatccttgtctacctgcgcatctacctgatcgccaaacgcagcaaccgcagaggtcccagggccaagggggggcctgggcagggtgagtccaagcagccccgacccgaccatggtggggctttggcctcagccaaactgccagccctggcctctgtggcttctgccagagaggtcaacggacactcgaagtccactggggagaaggaggagggggagacccctgaagatactgggacccgggccttgccacccagttgggctgcccttcccaactcaggccagggccagaaggagggtgtttgtggggcatctccagaggatgaagctgaagaggaggaagaggaggaggaggaggaggaagagtgtgaaccccaggcagtgccagtgtctccggcctcagcttgcagccccccgctgcagcagccacagggctcccgggtgctggccaccctacgtggccaggtgctcctgggcaggggcgtgggtgctataggtgggcagtggtggcgtcgacgggcgcagctgacccgggagaagcgcttcaccttcgtgctggctgtggtcattggcgtttttgtgctctgctggttccccttcttcttcagctacagcctgggagccatctgcccgaagcactgcaaggtgccccatggcctcttccagttcttcttctggatcggctactgcaacagctcactgaaccctgttatctacaccatcttcaaccaggacttccgccgtgccttccggaggatcctg

SEQ ID NO: 4876 - DNA, 1013 bp, Artificial sequence
  DNA replication origin
cacctggccacgtagggtggccagcacccgggagccctgtggctgctgcagcggggggctgcaagctgaggccggagacactggcactgcctggggttcacactcttcctcctcctcctcctcctcttcctcctcttcagcttcatcctctggagatgccccacaaacaccctccttctggccctggcctgagttgggaagggcagcccaactgggtggcaaggcccgggtcccagtatcttcaggggtctccccctcctccttctccccagtggacttcgagtgtccgttgacctctctggcagaagccacagaggccagggctggcagtttggctgaggccaaagccccaccatggtcgggtcggggctgcttggactcaccctgcccaggcccccccttggccctgggacctctgcggttgctgcgtttggcgatcaggtagatgcgcaggtagacaaggatcatgatgaggcaaggagcaaagaaagatccgatgctggaggccaggatgtaccaggcctcctggttgagcttgcactgggggcgcccgcgcggctgggggccctggtcgcccttgtagatgaggggcggcagcgagatgacggcggcgatgagccacacagtgaggatgatgcacttgatgcggcgcggggtgcgcttggagttgtactccagcgcgcggctcacggcccagtagcggtccaggctgatggcgcacaggtgcacgatggacgaggtgcagaagagcacgtcgagcgccaggtacacctcgcaccacgtgcgccggaagtaccagtagcccagcagctcgttggccagcgagaaagggatgatgagcgtggccaccaggatgtcggcggcggccagcgacaccaggaacaggttctgaggggcgcgcagcgagcggctggtcaacacagccaggatgaccagagcgttgccgaagatggtaaagagaatgaggaaggtgatggccgccgctatggccgctgtggcctgcacggagtagg

SEQ ID NO: 4877 - DNA, 1380 bp, Artificial sequence
  DNA replication origin
agttgtcacttctaggaaggcccaggtaagcgtcctcagtggggacttgcagggtggggagggcacacgggcaacccagtctcagctcctgcagcatcccttgaaggaagatgggtcagaagacaaaggctgatgctggctgcagagtctggggagctgctcactggcccccagcccaagtgtggttggagacagtggaaaggcggttcctcccgatgcccatgtgggcctctagcaggcccagactgtgaaggccttgggagcccctggataggcaggcacctgcctaagtagctgctcccaggctctcatggccaccctctgtccttcctcagggaaagagctactggcatctctccatcactggttatgtatgcccaggcggcgcccaggccctgcccagcccagagggtgggaaagacacatccaggaaactgtgtctagcagagtggtcggttttgagctgaagcctagggttgggggtgggaaggaggctgattgccctgtccgaacccagccctggcagcatccaccccatgggctgtgggcacttgcacctcaccagaagctggggagtctggcagaatgacagggatggggggatcaaggaggcacctactcccaacacacccccgtggctgggggtgctggtctgggtacctgagacggggcacctcccacctgagcctggggaggcgctagacattgtccgtgggcactgagaggccacgtgctctgctcccatggagggagcagggaggagaggaggtccagcaggttggacggggcctgggggagccccactgtcagaggtggattggtgcttatttatacagaggatgccttgcagagtcgtgggctgtgaataagaggcctggctcgaggcggggcttatgacattaggggctccagaaccggggaaacatgccctcagggctgcccaggctggtgctggtggcggtgtggcagggagagtgagttggggccctgagggagaacagttgctcatagcgctttgaaggcgagtggggggccttagtctgaagtttctttttaccccaaccctctttccactgtcacccccagaagggcttcagtgtgtatgtggggcaggaccgcagcagggagggagggtcaaccccttcccccggggtcactacagaagcggagggacgctcctctcttcacggctgcccctgagacctgctttttctcggagctgtgtgacaaagtccccaccctttactcccccacggcaaggaagggacctccccttcgcattagtcaaggggcggcagctcgccctgtgccccgtacaaacccttggctgaatcgcagttgatgctgtgattcgagtccaagccagtttccctgttacct

SEQ ID NO: 4878 - DNA, 2765 bp, Artificial sequence
  DNA replication origin
ggcccctctgaggatgtgacatttcagcctagccctaaatggcaggaggctgcctgtgaaaattcaggaactgaatttcctgaattcctgagtagccagtgcaaaggccctgaggcaggggaaagcaaggtgtgttgggtctgtgtaactggcatggggaggggcccacagccaagtcagagatggggagggttttattccacaagcaacaggcagcaactactggaaggtttgaaggaagatggtgccacatccgacttaaggtttaaaacgtcctcgatgcattctggagaatgggctggaagcagaacagccgggaagccactgaggttatgcaagggagagaggctacagagatggacaggagcaggtgcctttggagtgtttaggggtcacagtggccccacttgtgattgcatgcatggggtgagggcacaggctctgggtgggagctgcaccattcactgagaatccagcactgaggacctcggggcaaggcagggctgggggaaatgggtatgtcaggtctgaggtgtccatgcgacatcaaaggggtcagagagtaggtgggctgaaggagtctggggttcagcggggagagcagggcaggaggtgcctgggggagtgctgtcgaatctggaggggagccacacgtgtagaggaagaggaaggatccccggactgagctgggttgctgcatttagagcagcatttcttaatttcagcgttgcagcattttgtacctggtaattctttattgtggggacggccctgaaccttgcaggacatttggcagcatctttggcttctacccacagatgccaatagcggccccctccctgtattccagacattgccgaacgtcctttagaggaggagaatcactcttagcaagaacctctgacttaagagtttgggagaagaaagggctgcagaggagtggctttcaaggcggtcacagaccctgtgagtgttccaggggaagggctgctgtgccaagtgctgctgagaaagagggcagaataagcctggtgcttggtgatgtggagtagggcatgacccacagaagaccctcggtggagggtctgaagatgacctgccgggggttaaggagagaatgtgaggggtcagccacagtgcctggatacagacacggggggaaggtggctatgggaggcagcagaaaggtgatggggcttggggggcagttctaaggggtggggctggctttgtagagtaggggcagtgaccataagagggggataactgaagcgggggaaccctggggtgagatgagaggggttgggctctagggcataggttgaggacttgcccttcaatcagcagagagagtttgaggccagatgcaggtgggcggcgggggtgagttcctgcctggacttccgtttccccctaagtaccaggcagagtcacagcatggtggggcggaggagtggctgggaggttggagagggagggagggatgccgattttaacaagtgggaaagtgagcatactagggaagtttggagatttgtggtcatgaatttagagtgaggccagtcgatgcagagagtgttttgctccggaaagagcagctgcttggtcaaaggcaggcagtgggtggatgatttaggtttgaccagagctggggttttgtcaagatctttatgcagagaggacgactgacttctattatagaggacacgacccaaggatctgggaagtggggaggttggggcatacaggatggtctggggttaagagtcccagggactgaaaggctggtggggggcggggtacatctggagaaaggtggggtgtgtggcctgatgggggtctgtcccagtgggcccttaggggagggaaggcaccgttgtgagctgctggagccccagcccaggagatctggtggcaccatctcacctctcaggcctggagaagtgtctccatggcttccaactaaggtctcacagccagcaatgggacaacagtcttgcccttctttggaaaaggtggatcgcttccatggctaggtcctttccccatggcccctcttcccaaggacatccctccagggcaccctcatttgggctatctgtcttagaatgctcatgtgtatgagtgcactgttgcctgctgccactgtccctcacggccaatgaccttgtgccaggtactggggacagagaagggatgtccactctgatgggcagaggtgatgcaacaaacccatcagagagcatcttagtacagtgtgctgagtgtgaaagtggtgccgcctggcgtcgaggaacctggagaatggaggtcctccctctgcctgagagcctggtgactggtgagtgggccttgaaatgtgagtaggagcccaccaaacacagaaggaagggtgatagggcatctctatcagagcaaacagccccagggaaggtctagagagtggagacccagggcacattcagaatccaacactggcctggcggggcagggatggagggctgggatccaggttgtgccctgctgcccactcccctgctatgtgtctgggaaagctccggctgctcctgctgctggctgttgctggtctgggactgaactatgcccgttcctgtggaacaggatgacagtggaaggtcaggtctagtttgggaagagctgaaggaagccttgctatgctagtaggctccaattcctgcacctggcagcctcatggggctggttggagcaggcaaggcctgaaggtgtgtgtgtgcggggggaga

SEQ ID NO: 4879 - DNA, 1576 bp, Artificial sequence
  DNA replication origin
ggtgtctatgacgcctttgcctaacccgaggtcatggagatttgctcctgtttccatgtaagtcttagtttcaggttttacatttaggtatatgacctatttggagtgaacccttgaacagggtgtaaggaaggggttcaacttcattcttcatgtaactagccagttgttccagcaccattctttcccctacactttttttactgtactaaacatctaaaaaaaaaaatccctaaaggacagatgtggtgagaaatttgtgcgtaatttcttttgttgagatggagtcttgtgcacctcagcctcccgagtagctaggattagaggtgagcaccaccatgctggctacgttttgtatttttagtagagacagggttttaccatgttggccaggctggtcttgaactcccaaactctagtgatctgcctgcctcagcctcccaaagtactgggattacagatgtgagccagcatgcttggccttgtatgcaatttttctagaggtttgactaccatgactagggaattgggaggtggtggaaaggcctgtggtcaagggctgggtctatcaagatggtgagcatgggagcacattcagatgctggaaccatgacctgctggaggagaggggtggatatagcggggagaaaggacacccagaatgtttggaaaaaggctgcacatggtgggagctgaggcatttccttggatctagtgggaaggaagaagacaggaatagacccaagtctgcaggaggatcttgatgtatggatgctggggactctgttacataaggagaggtgaggccaccagaggtagggagaaggggatggaaacaaaggagaagatgtgcctccgctgactggagagcaggagacacctggtagaggtgggggatgctagcgttctagggctgggtctggcggcaggtgtgacagcagggaaaggtggttgaggctacctccgaggggtgactgccatgggggctgtgaagcctatgtaggtgggagtgatctgaagtggggagggctggtgtaggatgatgctgggtctggggagtatctgcagagccgcgctacctcagtgtgcacaggtggaggcggtactgtggagggtggcccccaggaacaggctgcagtggtggtagctcctggtgctgaccaggtctggagggcggtgtgggctgtgaggctaacaggacctggtagaagagtcaccagttgaagtgtgggagtgaggatttggtcagggtcagctgagggaagaggctcctggtgaagccctcgctgcatgcgcaggaggaactgggatgggaggcagtgctgaggggctggggccagccagagaacatgggcttgaatgaggaagagtgcccacaaagaggtggggtacagttgtagtctggcatgacagtgaagaacaaggaagccccaacctacctcctggcacggtgcagggtttagatgtggccattaagtgcaggaacagttctaggggaggtcttgggttcggggcaagtggtagggtatggccataggcagaacaacctgggtgaagggtccggaaggtgggcgct

SEQ ID NO: 4880 - DNA, 942 bp, Artificial sequence
  DNA replication origin
tcccacatggcaggctttctagggtgctgcacactgttcagtttgtgaaatttcctggagccctgtgcttgtgatagtgaacttttctatatgtgtactaaaataaaagcttgtgaaagtgcagtgaccttttcctccttccggagatacacggggggcgccccagggtctcaggcagctttccccatgtctaagcacaggccggggtaggaaagggggtctccctcgctggaggaataggtctatacctgggctggggcctcagctaggcctggagcaactttctgcgatgtttctctgccccctggaggcaggaaggaacctcagaagagccacactcccaagcgggcccctcctgtctttcacctgctacagccaggaaggggactgggctggggtgggaaccacaggtaggcatcggaggggctgccagtagacctggtttgggtggcgctgccggtagagctggttggggcggggctgcaggtggagctggttggggcggggctgcaggtggaggtggttggggcggggctgcaggtggagatggttggggcggggctgcaggtggaggtggttggggcggggctgcaggtggaggcggttgaggggagcaaggtgggaggtggagcagctgctatttaagagggggtggtggtgccggttctgcaattaggttactgtgtcttgctggggcttggtcttgtttgctgaaggggcagcagggctctaccatggagggtgtagggggtctctggccttgggtgctgggtctgctctccttgccaggtaagctggctgcctgtccctcctgctgctggctccagcctggagaaagctggggagaggctagaaggttgtggctggagcctgcagggattgtagctgagctcagtagctcagagcacagagctctccagggttattctagaagtcagctcc

SEQ ID NO: 4881 - DNA, 2205 bp, Artificial sequence
  DNA replication origin
gggcgtgcacacacgctcccacaggaacaccatgcgcaacatgcaggtgtgcatgggccaagaccacccacccccacaggaccacaccctcaggcacacactcgcatccttccacattccgaaaaggaagcggggtctgatcggggcagcactgggcctggctctgagtcacggacgggacccagcctcccagaaacaaccctgttcagctctggagcgaggtccctgtctgggaaaagacgccagcccagggagaactggggccaagagagcagcctttgtggggagggtcagacctgccccttccggccgctggcccctctgcccattcacttcccaaaccccaagggcacaaggaaacgtgaggtccaagcaggctcccgggtatcagatgagaccagatgctgggttgttgttttttaaatataacaatattttattgacatatcctgaatgttctgtataaatataaagtgctaagtttccaacccctgcccacagggctaggaggaagcgggggagggagtgttaaatgtcagctgagcacaaataattttccagcgccagcacaggtgtgaaaggctcacagacagacacacgcaacatgacacacccatcacttcccaagtccccagcttccccaggaacacagggcttgggctccaggccctgggcagacgaacccacagacagggctcctggttgtcacagcttgttccttggagctctcaggctgccaagggcttcaacatggtggtggaccagggagagtccacggtatagcgtctagctgatttctgccagaggatggggagggaaagagcagacacacccttggttcccgaccccgaatgagggccagcctcagtcccccagcagaagagcaccaggtcggaaagaccagcatgccggcattcctagagcccccatgtgggggcttctgaaactctgaggaggtagcagccctgccagaggtgaggggactgtgctggcccagaggggagcccaccagtccacagtcagctcctgccagcacagtggggcaggcaggcagaggggcaccacctcagtgacacagcacctgggtctcaaactgcagcagctgccccatgaaactgaagttgggggagatgaccccccggcgctgcttaacgaagtcaaaggcctcgtccagccgcacacggcgactctgcatgaggtatgccagacagatggtggcagagcgcgagatacccgcctggcagtgcaccagcacccggcctccgctgttcttcacccagtctgcaagggagatgggggagtggtgtcagacggaatgtgcacagcccaggagacaggtgcccccagtcctctcctctggagcccctcgggatttctgggcagaggtgcccccttaccaatgaagcctatggcctcctggaaccaggcactgatctccaccatctggttgtcctccacagggatactcttgtagcggaaaaggccctcaaagtggttggggcagctggcggacacgttgaggacggctgtgatgccacaggcctgcagcccctgcaggtctgacgagtgactgcagctgcccaggaacaggtagggcaagatctccacagggccaccctggagggaacagaggggcggtgaggcctttccagcccagccccggagagctggagcagcagcgggtggagaccccatgggctggccgagacaagaggactcctcagccagtcctcctgacctgagacaggtctcaggaatgtgcggaggacacaccgggacatacatttcccttcatgctcccaacatacacatgcaaacatacacagacccatacaggcacgcgcgagcagccatgccccaccccctcccccaacacacacacgtataaaagtgtgtgtatatgggcaaactgctcgcatccccaaatggcaggctctttccctagaggcgcccagtccgcggcggggagagagggaggttcgggggaggggggtcaatactcacctggtcgtagacaggagccctggagtcggagcggctggttttgtcccctgttggcggcagcgcaggggcgggggcctcagagcacagatcgggacagcagccctggaagccgtcgaagcctcctgcaaggaggggaagagcacgatcagcagggaaagccgggctggagtcgggtggggcgggccaagggcggccggcttg

SEQ ID NO: 4882 - DNA, 2565 bp, Artificial sequence
  DNA replication origin
acggcccgcgccagctccccgcggaccaggcgcgtccgcagcgcgcggtcgggcagcaggcaggcgagaacggcggcaggagggccgcgcgcgcggcgccgcagcagcgcgttccaaggcactggccgcgcggcgcgcacgtggcgccggcagaaggccaggaaggggcggcagtccagcagcagcgtgcgttccgcctcccgcggatcccgcagcagcgtgcccagcgccgcgcactccagctcgcgcgccgcctccagccccatggccaccggtgcctcttcctcttcctttcggtctttcccgcgtcccgggctctcgtggcggtggcgctgcccgagcggtcgactccgggcgccctccgcggcggcccgggttaagtacccgtgggccggcctccggggcaccatacaagggcagagcaggaaggcgctggcgcccgcgcccgcccccgcccctcacgtggggcgcagtctgggctgacctggagacttcggggcgggggggaggttgagggggaaggcagggcgcggggaccaacacaccgggaggaggcggggaccagcgactaagggaagggaaggtgttacccggagtcggagggactagcacccctccgtttttgcgcccaccctttgacctgtcccaagccactcagtcctggggaacccagcttctcagatgcaggtccccctttagggccaacgatgacccttggagtaccccaccccctaaccccacgcttcctctgccttttccctttccctcccagaattttcctcttagaaatttgtcaccacaaacattgacaaatgcctgctgccacgggtgatttctacactggatgatggggggggtccctgctgagatgtcctatttctcatctatttggagaccttgagccagagggactttctctctcctccccctccccaccccccattgcctggataagaccagtactcagggtcttgcagtaggttggtggccaagctaggccagaacacagtccccggggcccaggcccctgggcttgggccgaagggaaatgagggggggtcccagggcctttcatggggaaagcaggggtctgtgactggtttccagttatgtgtagggcaaagcttcttcctcctgggtgcagggaaagcccccaggccccagagagaagtacttccccctgccacaagcccgccctggagggaagtccgctgacgctcccggccctccccaggcctgcggggatttcaagaccttggcaaggggaagagggagaagcagaacagaactggcctcccccatcctaggcctccctgtccagccccgccgggcagcaaagtccagggctagcactgcacccggaggactgggggcctgggtatcccctccattccgccctcccccagccctgctgccggatgtggtgaggcccaggtgtgcgtggggtgtctgagccacaagaattgttggcagtgaactcccaaactcaagcagagaagttgaggtgggtggagacagcgtcactgcgctggagctgccctcgccctgcccccagctgcgtgggatttcagaacccaccctccaagcccccagtctcctgaggccctcctccgtgccctctgaaagacccttccggctcccccacagacccctgtgtccagaccgtcttgaagagtgacagctgggacctgtggagagcccgcagcccttctggacttgtctgccctgagttcctcacagcagtgtgctgtatgcctggttgtgtgcagggcagcatcgtacctgtgcagttccactatgtgtgagaaggagctggagcttgtgtgtgctggggtcagagccgatgcagaggagaaaagccccaaggactccaaaggtccctggggccacgtcaccctctcagtgtctccatctgtaaggggagcacatcatggtgcagcggctcttccacactggctccaacgctctaaggctactccactgtctgggcaacttggctgaggccccgctgtccctggcaggccagtctggaggctgaggcagcaaagcccacaacagagccagggagtctgggccacagatcccaaaggctgatatgagcccttatctttggcatcggcctccaaatgacttaatgcttattccaggggcaaattacagagcgtgcagaaggacaatcaggtccagtcttgctgctgggccaggagccaaagccttccagctctgtgggaggaccccagccaggtgggatccctgattcaggagtgaattcagctcagccgtgtaaggggctccagacccaactcccatgctgggctgggcctcttcccctccttctggagaatctggtataccttgccggggagttctgcatgtggggagagcattgctgaaggtttgctctcatagcacagtccctggggcctggcactcttggccatgaccagtggtctctttttctttttctttttaagtgacaggatcttgttatgttgcccacactggcctcaaactcctgagctcaagtgatcctcctgcctcagccaacagagtagctgggactat

SEQ ID NO: 4883 - DNA, 793 bp, Artificial sequence
  DNA replication origin
atgagagattcattcatagtcacaaatgtgtggtgtgtgtgttctggggtatgtgtgttgtgtgtgtgtgtgtggcaggtgtgtggtcatcctgtgtttgtgtgtgaggagagggctgaggccagggccccagaaatggccctgcttgaccgcccccgccgtccaggaacctgcttccttctgggtggtgctggctaagtagggaaggggccactcacctgtgctgtctgagaaatggactcggggcttgtatcaggcagggctgtgtccacgtgaaatgtgggcagggcactggtgggtggtggtgggtctcagggctggtggtcaggagtacaggttcatgggctgcggaggggcagctggggcatgtgagccggggtgggcccctcccccatggatctgggggctggctcctggggccgctgggaccatggcaggactaatcacggagggctctgagggctgtcctgggactagggaggccacatcactgtggtgtgtctgggtgtccatgggtaatggagaggatgcttaggcttggccgtgcagcactgtgtgcaggaggacaggtgtgtgagtgtggctatgtaagtgcagggtgtgtgtgtatgagtctgtgtgcacataacacatgtatgcgtgtgtgtgcacacctgaccctctctgggtgtctgggtggctccatgagcagtgatggcctcagcttttccaggcgcagtcattcttgaggaagcatcatcggatttgggccctgatcctccctgatcagtctcttcctgtctggcgtcacccc

SEQ ID NO: 4884 - DNA, 836 bp, Artificial sequence
  DNA replication origin
gagccatcccggcgtctgctgccatgaccgactctcccctcagaggagactcttcctcagcggtggctgcagagacagatgagcggcggctcctggccgcgggaccgtgagacgggttcgtggccggccatttagggggacgctgcgaccaccgcctgcgcccctccggactggttccttgggccccggaagctcgcggcgggccctgcgggaggcggcatgctcccgcggaggctgctggccgcctggctggcggggacgcggggcgggggcctgctggcgcttctggccaatcagtgccgcttcgtcacgggcctgcgcgtgcggcgcgcgcagcagatcgcgcagctctacggccgcctctactccgagagctcacgccgcgttctcctcggccgcctctggcgccggctgcacggccgtcctggccatgcctctgccttgatggcggcgttagccggcgtcttcgtttgggacgaggagaggatccaggaggaggagttgcagaggtgggcgctgcggcgagctctttctgggccgtggggtgggggggcttgtgaaccctggggcctgccctgtggtcgttggcccttgtttacccggtggtcttttaattggcaatacagtcgattgaacctgcttcagcaaaccgcgttgttatttgtctctgtgtgtcaatttgcatttgtcgggttataaaatagaactgaaagtgtgtaggctggtgtgtaggagggagactttgagtggggcgagcaagacagtaaagaaacaacactgtagaaatcaattagatagcgaaggcatggaggcccttgttcatgtaatctgtaatc

SEQ ID NO: 4885 - DNA, 1091 bp, Artificial sequence
  DNA replication origin
cctgttcgcgccaggagctgggggtctccgacgtgttgggctatgtgcacccggacctgctgaaaggtgagggtgctgcgcgctggcccttaaagcctcggtgggggacagaatgtgttctggctgaagcagagatagccagggaccagacacttggttgaaggaaacggccccataactgcctggtgttcatgcccaccaggtggctctgtttggggtccggcccctcattaattctgatgttattcagctaagcacctactcctcacagccatgttaatccggactgctgctattttaggattctgctggaggaaggacgctgtgtatcgagaaaagataagggtgctaggtatcacagttagctggcctcttctaaggatcctgtgaaatacggaaaagcttctttggggcagactgattaatggagaaaaaggaacttttaatatgactaggttttaaaagatatcttagagttctatggtaatcggatgcgtattagagaagaagggaatctgtggcattttaggtaatcggaagaccgttccattgccacccgcagtacaacagtcggaatgtggctcttggaaccattataggtgtgcctgacagaggcaaggttgctttgttcatcatcatgctttccggccagatagacagcagacgatgggagggtcctatgggccccatagtttatcctgcccattcttgtctccagtaaaaattgtgaagtgtgaggacaggactggactgtatcacctgctttttaccctaacaatgatcaatgtaccccaaacagtccttagtaacagcatagttcatcaaccccaaggtcttttgagccatcttgaaggtcttatatcctctctgtgctatcctgtctgtgctattccctggctgtgatgcattccagatgtttactgcaccgcctatcagaagcacttcctgttagatatctgcgtgttacctcctgaagaattcaggcactgggatttggtgaaaaggtccaagttccccgctgtgcatcggaccatactctgcttctgcaggtctaggctgaaaagcctcatccttgtggccaaatgttgcct

SEQ ID NO: 4886 - DNA, 914 bp, Artificial sequence
  DNA replication origin
ctccgccccccactcgagtctgcccagaccccatctggcccctggccctcttcggttgtcgtcccgcagtcccattccggagtctcctgtctccgccccccgaattcccgcagccctccccgtctccgtcagccccgggtcccacccccctatcctctggtgtcaaccctgacagcccagtcccggcttcacctgcagcgaacccggagcgttgctatcctccaccggactgtcaggctctgcgcgccccgcggaggtcggcggcgaccagcagcgactgcggagcgacggcgggcggccccgggcatgtacgcccccggaggcgcagggctgcccggcgggcgccggcggaggagcccgggaggcagcgctctgcccaagcagccggagcgtagcctggcctcggccctgcctggcgccctgtctatcacggcgctgtgcactgccctcgccgagcccgcctggttgcacatccacggaggcacctgttcgcgccaggagctgggggtctccgacgtgttgggctatgtgcacccggacctgctgaaaggtgagggtgctgcgcgctggcccttaaagcctcggtgggggacagaatgtgttctggctgaagcagagatagccagggaccagacacttggttgaaggaaacggccccataactgcctggtgttcatgcccaccaggtggctctgtttggggtccggcccctcattaattctgatgttattcagctaagcacctactcctcacagccatgttaatccggactgctgctattttaggattctgctggaggaaggacgctgtgtatcgagaaaagataagggtgctaggtatcacagttagctggcctcttctaaggatcctgtgaaatacggaaaagcttctttggggcagactgattaatggag

SEQ ID NO: 4887 - DNA, 1060 bp, Artificial sequence
  DNA replication origin
gaattaatgaggggccggaccccaaacagagccacctggtgggcatgaacaccaggcagttatggggccgtttccttcaaccaagtgtctggtccctggctatctctgcttcagccagaacacattctgtcccccaccgaggctttaagggccagcgcgcagcaccctcacctttcagcaggtccgggtgcacatagcccaacacgtcggagacccccagctcctggcgcgaacaggtgcctccgtggatgtgcaaccaggcgggctcggcgagggcagtgcacagcgccgtgatagacagggcgccaggcagggccgaggccaggctacgctccggctgcttgggcagagcgctgcctcccgggctcctccgccggcgcccgccgggcagccctgcgcctccgggggcgtacatgcccggggccgcccgccgtcgctccgcagtcgctgctggtcgccgccgacctccgcggggcgcgcagagcctgacagtccggtggaggatagcaacgctccgggttcgctgcaggtgaagccgggactgggctgtcagggttgacaccagaggataggggggtgggacccggggctgacggagacggggagggctgcgggaattcggggggcggagacaggagactccggaatgggactgcgggacgacaaccgaagagggccaggggccagatggggtctgggcagactcgagtggggggcggagggatcggggatcggctactgctagagcaaagacccggagtcagggtctcagccagaggatgccgaggggcggaggaccgggctgggccgcggggatcggggacccgtgatctgggaccggcggtttggggtgcgacctgtgcgcagaaaagaccctccccacgccgcccactgttcctcaccagtcagcaggccccagggctgggatggtgctgctcagcccagtcacgggcttctcggctgccgggggccgagcgttcccaggccccaatcccgcaacgcccggacagacccggggccgatgcacttccggcttcctcctcctctgcctccgcctcct

SEQ ID NO: 4888 - DNA, 2004 bp, Artificial sequence
  DNA replication origin
gcgccgccggctctgcgcagggcctcacgggactggtagttcgaggcggtcccgcgatgctttccctgccgaggtgaggggagcgactacaactcccagagggtatggcggccgcagcagtgggcagttgagtttccggggcgacccaggtcctccggcggaagcgggagcctctgtcggccgcggaagcctggagtgggcggtacgcagacgcgcgcggtgagacccgctgtctgctcagcggactctgcccgcccccacctccccctgcgtcgggccgacatgaaggactcgctggtgctgctgggccgtgtcccggcgcacccggactcccgctgctggttcctggcctggaaccccgcggggaccctgctggcctcgtgcggcggcgaccggagaatccgcatctggggcacggagggtaaggcccagcctggttgcgcggccctcagcgctgagggctcagcctgcgcgtagtgcaggcgctcagcctgcaggggaggctgaacctgttcctggcggagggagagtgggatgttagccacgccgagaagggctttacaggcaaagaagtctgcgactgttgggaggaaaaacgtcagcagacaagctgaaatgtcaagggaattgtgttagctgcagaggcaggaaaatgggaaaagagaggtgttaggaaagtggccttcagagtaacttgcgactggatggtcacattttatcccgagggcattggggaaccaatagcaattttagatcagatttgttttagaaagatgcctccagaggttgggcgcggtggctcacgcctgtaatcctagcagtttgggaagcagaggcgggtagatcacctgaggtcaagaggtcaagaccagcctggccaacatggtgaaaccccgtctctactaaaactacaaaattagctgggcgttgtggcgggcacctgtaatcccagctactcgggaggctgaggcaggagaatcccttgaacccaggaggcgaagattgcagtgagccgagattgtgccattgcaccccagcctgggcatcagagcaaaaactccgtctcaaaaaaaaaaaaaaaaaaaaaaaaaagcttccagacgaagtagattcatttgcatctttgtaaaagctgtgaaatacactccctgagctttcccccactagcttgattccagtgctagcccctgatattgaatggcttcatggtgctgcacccagctccagagcctggcctgcgctccgcctttaggtgacagctggatctgcaagtctgtcctttctgaaggccaccagcgcaccgtgcggaaggtagcctggtccccctgcggtaattacctggcctctgccagctttgatgctaccacttgcatttggaagaagaaccaggatgactttgaggtacccaggctggttgggaccagaattattgcctgtttcctccccagggctggttcaggaacctgagccaacctgcgccagttgggctgtacccatgggaaggggcttaggggtgttagctgctgttaattctcattttctttcccctttcacagtgtgtaaccactctcgagggccatgaaaatgaggtcaagtcagtggcttgggccccatctggcaacctcctggccacttgcagccgagataagagcgtttgggtctgggaaggtgaggccaggtccctccaggtggattgggaaccacctgacagccccctctgtgtccctgacagggtcggctcttgggtcccctttttctctcccacagttgatgaagaggatgagtatgaatgtgtcagtgttctcaactcccacacacaggatgtcaagcatgtggtttggcacccaagtcaggaggtaagagtcaagcagggactcttgtgggaagggctctggtgtgcaggcttgtgcccagccttcctctgcttttcagccttaatctagcttttacggagagttccatctgtgaacaaaaaacattagtccctttataaaaacagatccg

SEQ ID NO: 4889 - DNA, 1425 bp, Artificial sequence
  DNA replication origin
ggcggggggccgacccccccacctccctcccggacggggcggctggccgggcggggggccgacccccccacctccctcccggacggggcggctggccgggcagaggggctcctcacttcccagtaggggcggccgggcagaggcgcccctcacctcccagacggggcggctggccgggcggagggcagaccccacctccctcccggatggggcggctggccgggtcggggggctgaccccctcatctccctcccggacggggtggctggccgggctgaggggctcctcacttcccagtaggggcggccgggcagaggcacccctcacctcccggacggggcggctggccgggcggggggctgacccccccacctccctctcggatggcacggctggccggtcgggggggctgaccccccacctccctcccagatggggcagctggccgggcggggggttgacccccccccacctccctcccggacggggtggctgccgggcggagatgctcctcacttcccagatggggtggctgcggggcggagaggctcctcacttctcagacggggcagctgctgggcggaggggctcctcacttctcagacggggtggttgccaggcagagggtctcctcacttctcagacggggcagccgggcagagacgctcctcacctcccagacggggtctcggccgggcagaggcgctcctcacatcccagatggggcggcggggcagaggcgctccccacatctcagacgatgggcggccgggcagagacgctcctcacttcctagatgtgatggcggctgggaagaggcgctcctcacttcctagatgggatggcggccgggctgagacgctcctcactttccagactgggcagccaggcagaggggctcctcacatcccagacgatgggcggccaggcagagacactcctcacttcccagaccgggtggcggccgggcagaggctgcaatctcggcactttgggaggccaaggcaggcggctgggaggtgtaggttgtagtgagccgagatcacgccactgcactccagcctgggcaccattgagcactgagtgaacgagactccgtctgcaatcccggcacctcgggaggctgaggttggcaggatcactcgcggttaggggctggagaccagcccggccaacacagcgaaaccccgtctccaccaaaaccagtcaggcgtggcggcgcgtgcctgcaatggcaggcactcggcaggctgaggcaggagaatcaggcagggaggttgcagtgagccgagatggcagcagtacagtccagcttcggctccgcatgagagggagaccgtggggagagggagacagagggagagggagagggagagggagagggacatcatctaggctttaagctccacatgcattaggtatttg

SEQ ID NO: 4890 - DNA, 894 bp, Artificial sequence
  DNA replication origin
gggtcggccccccgcccggccagccgccccgtccgggagggaggtgggggggtcggccccccgcccggccagccgacccgtccgggagggaggtgggggggtcggccccccgcccggccagccgccccgtccgggagggaggtgggggtgtcggccccccgcccggccagccgccccgtccgggagggaggtggggggggtcagcccccccgcccggccagccgccccgtccgggaggtgaggggcgcctctgcccggccgcccctactgggaagtgaggagcccctctgcccggccagccgccccgtccgggagggaggtgggggtgtcagccccccgcccggccagccgccccgtccgggagggaggtggggggggtcagcccccccgcccggccagccgccccgtccgggaggtgaggggcgcctctgcccggccgcccctactgggaagtgaggagcccctctgcccggccaccaccccgtctgggaggtgtgcccaacagctcattgagaacgggccaggatgacaatggcagctttgtggaatagaaaggcaggaaaggtggggaaaagattgagaaatcggatggttgccgtgtctgtgtagaaagaagtagacatgggagacttttcattttgttctgcactaagaaaaattcctctgccttgggatcctgttgatctgtgaccttacccccaaccctgtgctctctgaaacttgtgctgtgtccactcagggttaaatggattaagggcgatgcaagatgtgctttgttaaaacagatgcttgaaggcagcatgctcgttaagagtcatcaccactccctaatctcaagtacccagggacacaaacactgcggaaggccgcagggtcctctgcctaggaaaacca

SEQ ID NO: 4891 - DNA, 1554 bp, Artificial sequence
  DNA replication origin
tcctcaacccacagacgccaaggcgccccgagaggcacttcgcttccatgccgaggccaagggcgcacaggtgcgtctggacacgcgtggctgcatcgcgcacaggcgcaccacgttccacgacggcatcgtgttcagccagcggccggtgcgcctgggcgagcgtgtggcgctgcgagtgctgcgggaggagagcggctggtgcggcggcctccgcgtgggcttcacgcgcctggaccccgcgtgcgtgtccgtgcccagcctgccgcccttcctgtgccccgacctggaggagcagagcccgacgtgggcggccgtgctgcctgagggctgcgcgctcactggggacttggtccgcttctgggtggaccgccgcggctgcctcttcgccaaggtcaacgccggctgccggctcctgctgcgtgagggcgtgcccgtcggcgccccgctctgggccgtgatggacgtgtatgggaccactaaggccatcgagctgctgggtgaggcgaccatggggaccccgcaggggaggtggggagatgggggctccagtggcaccccacaccgatccagagccacaggaagaacgttcacattcagttattccatcagcccctgcccagtgttagctgtgaagatgggcactggagacgccagatagacaaggctcagtcgtagggagggcagtcttgtccctaaagaatgataagcagataggaccagcactcacaccatctgttactcaaacacctgttagagtgtccatctccttttacaaaggaagaaacatttgggctggctttgcagcctaaataggagttcactagatacaaaggtggcaagcaaagggaacacacaggtgaggctagaggtgcgcatggagagtgcctgcagggagaaagctgagcctctcagtcagtgggggggaaaagagagccatccctttagccaccccagaagaaggtggatttcaggagagcacagagaggcagtaatacccataacaagaaatattggcattcctgggccgggtggtggtccactccccgcctcctgccagcaaatttgttaaaaccatttgtcacagctgccagcgcctcacacctgaagcacctgatttgctgggtctggagtggagccctgaacctgtgtttgtccaggctcttgggagatgttgatgcccatctgggttgggaatgtggctcggccgagggtctccactcaggcagcggctggagggcaaagaagaggggcctgaaggaaggtggctcaggaggaggaatctccagccccaaggattctcggattctcagctgggtcaagctggggaagggatggccaggacagggtcttaaaatttggggatgggggctcagcattgcaacccaggaaagaaaggagaccggacactttgctgcggggccaggggcggggatgggggggcacctgggcttgccgtcctggacctgagtttctctctctgcctcagatcccacagccagccggctcccaacacccatgccatgggacctcagcaacaaggctgtgcctgag

SEQ ID NO: 4892 - DNA, 1993 bp, Artificial sequence
  DNA replication origin
gtaggggctgcactgggtgaggctgggagaactcctcatcaaccctagttctgcccctgattgctgtggggtggggctagccacttgcccactgtctgcctcttaggatggcagcaggattgggtgtggcagtttgtagagagggctcggatgccggccaccatctccggcaccgcccctcgtccagggccattgctccagcctcttgccaagcccactccagggcttctctccagttcccacctcagggatgggcagtgacccagccaaagggctggcctctgccctcctagattgtggctggttgtgccaagaggccccacttgccctgtcacccccagccccatgcctggccaggtaggcagtgaacaagactccagacaggtgtcctgagactcctggccttgctggacatgcacttcactgccgtttgtaggtgaggaggctgggccctggaggacagtgacctgcctgggccagcagcagggcaggcctggaatgggggtgttagccatggcccagctggtatcccactgccctccatggagcagcctcaaccatgggcacaaggtcaggttcactgatgtcagggaccccagcatggctccggctctccatgtgtgctggctctgggacttctccttgcctaggtgcagccttgaggcacagggagctgggcaggcctgctgggattcgcaggaagggatgagtgcatcatgggaaggcacgggcggggcgcaggcgaggggtgaatgcggatacacagggctctgtgagagtcccaaggccacggtgagcactggtctttaatgctggggaaaggtcactgcaggtaggcttacctttggcctgtggaagtcagggacagagtcactgtcaccgcaaacgtgtcctggtgcctgaccagatggagcctcctggccctgggctctgctagagggtgtaaacctgtgtgtagtcagagtgcctgccttgccaggggagtgtgacctgatctgggaggggagtggccttgctccttaggatggggtctggcttaagttctgattgaattcgccttttattttcaacagcaaacagccagccagcctccctcccccagcccagaaagagcaggaccaggaggggaggggcaaggccggctaaggcagttctggggtaggaagccccaccagcttcctgcaggctgagtggagaggaagggctgctcagtgaggtgctttccccttctgactgccaggcagagtcctgtgggaagtcccctggtttcagagcccatgccagagccaggctggaccccacccaggattctgaggggctaacctgggacttcctctccagcctgcacccatactctgtggggagcagccaagcccctttctctcccaggacaaggatgtcaccattgctgggggccatggtcttcacaagtgatgcagttccccatgggaaaacaagagagacaagcagagagggaatagcagacagcctcctggagcagaccacagtcagcaaatctgtctgtctcctcttccgtcatttttaggtgcatatggaataaatgtatgggctgggcgcagtggctcatgcctgtaatcctagcgctttgggaggcagaggcaggaggatcacttgaggccaagagttcaagaccagcctgggcaacacagcaagaactcatctctgaaaacaaaacaaaacaaaacaaacaaaaaaaccgtgtataacaaacatatagatatttatgcctgactaaccctactctttctcttgaacaataataaccattactagattggtcgcaggaagagtacaaagagacatcagttcctatagttttcataacaaccctgcaggaaccgagagaggtggaaatggtccctaggggaaggtcaaggtgctcccaggtgtgagggactctgggatactgggggctctctggggagctggtgggtccagacccggttagcactgacactccccatcctcaacc

SEQ ID NO: 4893 - DNA, 1330 bp, Artificial sequence
  DNA replication origin
tccggaccccgcgctctctgagatactggctcgcggcgcggcccgccggccacctccccgcagtcccgccccgtcccgcccctgctcgccccactccgggctcccattggtaagcccggcttcgtcgcgcggagaaggcggggggcggggaccgcccttgagtccggggacctctgggaattgtagtgcgcgcccctcgcctctaggctttcagactggagcccctggaataggctcctcacctagaggagcggaggcaggaccctcagtaatcattgctgccttgtgcctcagtttccctggaggcaaaactagagccttggaaaaagcctccttgctttcagcagagcactgaggactctgtggagcgagcaaagtgcttctgactttgatttgaaagtggccctgtgcatttcccagtccccacctagcccaacaaagaaggccaggtgaggccgggagcggcggctcacgcctggaatccctgctttgggaggcggaggcgggaggatcacttgagcccagaaggtcgaggctgcagtgtgttttgatcacaccactgcactctatcctggatcctgggcaatagacggagaccctgcctcaaaaaaaaaaaaaaaaaaaaaaaaaaaaaaaaaaaggagaggtggttagtgtgagctagacaaggaccaaactagtaaatccttggcctaggctctgtggccaggcctgccagtaatagtcaatgtccacacacataatgcagacagagtgtggcagctacaagctgagtagtccaaagaaggggcatgagttcaggctgtgggaggtgggaatgaggcctagggcgaatggaggcaggaggaggtgcccagccagccatagcagcaacctggacctgtgcaggccaaagaggaagaaatggaggctcagggtttcagtctcagcaggtggctagctaggatgggaaccctgttcctagcacatagaagctacacaaaaatctttgttgatgaattttaatactcataatagctctatgcacttgacaccatcattgtcctcattttatagcgtaaaactgaggtctgagagattagctcaagtagcacagctggtaggtgttggagccagagctagacccaggaagaggagccctcatacccaggcatccccccacccgctttgcacccattactaaccactcatcatactggtgcccctcctcacactaaacgaagggaccagggctgcagtttggtgaacctgaaaccctggcccttaccctttggccctgggatggaagatgtctgcaggctcagtctagagcagacgaccctgtgggctc

SEQ ID NO: 4894 - DNA, 1139 bp, Artificial sequence
  DNA replication origin
cgctcctctaggtgaggagcctattccaggggctccagtctgaaagcctagaggcgaggggcgcgcactacaattcccagaggtccccggactcaagggcggtccccgccccccgccttctccgcgcgacgaagccgggcttaccaatgggagcccggagtggggcgagcaggggcgggacggggcgggactgcggggaggtggccggcgggccgcgccgcgagccagtatctcagagagcgcggggtccggacagccgcgcgctgagggtctcggggcgggcgccgcgggacctctccgggccatgggtaagcggctctgcggcgcggcccggacaggggctcggcggccctgcagggaggttcaaggtgccggcgccgggtcccctccagccctcgtggcagtcggtgcgctgtgtggggcggagaggggcccggggtgggtttcggggcgcgggccaaggggagcgagcccggcccgcggcttcagcgctccccggccggcgcggaaggggtgaggctgggcgtccgcgcgagcttcgagaaaaggaaagacaaaaagttttggcggccaggggcttcccgggcgtttatctcgaaactcttttcgccgtctcttgcctgaaatatgccgagcccggtacggctctgtcgtcccacttcctgctgcggtttccacctcgagctgggctcagctaatttgttgtgacagctgtcggcagccgcccctccgccccgtgacatcccgcaggtttcagaaccgcggcgccgccgggcacagactccgggtccagagcgcgcggccctttcctctgcggccgccgtttcctgaaaggggctgcgcgggtgtgaagaacttgctcaatgcgctttgtaggatccactgttcctctttcggccgcgggctgcgccgatggtccggggagcccggcttctcgccccctgccccttccttctcttcccttttctcttttcctctcctgtctctccgcccacccgccgcagccccacaggagaggggtcgcttccctggttgctctcctctcctgtcccttgtgtgtccccttgtcttccctcggtctgcagaagggacggggtggcggctggggagcgtcaggggaagagggcaagagcgtgggc

SEQ ID NO: 4895 - DNA, 1231 bp, Artificial sequence
  DNA replication origin
cttgctcaatgcgctttgtaggatccactgttcctctttcggccgcgggctgcgccgatggtccggggagcccggcttctcgccccctgccccttccttctcttcccttttctcttttcctctcctgtctctccgcccacccgccgcagccccacaggagaggggtcgcttccctggttgctctcctctcctgtcccttgtgtgtccccttgtcttccctcggtctgcagaagggacggggtggcggctggggagcgtcaggggaagagggcaagagcgtgggctacgagcttgcaggcgatgcccggcttcgcgctcggcgggagctgcgggccaacccgggcccgcgctccgtccctccgcggtgtctaggggtcgcccgggctggggtcgcgtcaccctccgcccagcgccggcgtggtggggcttgcgcggtgcaggacccccgagggcccagggggtcccaaggcgctgcgggtccagtgtccctttgtttgcagagtcttgggccagtaaggagtgctccgcgggccccaggggaggacaacaggtgcctcttgccccacccgggctcctctggtgggagcccacacgcacggtggcgtcactgcgcctacaggcaacgctagagcacaggaggggtgggaggtcggggctcgagggcttcaccccgcagcagagctcagagcccaatccaggccttagggacccgcctggggcctagaacttggtgtggcagaggtagaaagggcctccgataatctgcttctacagttgagagacgtcaactggcacctctgagcctctgccccgtaggtgaaatgggaacacacgaaaccatctgaggagctctcactgtccgtcaccaccaaatgtggcccagactccgtggggagggacagtcccatcctggaactggggcttttaggacatcccagagcccggtaagagggacagggagaatggggcttggaagttggtagcctcacattcagtgtcccccgcacctccttccctttctgtaccctctggtggctcttgtggcctcagctgcccccagaccctgtctctctcgccctcccccaagctgaggtactgaggttgggctgtggcttgagctgcacctgtgccctgttagggagtgggggtcccaggcccatcgcgtttcttctcactgctggctccagctcaacacttggcaggcccccctccccaaactgctggagcaagc

SEQ ID NO: 4896 - DNA, 1213 bp, Artificial sequence
  DNA replication origin
gacgctgatccctgagagctagagatttttttctttctaatgggagcagggagacctcaagttccttatctgtgctcagaggatgcaaacttgtcccctttccccaagtagatgtgcagtttcccagcacatcgctcctgtcactctgctaacaagagcaggtctgtgttgactgctaaggcatccaggctcagggatgggagggggctggtcagagagctgggcagcagcggggagagggggagggccgggaaggggcatggcccccacactctatgaatcaacttccctggcctgggtcggggagggcccagaggacccaccatctttgaataaggggtgttatctccataatcttgaggaaggaggaaagacctgttgatacctactgagattccatttaaaaaactgctacctgttacctgagagagtagggggccagctctggccagggcccaaccaacctggcgaagcaaaggcaggtatgcaaaggcaggaaggtgaaggcagtcgggcggtggttgagagtcactgaagacaaacttaagatgtctcacggggcttagccaggactagaaggtagctatggggccaggcagtgggtggatgcggggaagtcagtgggcccctgccctgccagacatcaagctggaagcagatgaaagtgggccaagaggacagatggggcaaggggttccagcactgcatggctgcacctcttaccaagttggtcactggttctgtatctccctttccccatctacaagatgggcgtgctagactcaatgtgcccaatgttctcagcagaaaaaagtgagaagagaaaggaggcttcccccacaaaccacagccaggctcagtgagaagatcagaggcctgcctgtcctgctccctccccaaggcacctcgctgcccagcaggtgctccggaaacatcagcctcctgggtgcaggatgagcgcaatggacttacagacccctgttgcccagagaggggcagtgactagtacaaggccacacagctctcaagtttaagggtctgctggaggcacacacccctttccttctctccctccccatctttctgctgcccgccccactcaccctgggtgtgatgggaaggaagtgacacttcctttcatgaaaagtcaccgactgggaacactgcgtcaattaccacaataatggtaacagcagcctcaataacaaccagc

SEQ ID NO: 4897 - DNA, 2028 bp, Artificial sequence
  DNA replication origin
gcatgtcccccaggaggccggcgcccatcccctccctgggcctctgtagcctcctctgagcccccttccccgccggcgccgaggaaggccctctcctggtcccaaagcttcagctccctcagtgagtgcgcccagccagcctgggctcccgcagctctgaggacggcgcataccctgcccgctccgggcagagtccacccggccctcccggcaaggtcggccaaagccccgcagggtaggcggcgtccagcacccgggcccgccccgccgtacctctcgtagtggcggcgcgtgcacgtggccgcgctggtgctgcctgggctgccccccagctcgtcgtacacgttcttccagaggcggcgcccggtcacctgcaagggcacctcgtgagggcgcggccggcgggcgccccctggcggcggggtccttgcagctccggccgccctcgcagggactcgaaggactgcagtttggcagctgctctgcggctccagcagcggccagccgattctctctcctagggccatggactgctggcccaagcagttttcccaacacggggcgggcagaacagatggggaaggctgaaaagctgctttgagcagcagagtaccagcggggaaggcagggaggcagggacgcaggggtaggactggggatcctggctcttcctctgtccagaggcaaggacagcgctgcaggctcaccccagggatatgcagtttggcaaggactgggaggtgccttccttaccagctcataggcccccagcttctccactgctttgtagatcttccacaggttaactgggggagagaagagcaggctggccgtcagtctctgtgggaggtggggacagcatgccaccccttcctggtgccctgacaggccaggcacagaccagcacacacccagccagggccactgcaatagacgggcaggctgtgccctgtgcacccctggcccagtggcagcctggagggaggcctcctttctatctgcaacctgggtcacccagagtgggagtgcctgcccgatgccctgcctgggcggggtcccctgctgggcccccctccctgcctgcaccccagggacgcactctgcttgaagccgagatggggcaccctctcgatgggcgtgtgtcgctccttcatgaacttgtagaggctgaccaggaaggcctgctcctcctcccgctcctgctcctcctcccgctccccgcctgcctcgggggagtcctggggagagaacaggaggcattgggatgggccccagttggtggctggctgctggggatgtgcagaaaccactggctgcaggaggaataaggtacctaccccaaccccagtttcccagagaacacctagccactgttctgggagggagtgactgttcctgggttcggcagacacaggtgtcagctctcagcgccccaggacaggagctagagtccaggacctccccggaggctgggtaccccagagcagctggctccagaggctgccacgagagcagtccccagccttctccaggccagggtcacttctctgtcttgttcttgatttgtcctatttgtgtcagctcctccgccagactaggaactccaggagggcaggctcagtgtccctgggactcccccataaccgcagagggaaaagctgaaggaacaaaggtgcttggtgctttctggtgccctggggttactctgtgaggcccatgttccccgagcctctgtgtggccccagcctgccgtgctgagcacagggaggtgaagctctgggcttcaattgcgcactgctgtcaggggcacaggacttttggttgcgggtcccagaggggcaatctctgctgatgccgtttatccagcgagtggctcggggcagagagcctagggcccataccctgctcagagaacagacagcttccaggacataaaccatctggactaggacagcgcagacagccatgtgttccaaaaatatttgatccagctgggcacggtggctcactcctgtaatcccagcactt

SEQ ID NO: 4898 - DNA, 1459 bp, Artificial sequence
  DNA replication origin
ccccatctgttctgcccgccccgtgttgggaaaactgcttgggccagcagtccatggccctaggagagagaatcggctggccgctgctggagccgcagagcagctgccaaactgcagtccttcgagtccctgcgagggcggccggagctgcaaggaccccgccgccagggggcgcccgccggccgcgccctcacgaggtgcccttgcaggtgaccgggcgccgcctctggaagaacgtgtacgacgagctggggggcagcccaggcagcaccagcgcggccacgtgcacgcgccgccactacgagaggtacggcggggcgggcccgggtgctggacgccgcctaccctgcggggctttggccgaccttgccgggagggccgggtggactctgcccggagcgggcagggtatgcgccgtcctcagagctgcgggagcccaggctggctgggcgcactcactgagggagctgaagctttgggaccaggagagggccttcctcggcgccggcggggaagggggctcagaggaggctacagaggcccagggaggggatgggcgccggcctcctgggggacatgcgtggttcctcaccaggctggtcctgccatacgtgcggcacctgaagggggaggatgacaagccgctgcccacctccaagcccaggaaacagtacaagatggctaaggagaacaggggggatgatggggccaccgagaggccgaagaaggccaaggaggagcggcgcatggaccaggtaggcctgcggctggctggggccaccctgtcccttgcctcttgtagccccctaccccacaactccctgtggccgcggagctgtctgctcagaatacacagaacctgcacccagggcgggacttgcaaggttccaggttctccacagatggttgtgcaagtggactctgaactccagcctgcgcccacccaccaggcacctgaggctgtgtccactcagaggacagggcacctttggaaaattctgtacagaggactgcaggggctggcgggggacctgggcaggcctgaaagtgccacctcttgctcctcaggtcaggatgtggggctgaggcagtcctgaggcaagactttctctcattccagatgatgccaggaaagaccaaagcagatgctgctgacccagcaccacttcccagccaggagccccccaggaacagcacagaacagcagggcctggcctctgggtcttctgtgtcctttgtgggtgccagcggctgtcctgaggcctacaagcggctcctatccagcttctactgcaaggggacacacggcatcatgtcaccactggccaaaaagaagctcctggcccaggtgagcaaggtggaggccttgcagtgccaggaggagggctgccgccatggggcagagccccaggcgtccccagctgttcacctcccagagagtccccagagccccaaaggg

SEQ ID NO: 4899 - DNA, 2006 bp, Artificial sequence
  DNA replication origin
gagccccagctggtgtggggcggagacgctaaccgcccttctgcgttccataaaggtggctccagaaagggcatcctctaccccaagcccaaagcctgctgggtgtcccccatggccaaggtcccagccgagagccccacgctcccgcccaccttccccagtagcccaggcctgggcagcaagcgcagcctggaggaagagggtgctgcccacagtgggaagagactgcgggccgtgtctccctttcttaaggaggcggatgccaagaagtgtggggccaaacctgcagggtccggcctggtctcctgccttctgggcccagccctggggcctgtgcccccagaggcctacaggggcaccatgctgcactgcccgctgaacttcactggcaccccgggccccttgaagggccaggctgcactccccttcagccccctggtcatcccggccttcccggcccacttcctggccaccgcaggcccctcgcccatggccgctggcctgatgcacttccccccaacgtccttcgacagtgccctccgccacagactttgcccggcctcatctgcctggcacgcaccaccagtcacaacctatgcagcgccccacttcttccacctcaacaccaagctgtaggccagcccatggtgttgtgtacactgtggagtcgacaggggcctacaacaggcaggtactgctgccagggggctctgaactagtgcctgctacccaggacacccgggccatgcccctggctgggcagcctggcacaagtgaagaagaaggcagtgggaaaactgggtttatctcaaggcagcagcctgagcccaggagcagaggacccagttgttataaggcgctgggagaggatgggcagctcccactgccccagagcggagctcgaagcacccaggttgcccacggaaaatccaataaaaagacaccagtgtgaatccacgtagccctgaggtgtgtgtggtatgggcctttgcaacggcaggcaaggcgggggtgagcttgtgggtggggctgccattagggggccaaggaggtggacctgaacgccactaccccactgaagagcgggcccaaagcaaaccccagcctctgccgtttaggcagcctctaacatctgtccttgccttcagtccagtttcctagttgagcttcagggaatgcttgctgccttcctcattgtggagatggggattggaggtcctgggagggtcggtgacttgcccaggttcccctggcaggaggggcaggggagggctgcacaggctgtgtgactcccgtgctctgagcgggaccccaggctgttaccagtgcccctggggggttgggggtgtgaccaggaagcctgagttggtctgcgttggtggtggatgtagatttctggggcctgcagctgagccctctctgcagccccaccccacttgcctgaaccgcatggacagaccagaatgaccactggattgaaatcaccggaggtgcctggagggaaaggggagcaaatccactggtctgggcctgggtgtctgcatcggtaacaagcccctgcagtttcagatgtggttgccccagggctcatattagaatccctgcggcttgacgccctgcttcctgcaggccggatgggagcagggccttggctcaggaggagggagggtgggttcttttcagaggcactgtcccctccctccacaagcagcctgcacccaaacagcttcacatgtagtcctggaaaagtggggctactgctggccaagcagagggcagatgtcggggctacaggtgtgagcaggtcagtgggtgacacgcaccactggaacttaccctggccgctggggctgggatgctcatgaactccggccatgggaagggcccccataggttgcaggtagagaggccaaggccggggatgggcagggtcttgcttgcccaaggctaccatccacgatgacagaacccagaccagggaacgtgcagcatgcctggcaccaggg

SEQ ID NO: 4900 - DNA, 1387 bp, Artificial sequence
  DNA replication origin
ctactgaatatgcgcgagggggaaactccagcctagttgttgactttctgcttcggacatgctcgcgtgttcttggctctcctcttccggacagaggcgccggagcttcatccgttccgggctttgccgctcaccgcctctcccttcccaggccgtaacccgcttccgcgttttactcggtgcccgcagcgccggggcgtggaggcgttaacgcgcacgcgcttagggatccggccgtggccgagcgcgcggccgtaagaccgcgggtgagagcagcgttggcttcgaggggagtggcgggccgtggggatcgcggccgtggttgggacggccgggggtctcggcgagggcttcagggctcccggggcatgcgggggcccgggctagggccggctgccggtgctggtcgggcggggcgggtcgggccgggggcgggctggcaggggccgcgtctgggcctccgtgacgcggacgccgagccctgccccagggagcgggaggcgggaggcgggggccaggcggctcctcctcgtcgcgaactctggatgaccttggccaaatcgcttcagttccccgagctggcgacttcgtctgtaaaatgcgagtcatagccctgtctcctagatgggccgtgtggaggctcagtggcgggaacgcctgcggggcagccggggtcctgggcggtttgctagggacgcctcactgggggtgagggtgaaagggcttccacggggatcattttgtcacaggctttgttgggggggcagttttcatttttatgtaaacaactctggaatattacgaagtacttaacagaacttttgtttcgcacaatacgagaggcttgaagaagtggagccctagctgggattcgcttttttgaggccggcgttgccctgccctttaggggtgcccacgctctagctgcggccccggctcccttcgcattgtcgttagaggatggtgtgaagcaacagagatccttagctttcaacgaattcatatttgtgatttcctgtttgtcaaaacccttcctgcccacctaggaagtggtgctggccaagcaagtttactgtctgtccacgcgaggtctttctgaaccttggggtcggtgagctctcccgttaggtaatttcagttcgctagaggttgagtatgggacaactcgtggcaccatagttttttttttctttttttttggtgttggtgtgggattccacgaaccgtccccaccagaggtctgccgtgaaatggatactcaataggaatgatagtaggttacaaaagtaagcatgttagatggtgtagattgggagaaatttaggatattggaattgacctaaactgaaacttttcactgcaggtgactagcatgcagatacccatg

SEQ ID NO: 4901 - DNA, 1280 bp, Artificial sequence
  DNA replication origin
cggttttcaaggtcgatgactgtggttcctatcttatcatcaggtgaaaataggtcgaagtcatagagctggatctctaggtccttctccaggggtatgttgcaggtgagttcaaacatcctaggggtgaggtgttggagactgcagaggatgtgggcaatgtctctgtgcccccctccctcaccggtgtctcggccccgtaggccccttgtttgttcatggagattgtggagagcagagcatggggtaggctgccttctgccaatcgccatcccctggttatggttgaaaataactttggataggcctggtgtggggctctgagctcccctcccagccagagtgagaaacagggtagaaccggcccacccatatatttgtcttctatctgttgagcaccagggcatgtaagacgctgtggtgggaacttggaggctggacaggagtgccagagttctgtgccttctccggccgacttccagtgtggtgtggataggagtggagaaggggtcttgggggttggggcagctcacatgccaaagatgggatccagagtgttgggctggtacatgtcccggttgccaagctctgtcttgcccagtttcaggatcacataagggtcacactggggtcagatacaagtgggggaaggataggaactggggaggccgtccaggtttgtcagggagggtgggaggagggtggaaacaagcccctcgcaccacacggagcctatggggagttggcattctgtgtgtcagcagtcggagggggctcccagagatgggttgaggggagcgtgcggggcacctgtgtggggcaggtactgttctttaccaggccattgtagtcctggggctgcaggttgatggctcgtaccatgtacacccgcaccaagcacggctgggggaagtcctctctctctggccaaaccaagaactgcagcgggggctttggggcttctggattctcaggaaaggggtagatgcggaaaaggccctggcggggggagggtgttgggggcccagcctggcagtgctggccagctctgtaaagccctctgggaggtgccccagcccatgttcaggagagagagggttgggctgagggtggcagggatagaaggccatgaggacagtggaggcaggtacagaaggtgttcagcagggcccactatgttgaaacagggtgttggcaaaggaaccgcagtcagtaggtgagttccccgtctgtgccgctgtggactcattccaccccatctatcccttcaggttcgggct

SEQ ID NO: 4902 - DNA, 776 bp, Artificial sequence
  DNA replication origin
tctgggttggcaaggcaactgatacagaagccagccaatcggtgatatagtcacctgcaggggcgggggcttgacgaaagccaataggacgcagggcagatggctcttcgggccaatgggttgggcgacggggcgggcttttgatgaagggtcgttggtgggaaagatggcggcgactctgggaccccttgggtcgtggcagcagtggcggcgatgtttgtcggctcgggatgggtccaggatgttactccttcttcttttgttggggtctgggcaggggccacagcaagtcggggcgggtcaaacgttcgagtacttgaaacgggagcactcgctgtcgaagccctaccagggtgaggcgcccagggtgaggtggtcgtgcagtggggcgggcttcgggacttgatttcaggggtagaggcgggggcggcgaagggcttcgtggcccggaggaaactgctggcggtggtggggcccacggagactccctccgcgtttgggagccacaggtctgaaaggcaggagttaggtgtgcctgccaagctctggaagtttccagtaggtaaaggcagggctgtcgggtgccactagtactaggcctggagttagacaggaggagtttgggaaggggagagaattgagaatggtgaggagtgattgagggctactagcaatgagccagtctccagatggacctgtggatgtgctagaaataaagcaggaggaagaactggggtagaacttgaacgaaatgagaagatgataaatttatgttg

SEQ ID NO: 4903 - DNA, 1502 bp, Artificial sequence
  DNA replication origin
gtagctaggagaccaggtcccggagaaggagagctggccccactggcagagaaaggcggggaagggcgcggaggcggagcactgggcgggtacccgctggcggctctcgcgcggcggcgctgctccaccttaagcgactgtacccccttaagggcgggcgctcaagcagcgagccccgggggcggggcctccaatgcaaatgaggggcgtgggcaggcggggcggggcgggcggggcgctgacctgacgtcaggctcgcggcccgggcagttggctcggcggcagcggagcggccggagctgcggtgcggaccggggccgcgcggcgtggcgcggggagcggcggcggcggcagagccagagcaacatggcgccggtgggcgggggcgggcgcccggtcggcggaccggcccgcgggcgcctcctcctggcggcgccggtgctgctggtgctgctgtgggcgctgggggcccggggccagggcagcccccagcagggcacgatcgtgggcatgaggctggcgagctgcaacaagtcgtgtgggacgaacccggatggcatcatcttcgtgtccgagggcagcaccgtgaacctgaggctgtacggctacagcctgggcaacatctccagcaacctgatctccttcaccgaggtggacgatgccgagaccctccacaagtccaccagctgcctcgagctcaccaaggacctggtcgtccagcagctggtcaacgtgagccgcgggaacacgtccggcgtgctggtggtgctcaccaagttcctccggaggagcgagagcatgaagctgtatgcactgtgcacccgggcccagcccgacgggccctggctgaagtggacggacaaggactcactgctcttcatggtggaggagcctgggaggttcctgcctctctggctgcacattctcctaattacggtgctgctggtgctgtcgggcatattttctggcctcaacctcgggcttatggccctggaccccatggagctgcgcatcgtgcagaactgtggcaccgagaaggagaggcgctatgcccgcaagattgagcccatccggcgcaagggcaactaccttctctgctcgttgctcctagggaacgtgctggtcaacacctccctcacaatccttctagacaacctcatcgggtccggcctcatggcggtggcctcctccaccattggcattgtcatctttggggagatcctacctcaggccctgtgctcccgacatgggctggctgtgggtgccaacaccatccttctcaccaaattctttatgctactcaccttccccctcagttttcccattagcaagctcctggacttttttctgggccaggagattcgcactgtttacaaccgggagaagctgatggagatgttgaaggtgacggagccctataatgacctcgtgaaagaggagctcaatatgatccagggtgccctggaactacggaccaaaactgtagaggatatcatgaccca

SEQ ID NO: 4904 - DNA, 1259 bp, Artificial sequence
  DNA replication origin
atttttgtgggtacatggtaggtgtcagtgtatttataattccaaaaatgacaccaccctgaacagcagggcagcctgccaacggagacagtgtatgagaactgctgtggccacaggttggcatcagtgtcaactggggcacctttggataatagcaataataattttaaaaataactaatatttacagcatgattacgcagtgccgggcacagggctcggcaccttgcacgccttacctcacttagtcctcaccatgaggtctgagggggacacagtcttcaatgtggatgaccagatcactagcagctgaagagaaagtcactattttgagcatttcatgaaataaatcacactgtacaagcatttactaatttttgaaactgacttctaactcttgggaaagtttcatgagaaataggtttcggtttaaggcaggactcctggtgacagtccatgtatgcataaatgtgggcgtttgcgagcctgtgtgtgcacatggggggttagcaggtgggtgtgaacatgtgtgagtggccctgcctgtgcatctgggaggtaggagtgtgtgtgtgtgcaagtgtgtgagagcacctgcctgtgcctttgtggggggtatgagtgtgtgtgtgcgtgcatgggtgagagcgagcctgcctgtgcctttgtggggagtatgagtgtgggtgtgtgagcatgggtgggagtgagcctgcctgtgcctatgtgcgggtatgagtgtgtgtgtgtgtgcgcatgtgtgtgtgagcgcctgcctgtgcctatgtgggggtatgagtgtgtgtgtgtgtgtgcacgcatgtgtgtgtgagcgcctgcctgtgcctatgtgggggtatgagtgtgtgtgtgtgtgtgcacgcatgtgtgtgtgagcgcctgcctgtgcctatgtgggggtatgagtgtgtgtgcgcatgtgtgagtgagcgcctgcctgtacctatgtgggggtatgagtgtgtatgtgtgtgcacgcatgtgtgtgtgagtgcctgcctgtgcctttgtggggggtatgagtgtgtgtgtgcgtgcatgggtgagagcgagcctgcctgtgcctatgtgggggtatgagtgtgtgtgcgcatgtgtgtgtgagcgcctgcctgtgcctacgtggggggcatgagtgtgtgtgcgcacgtgtgtgtgagcacctgcctgtgcctatgtgaggggtatgagtgtgtgtgcgcacgggtgggagtagagcctgcctgtgcctatgtgggg

SEQ ID NO: 4905 - DNA, 1083 bp, Artificial sequence
  DNA replication origin
ctggttcctctcctgccctggctctgccttcttgctgggctggctgccactcatcccggtggttgaggtcagcactattaatagccagcttaatcctgcgggagcttgggtgaagggaggaaagagcagagaatcgccaagaaatcagggtgctcagctatctgcaggtgtggacccagggcccaagcctgtggcttccagtcagtccagcccgcacctctcccatgggagggcctgagagcgcgggaacatcctgggcccctgggatctcagaggctggaccttcctgggagactcattgagtaagatgcagaggactccttcttgggtggtgggagtccctggtctgctctggggcccctggcttttccccatgagaaaaagcagctggagctggtgagtagggccctctcatggcccctgtggactttgtaacccagcacctataatacggttttcttaaggacttcaaggggctgtaaagtctttttttatggagggcggggaaggaggacgcagcagtttgctaaaatgggcattgtgcagggtggggccatcctttctgtatccagcaggggtgtggagcacctgctgtgctaggcatagtgggaggggttggggtagcatggcgaggagcgagggcactactcaggcctcgccaggctgcagcctggtcagtgggagatagacgccggtcagccgatggcacagagctgtgaagggaagaaatgggtcgggatccagggccctaaaagacaacatggctaacacccagggctaacgtttgagcccagggcagaaggataaagaggtgacacggaggctggggagcaggaggagctgtgagggactcaggcagggctgggatcctccttgcccttgtgccagctgtgagggaggctgaggctggcacctgtggtctgcccagccctccggggtttctggaggcctcacatggtgttctttgactgtggagggcacggtcccacctggctgctgctggacagaggtcgctggagggcagagtgggcaagcatgccgccaggcaaagcctggagaagacagtggggacagccagggtgc

SEQ ID NO: 4906 - DNA, 1352 bp, Artificial sequence
  DNA replication origin
tcacgtactctcctgataactcttatgaagggggtacacgcattgttcccatttcacagaggggaaagcagaaacaaagactatcatttagccagcaactgtggaggtggctcttgactaggcagtctgacccggggccatgcccctcatggcctcgcagttgcctactgggccagcagctgaacgggaagcaaagcttgtgaagaaaatcggaaagtcttttagagaaagctgatgagatgacaagtcaccctgacacggtgtgtgggtggcctggagcaggaagtgcttacccgctggggtgcgtctcctcttggccgtggagggcagcaggctggccggtgctcacttggctgggccaggagcaaccctccactcccagcctatcctctgggtgtgcatgtgtgtgtgtctgtggttgtgtttctgtgtgtatgtgtctatggatgtgtgtttcagtgtgtggtatctgtgtgtgtgtgtgtctatgggtgtatctgtgtgtgtctgtgtgtggtatctgtgtgtctctgtgtttgtgtgtctatgggtgtatctgtgtatatatacctgtgtgtctgtgtgtctatggatgtgtatctgtgtgtgtctgtgtgtgtgcctatgggtgggtgcttctgtgtgtgtgtgtgtccatgggtgtgtgtctgtgtgtgtctctttgtgtgtgtgcctatgggtgtgtgcctatgggtgtgtgtttgtgtgtctatgagtggtgtatctatgtgtgtatgtgtatcctggtgtgtctacgggtgtttctctgtgtatgcctctgtggcatctgtgtgtctatgggtgtatctgcatgtgtgtttctgtgtgtgatatctctgtctatgggtgtctgtagtatctctgtctgtgtgtgtgtctgggtgtgtggtctctgggtgtgtgtggtctctgcatgtgtgtggtctctctgcgtgtgtgtggtctctctgcgtgtggtctctgtgtgtgtgtgtgtgtggtctctctgcatgtgtgtggtctctctgcgtgtggtctctgtgtgtggtctctgtgtgtgtggtctctctgtgtgtgtgctatctctgtgtgtggtctctgtgtgtgtgtggtctctctgtgtgtgtgctatctctgtgtgtggtctctctctgtgtgtggtctctgtgtgtgtgtggtctctctctgtgtgtgcggtctctctgcatgtggtctctcactgtgtgtgtctctgcgtgtatctatggctatgtgtatctgtatgtgtatctctctgtgtgtctctgtgtgtatgtgtctatgagtgtgtgatctcaagcaccaagagatctttgggggccccttctagagct

SEQ ID NO: 4907 - DNA, 1001 bp, Artificial sequence
  DNA replication origin
cctcctccaggcagaagcccagcactcgcgggcccggcgcggcctcccccgcggcgttgcccaggcagagcgcggcgaacaaccagcctaaccgacccgccgcagctaccgccgccgccatcgcctgctgccccctctcggcctctcgcgcagcctaccccgctcgccccgcgcctccccgggccaatcgttacggctcttcgcgcctcctcggccaataggcggtgggcgggggcgggccccagggtcggactaggctgcgccggggagtaaacaagtggcggccaggggcgggccgggggcgtggggctccgggccccgccgagtctgctgcggctccggatgcgcggggtggcagtggccgggaggacgcggggcggcgggcagggcctcccaagcccggctgtcctcggcccgtgcgcggcgcccggagtcccactcctcccgatgctgtcccccgcgcccggaggccgagccaattctctgggaagttcccggcttgggagcggagcggccggtcggaagaacctcgggtgctggcgcgcctgaagttgcagaccagactgaaatgtgcgagacatgtgcctttttcttaggaaaggccccaggtaccagaaaggttttcagcgcgccgacctacggggctaagagggctgaaataagaaccagtgactgagcgccgggaggtttaaggtttatggaagatgttcatcgcgccgtaccctactagaggtttggggacgtgggacacagcccctgcgttcccgccgcggaccccgtgataaatacacagacacacaaaatcactaccgccttgaatctggacagctacctcaggtggttaatatctaacaggagcagagtggagctcagaaagactcagcgtgggtgctgggttccggcgcgaccagcctgatacctaggtcagcatctcagccacacaagcaggcggcagttctgtcaggaattactacatctggtgattccacttctcatagctc

SEQ ID NO: 4908 - DNA, 1121 bp, Artificial sequence
  DNA replication origin
gcctgggggcggccgggctgctggcgctggcagcgctggcgcgaggcctgcagctgagcgcgctggcgctggcgcctgccgaggtgcaggtgctgcgcgagagcggctcggaggcggagcgtgcggcggcgcggcgtttggagcccgcgcggcgctgggccggctgcgccttgggcgcgctgctgctgctggccagcctggcgcaggcggcgctggcggtgctgctgtaccgcgcggccggccagcgtgcggtgcccgccgtgttgggcagcgcggggctcgtgttcctggtgggagaggtggtgccggccgccgtgagcgggcgctggacgctggcgctggcgccgcgagcgctcggcctcagccgcctggccgtcctgctcactctgcccgtcgcgctgcccgtggggcagctgctggagctggcggcgcggcccgggcggctgcgggagcgggtgctggagctggcgcgcggcggcggcgacccctacagcgatctcagcaagggcgtgctgcgctgccggaccgtggaggacgtgctcacgcccctcgaagactgcttcatgctggacgccagcaccgtgctggacttcggcgtcctggccagcatcatgcagagcggccacacgcgcatcccggtgtacgaggaggagcgctccaacatcgtggacatgctctacctcaaggacttggccttcgtggatcccgaagactgcacgccgctcagcaccatcactcgtttctacaaccatccgctccacttcgtcttcaacgacaccaagctggacgctgtcctggaggaattcaagcgaggtaacggcccgggcatggtgcaggggacgcccgtgcgagtgccctctccctgaaaaggggtggagagttatggaagccttctggaaagggtcccacccctgtggagagcagtgagacctctaaggtcccttttcaagacggtattggccttgcagcttggaatgaccttttgaaatacttaaaggccatcgatcagagtgggaggaatcctttagacagcgaacactttaacccccgcgtcaggatagccccccccccccatttgcagggaggggtatgtccgcttgtcctctaatcccccagctctt

SEQ ID NO: 4909 - DNA, 970 bp, Artificial sequence
  DNA replication origin
agacctgcggggggagactcatcaagcactttggccagtgcctggcgtgcatatgctgtgtgcttggcgttagcaggtggttcttactccgggacaggctctgctggtaggtgagctgtttgccaatccaggagcaaggggtgaatctggaattgcagatttctgttcttctaggcaggtcaccagacttccttttttttagggaaaaagtggaagactgtagctgtccttttggtgttcaaagcactcacgtttctagattctttaagaaaaagctcactctggtgtctggcttcagctggctgctgctttcaacagttgagcagtcaccaagcagagatttggagcagcggagatggaagggttgtcctgttcagaactaaaggcaacttctgtagttggtcatgatgctcaggatgaggctggtgaaagtggtctttcattttccaaaccgccagtgtcaggatcttcgctgccatggtcttgtctttcagatgcgatggatgagcttggtccagggtggttggggattccacttggggaagaataaaaaatgttcatgttcgttgggaaggagcgcagaggcaggatgtcccctggcgggggggcttgtgtgctgtgtaaggaacttgtacttgatcaccagggccatgagcatcaagcagcagcatcagttatttttacagatcagtaacaattgtggacaccagcgcagggagaccagcggtgtgagggatccaggtgagaggggatgataacctgaacaaggttcatggcaggcctggagaggagccccaagagggcagcagaggtggaattgggaagattggtatctggcagcagggctatgcaacaaggaggagcagctgaggatgaggcccagatttctggctgtgtggtggcggtgcgccttcactaagggccgggcgtggggagcaggttttggccattgaatttgtgtctgtgcagt

SEQ ID NO: 4910 - DNA, 2107 bp, Artificial sequence
  DNA replication origin
tttccctttttcagcaattgtaaacagtacatatttttaacttttgtgtctacatgttcatttctaggaggtagaaacaggtttttgtgtgtttatcttgcacccgagattttgctggactccctagttgtctgctttctgtagattcctaggatttcccacatagacaagcatggcctctgcatgagaatacctggatcctcccctcagggcttctgacttagggtctggacatcaggactttttaaaccttcctggtgattctgataagcagctgaggtggagaaccactgctctttgaccttgtcgtcagtgagcagaggtgccttaagcacaaaagcctagtgccaggaccccgcatcccgcccactctgcactcggcctatcttgctgtcggccggcatggctaacaggcgtgggccctatcagacagtccctggtgactgaagcatgggctcctctcggcccaggaaagacggctaggctgtaatggatagccagttttaatgaacagaggatactgattggtataaaaaggtgtgtttgtcactgaggtgtcctcattttctagatgaggagttgtcttctccatggtcttgaacgcctgcttcgccatggcaccagcgtctgggtgcacgctggctgtcgccacagggcaggagctgctcatggaaaggtgtgtgcccctagtgtgcagcactggtcagcttttccacatagtaacaacagccttgttctgggcctgagaaggcccccaaaggtagacgaaaaggaaccatggccaaatgcctatcaatcagcccggtacctaatgtaacccaggacccatgtgagggaggctgagccttcacctttcagcccttccctcagcatgtggttctcagtttagggcagagcttcttaagattcactttctggcgtttaggggcccagccccaccagcagtacaggcctacaccagtgtaatttgaaacgtacagacggtggaagaggaagtctagggagcttgggtccttagaccaccagggagcagggaagggatgggaagggctggggggcggcgggggctcaccttcctctgcttccctgtgggctgggttcagagctcctcagtgtcctggcctcccaggtgggatcaagcagggtgggtgcagctgcagcgttccaggcaagagctcaagctccagtaccaggaacataaggggacataagggcctcaggcaaactagggttacgggccactgccccaagagttgagtgggccacaagcaatccccagtgcccaggcgcttccccatgagagccgccagcaggcaacggtgtgccaggccggcctgagcggggccagtacacagtgggtgcgaggcttctctcaaatgcgcgctccagctcatcagtcttagggcttctgaggcaacctagtgggtcctggacttctgttgctgtggggcctcaaacctgttgagtagccacctcagatgaccagaacccacctccagagttcctatgaccaaagttgtctagagccgctccggacactgccagggttgctactgacaggaatggggtccccagagaaagccatgcccacaggcatccaccagctgcagacaggcccggcccctgcatggcctgccttggctgcaccttgtacatcctggatggcatctgccggccacgggctgagtccccacacacacagactggccctggagagagcaaggcaagccccctaacctgggacaagtggacactgaggactcccagacccagccctgggtggctccagcttgggactgctcccttaaggctcgttcttggccctcactctcctccccttcctggccctcatctggacccgcgctttctgctgccttgtggtcctctgctccagccctgggagggaacgcggctcccctgacactcgaagccagggaggcctctctctttgcctgctgggcccggtgccgctcttcagttctgccagggctgctgaggcggcacaggccagagagggaggaaccagggctgagggcaggaaccacagaggtgcagacgcgggggcggggcacaggatggaatggtggcagtgcgaaaggcgcggcgg

SEQ ID NO: 4911 - DNA, 1980 bp, Artificial sequence
  DNA replication origin
aaggctaacaggaaggtgttggcgaggctggttccctctgagggtggtgagggagaatcccttcatgcctctccggcttctggtggatgctggtgatctttggcgttccttggcttgtagatgtatcacccaactattgccttcatgtttgctgggcgttctgcctgtgtgcatgcctgtgtccatgtgtctcccccaactttttttttttttttttttttttttttgagacggagtctcgctctgttgcccaggctggagagcagtggcacgatctcggattactgcaagctctgcctcccgggttcatgccattctcctgcctcagcctcccgagtagctgggaccacaggcacccgccaccacgcccggctaatttttttttgtatttttagtagagatggggtttcaccgtgttagccaggatggtctcaatctcctgtccttgtggtctgcccgcctcagcctcccaaagtgctgggattacaggcatgagccaccgcatccggcccacgtgtcccctttcataaggacatcagtcacattggattagagcccactttaacacaagtcatattggtgaggggcccaccatacgccggtgtgacctcatcttaactaattacatcctcagtgactctgtttccaaataaggtcacattctgaggtacctggggttagtacttcatacgaatcttggggagatacaagtcaatccataacacacacgctcacacacacacagtctattcaatctcctggcgtgggattagaataagaaactgcattagtacgagccagcagtgttccttggtgggctgcatgggacccgtgggccagactggtgaagctgtgacatcttgggcacctgcggccttcgggagtgatttggtcttgtcttcaactgaaccagccgcagtcccaggcccaggtggagcctgtgggcctggagatgttcctgaaggcagctgctgagaaccaggagtacctgattgacaagtacttgacagacggaggggaccccaatgcccatgacaaggtagcacaggttgggtgagtcggctggcagcagctgcagctgcaggagcgctgccttcagtgtgttcaagtcctggcctaggaggctgcagggattttcactcttatgggcatgaatccagtggcacctgcagacggaggagagggagcggcccatcgcgtggtgggggaagtggcaattccattcagggacctggccctgggaaggggaccgcgtggggtctctaggggtggctgcactccctctgcctaatcttccatctctgccctcagctccaccgcaccgccttgcactgggcctgtctgaagggtcacagccagctggtgaacaagctgctggtggcaggtgccacagtggacgcgcgagacttggtgaggatggggaaaggcccagcctctggtcgacgcccagcttcacatcccagcagctgagtgcttgggtgcttttgttttgcagctggacaggacacctgtgttctgggcctgccgcggaggacatctggtcatcctcaaacagctgcttaaccagggagcccgggtcaatgcccgggacaaggtgaggggcacggtgctttgggggcctgtcgggaacacgggagcagacgctgttcctggagaagagagcacgtagtcccatgggttagggaggcctcaccaatccagacccagcactgacccccacttgctctcagatcgggagcacccccctgcacgtggcagtgcgcacccggcaccccgactgcctggagcacctcatcgagtgtggcgcccacctgaacgcacaggataaggtaaggcaggcgcttggtcttttccggctcggacagctccagaggagcagggactgaggagccccagccaggaccagaggtgctgtctgctcggtgacagcagccctgaccttcctgcatgaggagggcagcacgcggaggcagaagcttg

SEQ ID NO: 4912 - DNA, 1122 bp, Artificial sequence
  DNA replication origin
ggggatccgttgtccccctgggtgtcagctgatgacacagttgcggagcctgcagcacccacagggtgagggagcttgccagcactctggactgcaggagctttgaggccggctcccatcccgggcaccagccttgtgacatctgcccttataagacagctccctgctactccacagctctgttttctaagggttcctccaattttcccaactcagtactcatatcctgttcctacaggtaagtggagaaagagttgaagggaaagtgttgggatttggacatggagttcctgaccctggagcctggcctagtgactggaggaggggcccccaagaggctgtggcccgggagaagctgaaattggaagaagagaagaagaagaaagtgagagaggggcgggggccggggttgggggcagtggctaatccctgaggccggctgagcagtgaggcctggagggactctggtggggcagcctgagcagctggtgtctcctgtcggcagggcagagagatctcttgaccagcggctgatggctggcatggtcttgtcttctgccccagcttgaaagatttaacagtaccagatttaatctggataacctggctgacttggaaaacttggttcaaagacggaaaaagcgactgagacacagagtcccccccaggaaacctgagcccctggttaaggtgagtgggaggtcggggttagggcagtgcacacaccagggctccagttccagaggaagggcttggggcagagtgggcactgcaggccaggaccacacagccagtgcctggggagcccattaaatccactccagagcccccgcggatgtgtccgccagggctgccataacaaagtcccacagcctggacagcctcaacagcaggcatgtgtcacctcgctgtcctgggggctggaaggctaacaggaaggtgttggcgaggctggttccctctgagggtggtgagggagaatcccttcatgcctctccggcttctggtggatgctggtgatctttggcgttccttggcttgtagatgtatcacccaactattgccttcatgtttgctgggcgttctgcctgtgtgcatgcctgtgtccatgtgtctccccca

SEQ ID NO: 4913 - DNA, 1890 bp, Artificial sequence
  DNA replication origin
catggcgaaggtaacgggaaagctcccgaccggacccagctgcctcatccccacaccctgcaaggccaggcggcccggcggccctccagcggcgcgcggctcccggaacccagcgcctcagtcctcgcttggccttggacgccctcgcgcggaggcctcggggcacggccgggcgcaacaagccccgccctaccgttgcaattggttctcgagctaaggcctaggcgtttgattggtcagctttggcgagaaggcgggactagggcgacagccgcggacgccgagcggccagatcagggacgcggggcgggccctgcgtccgcccctcccgccgaggctgagcctgagacccggggcggatcgactgacgccggggccgggatggcgacgcctcggccctgcgcggacgggccctgctgctcgcatcccagcgcggtgctcggcgtacagcagacgctggaggagatggacttcgagaggggtgaggctgccgcgcggccctcgtggttctcaccaggccccggcccaaggaggaggcgtggggccaaggagaggcggatgaacggggccccgagagcttggggcttggggcttggggcctggtgcgggaaggcgggcgggacccacggttcccgtgtactgagagcctcccagggccccgcacgagctcggccaggagacacctgtcccgcgggcggcggggaagcggaagcactggtttccgtaaccctcccgagtagcgggggacgacctcccctgggagacacaagcctgctcaggtgtttgagagagggcccggggagcagaatctgcaccaggggcattgcacccaacctgaggggcatggagctgcaggcctgggggctgcgcggtgaaggagagcagtggcctttgtttagccccgggtgccaggcagcctgcatgctttaaagatggcaagagcttcgcacgggcagccttcgaggcagggcacagtatctcatctgtgggacccagagaggtaacacgtttggcccagattatacagagattatggtgccaataggaacagaggaaggcgggaaaccagggtgcttcttgtgagcgttgggaaccactgtgctgtgtcatctgcccttgcggatgcagccctcgattgccactgctgtgtaagcattctcatggaactcttcctttaccgtggttctggcacctgcctacttccctccgcccctcctaccgctgtcctctgcactgctgaagtggttgcctcagagggtctttctgcttccacgcttgccttcctacagggttttctactctcacatagcagccagagcggctttttgaaaattagaaatcacatcattccctgttatggcctacaaagctctgtagacccacccctgccggttctacttctcctcctcattttatttctcatgcttttcttcccccaatcactacgccgcagccacactggtcttgttttggtgtctcaaatatgcaagaccttttcctgagttaaggccgttggacttgctgtcccatctccttagaatgaacttcctacaaccgttaagctagctgatgcttttcttcagatcccagctccaatgtcatctcctcagagaccctccctaaacaccccagttctcaactgggggcagttctgccctttaagggactttgaatatctggagacattttgggttgtcacaatcaggagggtgctacaggcgtgtagtaggtagagatgagagatgctgtatacatggtacaatgcacaggacagctcgctacaataatcatccggcccgtaagtgtcaattgtgctgttaagaagtaaacattgccttatccaaagttaggccagttactctgatgtatccatcatcttgcttttttttt

SEQ ID NO: 4914 - DNA, 1305 bp, Artificial sequence
  DNA replication origin
ggcctcccacttggccccggggttcagtggtattttatacttgccttcttcctgtacagggctgggaaaggctgtgtgaggggagagaagggagagggtgggcctgctgtggacaatggcatactctcttccagccctaggaggagggctcctaacagtgtaacttattgtgtccccgcgtatttatttgttgtaaatatttgagtatttttatattgacaaataaaatggagaaaatgaaacgattgctctgatggggctaagatgtttgggctaaagcctttctgggtaccaagagggaaggctctctgggtggagggaggctggactgggcctcccccacaatcccagggcagccaccacttttgtggtccctgcctgcctgtgggaggggacagcccagctctagtgttttcccacagtggtggctgcggggctgggaacgagaccatggccatagccccttgggagccagccttggcttctggccagaaggagaagtcagggcactgggagtccaggggagaagcggagtggtggggggggtgccttcccagaactcaagacgggtagtgggaatgaggggccaaaggagtggaaggttgtggagatgagatcattgcttgtgtgaggatggggttctcaacctgcttaggggaggagaaacgacttccagccttctacccaccaggaatgctagggtcttccgtgccccaactagcgggggaaggaacttacatccagtgtgcaccagaccactgtcctggagagggactggcacagaacccaacctgcattctgtcgttcatgcactctttctaagccgatcaggcggtctcccctgtacacttgatcgtggcttgagcaggcagctgcctgggttttaactgggaattgagaaggctggggtccgctgaggagcacgctgcgaaggtgcgcggtccgcagacggcctcccggtgggttttgatcatgaagaccgattccgtaaactcagcgcccactgtggggccagggggttctgcacaaaccaaggccctgcccctgccctgaggtggagctacaggcaggacaagttgtggccacctgccccttgctggacttgtaaggaagagcagggtacggggaggggcgtctcgaggcctttccagccgtcactttgccgctgccccgggggcggtcggccttggtccggggtggtgccaggaagaggggctaaaaaccgtggagcgcgccccggcccgatggctcacgcctgtaatcccagcactttgggaggccaaggtgagcggatcacgaggtcaa

SEQ ID NO: 4915 - DNA, 2365 bp, Artificial sequence
  DNA replication origin
tcctcgggtaaggagccgagatgaggccgcgggcgttttggggggctggtctggggcgcagcccccgctctcccgcgccggggctctgggccgacagggggcgtccgcaggccgggctcgccacgctccccgcgccgccgctttgtttgcgttcaaatccctggagctgggggaggggagaacccggggggacccgggacggggtcttggcggggaccctttgtttgggggtgagcaggtccccagcttctgcgtctccgcccctggcacgggaaggctggagcaggggaagccaatcccgctggcccgcccaggccagggtccctggggcgcagtccccgagttgggaaggttcgtcagagtcgcgggagcgcagcgggtgccggccgtgcgcggcgcgttgccagcggcccgggaggaaccccctcgcgtccccgcccctacctccccccgtcgcctgcgcgcgccgccggagtccccgactcgacccgagctcggtccccccaccgcccctccgccagagggctggtgtttcggaggaggcagtgcgaggaacaggatgaggccctggtcatttccacgcccatcccacccacttcctgcctccctcttgggcaacaaaggggcctcgggaagctgggccccttcgctcccggcccttctcacactcctgccctgctgatgtggaacggggtttggggttctgcagggctattgtctgcgctggggaaggggacaggccgggaccgggacctccgctcgcagccggccgcaccaggtttcccctttggggctttcccgaccgcctaccccaccgcatgccctcgtcgccctaaggagtcttcctcccagaattaggtgttggcagggtccggagccccagtggctgcaaggcctgctgcctgaggttctttcaagaaactcaaacctcttaggcctgagtgtgtatgttgggcgggggtcccctttttatttctcaaatgatttcctgttgcgcagaggtagtggtgggtctggaggccagggagggcttcccggagcctgtttagccttcagccaactcaactcctccccgcttcccagggagacctgtggtcttttaggcagaggccaagtgtggggacttaggtccacctccaaagagaaggggaaggagggcaccggggctcctggaaggcctgatgaggagtcctgtggcctctcctgctgcgggcccctctggtttgctttctctggctgtgatttctgaccatgtcttttccctcagcaggacagctggcctgaagctcagagccggggcgtgcgccatggccccacactgggctgtctggctgctggcagcaaggctgtggggcctgggcattggggctgaggtgtggtggaaccttgtgccgcgtaagacagtgtcttctgggggtgagtgcctggaggggtgaggaggaagtcagggacaggctgctgaggagttgcccccatagtgtgctggctttattctcacgtgtgtggcacagctttctaagaaactcgagttggaagaacgggcagtgtgggttgggacctgggattagcctcctctgggggagctctgtccaactccccaccccagactgcctgcccaggtgtgggagggggagagccttctgcctcgccctctccacgcctcgcttcttgaattgtcactggcgctgggagcctaaagagaaactggaaccgggataaatataaactggaggctctctcccctggctccccaggcccccctaagacctcctactgccctgtacacatcatacactctggtggccctggaagtgtgtgtgtatgtgcacatgctcgcatggttgccggggcacagcggggacccagcagtgctccctgtgcacacacccgtgtgaaaggtgatgtcaggtgtttgtatcagccgtgcgctctggggacctgggatgagctcacctcccacaggctccactcgggtgccagtgaagccctgccatgccggtctgtgtctggatccattgttgcctgcaaagactaaggctggtttggggggaccctgaggacaggtcggcagccatatttggcagctgatgtaggaatcacgtgactgtataaatgtcgtagtgccctgcatgccgggtggcagcaagacttcccaggccccagccccatctccgctctctgagcctctggtttctccggacctccctggcctggctcacagcccagctcccctcctgccatccccacctgtcctagtggcctgctgtgctcgcatctctggcagcctggattggggtcctgctggagtgaagggtttcctgaggcagggagtactcatagccgtctgtgcctcctgctctgctgg

SEQ ID NO: 4916 - DNA, 1699 bp, Artificial sequence
  DNA replication origin
ggccccgcggctccagcctcacgcaagcccggcctcgctcacctattgcgcgcagctccagtccccgggcgccgccctcgcgttcggctctgaccgccgtccacccctgcccccgcgtcgccgcctgcccgcgctcgcccgccagccctccgcggcctctctgccaccgcccctccgtccccgcccggctccgcgcccctaggctcgggctccccgcgccaccacggcgggcgccggctctttctccagcgcggccgcggctctccgcccccttccccttgacgtcaggctgggggggtcgagcggaggccgggggcgggccgcgaaggctcgctcaggagggggctgcgacccgcagcgacctgtggacccgcccgctctccgcccgggggctcggacctccgcctctctgggtgcccggacctcaacccctccgggtgtccagcagccccggggctcggagtcgcgggctgcgccacagcgcctggagggaggtggggcgggggagggactccgggtatggccacgggggaatcacactcacccgatctttctgaagtgtcccccgaagactccgggcgggctgggctggggagagggactcccgaccgtgcagttgcaggaacgaccgcgggcgagccacgtcgaggcgagtatccaggggaggcacgctgggggaaccgaggcgtcttttggggcggaccagaggggtctgccgtttggcccccaattctgcctctttctaggccccgaggaccactggtccctgccctcaagtctggaaagggcttcaccagccaggaagacccttcaatcaacagaaagggcctgctcctgcttctcacgctttgggcaaagcgcctatccccagaaaatgactcctcgtgccactggaaggctgattaacaagtggcatgagccctactgttcagatgaaaggggctgtggggagccacgctgcagaaccaccgccaccttcagaaccaccagcctccgcccacagccactcctagaagcaacttgtagctctggcctcatgggcggtgcagcgtctttcctgccagctggtcctctgagctgggcaggtggttagaagaggtggtcctcatggaggacaccccacgggcacctggagacagatgctacctcctggctaggggcaaaaggcagaggtgaaggggcttgacgtcctgaggtttggaggtaactttaagccagggtgcagtcctggaggggaggaacacttcaggctgcgtcagcagatctggattataaatcagtccgacagcagcttttgttctgggttaaaacttggcatctgaaaagtggagaccagaaaagtggtggagataattgagaaaagcagcccagtttggtttcagtaacaatcgggtctttgctggtacacataatggccccttctcccttgctggccaaagccacgtttcccagctcttttccactaggaaaaagaaaaaaagctgtggccttggagatgctggagataatgaccatggggtgggcagggaaggcctcctgcttcagctgacaaggtgggagaaggtgtgtcaccctcgtgtttagtttattccccgtatctattcaagcggagggtaaactgagatgcaagtgccctcacttgtgttctgtgctttagatttttgcagcttgtcttgatgtacattttcttacttcaccc

SEQ ID NO: 4917 - DNA, 973 bp, Artificial sequence
  DNA replication origin
tccacagagaagagttaaaccaaaagagagggatgcaagggagggtgggcccacagatgcagagcggcagtgcagggggtggggatgggtgtgggtgagtgtgggtgagggtctgtgggggggatgactgggtgggtgtgggtgggggtctgtgtggggggatgagtgggtgggggtgtatagggggtctgtgtatgtgggtgagtgtgtgtgtgagtgggcgtgggtggggatctatgggtagggggtctgtggggggggtgagtgggtgtgtatgtaggtctgtgtatgtcagtgagtgggtaggtagatgggggtgggggtgtgtgggggtctgtaggggggtgtgggtggggatctgtgggtggggggtctgtgggggggtgagtgggtgtgtatgtaggtctgtatgtgggtgagtgggtaggtggatgtgggtgggggtgtgtgggggtctggggatatgagtgggtatgtgtgggggggtctgtgtgtatgtgggtgggtgggtgaatgggtgggtgtggatgtggggtctgtggagggggtgagtaggtgtggatgtgggtctgtgtgtacgtgggtgagtgggtggggggtgggaggcctgggtatgtgtgggtgtggggaggatgagtgggtgggtgagtgggtgggtgtcaggtctgtggggggaagagtgtgtgtgggtctgtgtgtgtgtgggtggggcgtgggggagctgggtatgtttgggtacccctcctctcctgggaagtatgtgtgatccattttacagatgagaacactcaggatccgagaggccacagttcataaggtagaggtgggtctgtgtctcagaagccagtgccctaacacactgccaccagctgaggtgtccaggccgattcccgggagcaccctgagctcttggccaccaccctctgtgagtgacagcctcccttctcctccccagctgtcctcgctcagccgg

SEQ ID NO: 4918 - DNA, 934 bp, Artificial sequence
  DNA replication origin
aggtcggccttctgagccgggcgtggtggctcacgcctgtaatcccagcactttgggaggccgaggtgggcggatcacttgaggtcaggagttcgagaccagcccgaccaacatggtgaaaccccgtctctactaaaaaaacaaaaaattagccgggcatgctggcaggcgcctgtaatcccagctactcgggagactgagacaggagaattgcttgaacctgggaggcggaggttgcagtgagccgagatcgcgccactgcactccagcctgggcgacagggcaagactctaaaaaaaaaaaaaaaaaaagaaaaaagaattcagccttcctgtcctgttcctcttctctccaaaaagctctgactgcaggctcctggcagctcagaggacgtcacttcacggggtgatgaaggggtcactggcagcccaaggatggatggaagggaggttgagcgcgcccgcacctccgcagtaatcttcctggaatcctgggagaagagctgctgggtacaactgacccttccagctcagctacactaggggtgctctggctagaggctgtgcatctctagccactgaggcagcataaccccttgcccagagggctgagacaatgttccagcacatccctgggtgaggtggaccatatgtctgagtcccaggtgctgtgactgcaaggagggagttcagagaggtgaccggtggggttgggttgtctgagcggcttcggcctggcttttgcctcagatgcctcctttgccttgaatgcttcccccaggccttagtagaactggagcttcttgtcattcccactccagccaaaatgtcacctctgcaaggggccttcctgaccacccaatccagagtgccccagcactggctgtcatcttgtcctaagtcactcctggtggccaccccctgatcttttccta

SEQ ID NO: 4919 - DNA, 1798 bp, Artificial sequence
  DNA replication origin
cggggtgagggagggtggcgggaattcgcacggcctcagaggacggggccagctagccgggaaaggaagcaggagcaggctccccaggcggcgcagtgggaggaccccaagagttgcgtccctagatccagggccgccaacgtggaacctaaagatccagttctggggattgagttccgactccaaaccaagcggccagctcacagccgccgccgccgccagctggggagctcgccggccaagtgcgcaccctcttcctgttagccctccacgtgcgcgccctcttcctgctcgccctccacgtgcgcatccacgtgcgcgggaattggctggcggaagctcctgcccccaggcagtcctgggtcacgcgcacttgtagtagcttgcatttaccaagacagtgagacagtggcctggcgcggtgtctcatgcctataatcccagcactttgggaggctgagacgggacgattgcttgagcccaggagtgagagacctgcctgggcgacatggcgaaaccccgtctctactaaaaatacaaaaattagcctggcgtgggcagggcgcggtggctcacgcctgtaatcccagcactttgggaggccgaggcgggcgaattgcctgaggtcaggagttccagaccagtctggccaacatggtgaagccctgtctctactaaaaattaaaaaacattaaccgggcttggtggctggcgtgcgcctgtaatcccagttgcgcgggaggctgaggcaggggaattgcttgaaccagggaggtggaggttgcaatgagccgagatcgcgccaccgcactccagcctgggcagcagagcaagacgccgtctcaaaaaaaaaaaaaaaaaaaaaaaaaaaaaaaaaaaaaaaaaaaaaaaaaagccgggcatagtggtgcagtgcctgtagccccaactacttcagaggctgaggtgagaggatcacttgagcctgggaggcgtaggcagaggttgcagtgagccgagatcgtggcactgtactccagcctggcgaaagagcaagcccccatctctaacacacacacacacacacacacacgtgtgagatagctgtgtctgtttggcagtgatgagcttccctttatgggagatttacataattattcataaaggagcgggaatgggcattactgttaagcatgttacggggtctcccagatgtgcatgtgcgtgctagtacaccacatcacatgtctcattagcattttaattcctcacccaggggtgtgttttttagcattaaaatgagcataggtcattccaaggacactctaatcatgggtttctgcacttgtgtgaatttggggattttcccttctgctgttcatcctcttcgctgcaggatgttctaactaggagcctgatgcagtttatgcaccagtgggcggtttgttctctacatcaatctggcaagttcattcccctttaaaggaggctatgaccactgtatctaaccgacctcattttccccctcagagactttgggtccatgttcttatgaaatgtggagggctgggtcattttttctggagctgcttcgtgctgagacaggaccagggcccgaaagtctcttcttgcctgatttaaagtgataggggtcatatcctccactgggataagttgaaatccttgcataactatcaatctaggaattgttgtaacctagaagacacagactttaaaggagcttaaacaagcaaggaccaaaggtcagtagtaataagatggctattgtaggtcccatgaaaggtagcagaatgaagca

SEQ ID NO: 4920 - DNA, 990 bp, Artificial sequence
  DNA replication origin
atgaggccagcgaagcgcccagggacaaactttcaggcagcgcccactctcggtctcgggcaattgcagggtccctccgagagcgaccgtctccagaaaacgcggccgccgcctgcctatgccctgagcctgaagagcccccggcgccgcccgccccgcactgggcccgccctccgggattggtgccctgctaggggtggttgcctgtgacgtcacaggacgcgcccgcttctcgctggagtgcgcaccgagcggcagtgacttcgccgctgctgtagttccccggctggatgcggtgactggtgccagtgctcaggcgcccgctgcccttgacctcccgccccgcgagccctaactcagcgcaggaggaccggctgccgccgccgccgccgccaggtagaccaggcctggctgggttaggccagaagggtgtccctggcgcaggtctcccgcggagggcagaactagaaccaggttcccggccgtttccgaccacacggatggggcggacccatgtgagccctcactaattgcaggggacgaagctgggcatatggggaaactgggggtttccaggcgagtggacggtgggatgggatccgacgtgcacacccacgtttcaggctactgtttccacctcacgtcgccgcccctttgcttatggactcttgcagagttggattgagctcggactgtgtgacatagtggttgttgcagaagccccagggccactttctgactagtaccttgggcacctgacgtcatccctttgagtctcagtgtcctcttctgtaaagtgagggcgctttacctgaggggattgctgtaaggttggaatgaacctgcatgtgtgtgtcatgtgggaagggaacagtcaatggggcctggagttctcttggagagctggtaaccagcctcgtccctgaggcaatagccagagagcgcctgtagtttccccacgcatggctgtttgcagggcctctggaggat

SEQ ID NO: 4921 - DNA, 1478 bp, Artificial sequence
  DNA replication origin
catgggcttccgccgggggtgcaggaggcgcgcaccctccggccggatgggggcgcactcagggcccaggaggccatcccacgggagccccgccagcccccgccggagcccgagctgcagtgccgcctacaagtggtgcgctggctgcagctgtggcaaccccggatcccgtcctcccgcctcgcacccatcagcgcggaccccgggggcgacgcagtggcgaagtggggctgtgggcccagcggtggcaccaggcggagaagcaccactcaaccccatccctgggctgcagagggcccagcgcgggggactccgagcgtcgggagcctgtggaagagaagagcgcgcgggcgacagttaaacaggccctggggcagggcgcgcctcgcgctccagggagccccgccctcccgcggcacctccgcagcaaccgccgcctgcactgggcgcgcgagagctgctagggcggtttctctgcctcgggcctgttgggcagggccggctaaggtgcgcgtgctcgctggttctaacccttctgttgggcgtttctgctgagaggcgggaggcgctgagagtctgtgcggaggtccgtggacagactgctttgctcgttgttgctcttcggaggcggcgatccccgaaggcgagctgaaatacggctgcaggctacaatttgcagccgacgattatggaagacggcaagcgggagaggtggcccaccctcatggagcgcttgtgctcggatggcttcgcatttccccaataccccattaaaccgtatcatctgaagaggatccacagagctgtcttacatggtaatctagagaaactgaagtaccttctgctcacgtattatgacgccaataagagagacaggaaggaaaggtaatgggggccgggagccggggctgcgggaggaggcctgtggatgtggagaagtacccctttccaggctgagggctgcggggcggatggtccggggctcggggtttggacgggggctagggggtgcccggctggggtgggagtgagtggagcggggcctggggagtggcggtatatggggtggcggggtgtggagtgagttgggggatgggagtggggagtagggggtgcatggggtgggggcgtgaatgggctgaggtggacggaatgaaggcttggggggtaggggcgtggacggtgtggggtggggagatggggtgagggttcaatgggatagaggactggaggtgggggtgaggggtgggggtgaatggggtgggggaaaggggtgcagaggtgaggggggcgagtcctgtcaccaaaggggctggactttctttcctggcaggctcagccgcacctgggatgtggaaaccttggcgggggcgagcacccaggtcattttcacaagcagcaaaacaaaaacaaaacttcagctggtttccaatcactcaccatgctgcttctttataaatcattttaaagtgatttca

SEQ ID NO: 4922 - DNA, 1438 bp, Artificial sequence
  DNA replication origin
ggggtgcaggaggcgcgcaccctccggccggatggcggcgcactcagggctcaggaggccatcccacgggagccccgccagcccccgccggagcccgagctgcagtgccgcctgcaagtggtgcgctggctgcagctgtggcaaccccggataccgtcctcccgcctcgcacccatcagcgcggaccccgggggcgacgcagtggcgatgtcgggctgtgggcccagcggtggcactaggcggagaagcaccactcaaccccatccctgggctgcagagggcccagcgcggggggctccgagcgtcgggagcctgtggaagagaagagcgcgcgggcgacagttaaacaggccctggggcagggcgcgcctcgcgctccagggagccccgccctcccgcggcacctccgcagcaaccgccgcctgcaccgggcgcgcgagagctgctagggcggtttctctgcctcgggcctgttgggcagggccggctaaggtgcgcgtgctcgctggttctaacccttctgttgggcgtttctgcggagaggcgggaggcgctgagagtctgcgcggaggtccgtgcacagactgctttgcctgttgttgctcttcggaggcggcgatccccgaaggcgagctgaaatacggctgcaggctacaatttgcagccgacgattaaggaagacgacgagcgggagaggtggcccaccctcatggagcgcttgtgctcggatggcttcgcatttccccattactacattaaaccgtatcatctgaagaggatccacagagctgtcttacgtggtaatctggagaaactgaagtaccttctgctcacgtattatgacgccaataagagagacaggaaggaaaggtaatgggggccgggagccggggctgcgggaggaggcctgtggatgtggagaagtacccctttgcaggctgagggctgcggggcggatggtccggggctcggggtatggacgggggctagggggtgcctggctggggtgggagtgagtggagcggggcctggggagtggcggtatatggggtggcggggtgtggagtgagttgggggatgggagtggggagtagggggtgcatggggtgggggcgtgaatgggctgaggtggatggaatgaaggcttggggggtaggggcgtggatggtgtggggtggggagatggggtgagggttcaatgggatagaggactggaggtgggggtgaggtgtgggggtgaatggggtgggggaaaggggtgcagaggtgaggggggcgagtcctgtcaccaaaggggctggactttctttcctggcaggctcagccgcacctgggatgtggaaaccttggcgggggcgagcacccaggtcattttcacaagcagcaaaacaaaaacaaaacttcagctggtttccaatcactcaccatgctgcttctt

SEQ ID NO: 4923 - DNA, 812 bp, Artificial sequence
  DNA replication origin
gggacagggacacagccctcagaaggctgcacctgggacacctgtgccttggtgccaccctttcctcaccccaggtcgtgtccacaccctctcgccccttgtcacctctttgattgtccggacaacctcaaactcagccgaggtatggaagtcaaccccttccttgcgcagcaggagtcggaggtagcgggagacgtcgcggccggcaatgtccacccgcatgatggagtgaggcatggcaaagccctcatagatgggcacagcatgagtgaccccgtcccctgagtctagaaccactcctgtcgtgcgtcctgttgcgtacctgtcaccaggtcagcatcccctcacctcagccactgaggcacggggacctcctcacccaggggaggaaccctggcacatctgcattatctagtctgaagagaggacacgagggactccctagaggaacagtcatcaaggggctgtttttccagggaagtcagaccctggtcatggcaagcaggacggcacagggaggacaggactcagggaggccaggcttagggagcactcacagactgagcacagcctgcatggagatgaacagggccggcacgttgaaggtctcaaagaacacctctgccgccttctcccggttcttactcgggttgagcggggcctccgtgaggagcacaggatgctgcgagggacgggacagttgtaggcatcagaggaggcaacttgcaaggccctaaaaggctctttccagagaaccacacccgctggcgcacaggcagctcagcctcctacccctcctgagggccccatcc

SEQ ID NO: 4924 - DNA, 1101 bp, Artificial sequence
  DNA replication origin
ggagggggacctcttcatcggaccaaaagcagaggtaacaccgaggagcctgcctttccctgggggtggggtcctcagttgcaggaacatggcatgtgttcttgggcctctgctggtgacctcccgggtacctcctccaggctccagctgggaagtgctgtgcaggggcacctccccctgagatggggcagcagttcctcttctagggagcatgggtagagctcatcgtgtcctgtcttttagaagctatttggaagctacagaaccaagaactgatcaaaaagtgatataagagtcagaatcacacacacttcacgtctgctctaatgagggccatggggccgcctctcacagtgaagccggagtgtcccaccaaggggctgcatggcctgatcagaccctcaggagagcatgtgtgggtgtggggagagcagcaagctgagcttggccaagggcagtttaggcgcctgaggagcattgtgtcgggtgccggggcgtggggcatgcgtggttctgggcccagaaaggggaggcctgagctggaggtgcagagggtgggggtctcgcagatggggtccgtaggagccgaggtggtgagaggagctaagtggtgctaggtgagaaggggcatggctggggggacatcgaagggcaggtggaggcagcatgtcagtgcaaacaggggactggtgaggaccggccaaagggctggggggagaggcgtaggtcagggggcacaggtggcccaggaggggccgtgttgggcggctgcaaggtgccggcgctggccagaggggagctggcagagtgtgaggagaatgtgggggatgtgccggcagtgagaatggggaagaagagagcctgcagattgcggggcacactgccaccctctctgatccccccagctgaagctagctgggctctaagagcctaagaagctggtgggcaggtgagcccatgctgagttcaggacccgccacagaccctgggacacccagtgagcaggggtggttctggtcagggcaggtgaggttctggtcagggcaggtgagggtcagcttccaggagggcggaaagcagccgctgagcaagggccgggtg

SEQ ID NO: 4925 - DNA, 1692 bp, Artificial sequence
  DNA replication origin
ggcccctgctaccctgaactgtgtaagtggagaaatcatgatctgacttattttttagtaatcattcttaaaggtatgtatagctcacaattattttaatgtttaatattaacgcatttggggtccttatgtagatggttggtgatgttttcgtgaccgggaatatgccataggaacttacctcttgtctatagcagttagcctatgggaaaattggtttccttactgcacgtcaagttgcagtctccaagaacctctcagtgagctaagtgaggactcactgcacccgcaatgcacttctgcctttctggcccttgggaggctcagaccccttcctgtctatcccagcagccgcttccctctgcgcagaggagaggaggcatcagttaggcgcttcccgaggagggttaccaaaatccccagatgtgcctgcagggccccctcctgaccttcccggcctggtgctcagggtgtgggggtgtggagggggagcactggggggctggggggagggcagctgcggggtgacggaatggggtggcagagacgaaggggtagagtaagatgagggagatgagggccgggataggagaagggaggagggcagggacaatggtgtgggtggggaagaataaggtggagagagtggggagaataagctgagggagtggagtggggacaaggaaggtagaggaatggggggagggaagtggagaagcgggaactatgtggtgggtgggagatttgaatggaggagggggtaggaggaggtgttagaaggaggagggtgaggggagggagtactgaagtactgatgggccaggaatgagccccaagaggttggttcagcccacttgttccaagagggtggggaagaagaactgggtggggaatgggtggctgcgtggagagctgggggaggggagagcccattccttccccagcatcagcagcatcaacaacgggtgtaacttaccaactggtttctgctcaagtcagcacttactgggcacctccccatgccaggcacagtgccctggtgggcaggtacaccccaccatgtggccctcccagagctctccactgggggttgaccttggagcctgccctggtatctgtgctccagccccttcgctatgagatgagcaccaccttttccatttctcagattgaagccagcggggaggtggggagagtggggccctggtcaccccggaggacctgccagctgtccaaaggtctctgagtgcttcgccagggcaggtgccccaggagaggaatgccagcaactggggtgtggcctgtgccacctgacattcgcctgcccggccctcacaacgctgggagtttcccaggcatggtgctggggagctgggtccagctgggcttcaatacttgtcctgcctggaccttctcagagctttggcttcctcttcttggcaatgaggctgataatttaccctctttacagagccattgggtggtccgttcagcagcaaacatttattggacacctgccgggtgccaggccctgtgctgggctggatgtggggtggctgtagggcagcaggtggctggggtcctctgcgcttggaaggagatgcagctgccccagcctgggcatacagcaggcacagcaagcataccagattttccttgaattctcaacaggttgcacatgcacccttgtcc

SEQ ID NO: 4926 - DNA, 1139 bp, Artificial sequence
  DNA replication origin
aggctgcgctctcacctccagcttccacgtctggcgcacgtagtcacgcaccatggcgtctcgcaggcagtcgaagacccccggctgcggctcgaggcccgacggccggttgcacggcttgcgcaggttgcagggcagcccgtcggggtcgcgcgagtagaactcgcagagctctgccggtccacagtgcgctttgccgccggcaatggcgtaggtgccgttgagctggcgctcgatgggaaagtggtggaagcgcacatcgtgcacgagcgacagcacatagccgcccagcgagcgcaggcactggcgcagcaggaagagcccgtccgccatgcccgccagcttcaggtgctcctcggcctcggcacgcgagatgctgccgtagaagaagggcaggtgcgccgcggggtctggcatcgcccctgggcctcccgaaacctgcgggttcacagagggtcggaggcacgtcagggccttcctgaacctggtgcgttgggcccaaagacggcgcgagagacgccaagtggagggcatcagtgccgcagactgagctcgccaagggggcagagcctgctctgtgccagagtcaacctggagagaagccgcagcctgctgggcacagatcgagaagtcccaaacccccatctgactttccagagacattatgtggacgcccaagcacgccaactggtccccaagcacccacacctgtacccatctcttcatgtcccaaccacgtgctgaattattgtgtttcaggcccggtgctggggatatgcacgcttgaggcaggcgcggtcccaccccgtcctcccgaaggcaacactctaaggagggagagccgtgagataaactgagaaagaaacaaaaataataattacagattgaggtcagcattacaaaggaaataagtggagtgacattaagagagagaagaggtggctctagctaggatggtcaccttctccaaggagctagcatttgaagggagagctgaaggaggaggagccaacttttcaaaaagcgcgcgggacagcgcatcaggcagagaggactgcatgcgcagaggccctgaggccgcacccagctttgctcacccaagggccctacccctcagcctcccttgtcccttccgctga

SEQ ID NO: 4927 - DNA, 1549 bp, Artificial sequence
  DNA replication origin
ggcccaacgcaccaggttcaggaaggccctgacgtgcctccgaccctctgtgaacccgcaggtttcgggaggcccaggggcgatgccagaccccgcggcgcacctgcccttcttctacggcagcatctcgcgtgccgaggccgaggagcacctgaagctggcgggcatggcggacgggctcttcctgctgcgccagtgcctgcgctcgctgggcggctatgtgctgtcgctcgtgcacgatgtgcgcttccaccactttcccatcgagcgccagctcaacggcacctacgccattgccggcggcaaagcgcactgtggaccggcagagctctgcgagttctactcgcgcgaccccgacgggctgccctgcaacctgcgcaagccgtgcaaccggccgtcgggcctcgagccgcagccgggggtcttcgactgcctgcgagacgccatggtgcgtgactacgtgcgccagacgtggaagctggaggtgagagcgcagcctggggcgcggggtctggaggggcgtggccgaagaggggcagtcgagggttttggggggataggagggaggaaaaggtcgtcttccccattcagtcccctttggaagctggagaggtggggcactggttggggaagaacctgaaaggaggcctcagaggcaggggctccgtggtggcggtcgccttccgcaggctgagcgatgctatggtgctctactatgccagatgggaaggtagagggacgcactgggccgggcgaaggcgaggcttggaatgggggcggggctgagaggagggtgcgcggggctagggtgagcccttagggtagggtggctgttggggaagatgggcagtagtcgtccacagcctgagtgacaccaccatgcacaactacctgaattaggtcttcaagctggagatgcgcttggggccgcgctggaaggtgggggtggttcctccctagctggattggggaggggaccacggagatggcgcggaggtagtcctcgaaaacctgcctaacacgcgctagggacgcctgggtggggtggggagtcctctgggacagggctcccggaagggggttcctgtggcgagcacttggccacacctacagacctcctcgcctctccttttctagggcgaggccctggagcaggccatcatcagccaggccccgcaggtggagaagctcattgctacgacggcccacgagcggatgccctggtaccacagcagcctgacgcgtgaggaggccgagcgcaaactttactctggggcgcagaccgacggcaagttcctgtatgtggggcccgggatttgggtgcggtgaggattggggctcgttggcagggatcctggggactggggcagacgtgagtgtgcagttgggccgtaagggtgtccctgtgctcacatgtgcaagtgggttgtgtgtttctgatgtgcaaagggacttgcacatggggaagtagaggtagtgactaggaaagcctccagactcggtcccttggcctggcttggaatcccgcttccgccacctgctggctgtg

SEQ ID NO: 4928 - DNA, 897 bp, Artificial sequence
  DNA replication origin
caaactttactctggggcgcagaccgacggcaagttcctgtatgtggggcccgggatttgggtgcggtgaggattggggctcgttggcagggatcctggggactggggcagacgtgagtgtgcagttgggccgtaagggtgtccctgtgctcacatgtgcaagtgggttgtgtgtttctgatgtgcaaagggacttgcacatggggaagtagaggtagtgactaggaaagcctccagactcggtcccttggcctggcttggaatcccgcttccgccacctgctggctgtggcccttgggcaagtagcggactgtggttgcctgcctcagtttcccctccttcaatcaacaaatatttactgaatacctactgtgtaccaggcactgagcacacggcagtgagccaaaaagacacagtgcctgtcctcatggggcaggtagacaagaaaaggaatcaataaaatagagaccctgtcagatggtggtaagcgccgtgtgtgcaggtggggaggcggttgcaattttagattaggtggtcagaagaggccttcctgagaaggtgacttctgaggaagggaaagaagctgaggagtgagctgtgcagctttcagggggaagggtgttcctggaaaatgcaatggcaagtgcaaagatcaggaggcaggagtctatttggcgtgttccagaaacattgtggaggccatgtgcctggagctgagtaagtgagggggagaatgggaggaggtgagggcagggcggggactttagcttttcccccaagtgaggtgggatccccgggagagtgttgaagcagccccctctaactgtcctgtggttgacagcagtacctcccctcaggatcctctatgaggattacatgaattaatacgtgtgaatc

SEQ ID NO: 4929 - DNA, 1391 bp, Artificial sequence
  DNA replication origin
actgcaggacctggggtggggctgagggtggggaagagccggcgtggagggctcccctgggcagcgggagctcaggcacaggcagcctcagccttctgtgtgctgcctgggggcccttccaccttgctggccaggctgtagtaacaggctcgcatgcgctgctccacggtcaggaagtcggggcgatcctcccacctgtggggcgtggggtacatccaggctgctgaccacgcccccaggacccagcttcaccagtgggtgggcatgcactgtgcttggctgaggtagacttttggggctcagaaagtcagcagggctgttggggtggcgggacattgggtggtggagaggactctggggtgtgagagcgttgggcaatgccacacagcctaaggaggcagagctgcccacacacagggtgctgggatgacccctctaccgagcgttgaccagtgaggactcaggggactgagtggacttggtgtcagagtggcaactattgaccacggggacctgggatatagaaagctgatgctctgtgcatgcacctggggccagggtatcagtgtgctggggcttagatgagagggagtgcaaggctggtgatcagcagaagcctggagcatggcagtgggtctggccagcggggagcggcagtattaacggtactgtgcatggggtatccatggactgtgttggggtgctaggtgctagcctctttgggtactggggtgtggtgccctgggtgtttcctgatggaggtggaattaacacatgtcgcaggagggtgggccagccagagagggtgtctatctgttgggctgcttgggtgttggggtgtcagcatgctaagtgctggccggtggggggtcatgcgttacagtgtccacacattgcatgggcagtctagggcgtccgcttgtctgggggtgtgttgcctgttgtctgatgggaagttgggatactgatggtgttaggagttgagatgtctgaaggttgggcttcaaccaggcagaggtgggggctggaatagatgagtatttggtacctcagtgctcacctgtctggtagttgggtgctgtgtgctggctggtggggactggagtgttgggtactggagaatcatctcatgccctgagtgtcagtgtcataggttgagtagcagagtatggacctgtttgcgtgttgcagggtccatgtgttgagtgatggctgaggttttagatgctgaggcacaggcccacaggtgggatggcagggtgtggcacactggagcaggacagcaaaccctggtgtgttggagagctgggtgtgggggtagggggcagctgcaaaggctatgaactgggtgaagggctttgggtgagatgacattgggtagagttatattg

SEQ ID NO: 4930 - DNA, 1666 bp, Artificial sequence
  DNA replication origin
ctacgggcggccgcaggttccagcccggccccggcggacgtggagacggcggcggtggtggctccggttgctcctcctcccgcccgcttccccatccctgccggccgggggccgccgcgctcgaggtccggcgcggcccttctcggcgaggcggcggcggcgcggaagccgtggtccgggctctggccgcggcgccgggagcgacaacggttgcgagcccggggctcgatctccgagcgtgggcctgggtccgtgcgtgcgtgtgagcgagagtgtcagtcacggtctttgcctgggcatcgcctacaagcagtcggagcggagaggccgcgggtcaggcgcggcgggcggccatactggaaacgggcacggcccgcgagccctgagcgctggcctgcgaggggcggggcgcggctctgggcaccgcccacgctgtgccgacacctgggctgtccggcggtcagtctgtccgccccggagccccctgggccccacctcctcgtcccgctctcggaggcctgcggcttcacggccagacagaaccaggacagaacaaccccagcccgttaccgctacctggcgcaggagaaggagggaggcaggcccaggtccagctgccaggacttatgatggcggcttctgcttcgcggaggcggtgtcggcaatcacgtggagacggggcggcctcgccgcgcagccgccgcgttgcgtgggcggggcaggggcggagttgcggggcgctaacctcttctccggcgcctgggcaatcctccgtgctctgtcctacagtggtagagccttccaggggtgtgagtgcgcatacagaccgcgagacgagcgcggaaggtccgttccagtgactcttcctggtggcacccccacctctcgaccgctttgacgtcgagaataccccgggcctgactcagttcttgatggtgcttccttgaggatggtggcccgctgaactcatccttgggtcttccaaatcatggtacccaggaggagcttgatggagtcctcttgccttggcttgtgcccacattggcgcggaacacctcgtgtgcagaaagcgtcggtgactctggatggagaaggcaggggcaaacagactgctctttagaatatccagtagccggcttcctctctcgaggaagaattcttttttttcttttctttattttttaattatttatttatttttgagacagggtctggttctgccgcccaggctggagtgcagtggtgcggtctgggactacaggcacccgccaccacgccacgccaatttttctttttcttttaagaaacgctgtctcactatgttggccgagcaggtctcgaactcctgggctcaagcagtccgccttcctcggccttccagagtgctgggatcacaggcgtgagccactgtgctgggcccggaaaaattcttaagacgtctgttaccttcacgagccatctcgcgcctcttagatgcccttttcatcttaggttgagcttcttggtgcgcatggctgttgtctccaagacttaatttaagctcttggagggggtccttctttactcatcttagtaacttcctcccagcttgtagcccagagacattttactttccttagctgtatttgttgagtgagtcgatatatgtgtaaggccaagtctgccc

SEQ ID NO: 4931 - DNA, 1784 bp, Artificial sequence
  DNA replication origin
aactggaattatgttactgaagaagtgtaaggtgactattcatgtctacatgagatcgtaaggaagagagactcagcagacacagccaatggtgggacccacactgcaaaacctaatgatgattaaacagtctgagaggcttaagatgctcagagaaacaaaggaaaggacagaatccacagggcagggagaggatattggggaaaataaggaagcaaatagaaataaaatagccattaaggttaaaacactccctaggcaagttaaactagatgactagatagaggacttgtagtttggaagatgattctaaggaaatcagaccaaaacacagagaaagagcagaaattatgaaagtgaaatcaacgtaatgtgaagagtagaatgacaaattcaatataaatctaaatagggatttgaagcagagaatagggagagtgagggagaggcaacatattgaagagataatggaggagaattcaccagaattgaagaagggtgagtgctcaaactgaaaaggcacacgaattatgagcagaatacatgaaaataaatccacctgcagtcgcactgtagtgatgctgaggagtgtcaaatacaaagaccaaatattaagattttcttaagaaagggaactaatgtaagttactgagaagctatatcctgtcttttctgctgggctggtgggctggtggctggtggctggtgggttggtgggctggtgggctggtgggctggtgactggtgggttggtgggatggtgggctggtggctggtgggttggtgggatggtgggctggtggctggtggctggtgggctagtgactggtgggctggtgggccggtggttggtggcctgctgagctagtggctagtgggccggtgggctggtgggctggtggctggtggctggtggctggtgggctaggggctggtgggctggtgggtggtgggctagtggctggtaggctggtgggctggtggactggtgggctggtggctggtggtcttcaacttccagccagagaatgcagcaagaactgagaagtagccagttactctccaagtgaaggttaggctacttgagtgagacatttagaccaagaagaaggtggcaacttcatccaaaccactctgcaaggcctcgttgttaagatatgttgataacgtgggcttgggctttcattctttaacatgggtgggcatgcatgtgcgtgcatgtagggcagtggtgttgggcatcttaaattatctgcaatccatctcctactttttagtaatgtacataaaaggataatgaaagtctcccaaagcaaaagttctcaatcctagctgcaggtgagaatacactgacgcccaggcgggcccatgtttaaactctctggagagtgacatcaatgatatagatgagtctgtgtcacggggcctcctcctctgtccatgtcctgaaggaactcagccagtgtgcctgcaatacgtgtcaactgcctctctgagcatcaagtcccgtgagggtccctgagccgtgatggggttgctggtcccctgcgttctccaccctctcgtaatcatggttgtgtccactgcatgcccccagtcctgttgtaaacttaagcttcaccacaggcagggaagaaagacactttctctttagacaactggctcggctaaaatgtaaatatgacctttgggaactgctaacctgaccacccgagggttgattccagtaaaaagaatatcttcatcattttcacttgcagaattacaaagacatgacaaacatc

SEQ ID NO: 4932 - DNA, 1310 bp, Artificial sequence
  DNA replication origin
ctggctagggctgcggcgcgcgtggagggttcgctgctggtttgccgccgggtcgggctccgtgggccggggcaggaggaccagcacctgaggccgggcccgcagcccgcgacttcacagccaggcggcggcgctgctgctgctgcggggctctggcgcgcagcccggcgggacagcggggcggctggcgccgggggccggggagcgccaggtaggtgggccgggccgggcaggaggcgacgcggccgccgcgggggccggggccggggacggacagcgggcgcgggggcgcgtccaggtccccgctggggcggatgtggacggcgcccgcggttttcatggaaattgcactgcctaacggtgccagtggtccacctgcggtggcgtcttttgagaacaatccgagcccggccgacccccagccccgtgaagacgcggccgccccagcagggagccgggtgccgagcgggcgcgtggccgcgggacgcagacgcggtgcctgcccgatgcggctccagggctgggtctacgggctcctgaagctggaggccttgccgtgtttggggtggaaacataaccgggtgaaagtaaacatgcatctccgtgtgggaaatctggtctccatcctcgaaactcttccattttctgcctgcctttagaccccgacaacatttctagcatctttgctttctatattttatttctctctggctttgctagtcaattaattgaggcctgagaaatgtgcagggatctgtggctgtctcttgaaaagccagccaggaatgggtaggccccagaagacagacgttcaaaatgtcagaggtaaatttgtgtctttgtgggcgaaggaagggaatgttgatggtctcgcttcccttcccctgtcgcctgccctctgacattacataatgatgggttcttcctgccccgagttcatccgtaatgacagaccatgaaaatgttcctctgggtaagaaagacctatatgtggtagagcccatcttctcttttgctttgccactgaatgtgtcttgtgttgggaacctgcctaagagtggaatttgatttgtcgcctgcccctcagggcatttaaaccaagggaatgggggtggggtggcgatttgggtgttgcagagaaattctgactggtccatctgttcacagtgggttgtgtggaccatggggaagccagtggggttgaggacagagtgggttgacttcggtgtgaatcatggttctgccgcttgctgactctggttcttatctctaaaaggtgagagcagagccttttttgctgagtttgtttt

SEQ ID NO: 4933 - DNA, 1011 bp, Artificial sequence
  DNA replication origin
atgtctgtccccttctgctgaagtgctctctctgtcatgcagctgttcttcatgtgtcctctgtcctctggaagatgacttcctgagggagaggccacagcacatatgtctgtgtcccctcccctagccccagcccagggctcactgagggtctgtggtgggtcttcaaatctgtgcatcctcagtaggaagcatctgcagaaaggaggagtgaggtttgagaacctgatattctcctcttacagaagagggcattggggcccagaaagggcagtgacttgcccagagtcttgcagcttagctggggcatggctggctgtggagtccagcctccaggcctccctctccatgaggtgctctttcctgctgccctgagctgcacttctgcttgccacagtgtgggagtgccctaggcaggagaaaggagtgtattgtaggtgcagtgtagagtgaggagggcagtgcgggtgcagtgtagagtgaggagggcagtgtgggtgcagtgaagagtgtggagggcagtgtgggtgcagtgaagagtgaggagggcagtgtgggtgcagtggagagtgaggagggcagtgcgggtgcagtgtagagtgaggagggcagtgtgggtgcagtgaagagtgtggagggcagtgtgggtgcagtggagagtgaggagggcagtgtgggtggagtggagagagtggagggtagtgtgggtgcagtggagagtgtggagggcagtgtgggtgcagtgtagagtgtggcgggtagtgtgggtggagtggagagtgtggcgggtagtgcgggtggagtggagagtgaggagggcagtgtgggtggagtggagagtgaggagggcagtgtgaggacagtggagagtgagaagggcagtgtgaggacagtggagagtgttgagggcagtgtgaggacagtggagagtgaggaggacagtgtggggacagtggagagtgttgagggcagtgtgggtgcagttgagagtgtggagggcagtgtaggtgc

SEQ ID NO: 4934 - DNA, 1527 bp, Artificial sequence
  DNA replication origin
gcggcggcagcggcggcgcgcgggggcgggagggggcgcggggcggctgcgcggagggcgcgggagttgggggcggcgccggcggccgggctggcggccccgggctgcgggagatccacctgctggtaaaggagcctactgcgccgcggcccggccggagctctgtgcgggggagctgttggcgcctctgggcgcggggccggctccgggagcggctgggcctcgggggcgggcggcggggcgcgggccgggccgtcctcccagcgtccctgccccgcaccgcgcacccctcggggtcgcgcgccctctctgcggccggctcggcgcctggtgcgttcctggcgctccccggcgtggcggggctcggcgactttgggggaaagtggagcaaagtgctgatccggggggtgcggagggggagggacagctgcctgtgggacccgggggctgcgcgggagtcggcgctttcgcgggggccgcggggcaggtgggcggggccggacggtccgaggcgcaggggcaggggctgctcccgaggggaccggccgtgcagccttcgcagggaattttcacacaaagtgaagggctgcggggcccgcgtgaaagagcagcccccgtttccccaggcctcagctctctccgtaatgaggaagctgcagtaggaccctgaggctgggtctcggtgactccaccaagtgtgccaggtgacatctcggaggcgagcttttctgagctggcagtcgagccacttgcacacccgcctttattcctcgcaacagtgtgtttctctggagcggtttcattgcctacattccgcattggaaaatagaagcaggcacaatgtatgctttgaatgctttccacgtattttgctgttgtgcttttgctgttggacagattatttgataaaagataatgacagtcgttcgttggaacgtagactgtaaatttagaataaaaatatgcgttttgtggtttatgtttctttttctgaatgtttaaaaaacagtttgatgaacaggttatcttgacatagatttctttaacccacacgtgtaaacccgaaaacgcactgggcgatgacattacgtaagctgtattaaagaaaactactgacccgtttataaatggcaaataaatgaattttgccacaattgtggtgtgtaaagttatataggcttacgtcatggattttattgattccagatatcagggattattgtgcctttcattcttaagtcacctctaccctgtctgtgggatgctgattaaggaagatgccaaacgttcggcaaagtgttctcagccgtggactatattgagtatttcagagaacactttaaaataagtaaaggttttgtatccaataataaaatgaagactgaagcccttaaaggattgctaacaaaacagtctgatgtctagagttgaaagttccattcacctttgggagggtggagaaatgactagcaattttagccactacctttttttgttgttgttaaagattcaaacgtgttagattat

SEQ ID NO: 4935 - DNA, 994 bp, Artificial sequence
  DNA replication origin
ctcctgcctcagcctcctgagtagctgggactacaggcgcccaccaccacgcccggctaatttcgtgtgtgtgtgtgtgtgtgtgtgtgtgtgtgtgtgtgtgtgtgtgtttggtagagatggggtttcaccgtgttagccaggatggtctcgatctcctgacctcatgatccgcccacctcggcctcccagagtgctgggatgacaggcgtgagccaccgcgcccggcccctaggggtatttttaaggtggaaccgaaagaactcatggatgggttggatatggggagtgagggaaaaggaagcatcaaggacgcctcttggggttgtgtcttgagcaagcgagcagcctgggccagcatttactgaggcggagggaggagcagggagattgagaagcctgcacgtcaccaagcagagatgtcaagaagacctcggggcgggggtggggggggggggcggggggcaggggcgtgggcatgtgtgaggctggggctccgaggaaggtcttggcgtggaatataagttgggagttgtcagtagaggcattttccaaggctatgagaatgtgctgtagagaagagcaggagctctaggatgaaccctgatgggcatgatccctagggattgggtagaagaacaagcgaccagaggggcgcggagggaggctgcaggcggctttgccagcaggatttgaaatgaggagattttatcagggctaactcaaagggtttgcatttcaccttttgccccctcttgcataaatggcgtcatttgaaaagagaagagacgggaaggagggggagtcaggaacgcgggcgaagcgcatctgcctggttctggtgagaccagcccggcaactgtcaagtcatccctgcttaataacacctgctggaaggacaaaggaaagagctgctggcaccgagtcacatgtccacacaaaccacagagcgggccgtagatgccaagcccttccccttcccaccctgtacctg

SEQ ID NO: 4936 - DNA, 761 bp, Artificial sequence
  DNA replication origin
ccccagcacgcgaaacctggccctcggaagctggcggagcgcggccctcaggactcgggggacagggcggccagcccggccgggccgcgcaagagccctcaggaggcggccgccgcgcccggcacgagagagccctgcccagccgcccaggagccggccccgagtgaggacagaaaccccttccccgtcaagctccggtccacctccctctcgctcaaatacagggatggcgcctctcaggaggtgaagggtgtgaagaggtacagtgccgaggtccggttagaaaggtcgctgaccgtgctcccgaaggaggagaagtgtcccctcgggacggcccccgcccttcgaggcaccagggcccccagcgaccaaggaaaggggaaggcccggccccccgagccgctcagctccaagccgcccctgccccggaagccgcttctgcagagcttcacgctcccgcaccagcccgcgccccccgacgccggcccgggagagcgggaacccaggaaggagcccaggacggcggagaaaaggccgctgcgcaggggagctggtaagagcccgccgagggtgcgggaagggcagggcctggggagatccacatccacgggcacatcttgctggacactcgccaaatgctcctggtacaaactttgttgcaggggaattggaaggagtcagaattcccactaacatcatgtctgatctagagcaagcttgtccaactcgcggcctgggcccggggcggctttgaatgtggc

SEQ ID NO: 4937 - DNA, 1341 bp, Artificial sequence
  DNA replication origin
cttctcctcatccgggagcacgggcggcgtcggctccgcttccttcgggacactgcgttctggcccgtcgcgagcagagggcgcctctgaggtggcggcggggtcagtctcggggggagtcgtgtccccctcagggatggcggtgggaaacgggctcgcgacgtcttcgggagcacagaccacctcctccgccttgtccgtggccggggcacacgggcctgcggggggcgcctccccatcctgctttccgccgtcgggaccgggattcggggggccctccggcggggacgggggctccacgcggagagtgggggccgactcgggctcggcgagctccggggtggccgggcggcttgaggggtcctccccggggacgcccccctcctccacgctggccgtgagcgcggaggagtgctgcaggcgggcgcgtctggcacgggcccctccgggtggcggcaagggcgccggtggcccaggctcagggcctctgtctggcgccacgtcctgctgcccagagctggggcgctcttctgggctgacttccaaaagtggcttctcctcgttttcctcctcctctggggtgcacgtcaggtcgctcagggattcagactgagcgcgctgagagaaataaagataaaaagcatcgtcgctatagccaattccaggaagcctgtcacctccccacttttttcaaggcttataatggtttagtgatagcagcactataaagctggcacttaagtaggcatgtacccacgggtgtcttttctcagtctgtatcctactggtctacttgggctcacaagtttatcaggacaatggcagatatgcctccaaagtaaatgtctacagctcctctggcagagcctcaaaaccagtggactagagtaacgccaagggaaggcgaccaacagcagccagtgtctgctatgctctgtgctcccacacttgttatttcatttaatcttccattcatcccagtgaggaagggatgatgagtccctttttgcacttgagagccaggaactcagagaggccaataccttgttcaagcctgggcaagcaggtggccgagctgaacagctgggactctatggctctgtgttcctcccagccagtctcccatgtcaacacttcaggaatgtaccctcatagtaaagccagactggttttcctaaaagatggctcatatcatgccaatagctaaccatggcttataggataaaaccaaaattttcagctaaatttaaagtcctagattctctggtcttaagccgtttcttccactccctactcaggtcaaaccaagccctcaacactgtgccagacacttggtctgag

SEQ ID NO: 4938 - DNA, 1681 bp, Artificial sequence
  DNA replication origin
gacacaagagctcttaacctcagacgttaagccttttaaaaatgtacaagtatgtaataagcacccaagtgacaaagatacacaagagtcctcataggaccttgtagtcagagggagagcagacatagacagttgaaggagtctccaccagaaagagaagaatgttcttacggcagtgcaggagcaggtgccaagtggacagcccagacgctgtgatcccatgtgtgtggaacacctgggactgcagttgagcctgaaggacagtgagggaatggccaggggtggccccacaggcaaggggagtgccctagcagggggcactggtggcaaagagcaagatgtgctcagcagtcagaggggcccagtgagactggagtgaaaaaaaaaggcatctatggaggaaatgagagaaaagggctgaaaggccagggtggcctgatgctggaggcccgaggctggcgctgttaagaagtatgtctgagaagtcttagctcagtggggaagcaggtggacagaggctcagcaggaggggaggcagggaatggaggctcagtgggaggggaggcagatggacagaggctcagcaggaggggaggcagggaatggaggctcagtgggaggggaggcagatggacagaggctcagcaggaggggaggcagatggacagaggctcagtaggaggggaggcagatggacagaggctcagtaggaggggacacagatggacagaggctcagcaggaggggaggcaggaggacagaggctcagcaggaggggaggcagatggacagaggctcagtaggaggggaggcagatggacagaggctcagcaggaggggaggcagatggacagaggctcagcaggaggggaggcagggggacagaggctcagtgggaaggggaggcagatggacagaggctcagtaggaggggaggcagggggacagaggctcagtgggaggggaggcaggggacagaggctcagtaggagggaaggcaggggacagaggctcagtgggaggggaggtaggggacagaggctcagtaggaggggaggcagggggacaaaggctcagtaggaggggaggcagaggatggaggctcagtgggaggggaggcagggggatggaggctcagtgggaggggaggcaggaggatggaggctcagtgggaggagtgccctggtacccctgtggcagaggcaggccacaaaacccacccagcaaccacacctccaataccctcctcctctggcttttcaaaggagtctgggggactaggtgagaaaaagaacaggggtgggagtagggcctgtcccctctgtgtgcacacgtttgtgcatgtgtgtgggcgtgtgcatgcgtgcgtgcaggtgtgtgtgcatgcgtgtgtgtggagggtggcggtgctgtttagtaaagtactgtttgtcagctccttggtcccaagagatggagaaaggcaggcctctcaagaacactcagcaccctccttccatcctgacttggcaccctgaaaatgacgcaagggcccaagcccagccagggagaaatctggccactccactccacagcctcgttgggcagagcagatcagtcacaggaaacagagactccagtgtggctgcgggagggtgcctcaccagtgaaggagaaggtcacccggctccaccttctataa

SEQ ID NO: 4939 - DNA, 1310 bp, Artificial sequence
  DNA replication origin
cgccgagccgagcggagccgagcgaagccggcgcgcctgcagctgggagctgggagctgggagcgcgccgggcgcagggccgggccggccgcgggagggtagtgtcagcgcccgcgtccagctcttcggccgcagacccgggctgtctggaggccgcgcggccacctgctgcgtcgccccggctttgggctggggctagacgcgcaccgcggcgggagcagccccggctcgccgcaccccgcggaaggtgcccttctctgcgcgtctcgccgagcccgggccacgctcctgtcccaggtacctcgaggggtttgaaatcgcgtgtcccaaggcaggcgtgggtcgaaggcggggtgggcgcgggggcaccgggcggaggtggggcgggccggggctagggggtcgagggcagaggccgtgaagccaggggcccctcggacccggagaggcgccacccccgccgccgaagccctgggcagctcctgcggccgagggggagccggacgcgctcgtgcaagtgcccaaagtttccctttgctcactttgctggacccaactttccactgtgaggcaaatccagcagtttacgcgccaggaaaatgaaagaggagggagagaaggtcctgctcggttgaaattgctagcatacgaggtctttatgcccactgtctccacacgcagttgcaggggaaaggagtggacacattcacgaactgccttatgctttaggtgatggtttatttaacaggttttaggctttgattacacgccacccgggagggattctggagttgatctaagaagtgttcacatttttaatcaacaaatatttgttgaacagaagcttcatcataggcaaagattcggtatgaagttcacatgtgatcagagcataatagtcacttgcttttgaaatgcaagtcagaagcagtgcggctgtgtgaatttgactccgtgtaggtgcaaaccgcctgcaggcatcaggtcctgttgacagttttgagccaggaaatccaagtggaagacaggcagctgtgttacccttttagagccagctcacaccttcccaaactggtcttaaggtatcctactaggttattggagcctgcaggcttccttcatttgcatataccatagactagaatctgtgtagacccctggtattttccctggagctcggtcccacgggcgcacacctggaatgatggagcactgtggtcatcctaagaacctattgaggttataaaattgtgaggagaaagatatctagagacagtgtcgtgtggagctggtggagaaggttgagctgg

SEQ ID NO: 4940 - DNA, 1274 bp, Artificial sequence
  DNA replication origin
tgtacaagccatttgagtttgcaggccagcttgaatcccttttttggaaaaagaaaaactggaagaaaaacaataaaatgccaacagtgattgcctctgcggttggaattattggtgatctttccttctttcttattttatgtaccatcctgtttgtttttcagagaatgtttaacccatttatgctggaggttgcaattttcttatgtgaaaaatcagaccttggccatgaccttcagcagtaggatgtaaataactcccacaagcttagcattccaataatggaacactaggcattaatgggctcaaagtagtaaggcccaagtgtgggtggagactgtatttttgtggtttaggtctgcatggttctgtgaatttccttggcagcacaaaagggcttgtgtaggaagagaggaggctggtgtatggttggggtttcaaccaggaaggtgttggcgggggtggggggggaccaagggatgagggcactgggggtgctggtaagagagcagtcaagggatgaccatgaggcccagggctaggcagggtggaggctggagagagatgactagtgagaaatgagcagttggagcagaaggtccttggatgggggaggagcagaagtttaggaaacaacgggatcaagactagggtggaaaaaaattgggaagagagagtgggtgcagtctcatgcatttgagatacagcagtttcagggtcataataggccatggtgaaagttcattgattaataaatattgatccagcagctattgtaaaccagcaccgtgctaggtgctagacacagatacagaccctgccctcctggaggttgtgctctggtgagggactccagtatggaataaaaaataaatcactccaaagtgtaatatgttctctaaagaagaggagtaggagggaaatacaggtcaggaaaaaaagaccaaaggaagtatcactgaagctaagtcctgaaaaattagtgggagtcagccaggtgaagggtgggggcagctggggctaagccctcagggcaggaagaagcttgggttgttcacagaactggaagaaagccagtgtggctggagtggagggagcagagggtggtactgaaaggaagcccaggagatgtggtcctcttaaggagtctgggtttcaccctaactgcagggaagccagggaagggttttgaaacagggaaaggacagggtccaatccctattgctggagaaggatcagagggatggtggctaagatctgggtattgctggaca

SEQ ID NO: 4941 - DNA, 785 bp, Artificial sequence
  DNA replication origin
gtctgagaagtgaggagcccctccgcccggcagccgccccatctgagaagtgaggagcccctccgcccggcagccaccccgtctgggaagtgatgagcatctccgcccggcagccgccccgtccgggagggaggtggggggtcagcccccgcccagccagccgccctgtccaggagggaggtggggggtcagcccccgcccggccagccgccccttctgggagggaggtggggggtcagcccccgcccggccagccgccccgtccgggagggaggtgggggtcagcccccgcccggctgccgccccgtccagaaggtggggggtgcctctgcctggccgccccttctgggaagtgaggagcccctctgcctggccaccaccccgtctgggaagtgtacccaacagctcattgagaacggtccatgatgacgatggcggttttgtggaatagaaaagggggaaaggtggggaaaagatagagaaatcagattgttgctgtgtctgtgtagaaagaagtagacatgggggacttcattttgttctgtactaagaaaaattcttctgccttgggatgctgttgatctatgaccttacccccaaccctgtgctctctgaaacatgtgctgtgtccattcagggtttaatggattaagggcggtgcaagatgtgctttgttaaacagatgcttgaaggcagcagactccttaagagtcatcaccactccctaatctcaagtacccagggacacaaacactgcggaaggccgcagggtcctctgcctagga

SEQ ID NO: 4942 - DNA, 967 bp, Artificial sequence
  DNA replication origin
cttcccagaaggggcggccaggcagaggcaccccccaccttctggacggggcggcagccgggcgggggctgacccccacctccctcccggacggggcggctggccgggcgggggctgaccccccacctccctcccagaaggggcggctggccgggcgggggctgaccccccacctccctcctggacagggcggctggctgggcgggggctgaccccccacctccctcccggacggggcggctgccgggcggagatgctcatcacttcccagacggggtggctgccgggcggaggggctcctcacttctcagatggggcggctgccgggcggaggggctcctcacttctcagacggggcggccgggcagagacactcctcacctcccagacggggtcgcggccgggcagagacgctcctcacctcccagacgggatgacggccgggaagaggcgctcctcacttcccagactgggcagcggggcagaggggctcctcacatcccagacgatgagcggccaagcagagacgctccccacttcccagacggggtggcagctgggcagaggctgcaatctcggcactttgggaggccaaggcaggcggctgggaggtggaggttgtagctagccgagatcacgccactgcactccagcctgggcaacattgagcactgagtgaacaagactccgtctgcaatcccggcacctcgagaggccgaggctggcggatcacttgtggttaggagctggagaccagcccggccaacacagcgaaaccccgtctccaccaaaaaaatacgaaaaccagtcaggcgtggcggtgcacgcctgcaatcgcaggcactcagcaggctgaggcaggagaatcaggcagggaggttgcagtgagccgggatggcagcagtacagtccagctttggcttggcatcagagggagaccgtggaaagagagggagagggagaccgt

SEQ ID NO: 4943 - DNA, 1026 bp, Artificial sequence
  DNA replication origin
gagacagccttgcgcatgcgcgttccatccaggtgcggcagcctcaggcagagattaagaaatgagtcgtggaaaagggggctagcggctggttactaggagacgggacgctcggctcgggcgtctaggcgctgcgtgggcgtgcgcctgcgcggcgcggatgggccaggaaggggtccctcctaggtgccctgtaaggcaggcaggtagacgtacgcgtcgctccgtgcgtaggagcgcgcgcacggcttgtagaccccgcgagaaggaaggtcgagccaggtacgcgtgcgcaccgggcctgggggcgagcgggacggaagcaaagctggggcgccggggaggtggaagacgagccccactccggtacagagcgtgagggcggggccacggcggcactggctggcgctaaccgccccctcctccttcccgcgggctccgtccttcctccgatccgccggggcggggccaggacgatttgggggtgggaagggaggagaaaggggcggaggatggagagtgggcggttcttgtatcccccgctgaggccgagagctgacagtcgcggggatgagctctgggcaggacggcgggccgaggagcccggggagggacccggagctccaggtagaagctgcggaggtgcgcggggtggggagagtgctgctactggactggaaggtctctgagaaggcggctgcaagcgggcaggagtggcgggtgcggggccgtggcgggcggagttgggcgctagcagcgggagcggctgtgaggggcagcggcgggcacagctgccggccggaagctcggcagcacgagttgcccctgtttcttgggaggttaggtttgagcccagttcctatggtcactgcttcgcgtcctcccgcagctctccgcttggttgttggggagactgttcagtttagaaacgctctggaagctctggtggagccgaggaatttggaagtcacagatttgggagttcagcctgactcccgatcgctcatttctgagcctctttctaga

SEQ ID NO: 4944 - DNA, 955 bp, Artificial sequence
  DNA replication origin
cgagggcactggcggcggcggggccggggtccgcaaggccggagaaggccgccgggcccgggcatggtggtctggggcaacgcggaaggtgagcgacccccgggccggcggcggggtgggggaggggcgggatcggacacgcgtcgcccggaggcgccgcagacccgcccggcagcggccagagcgcggtcggcctgaggtggcgcgggggaggggtgcgtcgccccggccccggcccgcggccgtcctgtcgcggcctgggctgtccacggcgccttcccctgacgctcgcagccgccgggttatgtaatgtgtgacctcccctccccttcccttccgtcatggcgcggccggccccgcgccgccgccagccccatgggccgccccgcgccgacccctggcgcagcggcccttccctccgcgcccggccgcatcccgccggcccggtcagaccgcgccgcaaactccttcctcctgcgccggcgcctcggccggccattcagttccgcgccattcattcacgcgcgcgttcgggcgttcgttccacaagcgtttgtagaatgtcgacccggtcgagccgccgctcccacccgcactccagccacagcgtttttccgcaccccgccttcgacgtccccggtgcatcccagaaccggtcggaatgtccgaaggcggttgttgctcccttgtttttccttgctgcttgtccgttcgctaaatacgctgggcgccgttccccaactgtccttccgagagccccttgcccacttctgtactgttacagtgacgccgctctgggcgcaccgagccgcgctgtgtttcgctgctcttcctacctattctcagtttgtaaagaaataatctcacataacactccttaatgtactcctccgtaagataaattgcagataatatacgtctgctaattctctttatctccacgtcttctcacgcc

SEQ ID NO: 4945 - DNA, 1123 bp, Artificial sequence
  DNA replication origin
cattgagatgtgagcaggagaacagtgaggctgggacgtggtagagttagccaggaagacatggcagggagaaggcacatgccaggtggagtaggatggaaagctggagtgaaggctgagtgggaatgtgcctcctcgcctgggatagcaacaagacagcatgctgcagtggtgtacatgggatgggagaagtggcaggggaggccacgtcttgcaaggcctgccaagcctcagtaaggactgtggctttactgtgagaattgggagccattgaagggtttggagcagaggagtgtcatgatctgacgtaggtatgaaaatgatgggtttggctgttgcactgagaatgagctgtaatgggtcaggggagaagtggaacatggcttggcaggttattgtgctaatctggggggggggtgatagttgctgggaccatggggacagcaaagatggtaagattggattctctatatattttgaaggagagccagtaagattggctgacagcttggttggcagacagaggaactgaggacagatatttgttctgagcaaatgaaaggaagaagttactatcaactgagatgaggaaaactatgtgtgaggcaggttttgggggcaagagcaagagtttacttactcacttgggcttattgagtttgagttgtctcttagacatccaagtggaggtgacccacaagtctggagtttggagaacgaaatctgtatctgggctggaggtgtagatttgggagttgtgagcatacacgtgacatctaatgccttgaacctggatgtcataacccagggagtgagggcaggtgacgagggctgacctgtggtgtatccctacctaaaggggtcagtctgatgagaaggaaccagcagaaaagagaagaagggatcagtaggtaggaagaaaacgtagagtatagcttcgggaagccacgaggaaaggggatctcaagaagggaagggagttattaccagtgtcacctctgctgtgttaggcttagtaacatggaggtcagcatttcccttgatgagagtttttggggccaacgtctacttgggtttgagaaagaagcaagaagaggaattagagacattacatacagtcttt

SEQ ID NO: 4946 - DNA, 973 bp, Artificial sequence
  DNA replication origin
ctctctgtggcatccctgctgaggctcatgctgctacatgctgaaaccccccactttcatgttgaaaccccccagcagaaggggatggtgccctcctggggtgcccttttcatctttgggcaactctgacccttatgctgatgaacaaatcaacccatctataacttaacgcttcttagctttggtcatgcccctgggatttcttaattgctggcgatttcattttcatccatctttgatgactgattcgtacctacgaggtccttactgtgtccctcaggacagtacctcacacagggtcatgccaccctttaccagacagacctgaaagtcagaggagccttcctgtgtcaccatagcctacctaaattcctgttagaattttgatttttaaccttttggcagttgacagtaagtggtacagagagaggaaaaagcagagcaggggaaagagggctggggatgcccatgggggtggagggtgggagctgggtgcagcatcaagagggtggctgggtcactgcactgagacattgagatgtgagcaggagaacagtgaggctgggacgtggtagagttagccaggaagacatggcagggagaaggcacatgccaggtggagtaggatggaaagctggagtgaaggctgagtgggaatgtgcctcctcgcctgggatagcaacaagacagcatgctgcagtggtgtacatgggatgggagaagtggcaggggaggccacgtcttgcaaggcctgccaagcctcagtaaggactgtggctttactgtgagaattgggagccattgaagggtttggagcagaggagtgtcatgatctgacgtaggtatgaaaatgatgggtttggctgttgcactgagaatgagctgtaatgggtcaggggagaagtggaacatggcttggcaggttattgtgctaatctggggggggggtgatagttgctgggaccatggggac

SEQ ID NO: 4947 - DNA, 1811 bp, Artificial sequence
  DNA replication origin
atatcaggctgcctctaagcagcctggccacagagaagacaatcttttcagatactttgagacctgacaacatgctaacatgctccctgggcatggacctggagccatgagggtgaggaggaagaagaaaaggcataaggaggagagaagaacgttccccagaaactcccctgctctccagagcagcagcgtaagcactgtgtataattaaggaaatttaatcaaacactccaaatttataacaattgttttaaatttaatgagtcaaactaattaacatctcttgttatttataaagcaaatgataaaaattaaaaattgttttttaaattagagtaaagcaaggttgctgaagtgtacttgcaaattcccttcttaatctatagacatagctggtggactgaaaggcagaaagacagtgagcatgggacagaggcaactcagacagagaaggtgaggctgaaggtagaacgtggtaaaaaggcaagaatctcccaactggagtcttttgaagctctgagttgttgtggttgtgatgctataggtgcgatggtggtgatagtggtggtggtggtgatagtggcagcagaagtactggcagtagtgttggtggtagtgatggtgatgatggttatgatggtggtggtggtggtgatggtgatgatgatggtggttatggtagcaatggtgacagtagtggcagtgaaggtgttgtggtagtggtggtggtggtggtgatggtgatgattgtgataatggtggtgatgacagtgatggtgatggtggtggtagtggtagtgatggtggtggtggtagcaatggtgatggtggtggtgatggtggtggtggtagaggtgctggtggtggtggtagttgtggcgatgctgataatgattgtggttgtgataatggcaatggtagtggcggtgatggtggtgggggtgatggcagtggtagtggtggcggtggcagtggtagtgggggtgatgatggtggtggcagcgatggtgacagtggtagtgaacatgttagtggtagtgatagtgatggtgatggtggtagtgatggtgatggtggtggttgtgataatggtgatggcagcgatggtcatggtggtagtggtggcagtggtggtgatgtggtggtggagatggtgatggtggtggtaatggtgttggtgatgaaagtggtgatggtactggtggtgatagtggtggtggcggtagtggtggtgatggtggtagcgatggtgatagtattggtggtgaacatgttagtgacagtagtgatggtggtggtggtagtggtggtaatggtgatggtggtggtggtgatggtggtggtaatggtgttggtgatgaaagtggtgatggtactggcagtgatggtggtggtggcggtagtggcggtgatggtggtagcgatggtgatagtattggtggtgaacatgttagtgacagtagtagtgatggtggtggtggtagtggtggtaatggtgatggcagtgatgctgatggtggtggtggtgatggtggtaatggtggtggtgatgaaggtggtgatcgtgctggtggtactgatggtgatggtggtggtggtgatgatatggtggtgattgttatgataatggtgatgacggtagtgaagttgatggtggtgatgatggtggtagtggtggtaatggtaatgatggtggtggttgtgataatggtggtgacagtagtgatggtggtggtgatgatgacgatgctggtggtggtggtaatggtgttggtggtggtgaaagtggtagtgaaggtgctagtggttaa

SEQ ID NO: 4948 - DNA, 854 bp, Artificial sequence
  DNA replication origin
gcgtgtttcaggaaaccaggaattagagtgccaggcactcttctatgtgctgaggatacagtttgatagaaactagatgtagactttcttcttatggtatggtttaataaaggattcagataattagcataagaagtgccattatcggggagagtggagggttctacgtacgacttatatagggccccgggatttggtgaggggagtctgggaatgttcccaagagggaaaaatcactaaagtgagaccttcaggatcaggaggaagagggcaggtggacagcagaggtgttcaaggcacaggaaggagccataacatagaaactgggaagattgggagctgaccttgagcagatgagcagggctaccagattgagatgctatcctgagggcagggcagtggcatgaccaaactgctcttttttaaagaaacaccaccctggcttgacgggggaggaacgattgggctggggtaggagcgaatgggctggggtaggaagagcagccgggagatacattttaggaggctctgcagggggctggaagggagcccatggtggcctgggccaaggagttggcagtgcagaaggagagagttggacaagtatgagcagtcttcaggtagtagagttgacaggtctagagagggttgattggatatggggggcatgggaaatcacacagtccagatgatgcccaggtttctgactcaggcaactaggtgggtagtgctgcggtctgctgacacaggcaacaagtagaggctggggttggggtcggtgtggtggtgagctaagtctggacatgcaggctgtctatgagaaacctgacttgagaaggccacatagggagttg

SEQ ID NO: 4949 - DNA, 1019 bp, Artificial sequence
  DNA replication origin
ggcgcggcgagctcgctgctctctcttgagtgtgcctgcgcgcaagccggggagcgggtgagtgcgccggccgctgcagccagcccggccggcccggagtcgggggcggggggcgtcgggagccccgacctgggggtgggcggtgggcgggcggcggccgctctggcgcggctgggatgcaccttgagcggcgcctttcgttgcagcgcgcgggcggcccgagcctcggcggcggcggtagcggcggcggcgacgctgacacctcccaccatggacagcttcgacttagccctgctccaggaatgggacctcgagtcactgtggtaagtccccgtgccggccgcttcgggcgggcgggagcggcgaggggcggccgcggcggcccgcgcgtcctcacctgggccgggggctccgggcggccggccgccgtgggggtggggtgggtcgggggcgcctgcctcgccagcccttttctgcctccccgggtgggatgcgtggccgcctgcccgtctgtttccccctctcctgttcccctccctcgcggcggcccgccccagcccagggactggtgatctaggtagccaggggcagagcgcagccgtggggaggaaaagaagcgatttgaagactgtgtcactaatgcctggggatccacccgtcggccccctgctcctctcacttcctttccctccgactgcgccccctccctcctccggctggcaccaccgaccccctggagttggtgctgctgcgaagtgcccttagaggatgctccagcctccccgcctgcgcccggtctcggctgcatcctttctgtctctcccacccacttccaccgagatggaaaagtgaacatccagggcaggaaacgagtgtttctccgtgccggtattccagaggccttagcccagggagactcctttcctcggggttcacagttcctctgggccctttcttcacacctcgtcacagttgcactcctcctccccaccccacccgggcgccccgggtatcccttt

SEQ ID NO: 4950 - DNA, 1189 bp, Artificial sequence
  DNA replication origin
aggcgtatgctaaggggatattagaaagacagattttctttttcttttttttctttttccaaatacactgtgcattgggatttgggcagccagcccttcacacctgtactttttcctatattcatattctctatgtttttacctaatcttcttgctacttgctaccttcagctaatgagaggggtttttgagggctgagagttatcagcttgtaaaataacaatttcattttctcagactatgttgatgccaactctgtcttaatttagcgttttacattttgcacattagttatggatgctaatgaagaaaggattgattcagagctgggggaagaagggagccaggctgagcattctcaaatccgatctcaaataggaaagaagtctcattggccttttggtcttctacctgtgtcctgaattgagtttgttaatcctcattcggaggtgggtgaggtgagaggatgactcttcggcttgacgctggagggatcccgtcacttgcacccagggtttacatttctggcagccccagtcagcggttcttgcccagaaaaaggaacaaaggggagagtgctggaagggactcccttttggcggggagtgcgaggtttggttcgcgtggtgaggcacaactgcagggctctgagctgctctctaggaattctggggaatccctggtgagaatccggagctgtggccaagaggtcaggagagtcagggggccttggaggggcttccggttctaggccaactgtggagaagcagaggtagggccctgatggagacatgcgcttctcagcatgtctaaaaaagtaagccagggggaagagctgtctttacaatgagggagattattattactctttaggagccacgatgatactcttatcacccttctagctgatcacctgcctttccagaccggagacgggcggcaagtttgaagtcgacacccagaggccagtttgtcccccttcccggtgagaaataaaaagaaaggaggttggtttccagggctggccagctagagggtgggtgggaccaccactggaggccaaaccgcaacggagagcaggtccgggtggaagaggtttcctccgcgccgccgctttatttcgctgaacttgcgggctccagagaccttaaacggtttgtttggggcgctgctgcgggcggcacagctc

SEQ ID NO: 4951 - DNA, 1281 bp, Artificial sequence
  DNA replication origin
gcggcgccgcgcggctcggggcgctgcggccggaggagctggaagagctggcgggcggcctggtgcgcgccgtgggcctgcgcgaccggccgctgtccgcggagaacccgggcggcgagcccgaggcgcccggcgagggagggccggccccggagccccgcgcgccccgcgacctgctcggctgcccgcgctgccggcggctgctgcataagccggtgacgctgccctgcgggctcacagtctgcaagcgctgcgtggagccagggcccgcgcggccgcaggtgcggcgcgtgaacgtggtgctgagcggcctgctggagaagtgcttcccggccgagtgccggctgcgcaggctggcaggccaggcgcggagcctgcagcgccagcagcagccggaggccgcgctgctcaggtgcgaccaggccctggagctgggtgagtcggctgcggggcgggtccgcctcccctacacctgtccggcccagcagcggggtggggagctggccggtgggcccgaggctttgggctttcgagagctttgtctaggcttaggggtcactttgcttcctaaggatgggaaggtgaaaggtgggggcggccacaccctgcagccaggagaggccaagtgcaccccactggttttgtcttttccaggatgctggtaagtttcccgcggcccccggagcagctctgtaaggtcctgtaattgcttttcggcatcttctgcgctgttgaggagcggggaggatgacgaaatatttttgctcatcctgaaggaaaatgcacatagctgacacactacaggcgcagaaaggggtgccttgtgctggggcaagatttgctttgggtttcagctaatatagccaggaaggaaccgcctccactctgctgtaatcacgtcaaacgctccggctctagcctgctctctgtctcagaggccatcattagatgtcatggcgtatttaacttactagatagttacactgactagtgtgtgtagttttaaattgttcattcagtcatttccttatttatctgaggcctaaggccagcaacaggcactctcctgccttcacccagccaccacctgttaacactatttagctgaaaggaagaccaaacttctgtcatcgttttggctttgacatatgagtatgcgctctattggcagttgttttgggcagtgtgaggaggacggtttgctttctggtttcaccggttttataatagggcatatacgatttaaagcactagccgagaagacttgttgaatctcttgtt

SEQ ID NO: 4952 - DNA, 995 bp, Artificial sequence
  DNA replication origin
gcggagcagggaggatgcgctgctgctgggaactggccggcgggagcgcggtctcagccctcgccagcagccacgcgcgtctgggggcggcgcgctgcgagcggctgagaccgcgggcgggggcgggcgcctggcttgggcagcgtcctcagcgcggtgtgggcggcgagccccgcagggctgcaatcgttccggggtgggggccgggacaggcaccgcgggcgcaatctgagcccctgcccacgcgcagcggcctctcagtcccgccggcttaggtaacccaggtcgctgcggtaacgcagtgaccgcgctccaggtccgcgtctcttgcgatgcttcccccactcgcctgagggctcctgcgcgactgcgcgcgcgtcctctgcctgccgcctccccgcagaggtgccggggccctgggagcaggtggccttggccgcgggctgctggcgcgccggcaccgcggcacctgctcttccccagaggcctggccgcccccacaacctgtggctccgcttaagcaagaacccaggaaaagtcaccaaacgcatcacgcatctctagcttcgacttaggaaattgtcctaaatgactggggaggctgaagtgggcacccagaggccccgcctcagcgagcttcttctcttaactctaggctgaggcctttgagaactcattttaacagagaacgtggagggccaagagaaccagataccaggaggaggagggattcgagaagtggacaattgtattgtgcccttgattaggaagcagaaatagaattagaaatagaattctaattaatagaattagaatagaaatagaaagggtgccctagtatggagtactgcagacataagttgctggggagagggagctaaacgctccgttggtgtacaagcaaggtttaaattaaaatcctctgtgcgtattaaccgggttcataatttctcctatatagcctatgtatttctcctatgtagcctgctcccttc

SEQ ID NO: 4953 - DNA, 1299 bp, Artificial sequence
  DNA replication origin
cgggatccgggcctggggtcccgcggccgcgcccctccccactccccgcgacccgctggaacgcgcacggccggggacggcggcggggacgcgcgcgggcaggcggcgcgcacggccggataggcgcgagggggccgcgtgaggcggtgccggcgttctggcccccaaagccggtctagcgcgccgggcgtcttccttacttccgctgccgccgccgccacatcccgggacccgacgggccgcggcgcggaggcctcggggcaaggtggggcgggcctcccgagctcccaggaccccgcgcgcttcgcccacaggcccggcgaagcccgacccgcgcggcgcccccagggccaggggaggagcctaaggacccggacgagcgccgctccagtagggtgagctcggggacgcgcaggcgggtgggtttcagcgcctgggcccctctccccgccgcggggcgcacggaaaaaccggggaacccgcgggttttgtcctggcgagccacatcccggtgtgttttggcgacttgaagacctccctagttcgcgggagtagcgggaagagccttcctcgcgttaattatgcaataagaaggcgtccttgtgcgggatgctgtgacccgcggaattattgatattgtgcgagcctacaatttacttctttcatccttggctgagaatttgcgtttgtaattgtagatggagagaggaagaaagggttcagcttgggtccaaggagcatgcagaggaaggcagggaagaaggagcatgtgcagcttcggtgcgaggggagtcaggggtgggaatgcacgttccctgcctgaggggccccggggtgccctgagcctctgatcttcgctgtcaggaggcctgtccgaagttggaggttgaggcatgcagttctgcacttctggctgggaaggtgaaccaggttttccaaaatgtcatttttgctttccaagtctgcaaggcaggaaagggttgggcagtgaatggaaagtagtgcagccaggttctggttagctcagcggcaggactgtcataacggtgggtttttgttgttgttgttgttgttgttgttttgtctgaaaaccagagtctggggctttgggccatgaggagttgggttattgcattgcttagagtgccagagtgagaaatgtctcagacgctgttaaaattaggcagctcagtttagctctggctctctgataaccaaccacctcctccttcactcttttcagtgactgggttaaaatgaaaagacacaaagagagaagtggtcttttcccttccctcc

SEQ ID NO: 4954 - DNA, 856 bp, Artificial sequence
  DNA replication origin
gcagaagaactggcagaaattagaagtgattgtgtggaggccgaatgacaggaaggggtcaggcctgcaaggcagagaagagggtggtggtcttgacggagactgggaactgagggctggagggaaaccgtgggttgataggttggattcctgcctgtggaggaggcaaatggaggtgttaggatgtcagtggaaatgtgtgccttccgcttaggaaagagacctaagtcacgtgtagatttaatcaccagaagcacatacatggtggctgaatactggaaagggtgagattgctttaggagaatgagtgagtgaaggaacatgagaccagggatggatgagacccaggaaaatatcagggctcaacgacagggtagaaacagaagtcaataaggtgttggagaaggatttgtcagggagaaaaccctgcagaggaggagcattcgaggaggagcgggctcagaagcatcgaagctgggtggggcctggagggaaggctttgggtttggcattcaggatgtcatgggtgagcaggggctgtggtgggtggcagaaaatgtgacagcagaggaagcagatgcaggccagtcttgcaaggacagaaggaaggccctggcacaagaaaaaggctggtatcggcttaagggtggggtagacttgagcatgtgggtagacagagcagaggaattggtggagatgggaaggtgaagggaaattaaggaaccaagtgtagtaacataatgggagaaagtcgtaagccaaggggagagagtcataagccaagaggagggatgagtcttcttgtgcctctgacaaacaggagggaagatagaggaaggtgcaaatgggtctgggt

SEQ ID NO: 4955 - DNA, 1504 bp, Artificial sequence
  DNA replication origin
aggaaaggaggactcttgctttgtgtgtggagaagctggacacaatgcctcctcctctcaaccttgccgtgtatttgttgcttacaccgccttgtcttatggggtttcctatatattcacactgcagcccctaccacctgtaccctcaggaggatgggggctgtgttttctagctccattgctcttccacagccctaggaacaatgacagtaattcgttcgtttctttaaacatttatggagctcctactccgtatcagtctccaggggtaggaagatgaagacataattcctgagctcaaggaggtcacagcacagcaggaaagatggacatatcagtagttccctacaagagcatgcgagaagtgctataaaagaggtattcatcaagaggcaaggaagtaggcaaagttctacagctgaactggagctgactttggcagggggcttaaggacaagtgggggtttgccaagcagagaagggaggggagggggaacagggaagccaggggaggggaaacaacaggagaggtagggaggttggaaagcatccagagaaaagtgaagtttgaggttcctggtgtgcggggactgaagtatggctgacagctagagtagagggagaaggagagttgcggcatcttccagaaggttgctagaactgggccagaggatgctaggggaacagtaagaagggcccaagggaaacaggttttcaggttgcagattgtagagacagtggtaaacaagtggtgttctttttatacgattactgtctctgtttgcaagctgcactgcccaccatcagctgggtatcctctgatgttagaacttgacctcacctctgattgagaagggaagtgaaaaggaaggggaatacaatggttacagaagaggctggcattgaacattgtatttaaagagcctgatggggcagtggggacatgctgtgtaagtgtcatgaagacatcggagtttgaaagcagagatgttgggatctgacccagctgtggctacagagagaagcttatggcagacataggagctgaaatgagaaatcagttgggaggcgtgtgcagggggaaaaagtgtgagggccagacgcatggtaattttgccacaaatggaaaaggaggaggtggatacaacagacattttagcagaagaactggcagaaattagaagtgattgtgtggaggccgaatgacaggaaggggtcaggcctgcaaggcagagaagagggtggtggtcttgacggagactgggaactgagggctggagggaaaccgtgggttgataggttggattcctgcctgtggaggaggcaaatggaggtgttaggatgtcagtggaaatgtgtgccttccgcttaggaaagagacctaagtcacgtgtagatttaatcaccagaagcacatacatggtggctgaatactggaaagggtgagattgctttaggagaatgagtgagtgaaggaacatgagaccagggatggatgagaccc

SEQ ID NO: 4956 - DNA, 1317 bp, Artificial sequence
  DNA replication origin
tgctgcacattttgaacaatgcatagatgatctattgtagcttggctttgttatttggttaacgaaaaatccaagcaccaatgtcacctcttccaagaagctcatcctgagtccttcctcggcacccatgggacatctgcttttggcttggagggcttttctgaccctagccctatttggctggtgtttatgcctgcctcaacatagtaaaccctttgtgtatagaaactgccttaatgttcccttgatccctcacaggccaagcccagcctgactcatggcaagccttcaacagatgtcagtaaaaggaactcaaccgtcaaatgcatagaatgaacatggggtcaactctcctccgtagctctcttccgcatgtgggggaaagggcctagtctaactggcttctgtgatgcagaatccactctgccttatggtcagataggatatgtggcctatcttagaggtatccttcccatctgggtgagattaacattaggacacgggatggagtttggaataaatacgacaaccacatacacgtcatctccaggactaaaaaggcagaaaccacatttagtaggggcatctactggacaacagagaaaaagagaccacagcaaaaacactttttgtactgcagaattatttgatgagttactactacaggacattccaggtttcctaaaagaaaatttaatgattgttcaacaagttcccaaaagggagtaggaaaagggagttggaatctcttccaaagcaaaaaaggaagggaggtgactttaaataatgctttaaaaccggttagaagtacacaatttcatcctttagtaatattagtcatggccacgctctaaaggcggggtgaaacctacttgcctggaggaaaaggacggggtagaaaaacaaagcaaaataaaatccatcaaacaaaagtttcttcttttggaaagggagggacttcaaaatcatgacaggccaaatgcctcctcctctttcttgaaaagccctccaagtcagaagcaagcctgagaataacagctgctcttaggatgctcaaagctccttgcagctgattatttttcaggaggagaattagacacaaataatacaagtgggaaataaagagaatgacctactttacagggggggtaaaaaggagctctgtgtgagcgttttgatctaattgacggtgtggggttgcatgcccaaataaggcgctgctggtcggatctgcgagggagagggcacgtctcaaactcgagggagaggacgagacagcgagaggaacagcgtccggggcgacccccagtccaccgc

SEQ ID NO: 4957 - DNA, 1306 bp, Artificial sequence
  DNA replication origin
gggcggcggcgggaggcgctgctctagctgctgccgccgccgccgccgccgccgcggctgcgggtctccgggctccgcggccgccgctcctgggccgcagccgcgcgggtccctcggctcctgcgagaggccggctgctcgcgcggcaaactcttccgcacgcagagccggcggggagagccgcctccgcctctgcctcctcccctgcctcctccctccaccctcctccctctccacctccccctcctacccccaccctcctcctcctcccctcgcctgcctccgcctgcggggtctctcctggccccgacccagcctgggacaagcaccccgcgcgcgccgcaggcagacggacccccggccccctagacccccggcttccctgggcggcgcagacacccgcgagtccccaggccgccgcagcctctgctgggctgccagggacgcgcggcggggtcgggcctggggcgcagggtcggggttgggcgccggggctgggggaggggggggttgtgcttccaggtgagccggcccagaggagaggcaagtggactagaggctgccagccgaggtcccattaaagttgtcactcggggggaacaaggaatctgccgcccccgcctagtgtagaccctcgcagtgcgggccgccaccctgctgtcccgcgcaggggatgaagggggacgagcacgcgactgtcaccccctccacactgtcctccaggggcagggttgcgcgcaggtctcgacccagggcacaaagcgcgtctctgcggggaccactgcgatttctcaatgagcggcgggggtgcggcccgggggcaggtgggaggcgggggtcggggaagatgcgggcgagcggtggtcggcggaggacagcagcgactgctggggaggaataaccagtgcctgtcctaaggcgaacgtagctggtccggaaaatgggtcaaggatggaaaggaaccggctaattgcccccctccccggcaggggcacgtggggtgtggggctgcggccaggagcgggcacttggagctccactctgcctctccctcccctcctccgctgccctcctctccttttgcaccagtgcaggaaatgttccactgacctacatatttttccaaacatacgtgacctttttttttttttcctctgtgggaggagacaggcgagaatccaagaaaaagaagctggagagagaggcgcgcgcgagaaacagggaggattttaccaaggttcccgcaaacgccaagcggagggaggcagaggtacaggaataatccccgggtgccggggctgctgtc

SEQ ID NO: 4958 - DNA, 1395 bp, Artificial sequence
  DNA replication origin
aggcggaggcggctctccccgccggctctgcgtgcggaagagtttgccgcgcgagcagccggcctctcgcaggagccgagggacccgcgcggctgcggcccaggagcggcggccgcggagcccggagacccgcagccgcggcggcggcggcggcggcggcagcagctagagcagcgcctcccgccgccgcccgggaggagctcgccgcgcccgctcgccgcctcgtctcccagcggcggcgggaggcgcgtctccccggcccagtccgcgcccggccccgcggggccgctccggcccgctccgaggtaaggggccgcgcctaggggcgcgggggacccagggtgggtagtacgtgcgcgcggggtcgcaggactcggtcacctgctcgccagcgtggaggacgcgcgggggcggaggggcgctcaggcgcgaggctgcgcggcaccggggaccccggacgcgggggcgcggagaggtgggttcccctccacagtcaggccgctgggggcttcgcgtcctgcaggaggtagcaatcgctgggccggtgggctccgggcgcgtctcgacgcagaagacagaggactgggcatccgagcctcggaatttgggggtcctcggggtgtccgacagggtggagaaggatcgtgccccagggcaacagctttggggattgcccgtggttgtcttcgagacccatcgcgctaccctccgaaacgtcgggcgtcctggacccccggagagtgcggcgtgcgcgccctgggcccgcggtctctcggagtccctgggtcggaattggttccgggccggattgggtgcggaatcggtgcccccaacccccgtgtgcgcagacagcgtgcagcctggctcctcacgtcgctgccgcccccccaccccaactccggagctccccaggttggatgtatgcgtatggttttgttgggagatgtgcccctttcccagccgaggagggacgcacctttgacctttctgaagagctgggcaggtcggtaaccagggaagggacaggcaccacccggctaaattcagaaccagtcccgctcctctgcttgccactccttaattgctcaaggtaagaaagtttgtttcagccctgtgattcataaataattagtaactagttttgttgattaagcaagatggaaaccttgaatatacgcacgcacttccacaaagtctaaacactcccgagcttgtgtccgggaggctttagtacggaaagttagaagccctggagttcaacaggtgttcaggagggtcccggagaggagtttcgtctttacgcgttgctttggcatccaccccaacttcattaaagtggttagcctgttttcctacaggtaaaacattgatcacttattaaattaacttaatcag

SEQ ID NO: 4959 - DNA, 1149 bp, Artificial sequence
  DNA replication origin
ttccatatgtgtgtttatctgtattgtactgcaggttatctaagttcccagattctctactggactacaggctcctcgaggcccaggacaactcttgctcatcattgttcccctgggtcttggtgaattccaggagctcagctgactttaccaaagccacgagggcatgggaatgtgaggctggaggaaaggctgccttcccatctgttatcctccagaagccctgctccagacttctgaattccattccatttgagtgccatttatctgctggcgattttgtccaattgcaaggtcactggtggcttggaataggtggaaatggctacaagggtttggcaaagagtctggggggcctggaggagcagtgggggcctggaggagcaggggggcctggaggagcagggggcgcctggaggaacagggaggcctggaggagcagggggacctggaggaacagtgggggcctggaggggcagggggcgcctggaggagcagagaggcctggaggagcagtgggggcctggaggagcagggggacctggaggagcagggagacctggaggagcaatgggggcctggaggagcagggagacctggaggagcagtgggggcctggaggagcagggggcgcctggaggagcagggggcacctggggcaagggacagtgaacagcagtggctgctcatgtgggtaatggttaaaaccagagtagatggcggggaccatggacgttgagtgttgggacattcagctgccagtgggtctctgggatggccatatctgcctccaaccctaagtcagcatcaaaggtgaacatttcagccgagtgatatctttaagcacgagagcaagggactgaggtggacatttataaaacacagaaggaagccaatacaacttggggtttcaaagtgactttaacagaagaaggaaaagaaggctcactcccaaatctaccctcagtccataacggaacagggcagtaggcctcagttcacgtaggctgcaggaatcaagtatgtcccaaactgcaagagggtgtctgctctagaggcaaggagtgaagctggcaaggagcacatttacctgggttgatatcacacttgattctctgagcaggtgctggcttgtgacctgggcagagg

SEQ ID NO: 4960 - DNA, 1314 bp, Artificial sequence
  DNA replication origin
cttgggaatcgaaggagaaacgccgggtggagcggggccggagggctcggggccgccctggagcagcgaggctgctgtgtggggccaggtgacagcggggtgcgccgagccagcccggactcggccatctggaggcgccggaggctccaggtggtgtcgtggctgggggcgcgcggcgatgcgcgcggggcgcagctcttggaggccgcggtgagcgggaactgtctccacgcccggaggggaaactgagggtgggcgaatcccaagctcgtgatctcagtagagaaattgaacagatcagttttttcctctctttcagtgtcttacaaggaatgataggaaaaaaaacccaggctcgtaaagttgatgataaaacaaagcattttttttctaaaagttttgttccaaagctctttgaaattgacgccaacttgcagtagctaggacacctgtttaaaggtcagtgaaggaacaattagactttttcatttgtatctagggggcctatatttttctttccaattttggaatcggaataaaagagagcttagatctcctgtcttgttcctgttctactgaggagaagacagaggccagagagaggtcaaaggacctaggttaggtccccgggttagtggttggcggctctttctgctctcagaccagtctagggaaggcctttttgaggttgagtctggtaggagatgtactaacacgcctggaaaccgcagaaccaagtgcaaaggaactggattttgctggactttagcttctgagaaagctggcggttgggtttgttagaggagtgcagacttacactgagaccgggtgagtgggtgggagttggcaggttgctgcatggagggagctgtaggcagctgagggttccccatggaaggggcagagtgtagttaggattctggacggaggcggtgctttggtaaccagtggtcctgttgagtggcaacaaggactcaacttgggcaacttgggcagcacgtgggcctgctccaggagctgttttgagctttgggggagggagttgtgcaggaggcaggggccacagtggccttgttgggccccgtgacgcaccctggtgcttagtgcccaggctctcaggaaatggaggtgggtggtgccctgggaagaggcgaagaggcaggaatttgtcgtccctccctttctttgagggcagtgtatctttatttatggtgcatttagcagggttcctggtctataaatgtttcatttagtagagagtgaggacaaggcctgaagatttgtgaagtgagaaacataaggacagtttgtccc

SEQ ID NO: 4961 - DNA, 1546 bp, Artificial sequence
  DNA replication origin
ttcagcgcgttcttcagcagcacctcctcgggcttgagccacatcgcggcggtccggccgcgcccgccggccccagctcacatctccccggccgccggtcgctgtgagccgagcccgctcgagaggcgacggcggcgcgcggggaccacagcccggccggtgcccagcgctctgagagcccgcggagcgcagcaggcgcagctagccccgcgcacccagcgcggccctcacgtggccccgccccgcacccgcccctggccccgccccgcacccgcccctggcccctctccagccgccggccccgcccccgaccgcccctaccccgcggctcccgcggcgcctcccgggtttccgcgtccaaggcgctccggcgcgcagttccggagtggagggaggaagtccaatcctgcgccaggctccctccctcccgcctctccgcgctctcagggggaactcgggagagctgccgtccctgacctcgacctgagacgtggaggagggacagggaaaaagccttcttctcgcagctgcaggttgccccaccgagggcatttttccgcaccgagggggcggggggcagaatgcacgccagaaaacctaagtgcgctgggtttaaaatagcaacaacaacaaaaattacaaataaccaaaaaacagcataagaattaaaaacagttatattccaatgtttttaatacttggttcacattttggatgctctccccagggatccgacggcgctgcggaggcggcagcgatgtttgggatcctaaagaaagcatcagaccagactcaggtctggacgtccctcaagtggcccggaggtaccgatattagtgtcaccgccgtcagtgccctgcccagaaataaaacctttgttctgagagaaattgaaaagctggaaaatatggagtaggcgatgtgaagagaaactacagggaatgtagaggtcgggttttaaatgcgtatttcctcaaggatgttgtggaagcagagacaaggtggctggcctggagcaggctggaggacctccaaggatctccacagggaggcagttacatttaacaccctacctagcaaaagaagaaaagaacaaccccatgaaaacatccctggggttttaacaaaggaatccctgacaaaacgtgactgataactaggacagaactgaaaagtggaagtaaagtcaatcccgaccccccaggacgcctgggaactcagggaagcgcctccagaagggaacagctcagaaaccctgaccagacctggcggacaagaaccgtgtgggcgggggacaggaacgcccacccagaggccgggagagcatggtccaggactggcagccactaacagcctctgaatgaaactgaggaaggaagtcaatggtaatcgggaccattagggtgcaccagggcatatagaacagtcggggacggtaagaaaacattccttccagagacattcactggcacctcccgcgcagacacactgccaggcccgggaatcgcagagatgaactgggagacttgtctgccctggagaactc

SEQ ID NO: 4962 - DNA, 1127 bp, Artificial sequence
  DNA replication origin
gtccgtgcgccgcggccggcggccggcgcggccggggacccgcctctcctggctgctgtgctgcagcgccctgctgtccccggccgcgggctacgtgatcgtgagctccgtgtcttgggccgtcaccaacgaggtggacgaggagctggacagcgcctccactgaggaggctatgcccgcgctgctagaggattcgggcagcatctggcagcaaagcttccccgcctctgcccacaaggaggacgcgcacctgcggccccgggcgggcgccgcccgggccaggccgccccccgcgccacccgggatgttctcctaccggcgcgagggcggccagacggccagtgcgcccccgggccctagactgcgcgccgccaccgcccgctccctggcccatgccagcgtctggggctgcctggccaccgtgtccacccacaagaaggtgagcgcccggcggggagcgcgagggggcctggcattcaggcggcggccgggggacggggacagggacgtgctcgcgaccgctcgggactgagatccgggtccaccagacgtgcccggtgccctggatgggaccctcgacactgtacataatggaaggcgatggtgcctccgtgagcctggcgaagtcgggggagggtcggagagggacatggataaccaggtttcctgccaggtagggttgggtaccgaatccccaccttgaggtggccaggcagagagagggacacctaaccagcgtccgaccgagacctagaccagagcagccacagacgcctttggaatcgcagagtaggcggggacagcccttcccagcgcagggcacaaacccatagacctgaactccccatcaccttctgacctggagctgaagcagggatggggagagagagagcacgagggcttcgatggaaatctgcatttaagaaaatggagttcacgattttttctggaaaggaggcttattatgcaaagtgtgtaaatgctggaatgagctattcgctgcacttttaattgttcagttcgcaaatgctttactcacctgttagacatgattccacctagaatgacatggataagtaatgcagatgtaacttccatgcctccagaaggcttttgggggttttaag

SEQ ID NO: 4963 - DNA, 913 bp, Artificial sequence
  DNA replication origin
cgcgccggtaggagaacatcccgggtggcgcggggggcggcctggcccgggcggcgcccgcccggggccgcaggtgcgcgtcctccttgtgggcagaggcggggaagctttgctgccagatgctgcccgaatcctctagcagcgcgggcatagcctcctcagtggaggcgctgtccagctcctcgtccacctcgttggtgacggcccaagacacggagctcacgatcacgtagcccgcggccggggacagcagggcgctgcagcacagcagccaggagaggcgggtccccggccgcgccggccgccggccgcggcgcacggacatcttgcaggcagcacgcccggccgccggggccgccagcagcgctagtgccggggagcccggcagcgccccactgcggcggaagcaaggagcccgagcccccttcccgcccctgcaggatccccgggcgcggtcccccgcgcgagtcccggcgaatccctgcagccgcgcgcgaagctcagaagtccaggctcgcagaagaccaggttccacgcacacgccgcgcatcctgcggagtcctcctcgcgcgccaggtcccgggatgggttcgtttcctgcaggatggcacaggttccgcagccagagggtgggcgttcaaatcccggcttaatacacgcgtctgctcaacagctgtgagacctgccaagccacttaacctctctgtgcccatttccttcattagctgacaaagataatatctacctcttaaggatgatggatgggacggttgaacgattaatatttgaagaggcttagaacagtgtgtggcatggagcaaacgctctacagcagtcccttggtatccgaggggtattggttccaggacccccgtggataccaaaatccagagatgctgaagtcccttataaa

SEQ ID NO: 4964 - DNA, 1278 bp, Artificial sequence
  DNA replication origin
cgtgtgcgtgcatggcaggtccctccgcgctgcggcgggcgagcatcagaaagcgctgggcctggggccgctcctcacacccggctttgacccggcgtcccgagggcagccgtagcgggaaccacgcttcccctccccggccccacctcctccatcccagcgtcccaggcgcctggcggctcaccactggatgacgccgctgtgcgggccccggctaccctcgccgctcgacggcgaggccggcaccccctcggccatggctcggccccgggcctgcagcaccgaggcaggcagcgagcggcggccgtgggcggcgctgggttgcaccggtcctgctaccgccgctcctcggtgtttactttagaaaggagcgcgcggggggcgcgcggggcgcggggcgggagcccagtcctccaggcccgagcccgggggcgcggaaggcgcgcggcgagtacgggaggccacagctccccaacccccgcgccccgccgaggatgcgcggaccccgccctgcatcctgcggtgtgggctggagctgcctcccgctctcacccagcgcccttcccaccggcgtagcaaccagtcaaacagggacgcgaacaacaagcaccaacttacaccttttccaatctggtcgcggtgttgagtccgtgggtgtccttgacttgcttgagcgttggagttattcaggcagttttcaaaaatattgataccccggctgccgctccccatcccagccccgccccaccccaccccaagaggttctgatgaattggtctgggcgagggccgcctgggccaaccggctttttcagggtcccgggtgatgctaatgtgcccgccgttgctgaaaaccactgtctctaggagttttgaaaaatctcggagctctctggcaggcgggcgcatctggacttctaggaggctggtcccaggtgactccagtgtgctgctccaggtgagcagtgccacctcaacgtgagtccccatatctgtagccaggtcctgccagtccttgctctcaagagccatttatgtcagtgtcattgctgtgtgacatggagctgctggccatctccaagttcacttcctttgtggggaactgtgtgggttgttgtgagtattaagcgacattcacttgcaaggctgtgttgtagtcagagctcagtcatgcagccgttactgtggctgctaaccgcttcagagtctccgggtaaggatttctcaatctagatcaaaaacacatttgccgacttgacagcaacaaaaaccaaaccgc

SEQ ID NO: 4965 - DNA, 964 bp, Artificial sequence
  DNA replication origin
atttttagtagagacggggtttcaccatgttagccaggatggtctccatctcctgaccttgtgatccgcccgcctcggcctcccaaagcgctgagattacaggcgtgagccaccgcgcccggccaagaagaatctattttcttccaaaactgtattgccaagagaaatgcaccaatgtcagccccataaggcacaacacgggcatgggcctcgagccagacagtggggtttgaactcgaatccaccgcttgccagtataagtggccttgcgcaactcactcagcccctttgagtcccgaaagggtactgatataaccttcctggtaggggtgttaaagatgtaaatgataaaagcacatgaacccttagcagggtgcccggtgtgcagcaggggctcagcatggtccctgagcgtgtaggactgaccagagagaagtgatcagaccctggtcaaagaccaggaaatgcttctcaacagaggtaggccttgatctttggaggggttctgatgacacaggtggggtgggtaagacttcacagaaatggcacagccgcagcaaagaacagaggctgagttgtacagggaaagactggcctggagctttgtgtttggttggggaccgagtaggagtcaagcccggaaatgagggcctcagatgctggcccaaagagactgtgcccagtttgctaaataaatgaggaaataccagaggctctgagcacaggctcaaagggctggcgtcctggggtaggagtacccaggcagatggggtgggaggaagataagacagatgtgggggtcacaggaggctgcggtggaaatctgggcaggtggtggccagggtatggtggatggaaagaagcgtgttggggagggatgggcagggagggctgggctggcctcacggctttcggcaggagaaccctcgctcgcttgcgtaatgctctgccgtcactctattga

SEQ ID NO: 4966 - DNA, 1203 bp, Artificial sequence
  DNA replication origin
gcacgggcggcggcgctcacaccatggcgcggggccggccgtcaggcccccgggcgtcgcccgccgcctcaggccccggcgcccgcgccccgcgccgcgcgcctcgaggacgggcccggagcgtggggccgcggcggcgccgagttgagcgagtgagcgcgaggcagcgagacaaagataacccgggaggcggaggcggaggcggggagcgaggtggggagggagggggcggcggcggcgctggaggaggagaaacgggacaccaaaaatatattctgaggagagagaaaacagctccccctttcctcctcaggcaggaaaaaccggcggaaacgcactcacaccccgagccctgccgggtagggcgcgggccgaggcgcccgcgcggcgtgaatattcatcaggggtggggctcgaacaatggccgcgccggcgggcagcgcgggcagcggtcccgacacgacgcccggcgcccagggtgcggcctccgcgctcgaccccgcacggcgctcccgaaaactgcaggagcggggaggaagcgggctgggatttccccggggaggagctggggtggggaaacgcccctacctcgcgctaacaacaaatgacacgaaactgagctggaccgacactaagaggccatggaccctcgcgtctcccagggcaagggtgtgtcccgccggccgcgtcccggctctagagggacccgaacccggtgttgccgagcggaggaggggcctccctcgatcctcgccccctcctcgccccattcgccccatcccccactctcccacaccctagagaggagacccttaagtccctcgtttccggcttccctgcacggttttcttttcctttctctgcttttgcaggctaaatgtgtggtacggttgtggttgtagttgtgggattcgctgagcatcgctgggctgcccggccatatccaaaacagctcctgtaattgtctggcgctgcgctcctggctgcgctcggtaggtgagcactgtgtttggggcccttagtaccaacccgcattttgtaacctggagatcactaaggatcaaccaacaggtttcttccggcaacctcggaagccagtcggtagttaggcactttaatgccagtgaatcaacagtcatttatatcgcattcctccaccgtccaaaaactttcagtggttccctgttacctgacaggtgttct

SEQ ID NO: 4967 - DNA, 913 bp, Artificial sequence
  DNA replication origin
tccgtccgccctccgcgcggcccggccggcagagagccccgagcggcccgagagcgcagccgagcccgccgccgccgcccgcggccccgcgaggagagtaccgggccggctcggctgccgcgcgaggagcgcggtcggcggcctggtctgcggctgagatacacagagcgacagagacatttattgttatttgttttttggtggcaaaaagggaaaatggcgaacgactcccctgcaaaaagtctggtggacatcgacctctcctccctgcgggtgagtgggcccgcgagcgggcgcgcggggagcgggcagccggcagccggcagccggggccgcgcccaggtcggccgggcgctcgggcgccgccgtgggcagagccgcggggcgcggcggcccctttgtcttcctgtgcgggctggtgcggggcgggcgctaccctctaccgcccccacgccccgagcccgccgcgcgacccccgggcgctgggggaccgcgcggggcgaagcccacctcttttgtcaccgccttttctctccaactgccttgcttgatttattcatttttttggcttcttttaaatgataacccctcccctccttcctctccaggatcctgctgggatttttgagctggtggaagtggttggaaatggcacctatggacaagtctataaggtcggtgtgggcgccttctttgtttcccgtggcatgtggaaacttcttattgggggacgaggagagggtgataaacatgctgctgactggaggccacgccgcttggccaaagttgggagaggggtttctttcgccttgcagtccctctgtttttgcacaccgagtttatattcagactggccttaaaagacctcatttcctggctttgagataaggaaataagctacactcttaggcat

SEQ ID NO: 4968 - DNA, 1322 bp, Artificial sequence
  DNA replication origin
atgttcaccatcatagtgcttctgggctggttccacagcatggagccaggcccacctgctgtagctttcagaactgccatttggacacgtggttgaagcagccttcagttggaggattcacagtaatggcatcactgtgggagcttagaggaacaactgcttgcaaccccagctgcactggaattacctgggagctttaaaaacactgccttttgggcctcagccccagagactctgacgtgactgatctgaacacaggagtgtcatgtcctccggtgattctgagtggagtcaaggctgtgagaccttctgctgtataaaggaatattgagagctgggattgttaaggaattctcttaatgctacgtcactggcctctgatgtaagcctgctttctcgaggaaaaggaaccataaaagcttctggaaacagattgtttaagaatgagaaattgtcatcatgccaggttgcaagacagcttttagggcagatgagcttctgctgctcattccttcatcttttcctccagcctggatttgtccgggggcagctgaggctcaggttacctcaattcttgagtttctgaagaggcatatccaggggtgggttacgagaacaagagcctgcccagtctgaaagggatgcaggaaggggcggtgtgtactagaaggaaggaagctatcatcatttattaaaactcttcttggaggatggcccatgaagacctccaaacaagctggaggggccagtcacttgctgaagactagcgaagtggagggggaaagcccgagggagctgcagactcgaccactgcgccctcccctcctctccctgcaaggagcccaaggtgtgatcctgccaggcgttcgttcgctgcatgaccttggccatccttccattcccctgggtgtgaattctcattggcaaagtgagctggtgggcataagtgggttttaagtttaaaaatttaaaaaccctgtctgcccccaagtgtggtatcaagattttatagtatgacacttaaattgcttttttcatccgggcgcgtaacagcaacaatgaaaccagcagataacgcgtgagtagtatcagctctgggcctggcactattttatatgtattagctcattttttttaaaaaactgttttcaaccactccatgagatgagtgctcttatgatccctttttcacagaagaggaaacggaggtacaaagaaattagtgcacaaagccagtcggagagagcccctggccaggcaccaagctccagaggtcgctctggcgagcgtttgcttcgggatctgatgccctggagtcgcca

SEQ ID NO: 4969 - DNA, 1735 bp, Artificial sequence
  DNA replication origin
cggcagctctccaatgctttggaaccggcgggacccctgcgggctacccggggcagggcggtgtccgcaggggtctgtccagccgcgcctgctcctccgggtggagagttgggacacccggccagctcgctcgcagcccgcggactggcccagccgagccgtctccgcccgttccccgcccccgcagcggcggggctagagccagagccgcgcccggcagttcccggccgcgagggcgggcgcagcttgtggccggcggccggagccgactcggagcgcgcggcgccggccgggaggagccggagagcggccgggccgggcggtgggggcgccggcctgccccgcgcgccccagggagcggcaggaatgtgacaatcgcgcgcccgcgcaccgaagcactcctcgctcggctcctagggctctcgcccctctgagctgagccgggttccgcccggggctgggatcccatcaccctccacggccgtccgtccaggtacggggaagctggagcatccggggactaggtaggggtgagacggaccacagccttgacaccttcgagtcccccgctctgcaggacgccgtgagcgtcctccctaagttgcacttggttgtcagagtgtgttgtgtaagaaggggatggcggtgaggtctgcgtgtgtgtgtttcttgtgtggagcaagagttaacgttgttcaggtcgtttgaaggaacttgccagttgttctggaggggggttctaggtaggtgtgtgacttcccgtgtgaatggctttcaggttttctatccggctacgttctacaggttcaggagcgtccctcttagaggttaggctcaggaccgtcagtctccttaacaaggtaagggctgaggccttaaccacactggggagggtaacttgttgcccctccagataaaggatggtgctagggaatgtagctacaagcaagtaggcgctgagaagacactcattatttacaacagtcatgcccagcactttacagtttataagcccttgacagcaactggtcttttaccctccctacagtcttgtgaggagggtgctgtcatcacccctgttttacagcgggggaagcagaagtttaggtgaccaacttgttggaggatgatgtcctgaaggagggtaagacctctgcatgcagcccccctctgtcttccctcccactcgtcctgcctgccagggctttctcctctgcactgccgggaggaaggaaggccgctgggaaggcacgcagatgctggctcctgctgggctgtctctccactgccttatctttggggcagggtagcttctcagatggccacattcctgtgatttagctttacattctaggaactgaggcaagggacaccatgaacttgggctcttgaggtcatggagcaagggtccattcgtcacgggaatgtgatggatgtctcagtcgctgcggtttggtgccaggcttctggacattgaatgtatgaaacagaactccatgactattgatgagctgaggaaagccagaggtggcatggggacgttcactgtcctttttgccatccagtttaccaagcggctattggcattgttttctttctcaatcccttctaatttattgtgtgatatctcatttgatatttcatttaatattctgtattcatatccgatgttaacgtttatgctagacagaaaggtagagcctttgagaatggggtttgctggggcaggggtgtg

SEQ ID NO: 4970 - DNA, 913 bp, Artificial sequence
  DNA replication origin
ggtctccaggctacagcactcccacagccccagctcctggcgacccagcccttaccccaaccgcccgtggacacctccaggaaagggcttcctgtcacgggacagacccggaggtcatgggcatgtggttaggcctcaccttggccagtcgtttctctcccagcgagcagaggcgctgcttcctcgtgctctcccttctctgtctcgggcctgcagtttgctccgtggttccagaccaaggcccacggggaagccattgccaaatgcagaggctggcgcggctggctgagcaggcagcggaggccgagggtgggtgtccgtggtcctgcgtccccgtgtccacagccaggccgcggggaccctagggtccgctccttcgctgcccgagcacggtgcctgcaggggcccctccgtggggtcgtggatcgtcagggccgcgtgggtggctgggcgggggcgggctgtaggcagcttctaaaagcaggggctgggcgggggcgtggggggatagggagggacgtagtggaagttggggccccaacggacatgagggcggcagatgcagatcttatgaagattcaggcaggaagagctcggcagggcgatgcccaagacggggtagtggacggggacgaattggttcagagacgggtagcagatggggcagaaggacgagtaggtgggctggaacaggagcgtagtctgcgggtccagaaacgggggacggatgggaggaaagaagagccgactgccagggagctgcggggtggcgccgagcgggcgccggggttgggaggcggagaggcggggcagctttcgagtcattttcagcgagtgcaaagctccctcgtcggaacggtcggagtgcgcggcgagcgcggggcctgcgcggcttttatctcctcagggcgtt

SEQ ID NO: 4971 - DNA, 973 bp, Artificial sequence
  DNA replication origin
ggggccccaacggacatgagggcggcagatgcagatcttatgaagattcaggcaggaagagctcggcagggcgatgcccaagacggggtagtggacggggacgaattggttcagagacgggtagcagatggggcagaaggacgagtaggtgggctggaacaggagcgtagtctgcgggtccagaaacgggggacggatgggaggaaagaagagccgactgccagggagctgcggggtggcgccgagcgggcgccggggttgggaggcggagaggcggggcagctttcgagtcattttcagcgagtgcaaagctccctcgtcggaacggtcggagtgcgcggcgagcgcggggcctgcgcggcttttatctcctcagggcgttccagggcggaacgtgctttgtgacctgcgccccccgtgaagccgggagcccctcgcgagttggcacagggccccgtctcagggtttaggagcgaacggggaaatggaagacaaaggaaatggggggacatagcaacccctattcttgtaccctgtagttttgccctcagtaggcaaaggctgatcagagggctaggatacagttagaggccgggggcctgggggagcggctctgagcaggatctgggaaaaggggacgaagtcagtgccccaggcaccttcccttaagacagcgcagcgttcaaagcccttcagtccttcacatcactgcgggaacatgcgcaattagacatgctaggtccattttacccatgggacaggaaggaccagagagggaacttccataggctggcggtggtgacaaagcaggtggggctagaacttgggtcaggagagggcaggtaggagggaaggcaaaatgccccaagcgcgcaccagcgccttgcctctcctgcatgtctggacggggtcctgcagggggcgcgtcagagcagacctgggcgtttcctagcttacccttggtccccgtatt

SEQ ID NO: 4972 - DNA, 1198 bp, Artificial sequence
  DNA replication origin
agccgccctccgccgccggccgcctgcccatgccggtgcgctgctctccagccgcagcggcaggccctgcccagggcggcccgcgggcgggggcggggcgggcgcggcgcccaagccgcagggcaggaggacaaggggacctggccggcacaccgcgcacctgcccgagcccgcggggaacgcggggccccagtgaccgcgggggcgatggctgccctcccttcgcgcaggcaccgcgcgccaagacccgccacccccagagccagcgaactgtgggtggaatcgccgcaacgggcgcatggtggccggagctgtctccgccccggaggcagcgtcggacgtccatccagtgaaggaaccagcgcgacccacgagtcgcgcccttccctcctcccccgcccccgcaggctcctccaaggggacaccccggtgcgctgggcgcgcggggaggcgccacaggctcgcggtccggaggagaagcccgggccggtggaggaggagtgctgtcaccccagcctggcgctgcggaggccaagacaaggcatgggattctctggacgtacagaaagtttaggaaagccaaattttgtttcctttccgagagttatcaactcgcgcacaaggtgctctgaacagggaaactccctgcgcggaactcagtgttcccacgcccccacggaatcggaatcctgttctctcctcttgccacattgtgctgctttcacccatttgctacactgtcgctgccacttttcttctccctcccccagctcacgtaaaaaaaaccaaaacatctttctccgcttttaggcttagaggtgtacatgtccaagagcataagaaatataattatttcatggaaaaccagtgatttgcctcgctcagattgacttgctccgctaattacaggacaggctgtggtcaggaaaagaaaggaagcgtgattcttcttctggatctaaaagggctttctcatgcagagccaacctttcctgtccttcagagcgcctccttcactggttgcgatctcactgtttgagcatctttatcgccagaaaccgaaatgagcacaaaggggactagttgccattcaattaactgaaagttttccctttgatatttatgaaataaaatccttctcttttcttaatctttgatgtgtcaaaacacgtggcttctactattaaacaaacaccag

SEQ ID NO: 4973 - DNA, 1483 bp, Artificial sequence
  DNA replication origin
gcgccgcgcccgccccgcccccgcccgcgggccgccctgggcagggcctgccgctgcggctggagagcagcgcaccggcatgggcaggcggccggcggcggagggcggctgagggctgctgagggtacgcgcagcggcctctcgtcgccctgcacgtgcctcgccaggcagtgcgcctgctcgcagcgaggacctagccctctggttgcagagacccggtgccgcagcagcggcgggtggctgtcgctgccctgccctgcacggggcagggcggagcgggctgagcagcccgggcgcgatgcgttgagcgctcggagggccaaccgccggtccccttggcggcaaccggcggcacccatggaaccactgggcaactggaggagcctgcgggcgccactgcctccgatgctgttgctgctgctcctgcaggtggcggggcccgtgggcgccctggcggagaccttgctgaacgcgccgagggccatgggcaccagttccagcccgcctagccctgcgagcgtggtggctcccggaacgacgctgttcgaggagagccggctgcctgtgtttacgctggattacccccacgtgcagatccccttcgagatcaccctttggatcctgctggcctccctggccaagattggtgagcgaactggacttgtggggaatgggagggggcgatctcggggggacacctggagggtgaccgggtcagccagctgacctctagatagtgaccgcctcatcttgaatcagggcagggacgacagatggagcagcttcttctggttgaaaaggacccttggaagagcagtttcgcgttttggttcttaagggaacattggccttgaaatggccccaagtgtaagttctacaaactcagcgattgctgcttacttctgccgcacggaacgccaagtttgtcagctctctgcttaagttgagtgagatctgtttattgaagtgtaccagtctcacctgcagggagagaggtgccgacgaaccccggagctatgcataatgtggttaaaaccctggatgctacaggagagaggcgccttggcagtgacacagaccctgctgtgcgcctgactaatgaggtgcatggaaggggaccagggacacctgagtgcttgcagctgcaataggaacgccctttctcctccctctattgggttgaggctgtcactctccaggaagcttttgcttcggggtggctgaggccagtgaggtgagatgcatatttaaaaataattaactctgggcccaggacaatggcccagcctgtaatcccagcacactgggaggcccagacgtgaggatcccttgaggccaggagttcaagatcatcatgggcaacatagcaagaccaaacagtacaaaaataaaaaattggccgggcgaggtgattcacgcctgtaatcccagcactttgggaggctgaggcaaggtggatcacgaggatcactgatcaacatgg

SEQ ID NO: 4974 - DNA, 924 bp, Artificial sequence
  DNA replication origin
gggcgcgagcgcgccggcgccccctgcaggccggcacttggagggcccgccggggcgctaccgccgcgccgaggtcctcgcgctggctgcgtccgaggccaccggcgcgcacacgcacagctgcccgcctgctccgtgccttttccaaacgcgagttccatacgcggctgggagcggcagggtgggaggggaagaagggagagagggccacagagggaggcgcggagcggggtgggcagccggcgtcaccccctccccaccccttcgctccccttctccagtccgcgctgggcagtccccgcatgtgccagcggccgcgcgcctcgttccgggcccgcgcgctctggagccccgaaggccgcgctgcctccccacaggggcagcgaccagcgctgggtaccaggctggcctgggccgggctgggtcgcctcacctccggtgagcgcgccccagaggagccgtttcccttgcagtctagagggtagagcggcggggaacagtgtgcgtgtgtgcgcgtgcgaggaccgggtgtacgtgtgagtgcggtgcgcgcgcagggcagggcagggcaggacaggaggcgctacaggatgctctggtggaagcttatccttttcagccttgagatctaaatctgcaaccttagagctgattattctaccccagcccccctcctcggttctctacacgggcatctccctctttcgcctgagtcttcccaatctgattcccaaagagatccccctcgtggtccggggattttcatggacaccctgacccacgtgagccaggctgaaagggacagtgttagccgagggcatgtccatcatccagcctgctcgttaggctggatttcacgcaccaggaagccgcgtttggggacttgggtatctgctttctctctgtcttggccttaaaaattgc

SEQ ID NO: 4975 - DNA, 995 bp, Artificial sequence
  DNA replication origin
ccagcctggtacccagcgctggtcgctgcccctgtggggaggcagcgcggccttcggggctccagagcgcgcgggcccggaacgaggcgcgcggccgctggcacatgcggggactgcccagcgcggactggagaaggggagcgaaggggtggggagggggtgacgccggctgcccaccccgctccgcgcctccctctgtggccctctctcccttcttcccctcccaccctgccgctcccagccgcgtatggaactcgcgtttggaaaaggcacggagcaggcgggcagctgtgcgtgtgcgcgccggtggcctcggacgcagccagcgcgaggacctcggcgcggcggtagcgccccggcgggccctccaagtgccggcctgcagggggcgccggcgcgctcgcgccccgcgggttctccaccgccccgccttcgcccaccgaggaagggtcggagggaggacccggacgggagcaggttcccttcgcgcctctctggagggtcggcggggccctcaggctggtgctcacccgtaggaccgggacggtgttgtcacacttgtcaccaacgacggccggcgtggcgtcgcaagtccgctttccagtctcagcggctggaggaggcctcggggcggcagggggagtttgcctcccggctggctagcttcgctagactcagtcattactaaggggttgggagggggagcttgtctcttctctcctggcagagccgcgggaggcgtcggaaagtttcctaccacttgagggacgaaggtggatggatcgagagccttgtttccctgctgggatggccgaatgtaccagaagtctcgctggcgagcagcgccctcggcttccccggcaatcatcccaaacgcacacccttcccctggccgaaggaaccccaggttgcctaggaaacggccccgcggacctggcgggccctagggtggagacccgggcggggttggggggtactcgcgaatctgctgcggg

SEQ ID NO: 4976 - DNA, 1203 bp, Artificial sequence
  DNA replication origin
ggatttcgttccttggctcctcttcgtaattgagctgttcttccttcggggagggggccgcggctgcgcgggaggaggaagagctggaagggggggtacccgctctcagcccgcagcaagggcgaggcgcagctctccgtgccggcgtcccgggatttgtattgcatgcatgtacgcatgcagggatggatggatgcatgtatggacgaggaaaaccgatgaattgggtcccatgttctaggtttccggtcgagcttttggcagctgcagggcgcctcaggtcggtgcctggttaacccctaagatctgctctcgaggtgtttgggggccgcgggtgggcgctgtggacgcgccccgggtcgagggctgcccaccggccgcgcgcagatcccaccgtggaggcccgcggcgggggacaaaggcggacaccccgagcaagcaaagggcgggcgcacacaggcactcacgcacccacgcgctctctcgcccgggcccctcccggtgagcccccgcgcctgggagtcagggctctgcgcttgaaaagttcgcttcatgtagacgctgctccctcctctcgccactgcatttagcaagcggtgtgtgaacgtgtatcaccctctccccagccacccccaaaggtgtgggcagattgcaagagttactgctctgttattgtttgtcaaatagggtccttctcttgggagagggtcgaggggcatgtggcggatcccgggccaggattacattaatcaaagcattatttccccagagaagcggagcacaaatgagagtaaatcctaataaaattggatcgcggagaaatggaacgctttaagtcatctgtgctgactgataaaaatctcacatttacaagatgtgggtcttaaaaaaaatccgcacacctctggcctcggcttggctggtgggtccaggtcagggtgggggacagacactacacgaagctcagctgaacttctgaagtgagaaaggaagctggacacccattcggagtttcacaagctcaggtctgctcaggaggcatcttcggccctgggaacccctctggagtgtttgcggaacccgtgggtccgacggagtccccatcagtgccctgagaggtctggaactctgttcctctgggaacgtggcccccactttccccttcgaactctgctgcggaacgggcaactcccatgggtgggg

SEQ ID NO: 4977 - DNA, 940 bp, Artificial sequence
  DNA replication origin
ctgggcgttcgcaataggtctgggcggggggaagaaaggggagataaaagggagggagggacgagaggggggaagagaatcagaaggaaaacgaagggggaaacatgaaaaatagcaacctgcccaccccacctagtacgcgtcgggttgctcacccccttacccccgccccgccagagatttgtaaagcgcgcggcacggatgtaccattcaagctaatacctatagacagatgtgtccccagtggtttcaaagtttcctcttcccttcaccagccggcccccttctctgatcggcgggggtgggaagcgggggctcgcatcgccaagagctctggtcgtggccacgctccttggaaatccgccaccgcaactttccgcagccgttgcgcgccggcggcagccccctttgtttaagttctcggatgccatcatctgggaaacctgcagcccaggaccagcgcggtgcccgcgcgtgcgagacggaccgctcgctgccgccgctccctggctcctccaccccctctctccctccttcgctctccctcccttcctccctcctccctcctctgggattcgtgcaagtagcgtgcgtgcccttgtgagtttggagggtgccggtcagcggagccgtgcgatgtatttgaaaagcaatcagtccgaccttcccccatagattcatcgtaagtgtattcgaccccaatggctttaggaattccctgtggcagcaggagccgggcgaaagaaccgggatcggctagccgcgcccttctctgctccaccgcttcctcgtgtgtgtgtgtgtgtgtgtgtgtgtgtgtgtgtgtgattagcggtgggggggtttgctcgctctctattcttaggcatggtggtgcttttttttctttcctttctgtctcagatggatttgcgtggtggatggggctggcggcgacaaa

SEQ ID NO: 4978 - DNA, 947 bp, Artificial sequence
  DNA replication origin
tctcagggtggaaaaacctcacgagtgcagttttcgtgcgtcaggcatcttcacccttctttaaaaacaaaaacaaaaacgaaacaccaccacagtatgaacgagatctcatgatcgccccctttttctcttccggttttgtttgttatatatgtatacaaaacagtctgggtgtttattatgctttttattttttggcccctccttccttggactgcaaaaatgcctccttggtccgtttctcccgcgttttctcctccaagggcgggcatgcctgtctctgggtggaggggagggcggcggatgggcctgggctggagcccggagcggcccaggtgcagggtcggcgcggcggcggcagcggcggcggcggcggcggcggcggcggcaggggcggcggcggtgctgacggcggctgcggaggcggcggcggcggcggccctcttcgctctgcgccctggcttcactgaacgctcgtctgcagcccgtggtgaggcggcggcgtgtcggcgctcacggtgcccacctgcgagtagacgtcgtcgggcgtctgctgttggatcccgggcggcgtcatgcgcttctccttttggcgccgattgcagaaccagacccgcaccacctccttctcgagctgcaggctgtcggccaggttggtgatctcctgcgcggagggcttggggcacttgaggaagtggctctccagcgcgcccttgacgctcacctcgatagaggtccgcttcttgcgcttgcggccctgcgccgcgatcttgtcgatgcttgtggggctgccggtgcttgagtccgcctcctccagccacttgttcagcagcggcttgagcttgcacatgttcttgaagctcagctgcagggcctcgaagcggcagatggtggtctgcgagaacacgttgccgtagagtgtgcccagcgccaaccccacgtcggcc

SEQ ID NO: 4979 - DNA, 1130 bp, Artificial sequence
  DNA replication origin
tctatcgaggtgagcgtcaagggcgcgctggagagccacttcctcaagtgccccaagccctccgcgcaggagatcaccaacctggccgacagcctgcagctcgagaaggaggtggtgcgggtctggttctgcaatcggcgccaaaaggagaagcgcatgacgccgcccgggatccaacagcagacgcccgacgacgtctactcgcaggtgggcaccgtgagcgccgacacgccgccgcctcaccacgggctgcagacgagcgttcagtgaagccagggcgcagagcgaagagggccgccgccgccgccgcctccgcagccgccgtcagcaccgccgccgcccctgccgccgccgccgccgccgccgccgccgctgccgccgccgcgccgaccctgcacctgggccgctccgggctccagcccaggcccatccgccgccctcccctccacccagagacaggcatgcccgcccttggaggagaaaacgcgggagaaacggaccaaggaggcatttttgcagtccaaggaaggaggggccaaaaaataaaaagcataataaacacccagactgttttgtatacatatataacaaacaaaaccggaagagaaaaagggggcgatcatgagatctcgttcatactgtggtggtgtttcgtttttgtttttgtttttaaagaagggtgaagatgcctgacgcacgaaaactgcactcgtgaggtttttccaccctgagatgacctacacggcagcggtggacagcacctgcctcgtcttctcctctttgaaaaaaagagagagagagagtcccctttcctttcactttctccctccaaaacagctgcctaaagagatccacggaaactttatttcctgggagcgacctgagagaaaacagaggcaccaggttccatcaggggacgacaccgtgctctgggaccctgtttttcttggccatattaaagtcatttggaaacaaatcaactctgaaatgggaaggaggggggaaaaacagtctccaagaaaaaaataattatattgacagcttctgaaactaacagactgaatagcaaagccaaaagaaaagtatcctcaaagtaaccttggaaataaaaggatcgggaaggagcagag

SEQ ID NO: 4980 - DNA, 1211 bp, Artificial sequence
  DNA replication origin
tggggaccctagggcgtcagatgcgacagctaattttaaaataactgtttaacaggtgattagggagcgcgctttctctccaccaccaagttcacctcttctccaaacccctctaaaataagtgacttgacgataggtgatcccattccctagtcctctccttaatgccagtctggaggcgcactgtcaagaagggatgcgtctcctcgcccttgagaaccagcgcggagaccttcttttgtgcctctccttggctgtgaactttcccgcgcggtaggttctcctttaagaaagtagcatccctatgaatatttaatgctgcacgcgggccggcggggcggaggggagcccgcggcctgggtttccgcgcgcgccgagacccgggcgcagagcgagtgcgtccccaccagcctggccgccgcgggaactcggggaccgggagggcgggggttagcgggaggaaagggtaagctgaagaggggctgggaacgggagggaggctcggggcgaacgggccgtcgcgttcatttccataagaaagctgaaatcgcagttggaagcaggatttctcgcccctgcagcccttcccccatacccggttttctgcaagaagcgggctccagagctcagagcccgaagtgtgtgctctggtctttgatgatgttgataaaatgtggtttcaaatgttgtcccgaagaggccggtttcctgtctgtatgtggaatggaaggaccgtgccgggtgagtccagaacgccggggagcggacaggaggagcagggctgaggagagggagggcgcagccggcgggcgcagggcatccctgcaggggaagttctccagggggttttgaaagggggagccaggttgaagccaagtttcccgagcaaggaagagtgtgtgtgtgtgtgtgtctgtgtgtgtgtgttcgggggtggggagcgcgatgagggaagacgtcacgaaagccccagaacccaggcggcccgcgcgtgggaaggtctggcaggtcttgtcacctccctcttcaaagagcgggggaaactttcgctggccgtcgctgaccctcttcctgcgaaggaataaagtgaacttgcccagatactggattccactggcggttcagttgttgagttctttctgcgttcgcattgagcattgagtttctttttgacttgcagtgtgaacagcagccatgtgacctcaattcta

SEQ ID NO: 4981 - DNA, 990 bp, Artificial sequence
  DNA replication origin
cccctcccccgaccccgcggcccggcgggccccgagcccctctctgcgtcccgcgccctcccgggcggtggccccgctcggctctcctcgcgcccccgcgcgccggcaccgcccgagcatcccgggacacgcgtggcgggaggatctggccggcccggcctccccactgcagggagcgcccgcgacccccagcccgctccccgccgaccccccgcggcccggccaccggtcacttacgcctgcgctgggccccgcgcgcccggcggcccgagacaaaggctgcgcggccgcggcgccgccggctgctccccgagccgcagctgccgggggccgggaggaggatgggggaccgggaggagggagaggaggaggaggacgggaggaggagggggcggcggccagggagagcgggggaggggccgccgcggcgctggccacccagctgcagcagcccgaccccaagtcctcctcccgcggccggccaccctcctgggcgcagtcctccgcggtcctccgccccaaaacctcccccgggagactagggtaccgccccccggggggcggggtgagaggaagaggaggggaaggaggaaggaggtgtgtgtgtgcgtgcgtgtgttccttcttaatcgtgatgctctccacccacccccgcgtccgcgagcaatcttatgaaaatgctcgactcccggcctcacctggtcacctctaggaagaaccctcaccttcctccttccacccgcccgcacacctcgctttcggatggtccaaccattttatgagcagcaaaactgagacctgggagttgaaatgcccgaggacgcagggatactgagtggcaggctgagaggagaatgccggatctgagccctttaagaggcggacccagatgctacctgttctgtcctgggcccgatgcccagcacccgtggggatgggtccaggctgggagtgggacaagtatgtgccatcctgcctgggcctgcgagg

SEQ ID NO: 4982 - DNA, 881 bp, Artificial sequence
  DNA replication origin
ggctgctgcagctgggtggccagcgccgcggcggcccctcccccgctctccctggccgccgccccctcctcctcccgtcctcctcctcctctccctcctcccggtcccccatcctcctcccggcccccggcagctgcggctcggggagcagccggcggcgccgcggccgcgcagcctttgtctcgggccgccgggcgcgcggggcccagcgcaggcgtaagtgaccggtggccgggccgcggggggtcggcggggagcgggctgggggtcgcgggcgctccctgcagtggggaggccgggccggccagatcctcccgccacgcgtgtcccgggatgctcgggcggtgccggcgcgcgggggcgcgaggagagccgagcggggccaccgcccgggagggcgcgggacgcagagaggggctcggggcccgccgggccgcggggtcgggggagggggtgcaggctcgcggggcgccgcagcttggcgcccacagacgtgcggcttgggtgcaaatcctgtttctctgggcagaggccacgcggggacggaggaggcagagaggacgggctgtgatggagaaacgggagaggagccggccaggcgccaccgtcaccaccatcaccaaccaccaccaccatcaccatcactgactgtcgcccatcccagctcccctgcctcacctcccatctcatatccctgtgcagtgccaactttatcagatcatctctttttcactgggtactactttggaaaagcgacagagtgcgccaagtcaggaataagtacatccgctgtgggacatttatcttcccctttctatttagctacctcaattttctcatcaggaaagggggcacaatggcatttcattcctctaaatcac

SEQ ID NO: 4983 - DNA, 949 bp, Artificial sequence
  DNA replication origin
ggagggaggtggggggatcagctctccgcatggccagccgccccatccgggaggtgaggggcgcttctgcccggccgcccctactgggaagtgaggagcccctctgcccggccagccgccccgtccgggagggaggtgggggggtcagccccccgcctggccagccgccccatctgggagggaggtggggggatcagccccccgcctggccatccgccccatccgggaggtgaggggggcctctgcccggccgcccctactgggaagtgaggacccctctgcccggccagccaccccgtccgggagggaggtgggggggtcagccccccgcccggccagccgccctatccaggaggtgaggggcgcctctgcccggccgcccctactgggaagtgaggaacccctctgcctggccagccgccccgtccgggaggatggtgggggggtcagccccccgcccggccagccgccccatccgggaggtgaggggcgcttctgcccggccgcccctactgggaagtgaggagcccctctgcccggccacgacccgtctgggaggtgtgcccagcggctcattggggatgggccatgatgacaatggcggttttgtggaatagaaaggcgggaagggtggggaaaaaattgagaaatcagatggttgccgggtctgtgtggatagaggtagacatgggagacttttcattttgttctgtactaagaaaaattcttctgccttgggatcctgttgatctgtgaccttatccccaaccctgtgctctctgaaacatgtgctgtgtccactcagggttaaatggattaagggtggtgcaagatgtgctttgttaaacagatgcttgaaggcagcatgctccttaagagtcatcaccactccctaatcttaagtacccagggacacaaacactgcggaaggccgcagggtcctctgcct

SEQ ID NO: 4984 - DNA, 1289 bp, Artificial sequence
  DNA replication origin
acggggcggctggccgggcagaggggctcctcacttcccagtaggggcggccgggcagaagcgcccctcacctcccggatggggcggctggccatgcggagagctgatccccccacctccctcccggacggggcggctggcccgggggggtctgaactcccccacctccctcccggacggggcggctggccgggcagaggggacccccccacctccctcccggacagggcggctggccgggcggggggctgacccccccacctccctcccggacggggcggctggtcgggcggggggctgatccccccacctccctcccggactgggcggctggccgggcggggggctgacccccccacctccctcccggacggggcggctggccgggcagaggggctcctcacttcccagtaggggcggccgggcagaggcgcccctcacctcccggactgggcggctggccgggcggggggctgaccccccccccacctccctcccggacggggtggctgccgggcggagacgctcctcacttcccagacggggcggttgccaggcagagggtttcctcacttctcagacggggcggccgggcagagacgctcctcacctcccagacagggttgtggccagcagaggcgctcctcacatcccagacagggcggcggggcagaggtgctccccacatctcagacgatgggcggccgggcagagacgcttctcacttcctagatgggatggcagcggggaagaggcgctcctcgcttcctagatgggatggcggccgggcggagacgctcctcactttccagactgggcagccaggcagaggctcctcatatcccagacgatggggggccaggcagagacgctcctcacttcccagacggggtggcggctgggcagaggctgcaatctcggcactttggggggccaaggcaggcggctgggaggtggaggttgtagcgagccgagatcacgccactgcactccagcctgggcaccattgagcactgagtgaacgagactccgtctgcaatcccagcacctcgggaggccgaggctggcggatcactcgcggttaggagctggagaccagcccggccaacacagcaaaaccccgtctccaccaaaaaaaaaacgaaaaccagtcaggcgtggcggcgtgcgcctgcaatggcaggcactgggcaggctgaggcaggagaatcaggcagggaggttgcagtgagccgagatggcagcagtaccgtccagctttggctcggcatcagagggagaccgtggaa

SEQ ID NO: 4985 - DNA, 1325 bp, Artificial sequence
  DNA replication origin
gtccctgggtacttgagattagggagtggtgatgactcttaacgagcatgctgccttcaagcatctgtttaacaaagcacatcttgcaccacccttaatccattcaaccctgagtggacacagcacatgtttcagagagcacagggttgggggtaaggtcacagatcaacaggatcccaaggcagaagaatttttcttagtaccgaacaaaatgaaaagtctcccatgtctacctctttctacacagacatggcaaccatccgatttctcaatcttttccccacctttcccccctttctattccacaaaaccgccattgtcatcatggccccttctcaatgagctgttgagtacacctcccagacggggtggcggccgggcagaggggctcctcacttcccagtaggggcggccgggcagaggcgcccctcacctcccagacggggtggctggccaggcggggggctgatccccccccacctccctcccagacggtgtggctgccgggcggagacgctcctcacttctcagacggggcggttgccaggcagagacgctcctcacctcccagacggggcggcagggcagaggtgctccccacatctcagacaatgggcggcggggcagaggcgctccccacatctcagacgatgggcggccgggcagagacgctcctcactttccagactgggcagccaggcagagaggctcctcacatcccagacgatgggcagccaggcagagacgctcctcacttcccagacggggtggcggccgggcggaggggctcctcacttcccagacggggcggccgggcagagactctcctcacatcccagacggggcggcagggcagaggcgctccccacatctcagacgatgggcggcggggcagagatgctcctcactttccagacggggtggcggccgggcagaggctgcaatctcggcactttgggaggccaaggcaggcagctgggaggtggatgttgtagcgagccgagatcacgccactgcactccagcctgggcaccattgagcactgagtgaacgcgactccgtctgccatcccggcaccttgggaggccgaggctggcagatcactcgcggttaggagctggagaccagcccggccaacacggcgaaaccccgtctccatcaaaaaaatacgaaaaccagtcaggcgtggcggcgcgcgcctgcaatcgcaggcactcggcaggctgaggcaggagaatcaggcagggaggttgcagtgagccgagatggcagcagtacagtccagctttggctcggcatcagggggagaccgtggaaagagaggg

SEQ ID NO: 4986 - DNA, 937 bp, Artificial sequence
  DNA replication origin
gtgaggagagtctctgcccggccgccccgtctgggaagtgaggagcccctccgcccggccgccaccccgtctgggaagtgaggagcgtctctgcctggctgcccatcgtctgggatgtgaggagcctctctgcctggctgcccagtctggaaagtgaggagcgtctctgcccggccgcccatcgtctgagatgtggggagcgcctctgccccgccgcccattgtctgagatgtggggagcacctctgccctgccgccccgtctgggaggtgaggagcgtctctgcctggcaaccgccccgtctgagaagtgaggagcgtctccgcccggcagccacaccgtctgggagggaggtggggggggatcagccccccgcctggccagccaccccgtctgggaggtgaggggcgcctctgcccggccgcccctactgggaagtgaggagcccctctgcccggccgccaccccgtctgggaggtgtactcaacagctcattgagaaggggccatgatgacaatggcggttttgtggaatagaaaggggggaaaggtggggaaaagattgagaaatcggatggttgccatgtctgtgtagaaagaggtagacatgggagacttttcattttgttcggtactaagaaaaattcttctgccttgggatcctgttgatctgtgaccttacccccaaccctgtgctctctgaaacatgtgctgtgtccactcagggttgaatggattaagggtggtgcaagatgtgctttgttaaacagatgcttgaaggcagcatgctcgttaagagtcatcaccactccctaatctcaagtacccagggacacaaacactgcggaaggccgcagggtcctctgcctaggaaaaccagagacctttgttcacttatctgctgaccttccctccactattgtcctgtgaccctgccaa

SEQ ID NO: 4987 - DNA, 1838 bp, Artificial sequence
  DNA replication origin
cctcagccccgcgggctcgcacagctggcgcggaccacgctctcgcccggggccggcggcctcagcgccccccgaatgaacaccttccgcccgctggccgccccgcgaggcgggccgtgtcgtggccccggtgcacggagggggacgccgaggcccggagcagggcccgtctcggcctgtgctcggagccaggcggcagggcccgcgggccggcgggcggcgcggagacggctgcgctcccgccctccgccagcgcctggcggccgccccacgtgacgggaagcggcggctgcggggtcgggccagcccaggagccgcgggccggagcggggcggcggggccccaggccgcggggcggcgcgggacggcgggcgccggcgccggtgagtgaggagggcggcggggcgcggggtgcggggctcagggcgcggggcgcgtggggcaggagggcggggagcaggagtggggggtaggcggcggggcggggtggagggcgagcccgtgcgtgtgcgctggggcaggtgtagtgggggctggaacgcggggtggggggagcaagtggctatacacttgggggcaggtgtgcgggtgtgcgacttggtagctgtcccttgtgggggccggctagcctgctggggtgagcaaataagtgttcacgtgtgtgtgggatgaagtgtgcacgggtgtggggtcaagtgtgtatgttgtgtgtgaggagtgcgtgtgtgtttagggcaagggaagacctgagagacctcgtccttgatttgggttttccggggagaagggccaggaaggacttgcacctccatccctggtatggaatggttttggcgctgtgattgaggtttctgggagctctttggatttgagagctcaaattcgggtcacactcaggcctgaattgtcctgatctggagagtaggcaggggtgtgttggggagtagggaaaagtgctgtgctgggcttcctggcccctgtttttagcaccaggtcaagggctggaagctgtcatccctgtggaattgttttctttccattgccttctggaggtgcaggtgcaagttagtccgcctgcctccctgtgttaagtgttgatatccttaaacacggaagctgtccggttgtctgcacctgccgtggcttctacccaaggactgttgagtgaccctcaggaagcctcctacctggctgctaaaaatgggggctcacagatcacacagcaggccttactgcacgtggactgcacgcgcagctgtggtcaaaacatgtctgagcagagtttaatcactgatgaagtgctcatgggcaagcaccttgtctatcaggaaggaaggcagctgcgggtgtgattgtggtggcaagttaaggcactgagaaggtgtgcagggaagatcctactgcgttgtgtgtgttggcttggttggagtcaggatgaacgaatgtagagggactgtgtggtggctgctactctctcatggtggacatgcttctctctgttggtcagccggaagctggcagacaactgagagctcgcagttccatggtcagtcagaaggaacatttggtcagctgcttccttttctttttccttccatttctgccagccgagcagcctcaacagtcattgcagctgcttctgtgatgtgtagcaaaacgctgcctggagtactagaaagtctactggctggaatctgctggaacctgtccataactagcctgccccaggtcatctatgaaatgggagtgatgctctgtggtggtaatgaatgtggagtgtgggttcaaatcctgcctctgccatttcctgtgacctttgggcaatttgctggacattc

SEQ ID NO: 4988 - DNA, 1486 bp, Artificial sequence
  DNA replication origin
ctcgcaccggattcggcccccacttccgagccctggtggctaagcccctcggcctccctccggggcgcagggggttggaggtactcacggcaccgcagcgggccggggactcccggacggggctggagggcgcgggcggctggtggctgcggctccgctgccggccgagtggagcgctgcgcagctcccgccctcgagaaaccccgccgtgtcatttgaccatataaggagatgcacgcctcggctcgctggcaccgggcgtggggcgcggggggcgggcgcccccaggcctcgcggttgccgtgcccccgccccgggctgcggcggtcccggcccgtaccctttgtttgccagggctcctttcttcgtgccctccgggtcttgggagcacagtagttatcgggagcgtcgcctccggcgtgggctctcgggcgcgagtttcggacgaggcctgggcgcggtggcaggggtctgcccacgccgggatctctgcctggtcccaggagcgggagactggagaagccccaggacgtgccgggggaggcggagggaggagggggtcacttctcaggaggcatgtgcctgggatatatttgcaaggtggacgtttttccttcttaccctgcagatgcttctttacgaaatgaacaccacagatgaccataaagaatccttcgttccactacggaggggactaaaggaaggtcctatccccacctctccctctcggggccagaagactagttagacatcttggattcccctccagggcgggaaaaccaaagtgagctgggagcgtgcctcccacattccaagcccgggccctctgcgtgacgctgacgctgggtagggacagatggcactgttcagcattgtcgcagggagagcacaggttgagcccatccctgggagagggtgcgtcgtgatggaaacatttgctcctgagcaggtaaccggtccacttgcagaaaccggtggacgatgagtaggtggaccacaaaggcgtcctcggcactttgggggcaggtgtattatttttaacattcggggcagctcataggaatacatcctccagagaaggcgggaagaactccgtgattgctttcttttaattgatactctccgtctggtaggcctcatgggtctccatcatggaatcacagaacttgagaataaaggggcttcatcaccttagcttccactcggtgagcactagctctacctggtatctcatttgatccacactcctttaaggtaaagatttttaccagatttacggtgaggaaagttcagctcagatttgctccaggccacgtgaacggtaactgtgccagctgagatttgaactgggatgtggtagatggcaaagccatgtaagtatattacgggatcagaaatgcctctcatccctcagtcactcaggtgactccagaggactgagacttgccataagcccagccagaactagatgtgcggaatacagccc

SEQ ID NO: 4989 - DNA, 1302 bp, Artificial sequence
  DNA replication origin
tgcgcccgcccaggcgccgctctttgtctgcgccgctccctcctcccgccgccgggcggacgctgccggcccgggcggaccctgccggcccgggcgccgcgagcctcccggccgccaagccctcccctccgcccgccgcccgctcggccgcgcggctccggcctgacgatccccgcggcagcggcggcggcggcggcggcggcggcggcgaccctcccccggcgcgcagcgcccgcctcctccgcgctcttcctcctcctcccgcgctcctccccggccgcgccgtgacgccgcccaggggccggcccaggcccgggcgcgcggggcggggacccgagacccacctggggcgccccccgtcgtcgccaggctccgcgcccgggtcccggtacgggcgccgggatagcgcggggctgcgggacgctccgctctggaggcgcagcacgggccgggcgccgggggcaggaaagggtccccacgcccgaaattgcgtgcgggcggtggggggcagggtaggtgggtggggaggagagtgaaaacacagacggcaacttccagcctgggatgactgccgggtgggctttgcgtcctcttttttgtttgttcgttgttcttatcacgaagctctagttgctgggcagccgcccccctcccggaagcattcccacggcactcagctaagcaggcctgttgtccatcagaaaagtgacttaaataaaaatgtcacttcctccctgtaattgcttgtgggcatttttatttatttgctttgcatctatttactttcccaaccagacacatttttagtccatcatccctgtccgaggcacttcctaaaagaagaagaaactcgacctctgttgcctcccaggcatccaggccagccccagcctgtggaatcctggttgcacacccgtgggggcagaacccgaagaggagctgcccgaatgtgcccctagaaggagtgtcgctaatgatgggaccgttcagctcacccagcctcgagttgtggctagcctataaacaaacttggaagatgaaaacccaagagcaaggggaaagacacaagtttccctttcacagacacatgcatccggatgtcttttctcctccccatatggtttcccaaaggaaatcctaatattcaaatgattctgatttcctggcaggatagcctgcatccatgttaatgagattctttcttaggctcctggtctctgcttactattaaggcaataataatttacccaaggttacaaggctgtattatttgattcactcatctcctgcttccttccagaa

SEQ ID NO: 4990 - DNA, 1203 bp, Artificial sequence
  DNA replication origin
cgggcgcagcgcggccaccgccccgggacccgcgccgctgccctccggctccgcgggcggcccacggcgaggtaagcgcggctaggcgggcgtggggcgggggccacaaacttggggccgttgggcggagttgggagcgcggcggggctcgcgggccggggtgcgcccgggaaggggccaggagagcgggtcccctccgcgcccctccggtgctctcggccctgccgcggcctgggcgcccccgaccgcggactgccgggcacctcccggctctgcaccttcctgcccgccttcccatccctaacccccaccatcgggggccggcccaggggcggggacgccagccaagggcgcgggcgaggatcagggcagggggcccggctgcggggcccggggactggagacccccgggtgcgcaggctgcgcctggcctgcaggcgggcggccggcacggagctcggggctagcgtgggaccgtgcggtggccagggtcgccagggcgcgtgtgccggggaagaatagccgcggatcgcagggccccggcgcagggacgggggaggccgcgatcggccgggagaacttaaccgtgtttattacaactatttatgttcgcgcacaaagctgctgtcacattgcataaaggaggtcctcgcttcggcgaagggagcttttgtgcccggcttcaggctctgcgccctgccccagatttacaggactctaacagccacctgaatgaaccaaagtttctcacaatcgctcggctctctcggtttttttcagggcgatttaatcaccgagtgcttttggaaaaatttgatatgtgagttttaaggcatggagggtaactgccttatgagcacagttagcttggcattgtgtggaggggtttaatttgcaaaacgctttaatttgtagacaatggggatctctgtgaaggtctgcggtggatgctaggggtcattggctggtggaccccaggcacctgacttaaactagtattgtaacagcttcagggacaaagccgagcgtgcgtggagtcggccttggccacttcacacaattcaggttggcagattcctctttatttggctttgtttattttgccaacaggtttaaggctgcttctgccaagtttgcatctgcataatgggatgagcaggccccagtgtgggcaggagggggcctaaaatatcgcaagggcca

SEQ ID NO: 4991 - DNA, 1600 bp, Artificial sequence
  DNA replication origin
tcagcgaacagaagctagaggcagggagacccactaagattccatttaaataggaagctggactcaggttggggtgttagccagggaaatgccagatgagttctgaagagcttgcaaaggaagcaggagcagaatgtggtgactggccagggaataaggaagagactgtaagatgacgtagagcttctgtggggtcacgggaagatcatcccaatattggcgaaaggcacacttgctcccagggtctgggagtgacttctcagctaagctaccagttagttgggtcacccggccttgaagaagtctgggcagatcccattcataagtgtgactcaataagaaaaatggctaggttaatgggacaacaaggtggggctgtgagcagaaaggtaggtgtgtgtgtgagtgtgtgtgtgtgtatgcgtgagaaaggctatgtgagtagaggtgtgcgtgtctgtgcaagtgtgtaaaaatgtgtttatgagttagtgtgtatgtgttgagtagaggtgtgtgtatatgtgtatgtgtgttgggtaggggtgtgtgcagtaggtgtctgagtgtatggatgtatgtgtgttggtaggggtgtgagtgtatgtgtgctgggtagcggtgtgtgtgtgttgggtaggggtgtgtgtatggatgtgtgtttgtgttgggtaggggtgtgtgtatggatgtgtgtttgtgttgggtaggggtgtgggtgtgtgtgtgttgggtaggggtgtgggtgtatgtgtgtgtggtgagtaggagtgtttgtgtgtgagtgtgtgtgtgtgttgggtaggggtgtgtgtatggatgtttgttgggtagagctggatttatgtggatatgtgtgtgtgttgggcaggtgtgtgagcgtatgaatgtgtgcatgctgggtaggggtgtgagtgtatggatgtgtgtgttgagtagggctctgtgtagatgtatgcatgttgggtaggtgtatatgtggatgtgtgtgtgttaggtagggctctgtgtagatgtgagtgtgtgttgggtaggtgtgtgagtgtgtggatgtgtgtgtggtaggtaaggctgtgcttatgtggatgtgtgttgggtaggggtgtgtgtgtacggatgtatgtgttttgggtggcggtgtgtgtgtggatgtttgtgtgttgggtagggctgtgtttatgtggccgtgtgttgggtaggggtgtgtgtgtatggatgtgtgtgtggtgggtagggctgtgtttatgtgggtgtgtgttgggtagggacatgtgtgtatgggtgtttgtgtgttgggtaggagtatgtatggatgtatgtgtgttaggtaggggtgtgagtgtgtggatgtttgtgtgttgggtagggctgtgtttatgtggctatgtgttgggtagggatgtgtgtgtatgggtgtttgtgtgttgggtagggctgtgtttatgtggatgtgtgttgggtagcggtatatgtgtgtggatgtttgtgttgggtagggctgtgcttatgtggatgtgtgttgggtaggggtgtgtgtttatggatgtttgtgtgttgggtaggggtgtgagtgtgtggatgtttatgtgttgggtagggc

SEQ ID NO: 4992 - DNA, 1109 bp, Artificial sequence
  DNA replication origin
cctgggagacagagtgagatcctgtctcaaaaaaaaaaaaaagaaaaaagaaaaaagtaatattcccctggtctttcatgcattcagcaaacatggatgtgcacccactaggcactggggacgcaggagatgcaccaggaggaggcacacgaggccctgcctcctggagcttacacactgcagggcggaaggcagcaaatagggaggcagacacatgaacatactttacttgaatacgacgagtggttgtgaaggaaataaataaggttgtgagatgaagagaatggtggagttccatccacttgacacagtgggttggggaggtgtctctgagaagtcagggtgatctgaggccctgggattagggacaaactaatcccatgaagaatggggactggggtgcagaggaaatgcaggggcaacctccgggaataggagagagcttggcactgtggggtacagaaaggaggtcagtgtggctggagggcggtggagaggatgggggatggtggggctagaggatcaggcagaatccgcaccctggggcagggcctctggaggccatcgtgaggagtttgggagtttggcgctgagcaggaaggaaggctatgctggctctcagctggtgtgatgtaatatgactggcattttaggccccttgatttggatactgtatggagaagagccagcagaagagcaaatggaggggcatgaatgaggtgattgcgattatcctgggaggaggggcggtgacttagtctaaggaggatggaggtcaaggagacggagggacatggacagactggagagtggttctgaggtaggagagacaggagatgaggaaaggagaaagaaaagagggctcccagaccatggagacacccaggaggatgagagctgctgcctcaaatggaaaagagcagcaggtttggttgctggcaggggacaaaggtggactcaggcaggaggtaggaattctagctgggagctcagcggagggagtggaaacagaaatttgggacttctccacacagacacctttaaagcctaggatattgggtgagctcccttagaggaacaaggcctgactccagccacgagggtctcca

SEQ ID NO: 4993 - DNA, 1261 bp, Artificial sequence
  DNA replication origin
ccatcaccgatcgctctccccgggcaccatggaagcgccacatggggccaacccctggtgccgctatcaatcagcctggcatcgccccgctcacctgggccccagcacaggagcaggagcagcgccagcccggtcagggccaggacagcaggccgcgcgggggaggcagccatggcggcggggcgcgagcaggagggcgaggggcgcacttcgaggtgctgcgagggagaaccgggcgcgggagaggggtgcgagcgggcaggcgcggccgcgggttatccctgcgtcgctgccggggcgggacccagcgggtgggcgccgcgccagagggctgagggccaagcggctgcgcccagcgcacgggcgagtaccaccgaggtcctctctcccgccccggccccaaggggaacgcagcccctgggctccaaggccaaggatgcttggccacggagaaccgccggcggcgggggccgcgtggccagcgctgcccgcagcgaaagcggttaggacaagctgggttccggagacccaaggaagggcagaaggcatcgggagaagggacgaggccccctggccactcagagggaggacttgccggatcccagcgctggggtgtctccttggctcccccacttcctccgcccgccccagccgcgccactgttccccttactcctcacccctttcttccctatctccctccctccctgcttgggggccttgcttctgcctggtttgtaaagtgggctttggaatttccttagttcagagctgctcttaaggatgccttaggcggggctgtttttgagatagtttgaaagattccacagtctgggttcagagctgcagtccgggaaatcgtctcacccaaacttctccaatagaaaagcctttgagaaaccaggaacctggtgccctgcagctgtgagcaaaaccactgcttccctttgcccgctctgtaatctgggcacacttcagcgagcgatgttaaggtgagacccaagggaaacgcagaactgcatcccagtaactggcctgttcaactgtagaggacacgtgaaaggaggcgtagtgaacaaaaactagaacaactttatcccaacggactctgagcgggtcacctaattattctctccaggcctgggctacaaaaggatggagatgtgagattacctttcctgtcttcccatctcagatctgccctgaactgagctgattacctctttccttcaccaaggttctcacttattttcccctccctg

SEQ ID NO: 4994 - DNA, 1641 bp, Artificial sequence
  DNA replication origin
gagtggccagggggcctcgtcccttctcccgatgccttctgcccttccttgggtctccggaacccagcttgtcctaaccgctttcgctgcgggcagcgctggccacgcggcccccgccgccggcggttctccgtggccaagcatccttggccttggagcccaggggctgcgttccccttggggccggggcgggagagaggacctcggtggtactcgcccgtgcgctgggcgcagccgcttggccctcagccctctggcgcggcgcccacccgctgggtcccgccccggcagcgacgcagggataacccgcggccgcgcctgcccgctcgcacccctctcccgcgcccggttctccctcgcagcacctcgaagtgcgcccctcgccctcctgctcgcgccccgccgccatggctgcctcccccgcgcggcctgctgtcctggccctgaccgggctggcgctgctcctgctcctgtgctggggcccaggtgagcggggcgatgccaggctgattgatagcggcaccaggggttggccccatgtggcgcttccatggtgcccggggagagcgatcggtgatggggtggcggcgtagggacccatccttagcctaggcagggccaaggggtggtagaggaccgggtctggggttttgcactcgcacaagtgcgaagtggtgcccttgtgagggtggagagagtaccggggtcaaggggagggtctcagatctcccgggcaaccttgggcaaggagggccaggcgtccgaagggtgggcaagtagtgtttcgtggcttaacgtaaggggcaaaagggttgtgggggctttacgcagctggtaacccagaggaggcaaatggcaccatcaccgccattcccttccaggcagtcgcttagcaaccaagttgacttgcgcttcccagctgggtcaagttgcaatttgcaaagctgggcacaggcctcacaccccagagaggggaaaggctcttaaaggagtaatgcttaatctttcctgcttcgtggagctcccagcgaatcggttgaaaactctgaaattctctgctcgctctctgtaaaacgtgcattcacacgcacacccagaatgatgggtgctccgatatctgatcgctgggctccacaggccccactttaggaaccataatctgaagccgtggtttgtcctgagttaccaccttcactgggtaggaggaacatttatggttcacaagtggcctcaaggacacatgactgcctttgaagcttacaactaggggaggcagggattgttacctcagagttactggtgtatgaagtgacttgcccaagagcctgagactggcgctgtcccactgcaaagcagctgggcactgcctaatgtaaaagggaggctcactcggttgctcagtttctgtattttgctcattcgaaacaggtatggaaactgaactcgaggtgagaagaggcaggggacattcagtaggagccctgggatggagccccggggttgctaaaacagcaggaggcgtggtgaggtctgttcaggtggggaggattattgttccaccttagaatcacaggcgaagctaatcagtcatttcccgttgtatggtttacctgcctcccactctttgttcttgccacttta

SEQ ID NO: 4995 - DNA, 1275 bp, Artificial sequence
  DNA replication origin
gcacaccccctaccgcttaggcccgggcgcggaccccgggcggaggggcccctagcagtcctcgggcggccccaggtctctgcctcctgcccgggcgcgggggactcggcggcggcgctgtcgtccatgtcgcgctgggagccggcgagggtcccggtcggggactccggagcgtgccgcgtggggatacccttggggacagccgaggtcgcgccgcggtgtcggttaagtcggataaaaatactgtggccattggcagagcccccgctccgactgtttgctcctcaggaaaattactcagcgtttaactcttggggagccaagtgtgggcggctccccggcccgcggccgtgcccaggtgtcggggcgcaccggcatccccattctaggttttcccccggggctcggcggccgggcgaagcaggcaggcagctgggtggccgggcagggcgtgcctgcagcttctctgtgcgcgggtccagtttctgtcatcgctcacagcatgctgcctggagacagggcaggaggggcacttcgcaggcaggtggtcggccctctgcttgttagggaagtcagaaaccgtccttttaaagatctattcgttgggaatgttttaattgatgctattaatacgttaccaagtagcaaaattggactagaaatagctcccagtgtgagctgcgtttgaatgctagccacccagacacacactgaaatgaaatcacctgctaacctgttggcgttaccaagatctgattccagaggtgagtgggtacttcacttgtctgaagtgacttcagttgagctctaggaaggcaagtatgagtagatccagcctgtgtgctacagcccagctgttcaggaggtggagctggaaaaccccagcaggactccgggttgctaggggaggtttcaggcgtcggatgggtgttagatgtgtgtagttttgcaagggaggaagaactagtctaaagtgtgtgtgtggtcaatcttgagtaagaaagctgagacccaagaggaaagaccatttaaagttgaataactattattatggcagtaatactacctacatttgttgagtgcttaactgtgtgagtcatgattcttagtgccattgtctcaatcattgagcaaccctgggaaatcggtactataatgattcctattttagaggtgaggaagttaaggccaagagagattaggaaatttatggatgatcacacagatagtaagagaaggagggccaaaatttgaacccagaaaggcctgggagca

SEQ ID NO: 4996 - DNA, 1447 bp, Artificial sequence
  DNA replication origin
cctccagtgaccctctctttccttccctcactcgctccccttttcactgcctccccttctcctgcgtccaggcttttgaggggaggtggcctcagtcaggggctctccggtcccccggggtaatgcgatatgggggtattttatttccacccttagggaccctgcctgccaagctgcctcccgggcgccccgccaccgcgggctcgacgctgcaccctgccaggaccagggccaggacagccacgtatcacctccccgctcaggccccgggagcgcagaccttgggcagcccgcgcgccgccgccttacctgtcagctgcgcggccaggaggagccacagccgcggccgcatcggggcgcgcccgggacacctggccccgggggctcggcggagacagtcgcggctggggtgggtgaggagctggccgggcggggcgcctgggtcggggagctggggggggcagtggggagggcgggaccgggcgcggtggctgcgggagtctggtgttggggaccgcgaggtctccgccctcatcctcctagcattgcaaaggtctgggctgcgtttccagagcccaccaggaccctccgctttccagaaaggaggggacaccgccggcctcccccaggcagctgcatgtgtgtcatcgccccctgccccgggaggtgctcaggaaagggttgtgaccccgagtgacagtagaggctcagagaggtcaggatgtgtagtgcatggtggagctggccactaactcgggccgcttcttgtctgtttgagtagcaattgaggggctcctgggtgccccgggctgggctgggcctggagtcagcaagccccaagtcttgccctcccttgccagggaggaaggaaaggtaaccggctgtgacactgagggaggtgagctgggaactggaggtgcagagaaggccccgacgctgtttgtaggttgtgcgggtgcagcaagacctagatcttaagaatttcgaaggactgtgacgatcaccggctgcgccctgccggcgagtgccctggggccggctctatttgttgcgcgatccagccctggtggggagatttgtgaggggagacctggctcaggctgtgtcttcctgttcaaacgggggttagtagagagggggttggggaggtccagggagaactgggcatgcagcctgcaggggagagggaccccttggagggctgcgggagaggctccttgtaaatgtcagcaaagacccagccaggcaggtccatgggttaccctaagagcttagagtttatcggagaggaaatggcatgtcccctgagatctaaagcaggcagccgggcaaggacactgtcacatttggtctccacatccagtattctttccatcccactcttgccccagcccctctgcccattgctggtgacagcattgctcatggctgagttgggtgcagagag

SEQ ID NO: 4997 - DNA, 1068 bp, Artificial sequence
  DNA replication origin
tgacacacatgcagctgcctgggggaggccggcggtgtcccctcctttctggaaagcggagggtcctggtgggctctggaaacgcagcccagacctttgcaatgctaggaggatgagggcggagacctcgcggtccccaacaccagactcccgcagccaccgcgcccggtcccgccctccccactgccccccccagctccccgacccaggcgccccgcccggccagctcctcacccaccccagccgcgactgtctccgccgagcccccggggccaggtgtcccgggcgcgccccgatgcggccgcggctgtggctcctcctggccgcgcagctgacaggtaaggcggcggcgcgcgggctgcccaaggtctgcgctcccggggcctgagcggggaggtgatacgtggctgtcctggccctggtcctggcagggtgcagcgtcgagcccgcggtggcggggcgcccgggaggcagcttggcaggcagggtccctaagggtggaaataaaatacccccatatcgcattaccccgggggaccggagagcccctgactgaggccacctcccctcaaaagcctggacgcaggagaaggggaggcagtgaaaaggggagcgagtgagggaaggaaagagagggtcactggaggtcaccaggggaaggaaacaggtccctgcccagggtccccgcaggatgtgctcggaggaaggttggccaggccgtgggtcctgtggacacatttttattacttccggggaagtgtttgtagtacaatcagacaaacatggggcgttctcagttctcggagggctagggcagggtgatccctctggctcccgttctccctgatgtggctggtgttgggtgtcatgggtagcgtggctccctaggaagcagcctggaggttgggttgctggagttggatggggcatctggattgtccttctgagtaagcccagccagactgccttttggaagaagcctccacacacccggaaaactgcccaaacttgtcgatttgctctcgtgcccaaaaagcccaaagctggtcatcttgccagggggtgaca

SEQ ID NO: 4998 - DNA, 885 bp, Artificial sequence
  DNA replication origin
cgtagaactggaagaaaccttctttccttttttccttcctccttttctccctccttccctccttccctccctccttcccttccttccctatttccccccctcccttccttcctatctttcttttttccgggatgagaaaagcgcctgcttgtttgtgtcctgacggggtgatccaggagaggggaaatcccgtgatgcccgagaggaagaggagagaattgctggaggcctgtccttgagatggcaggaagggatgggtttagtgccccagaggatttggccttggttggttcatgaacagttggcacaaacaattcctctgcagtaacaggagggaaggccaagtgtgggtctagacacggggaggtgggtagacgcagacatcctttgttaattggtttttctcagtgaaaaagaaggttaggtcatcagatgagagtgaggctgggagaagggttgaaagtttggggagaggggaataggagtgacatagtctcctaggatagggggacactgaagtgaccaggtgaacacaagatttccaggcagcttggagggtcctcctgaggtcagtggtcctaaattcaagtgcggccagtagaccaggtaggagtttttctccagtataatcaggtgcaagggtgcagtgaggggctggtagagttgggtttaattgggtttgggggctttccaggttaacgtgactgtgggagaatggacaaaagtgctgaatgcatatggaggggaaggattaaaatggtgggctctggaatccaagctggtgtggagggaatcaaggatgaagaggaaaggagggaccattgcaaatctagcatcagggaggtgtaggtcccagggagatcaaattattgttggggtggaggt

SEQ ID NO: 4999 - DNA, 988 bp, Artificial sequence
  DNA replication origin
tgcttgcggggaggtgtgaagggagaggcgccggcgggaaccgggactgagggcggtgcttgccagcgcaagttccaggtgagcgcgggctccgcgggccgcgcactcccgggcagtgaggggcttagcacccgggccagcagctgtggagggcgcgccaggtcccccagcagtgtgggcccgcccacgccttggtcgaattctcgctggacctcagccgcctccccgtggggcagggatcgggacctgcagcccgccacgctcgagcgccccaccttcccgcagtgggctctcgcgcagcccgagcctccctgacccgcgttgccccctgccctggggcgctaccccctgctcaggggcgctgggtcacctccaccgcccaagggctgaggagtgcagacctgcggcctgggggactggcgggcagctccacctgcacctggggcgggatcctagtgcgctggatcctagggcaggggatacactaggggaaaccagctgaacccctgagtcaggtggagacttggaaaacttttatgtctagctggaggattgtaaatgcaccaatgatcactctgtgtctagcttggggtttgtaaaggcactaatcagtgctctgtgtctagctaatctagtggggacttggagaacttttgtgtctagctagaggattataaatgcaccaatcagcactctgtgtctagctcagggattgtaaacacaccaatcagcaccctgtcaaaacggaccaatcagctctctgtaaaatggaccaatcagcaccctgtcaaaacggaccaatcagctctctgtaaaacagaccaatcagctctctgtaaaatgggccaatcagcaggatttgggtggggtcagataagggaataaaagcaggctgcctgaggcagcagtggcaatcaggttaggttctgttgtggggcttgtatggcttgttttttttaatattcgcagtaaagcttgctgctgctac

SEQ ID NO: 5000 - DNA, 1381 bp, Artificial sequence
  DNA replication origin
gggatcgcggagagggagggggctctggggcgagcggagctcgggggcggggcgcggcgcagcctcggtgcgtgggccgggaaccgccgcctctccccggggctcggggccgcggttcctctggccgcgggagccgccgccgcgctgcccgaaacaatgaggcgtgcagcgcggggctgagcgtagcctcccgccggctttgaggccgagccacccgctgtgccccgccgcccgcgcttgcagctgccgccggcgcggagcagcgctggccccggagaggtgatcccgcaggccgcctgggacgggagcgcggggcagctccgagaccccacggtggcaggaggaggactcgagcctgcggcaggacgactcccgccgcgcactcgccttctgcagcccccaagttccgcggcgtgagtcggggaccccggccagggtcccagctctagcgggcgccagcgtgagtgtgggagcgcgtagcgcgcgcacccgagcggctgccggggaataaaatgtgacacgcacgccttggactccagtgccgcgctgccagggggagcaccgagcaccacggtgtcgtgcgcttcgaggcgcggcgtgggaagaaggctggtaagggagggcactgggtaagggttggcgacgcctttcttggtggcgctgcagcctccgcgctgctgtgcgcggagttacactccgtgtttaggagcgagacccgtgtgtggggaatgttgaaggtggtttggggaaaagcaggaaattctggagaagcgaacgggaggacggcttgcgctttggggacgggcggatacagttgtgcccctgtggctcagtaaaggtgatcttttattttggctcttttggctctggaagggagtgaagatttttgtctttcttcagccaacccccgtacaaaactgcacttcttaaaggttaaagtgtgttctgttcatttctggttctctgtggctataatgtttggggtagtagggatctttagaatcctaaatacccgagtgttaattcttatgtagttggcaggcggcaaactccgcttttgggtttactttccgcggtgttacggagtggatatttgatgcattcttttgagtagggagtgtgacgtccatctcattcggatttgccggttctgtgttgggggactgagtgaagttaaactcaatggctcccgcaagtgctgccttccaaagagctgaatagctgtgtttggagaagctgtgctttccaggaatttaaatgagactttttgtgattgccttccaggtctctcctcctagtaccatatttgttttgtcaggctgaactttcaaagctgttttgtaatctgagaagcacttttggggggaaagtaatgcttggc

SEQ ID NO: 5001 - DNA, 1134 bp, Artificial sequence
  DNA replication origin
tgtcttctctgcctttgtgagcaaccaagcaggcaagttcctctccgcagcagcccgatgctctcccggccccctgcggcctttcctcggccccctctacccatttcctgcgcccagactttgtagcctcttgcaccctgacagcaacggtgccagacagcaaacccgccctcgcatcccaccgagagggaaaaacgccgcgtccctcccctctaaaaccgcccgggctcggtgcccaaggcgtttccgagggtgcgggcccgtaggcgcaggaatgcccgctccgctcctacctggagtggtggctgcacgcgaaagcgctccgcccggggccgccgccccctggaaccgcgaggggtgtgggtgcgagggtgcagaaagggagggtgcggggtgggtcggggtgcagtgcggagcggggccgggcggtcagggcggctcctcactcggcgtctccaagaacctgggagcgcgcagagttgacaggtgttggcgccggcggagggcgcgcggcgcagggcgaggtgggaatcgatcgagtattgggaaaagtcccctttataagggcggcaggcgggggcgatcgtcagacatccggaggcggacgtcagaggagagtggtgctagggcgtgtgctagggacgctgccctcgcgaggagggtgggtgtgcgggatgcgaaggaaacggggcccaaggagctggggggcaggctgggctctggtccgcgctgccagccatggtatccccatcctgagacaagtacctgctactcccatctcctcctccagaaaactgggcggagattccttagggtgattcccagtcgaacttctcatccctctggttggaagctgggaatggggagggtctcagaggattatattttcagaagcagcagctggaagcctagaggagagaagtgtcctgttcttttcttcccaggtcagagtctggaattgtttcctgacgagtctctctgagagggaaggggtcctctcccgcggcctcccctgggccctgttggaagctgttcctggcgtccctggtgatgggctccctgaaggagacatttcaggaaggtttagaaagtcctttttacattcatacccctgccacttaaaagtagggctac

SEQ ID NO: 5002 - DNA, 756 bp, Artificial sequence
  DNA replication origin
caggggccggccgcgcgggggcgcgggaggggggggaaggcgaggcgggccgcgcgggaaggcgggggaggggcgggagcggctgggcaaggaggggcggggactggcggggcgggcgccgaagggcgcggactggagaggtaggcgcgggggggcggggcgttgcggggcggggcgcgcatcagaccccgccccaacccgtggctcgggcccgcccccatttcagcaccccaggctagtctgggaggctggcgcaaacgcagcgggtggctggggtaggggctcattgggagcccacggagcgcggcggcggctcgggggccgagttccctacaacaaggatggcggtgacgggcgcagggagcggggcccggctctccttgcctcgaggctcctctgattccactcgcgtggctgcgcggccctggcagcggccttcgtcccgggggtgggagctacacagggttccgccccgtcctggcgaggacgcctgagggggctctgtggtaaggctctgtcgggcaggccgggcttccgggaggacctggtctggatcggtcaccgctgggtgcctgagctccgcatggagcctgcagcctttgtttaacttgtgagttaagaaaagttaacctttcttggagagtttccagtcttgcctctgcatcctgttcttccttgctagctctcattttcttcacccattccgtctatcaaaacctgaaattttggggccggcgcagtggctcacgcctgtaa

SEQ ID NO: 5003 - DNA, 931 bp, Artificial sequence
  DNA replication origin
cggggagatgcaatactactcagttacgaggtgtgtagtgctagcacgagaaacttggaggacgcgctgacaagccgggctgcagtctccgggtcgccccgccccgccctttccctgccgccgtgcgtgcctcgggggggcggggtctggcacgtcgtgacgcactgcggccgcgtagcgccgcgggtttgatgaacgcggttcccggggagactggtacggttgctgtgtgctatggagccgagggtcgtcaagccaccggggcaggatttagtagtggagagtctcaaaagccgctacggactcgggggcagctgccccgacgaggtgaagccgccgcctgaggtccgcgggtgggctcctgctgctggggggcggcccgctccgtgccccgcgcagccggcctgggggcgcgcagcggctctggtcccggccccggcactcccgccgtggctgcggcttgggcctcgtggaagcaggcgggaggggcgggcgttgcgctgcgggggtgcgggggtgccgcttcacctatgcctctgtgttcctggtatactgggcatggtgtggtgttggagaaagtgctattcagcttttttttgcagtgatgtgagtggagttgtgaaaacaattgaattgctttttaaaagcggcttatttcgaaataatttcggacttactcaaaagttgctgcagtattaccaagaattcccttgtaccctcacttgcattcacaaattaatattttgccacattggctttaccattcgttctctccccttccctccctacaaacgcattttttccctttgaactatttgagggtgatttgcaggcatcatgcccctttacctctgaatagaaataacttgtgcatttttcctaagcataaggacgttgtcttttaataaccacagtaatattttcaggaaat

SEQ ID NO: 5004 - DNA, 1117 bp, Artificial sequence
  DNA replication origin
caggcttggccctgcctcctccaagcgtccgagtctttttcggcttttcgtgagcctcagagagggacgtttcctgccaacgctgctgcgaaggaaagtttgggcggcgttatcccgactgccttcctcgccagcgccggcgagcagcttggggacacagccgacgcccgggcatcctccccgacgaccccccggagcgctcccagttcagactcctttccgagaagcgcgcagaagtgacagccccggagcttcgttccggtgtaggtgtggggatgcgccgcaaggcaggaggggaaggcgctccagttgaagggggcaccccggggcccgcgccgactcctcccggcgcagccttggctcgccggagtcgcgggtcggaggctggcgccgctgcccgccgaccagcaccctggcgccaggcgcccggctccacgccgcacccttggcgacgctgtgcgaggggctctagcgcccgccgcggcgcagtctcgtgaacccccgctccaattttttcctacggaggcgcagaggagggtgaattcgcgctctccttcccgacgccccggcttctgggagcgtcagagcaacggaagtacgtacaggaggaccgagagcagcagggaagtttggcggtgggctggggtcggcggcgaagattccctgccgtgcgctgccccctcgtggccgctttgcgttcccgtcgggaagggctgggttccagtccagggcccagcacaaaccaggattggttggacgctgcacagcgagttcagtcagggctaacatcagaagagtcgtggggggcctgcctatcggccagcctgtccttgtggtttgtgaagttgtatgatctttctgttattattaaggaaaaaagtagtatttgttgaggctaaaaggccaagagcgtgctatatattatttaatcctctaaacagctctgccagataattattttatttatttatatttacttccatagctttagacaggatctcgttctgtcaggcaggctagagcgcggggtgctatcacggctcactgcagcctcaaactcttgggctcaagccatcctttcacctcagcctcctgaatagttgaaactacaggtgcg

SEQ ID NO: 5005 - DNA, 1190 bp, Artificial sequence
  DNA replication origin
catccaaggcggccgccgctgctgcgcagagcgagggcgacgaggacaggccaggcgagcgacggcggcgtcgggcggcggccaccgccgcgggggcgggcgaggacatggacgagtcgtcgctgctggacctgctggagtgctccgtgtgtctggagcgcctggacaccacggccaaggtgctgccatgccaacacactttctgccgccgctgcctggagagcatcgtgtgctcgcgccacgagctgcgctgccccgagtgccgcatcctggtgggctgcggcgtggacgaactgcccgccaacatcttgctggtgcgactgctggacggcatccgtcagcggccccgcgcgggcaccagccccggcggcagcccgcccgcgcgtcccatcccaggccagagtgcggcccccacgctcgcgggcggcgggggcggcgcggcaggcagcaccccgggttccccggttttcctctccgcggccgcgggcagcaccgccggcagtctgcgggagctggcgaccagcaggaccgcgccggcggcaaaggtgagtatctgtctcggcggaagtggccacggcacgtgggagtgtgtgggtgggtgcttgggcgtggggggcagtgatgaggtgcggaggagaccacgggtggtcctgcgttggcccactccgctgttgctcttcctccaacttcgcttgcttggtggcggcatccggcccctgggcagctcgccgcttgttcacgtgtgtcccatcctcctgtggagtgggcacgccttcctgtcccgtcgctcacccccgattccttggccggacttgttaccctgcctcttaaacttagcatcgcccttgcgtctccctagaaacggggaccttcttcctctgggtccccagacactccctctgcacaccctgggcctgcctagagaaaagttagcccttaacgtttctgacagggctctgatggctgctctgggaagcccgcgggcctcctgcctgcggtgtggctaaggaggggagggcagaaggcagagtgggactggggtttggaggaatgcttctagtagtctggaaggagttaatctggaggccccaggagccttttgacccagcccttttggacttggcagtgtctaaccagaagccaaggtcttctcctgggctcccaggcagggttgcattcccacgggggtc

SEQ ID NO: 5006 - DNA, 941 bp, Artificial sequence
  DNA replication origin
accagaggaggtgtcacagaagtttgtttgagacttccgtgagtgtagaaagggccctgccacctgcagagcttgcaggaggtaggagaagcaggcagccgacagcagactggcacatctggggggtcccatgggtgaaaggaggcgaggacctggctttgctgagctggacacaaccgtcaccctgacctccttctccaaccagtaccccctcctgttgatactgtcaggagacttgttccccggggtctagaaaatgactattttgctttctcctgggagatgctggctttgggtcctaactcttctgtcaagacacactgttatccccaggcgtcatcactcttcctgggatctgcaccctaaattcacatccgatttcacgatagagaaaagtgcagtgggttggagcttcagcctacacctgtaaagaattggtcagcctggggactggtgatctctgcagctgtgggctcagctctgggctgggcctggtcactgggaaaggcaggcatgtgcctaggtgctgcagaggtctcgagcccctcccatgagcttggcgcggtgcggagggcagcctgtgagtgaggctctgagccccactcatcactgagcaagttggaggaagagggacccaggcagagacgagaggctgcctccagaaagccagccagtggcaactgcaaaagccgacagagcactggttgccaggaatgcgcacggcccacagaggggaagagtgaggaagggtcactgaaacagcctgaacaaataaaaatggagccagaaactgcacagaagggagacaaaagagaggaatccgcagaaacctgggctccggggggtgtggttgcatctttccacctggatgaagtcgactaaaatgagcaccaaggatgggtcccagcatagcattgatcccttcaatacaactgatgtaa

SEQ ID NO: 5007 - DNA, 1212 bp, Artificial sequence
  DNA replication origin
tccagaactgcagggacaaggatgacagacatagatgcgcttcccttcccgcctgtctagccagccacggagttctctctgctcctcggggacatagctgagatcatgctcctgcctgctctccatgcctctccttcccttctctgcatctatttggtgacttctctatccccagctacttctaccagctgggccatccacccgcccttggctactgccacaatgccctattcacctctgcatccccctgagaagcaggtttgagtgggacagatccccacctccagtgcagaacatcccacagggtacgttcccacactgcaccacacaccagcctcagctgtcaccagctgaggcgcaaacccaaggctgcctggggcactggcctggttgaggggcactagtctggtggtggggggggaacacacatctgggtggggagcattgacatggttgtgggcactgacccatgtggagggtattggcctgggtggggcgaactggcccaggtcgggggcactgtcctggtgaggagcactgacctagtggggagagctgacctagttgggggcaatgactgagtgggaggcactgactggataagggacactgtcctggtgggaggcacggacccagttggggggcatgggcagaatggggggcattggcccagtggaaggcactgaccagggtgggggacactggcctggtgggatggggctggcctgggtagagggtactgacccaggttgggggcactgactgggttggggacactggcctaggtgggaggcattgacttgggtggggggcactggcctgggtgggaggcactgacttgggtcggaggcactggtctggtggggagcactgacccacaccaggcacccctctggctctggaggaggtatgcccagggtgggtacacaggcctcttgcaggcggctatgtgggctgctcccctggggggcagaatctctcctccttcccttcccctctttggtgggttttctctcaactgagcaaagggtctcatcgaagatggaagcagaagtcagtcttctctgttacgtacagcatttgtattaacagtgatgacgatgatgatgatggtgtcaatgaaaaacagctgaatgaatcgcagggtcttcttggggaactcacccccctgcagaggccctgctctctctgctgtcctccctagctcactgc

SEQ ID NO: 5008 - DNA, 668 bp, Artificial sequence
  DNA replication origin
gagtcagtgttggggaagacgaagggtattagcgaagacgaagagtgttagctcagggcacctaaggacagtggtgactccttgaggaacagatggaatacagaaggggaagcaggtttgcggaaagaggggtgtcatcggttgctcctggcatgcgctgaagttgaggcgtctctccaggaagccagcaggtagttggagaagagaatctgtagtttaaaagaggtgctggcaggtgacgttggctggggttctggagagggtgaacccccatgggtgagtatgcccaggatgggaagagaaggtggggggtatttgtgtagatgtaggggctagagatgtaggggaagagaaggtggggggtatttgtgtagacataggggttagaaagagggtctggcaggaggggccaggacggggctccactggaaagaagaggcacagatcaaaggggacaggttcaggaaggggtgctgtccacagcgtcaagtgctgccaagaggtcaagatggcggatgaggaaggaggatgctggacagggcattggtaactgtggctgggtcagcttcagcagcaggggtggtgggcaagatcggactgcagagagtcgagcacatccatgggaaagaggaagcagtaggtcaatgagagaagaatgagaatgggcc

SEQ ID NO: 5009 - DNA, 1069 bp, Artificial sequence
  DNA replication origin
agaccaaagatgaatgttaatgaagagtgatctggtggacctcacaccagtgcaggctgctgggtggggatgctgaccctatccagcggcttgtgcacacagtgcatctctggggatatgagggaagctcatagaccccaccattgcaccctcctgatgctggaggaaccccacttagaagtgaaaacagaaacagaatgcagctcacgagggctcaagcaggaaaaaagaaccagtgtggaatattctggaatagcaggagaaccttgtagagattaaaagtttcttggccttaatatgaaatctgccccccttttcgaacatcctaatcctacatagcaaggccctctgccctcattcaatgaccttggctatttcctttgttgataggtgtccctcatgccctcctcctagggacatgctgtgggctccaactgtggctggcatctttgtttctttccctgtttgaaatggtgaacactgacagtgaaattaggaccaactctgggcttcaggaggatacacaaaatcatcaggagaggaccccgccaccccaccacgttcacagtttcaatgctatgtctaggtgacaaatggagagaaaccagggtgtgattctgttcccatcaccatagaggaaataccactaagggaaaagtccagtgaaaatgacaaacaactgcagccaacacgtacctgtgtattgtgcagggaagctggaggggaggagaggagaacggggagaggtgaaagaaaggggatgagagagatggagggaggaggagggaggaggaggagatggggagaggatgggagaggacggggagaggacagaggaagaaagagaaggggagaggagaggagggtggcttccacacagcctgggctgaggcaaaggaaggcagaagaggagaggaagagtgcagggaggacttggatccgtggaaggcttgtgaatcagtaacaatgacgcacaaattgatgtgcctgctctcagagaaatacaattgagtgtaaatcctgcttaagttagcctcatctgttgctttatggtgtcaaaacagtttgc

SEQ ID NO: 5010 - DNA, 685 bp, Artificial sequence
  DNA replication origin
ggctaggaacagaaatgaagccctggaccccatcagccctctgggctgcagagggtgaggatggaaccggggttccttcagtctggtagtcactgcacaaatgtgagaagagctacctcggggtttccctctaggacatgtggaaggcttcccctcggcctccacatcggactgacttgtcaaaggaccctcggggctgtctgctcccccacatgccctcaccgcccccttggcagagacgccttgccctttgcccagcatctgctgtgccagcttcccacattcatacgagccattccctgtgccaccaacagagggagctcccgacacagtttgcatctaaacaccccttgagagcccaggaaacactgcctcctgcttctggcctggaaggctcagagacctacccctggccattctcacctcagccctctcctccacacctgctctgggctccctcagtttcttgatcctgccaagctctccccagcctcgggttggggtgtgcacacacaccgttcccgccaaccgaacattctttcccctcttcctgccttgtgaatttctaaacaagactacagtgtggaggtccagataagacccggacaccctctaagtggccctccatgcccctcacctctccaactagataagagtttcctgcgatcccttagtactttgccct

SEQ ID NO: 5011 - DNA, 1566 bp, Artificial sequence
  DNA replication origin
gacggcgccaagtacgtgcacctcaagaagaggttctgtgaagggccgtccgagccctccggggacccgccgcgaatccaggtgaccgccgagcccgaggcccccgacggccctgccgggcccgaggcgcgcgatcggctccccgacgcggcggccccggagtcgctccctggacagggccgcgagctgggcgagggagagccccccgcccccgcgcactggccgcccctgagcgccggggctcgcaggaagaactcgcggcgcgacgtgcagcccctaccgcggactccagccccggggcccagcgaggacctggagctcccgccacatggctgcgaggaggcggacaggggcagctcccttgtgggggctaccgcacagaggccggcccgccagaacctccgtgacctggtgatgggcagctccccgcagctgaagaggagcgtgtgtcccgggggcagcagcccgggcagctcctccgggggaggacgcggcagaggcgggggcgactcagacagcgcatcggtggcctcgtcgtccgcggaggaggagagcagcggcggaggctccgtgacgctggaccccctggagcacgcgtggatgctctctgcctccgatggcaagtgggacagcctggagggcttgctcacctgcgagcccggcctgctggtcaagcgggacttcattaccggcttcacttgcctgcactgggccgccaagcacggcaggcaggagcttctggccatgctagtcaacttcgccaacaaacaccagctgccggtgaacatcgacgccaggacgagcgggggttacaccgccctgcacttggcagccatgcacggccacgtggaggtggtgaagctgctggtgggggcctacgacgccgatgtggacatcagggactacagtgggaaaaaggcctcccagtacctgagtcggagcatcgccgaggagatcaagaacctggtgggagccctggacgagggtgacggggaaagcgccgcgggtagcggcggcgggcgctggaggctttcaaaggtgcttccctcgcatctcatcacctacaaactctcacacgccctagaagatggaggggaccatcaccaccatcaccactcggctgaggggtgggtcggaggcaaagccaaggatccagggcgcaaagcctcgggcagctctagtggacgtataaaacccagactcaacaaaatccgattcagaacccagatcgtccacaccacaccctctttcagggacccagagcagccgctggagggcaggggggaggagggagtgggggaggaacgacctgttaaaggccactcgcccttcacattgagaccaaagtccaatgtatttgggtaaaaattgcttcttttagaaaatgcaaaggtttatttgtcttaataaattgaatactaggtgttgtaaggaagtgagaccagaaggacaagctaaattatgcattcttacttgagggatcggaatggatggggcggagttctcttcaggctagccttctgggaaaagtggatgtctttttcagagattcatcataccttgacc

SEQ ID NO: 5012 - DNA, 1665 bp, Artificial sequence
  DNA replication origin
gtcgccccaccccccgtgccctggatagcacccccaacccactctatgctgcaggcatcaggtgcccccaagcgaccccccaccacgggcagtgcagcctctgatagtgcacctaccccaccacctttctaccaccctggccatgctgcagtctccgtcacagccagcaactgcagtgaggcgagccacgatgccacaggctacagcctccagggtgcggcagacggttcctcctcttcctcctctaagccaggcacagagtagctgggctacagctgcagaagagcctggaatggtgggaagcccccttagcatccttcacattctgaaaatatgcaaatgaggttcctggactacatgttctgattgggtgagacaaaaacctctaggcctatgccccatggtgggggacaggttagggatgctactgggggctatactgcctgtggcagagtgggggtgggggtgggggttggttggggggtgctattgggggccagactgcccctggcggggggctggttggggatactatctggggttgcagtacccacagcagctcatcggggagtggattgggtgcgataacttgggcacaactgcccgaggcagatgttgggctgggggcactattgggggctatgaggattaagggcactatcagggactgcactgccagtggcgggtggcagaggcagcagtgacagcagtggcctccaaggcaggggctgttctcctctccccagactccaaactctagaggctgacctcgttctgctgctgctgctcgaagccagtggggtgcatagcatttccatgggaatcctgagcatggcagggcccccacacctgctgtgggtccagggcctgtgccctcttcctctgtgttgcagagacagcctgggatctctgggcatggagttgggggaatcacaaggggacagggccctgtgggtggaggcatcaggaatggcaaccacacttcggtttgggggtggctgggtctgagtttctgctgctcctgctccccaaggagtgcagcctcagtgggcccagtggttcctgtggcttggggagctgggcactatggtgtctccaatccccaccccaggccccagtgcctggccagcttgggccaaaaggagaggctggacttcggagggtgggtgtgagtgccttcgctgaaactggcccctgccacccagtggacagcatgacaaggtgatgctgtaacgctaccacttcctgcaacctggtctaggtttttctggctttgcccacactgctgcttcctaccaggagaaggaggatccacctgctggatattggaggctggaggctggagcctgtggtcctgcagcttgcctcgctgtgagttggtggtggtgacagagactgtagcatgccagagtggtaggaggtggccagctgcagccagggcaggggcagggctgtggcagtagccatgtggtaggagccttgtagggagggccggtgcattgagggtgacagcagtggtggttgtattggcatcagtgccagtggtggcagcagcagcaagtctgggggctgggaagggggagtaggagcttcagggttcggctggcctggcataggtaggaagctgtggttgctgcaccatgggcctcattggaggtgcagcca

SEQ ID NO: 5013 - DNA, 1762 bp, Artificial sequence
  DNA replication origin
cacagtgactcgaggtcccattcctggagcagggctaagtcgaagctgtccatggtgggaggtgtcagcgtcgccgccgccgctaccgccgccgccgccgaagctcgggccgcccgcgcgctgcgacgaaaggcgccgctcaaggtgcatcccagccgcgccagagcggccgccgcccgcccccaggtcggggctcccgacgccccccgcccccgactccgggccggccgggctggctgcagcggccggcgcactcacccgctccccggcttgcgcgcaggcacactcaagagagagcagcgagctcgccgcgccgccgccgccgccgcccccggccctgcgccgccgccgccgccgccgccgccgccgcccccgccccgcctggcccccggccccgcccccggccctgcgccgccgccgccgccgctcttagggttccgtctgctcatcagacaacagatatttattgaatgtaagtagttgctgaggttttatgcttcactgacattctaccccctgggaatgagtgttcctgggaatgtgcatttctttccttttttttttttttttttaacaaaaccaggtttttccctaaggaatgcaccttccccaaagtttcccgcatcctcctgcctacataattcacttatatagtcactatgacattaattagattcagaagtctgtggaaacagcagagctcggcagggtcagagggcaagcagggcagagaaaagagaggggaaaatgagccccgggagaggggaaggaagtggagggaagtttttcatgcccttcaagtaccaaacaaaacaaagataatttcaaaagtggtcagccactataacactgcttagagaattaaagtattgacaaattgaagagtgctttaaaataaagtggatggggcataagcatgtatgtcttggtgttagttgctccttatacagccggtactaaaggctggtgggtgaagcttaccacattttaaaaagaaaaaggcaggcacacatactaaagttgaaaatgcaggcaggaaggacatttacttttcataaaagcggatcagaaaagcatctcctatcacagatcatgtattttatgccatgctgaccaatgttgggggataatctcattattttgtgatatgagaagatcctttgatgctggtaacaagaaccaatcatcctgacttaaatcttaatatccccacaggttctttgtcatgcgtcttcaagatgtgccctggccattcatgcaagtttcaaggactctgaatctgttgagaaaaagaggttacgttccaattctgctttagttccaacccaaatgctgagaaacactccatggaatttaattacagggcgataactgtgatcttaccaagatttatgaacaggaagatccttggtgattgtagtcagtcaaagggtggctttgacatagcacctatctgttagggcaaatactgccagggaaaaggtgacatttggaatcatctgggattggactcttgatcaatagatgcgaaatgtcaggtggacatgagaactgttggtctttggtacatatgtgttgcaatgagtaaggatgagtaatgtgaaggaaaagtagaatcttgggaccccaaactcactatgccaaagggaaagttaagcgtgggagactgagtcaggcaaaaactgccttccttttgttcccaaatagatggctgtaatttcacatgcttgcgttatgtgaaatgtggattcattgagtgcta

SEQ ID NO: 5014 - DNA, 986 bp, Artificial sequence
  DNA replication origin
tcgctgctctctcttgagtgtgcctgcgcgcaagccggggagcgggtgagtgcgccggccgctgcagccagcccggccggcccggagtcgggggcggggggcgtcgggagccccgacctgggggcgggcggcggccgctctggcgcggctgggatgcaccttgagcggcgcctttcgtcgcagcgcgcgggcggcccgagcttcggcggcggcggcggtagcggcggcggcgacgctgacacctcccaccatggacagcttcgacttagccctgctccaggaatgggacctcgagtcactgtggtaagtccccgtgccggccgcttcgggcgggcgggagcggcgaggggcggccgcggcggcccgcgcgtcctcacctgggccgggtgctccgggcggccggccgccgtgggggtggggtgggtcgggggcgcctgcctcgccagcccttttctgcctccccgggtgggatgcgtggccgcctgcctgtctgtttccccctctcctgttcgcctccctcgcggcggcccgccccagcccagggactggtgatctaggtagccaggggcagagcgcagccgtggggaggaaaagaagcgatttgaagactgcgtcactaatgcctggggatccacccgtcggccccctgctcctctcacttcctttccctccgactgcgccccctccctcctccggctggcaccaccgaccccctggagttggtgctgctgcgaagtgcccttagaggatgctccagcctccccgcctgcgcccggtctcggctgcatcctttctgtctctcccacccacttccaccgagatggaaaagtgaacatccagggcgggaaacgagtgtttctccgtgccggtattccagaggccttagcccagggagactcctttcctcggggttcacagttcctctgggccctttcttcacacctcgtcacagttgcactcctcctccccaccccacccgggcgccc

SEQ ID NO: 5015 - DNA, 963 bp, Artificial sequence
  DNA replication origin
caaatgagagaatacatttaaattaaatggaaaattaaaatggtaaaaaatgcaaagctgtattgaaagttccgagcttctctataaggagctttttgactatggaagaatcctgtactcgttccccctaaatataaaaaaaaagttgaaggaggcagaagggagagtgatgcacgatgggcaaggacttcacctgctgttgctggctttgaggatggaggaaggaggccacaaacctagaagctggagcccctagaagctagaaaaggcagggacccgattctttccttgagcctccagaagggacacagccccgccagcaccttgactttagcctggtgagatcctcttaggacttttggcaatcagaactataagacagaaatggaagccactgagtctgtagctgtttgttgcagcagcaatagaaaactaatgcagggcccaagaaatcactggtgatgagatcgggaaagtgggctcaggaggtctggatctgtgatgagatggggaaagtgggctcaagaggtctggatctgtggtgagatgggggaagtgggctcaggaggtctggatctgtgatgagatggggaaagtgggctcaggaggtctggatctgtgatgagatggggaaagtgggctcaggaggtctggatctgtgatgagatgggggaagtgggctcaggaggtctggatctgtgatgagatgggggaagtgggctcaggaggtctggatctgtgatgagatgggggaagtgggctcaggaggtctggatctgtgatgagatggggaaagtgggctcaggaggtctggatctgtgatgagatcgggaaagtgggctcaagaggtctggatctgtggtgagatgggggaagtgggctcaggaggtctggatctgtgatgagatggggaaagtgggctcaggaggtctggatctgtgatgagatgggggaagtgggctc

SEQ ID NO: 5016 - DNA, 779 bp, Artificial sequence
  DNA replication origin
gctgggaagcccaggcagagggtcaccagggcttgcttttgggccctgccctttggctggatttctgaggcacacatgcttgtcatggtggggcctcacatagggtgctgacagcagttccagggctggggttggggctcagacccttgggggggtagggggaaggaactcaccgctgccccaggccactgtaggtggaggagctgacagggcaggcatagccccccggggcagagtgggggcagccccgtctgaggcccacagtaggagccgggcctacaagggacctcagccacagcacctgaagagacagggccagggatgcgggagaacaggccacaatgtgggcatggtttggaggacaccccaagtcccttcttcacccatcaatggcacttggaagccaggagaggtccagagccggaggagaactcaggagggtccccaggctccccaggtgaggcctgggcagggaggacagcagtagggtgaggcctctgaggtggtggggaacagtgtggaaaccaggaaggagtgcggagcttgcaggtgaagggagatctcgtgtggtcagggagggtgactcgtgcgggtggtggtgtcatgaaccgagatcaatggcaggaagttcccgtgtctttgtgcagccagccgccgcggtggggaaggaggatgcatttcatgaggtggaggtgggagctctgatgaggacgcacagggcagtggcactgaggccacagctcacctgagggcagccaacaggagggtgcttttggttg

SEQ ID NO: 5017 - DNA, 931 bp, Artificial sequence
  DNA replication origin
tgccttcaagcatctgtttaacaaagcacatcttgcaccgcccttaatccatttaaccctgagtggacacagcacatgtttcagagagcacggggttgggggtaaggttacagattaacagcatcccaaggcagaagaatttttcttagctcagaacaaaatggagtctcctatgtctacttctttctacacagacactgtaacaatctgatctctctttcttttcccatttccccctttttctatttgacaaaaccgccaacgtcatcatggcccgttctcaatgagctgttgggcacacctcccagacggggtggcggccgggcagaggggctcctcacttctcagacggggcggccggttagagacgctcctcgcttcctagacgggatggcggccgggaagaggctctcctcacatcccagacgatgggcggcccggcagaggcgctccccacatctcagacgacgggtggccgggcagagacgctcctcacttcccagatgggatggcggccaggaagaggcactcctcacttcccagactgggcggccgggcagaggggctcctcacatcccagacgatgggcggccaggcagagacgctcctcacttcccagacggggtggcggccgggcagaggctgcagtctcggcactttgggaggccaaggcaggcggctgggaggtggaggttgtagggagccgagatcacgccactgcactccagcctgggcaccattgagcactgagtgagggagactccgtctgcaatcccggcacctcgggaggccgaggctggcggatcactcgcggtcaggagctggagaccagtccggccaacacggcgaaaccccgtctccaccaaaaaatacaaaaaccagtcaggcgtggcggcgcgcgcctgcaatcccaggcactcggcaggctgag

SEQ ID NO: 5018 - DNA, 1005 bp, Artificial sequence
  DNA replication origin
aaattaaatggaaaattaaaatggtaaaaaatgcaaagctgtattgaaagttccgagcttctctataaggagctttttgactatgtaagaatcctgtactcgttccccctaaatataaaaaaaagttgaaggaggcagaagggagagtgatgcacgatgggcaaggacttcacctgctgttgctggctttgaggatggaggaaggaggccacaaacctagaagctggagcccctagaagctagaaaaggcagggacccgattctttccttgagcctccagaagggacacagccccgccagcaccttgactttagcctggtgagatcctcttaggacttttggcaatcagaactataagacagaaatggaagccactgagtctgtagctgtttgttgcagcagcaatagaaaactaatgcagggcccaagaaatcactggtgatgagatcgggaaagtgggctcaggaggtctggatctgtgatgagatggggaaagtgggctcaagaggtctggatctgtggtgagatgggggaagtgggctcaggaggtctggatctgtgatgagatggggaaagtgggctcaggaggtctggatctgtgatgagatggggaaagtgggctcaggaggtctggatctgtgatgagatgggggaagtgggctcaggaggtctggatctgtgatgagatgggggaagtgggctcaggaggtctggatctgtgatgagatgggggaagtgggctcaggaggtctggatctgtgatgagatggggaaagtgggctcaggaggtctggatctgtgatgagatgggggaagtgggctcaggaggtctggatctgtgatgagatggggaaagtgggctcaggaggtctggatctgtgatgagatcgggaaagtgggctcaagaggtctggatctgtggtgagatgggggaagtgggctcaggaggtctggatctgtgatgagatggggaaagtgggctcaggaggtctggatctgtgatga

SEQ ID NO: 5019 - DNA, 1013 bp, Artificial sequence
  DNA replication origin
ggtggcggcggcggcgcggcgagctcgctgctctctcttgagtgtgcctgcgcgcaagccggggagcgggtgagtgcgccggccgctgcagccagcccggccggcccggagtcgggggcggggggcgtcgggagccccgacctgggggcgggcggcggccgctctggcgcggctgggatgcaccttgagcggcgcctttcgtcgcagcgcgcgggcggcccgagcttcggcggcggcggcggcagcggcggcagcggcggcggcgacgctgacacctcccaccatggacagcttcgacttagccctgctccaggaatgggacctcgagtcactgtggtaagtccccgtgccggccgcttcgggcgggcgggagcggcgaggggcggccgcggcggcccgcgcgtcctcacctgggccgggggctccgggcggccggccgccgtgggggtggggtgggtcgggggcgcctgcctcgccagcccttttctgcctccccgggtgggatgcgtggccgcctgcccgtctgtttccccctctcctgttcgcctccctcgcggcggcccgccccagcccagggactggtgatctaggtagccaggggcagagcgcagccgtggggaggaaaagaagcgatttgaagactgcgtcactaatgcctggggatccacccgtcggccccctgctcctctcacttcctttccctccgactgcgccccctccctcctccggctggcaccaccgaccccctggagttggtgctgctgcgaagtgcccttagaggatgctccagcctccccgcctgcgcccggtctcggctgcatcctttctgtctctcccacccacttccaccgagatggaaaagtgaacatccagggcgggaaacgagggtttctccgtgccagtattccagaggccttagcccagggagactcctttcctcggggttcacagttcctctgggccctttcttcacacctcgtcacagttgcactcctcctccccaccccacccgg

SEQ ID NO: 5020 - DNA, 1723 bp, Artificial sequence
  DNA replication origin
ccgcgccagagcggccgccgcccgcccccaggtcggggctcccgacgccccccgcccccgactccgggccggccgggctggctgcagcggccggcgcactcacccgctccccggcttgcgcgcaggcacactcaagagagagcagcgagctcgccgcgccgccgccgccaccgcccccggccctgcgccgccgccgccgccgccgccgccgccgcccccgccccgcctggcccccggccccgcccccggccctgcgccgccgccgccgccgctcctagggttccgtctgctcatcagacaacagatatttattgaatgtaagtagttgctgaggttttatgcttcactgacattctaccccctgggaatgagtgttcctgggaatgtgcatttctttcctttttttttttttttttaacaaaaccaggtttttccctaaggaatgcaccttccccaaagtttcccgcatcctcctgcctacataattcacttatatagtcactatgacattaattagattcagaagtctgtggaaacagcagagctcggcagggtcagagggcaagcagggcagagaaaagagaggggaaaatgagccccgggagaggggaaggaagtggagggaagtttttcatgcccttcaagtaccaaacaaaacaaagataatttcaaaagtggtcagccactataacactgcttagagaattaaagtattgacaaattgaagagtgctttaaaataaagtggatggggcataagcatgtatgtcttggtgttagttgctccttatacagccggtactaaaggctggtgggtgaagcttactacattttaaaaagaaaaaggcaggcacacatactaaagttgaaaatgcaggcaggaaggacatttacttttcataaaagcggatcagaaaagcatctcctatcacagatcatgtattttatgccatgctgaccaatgttgggggataatctcattattttgtgatatgagaagatcctttgatgctggtaacaagaaccaatcatcctgacttaaatcttaatatccccacaggttctttgtcatgcgtcttcaagatgtgccctggccattcatgcaagtttcaaggactctgaatctgttgagaaaaagaggttacgttccaattctgctttagttccaacccaaatgctgagaaacactccatggaatttaattacagggcgataactgtgatcttaccaagatttatgaacaggaagatccttggtgattgtagtcagtcaaagggtggctttgacatagcacctatctgttagggcaaatactgccagggaaaaggtgacatttggaatcatctgggattggactcttgatcaatagatgcgaaatgtcaggtggacatgagaactgttggtctttggtacatatgtgttgcaatgagtaaggatgagtaatgtgaaggaaaagtagaatcttgggaccccaaactcactatgccaaagggaaagttaagcgtgggagactgagtcaggcaaaaactgccttccttttgttcccaaatagatggctgtaatttcacatgcttgcgttatgtgaaatgtggattcattgagtgctaatcagagccccacaagaatgaaagcacttgccttgctgcctaccctccctcctcttttttcttcccctcctgcttgctcttttccctttaaataatgaagttcccaaaaccctcttt

SEQ ID NO: 5021 - DNA, 1248 bp, Artificial sequence
  DNA replication origin
tccccacatgccagcctttcatcccacccagggggctccttgtggatcagacaatgcccagtggggagccagtggaactgctggtgagcatatgggagaaacccctcagggcccctggaggtgtgtcagtgcaacaagaaggagggacttcttaggctgtgtgggaggtgaagaaaaaccaaaatgaaagaaagaagaaggaaggaaggaaggagggagggagggagagaagaaaggaagggagggagggaaggaaacaaggaaggaaggaggcacagacggagggaaggaaagaaagagggaaggaaggagggaagggaggaacagagggagggaaggaaagaaggaaagagggaaggaaggaagaacggagggaggaagggaggaaggaaggaggcatggagggaggaagagaggaaggaaggatggaaggaagggagaaaggaaggaaggagggagggagggaagaaaggaagggggggaagaaagaaggaggcaaggaaggaaggaaggagagaaggaaggaaggacagagggagggacagagggagggaaggaaagaaagaaagaggaaggaaggaaggagggaaggaaagaggaagggagaaacagagggatggaaggaaagaaggaaagaggggaagaaggaaggaggaatggagggaggaaggaaggaaggaaggaagggaggcttatcaggggcctaagtcttggcatagacaggtgaggccccggccaggtaaatctgagctattacctttactgggactcctgaagtgctcagactggggagtactgagaagcatgggggacagtgtaaattagtttcccaaatcatcccatttctccctcctcaagccctacacaacagccatgccctgcagtgtcctcacctgaaaagaagggactgactagacaagctccagggtgcccccggctctgacgttttacggttccatgatttctacaaaggacactgaagtgcccccgagaacagactgtgcctctccacagaaccgtgaaccatggattgtaacgttcatgccccaggcctccataaaaacagcatccataatgtttgccaaggcccccaggttagtcctgtctcggtagcatgatgtgcgtgtgactgaagagtcgtgtgagcctgggtaggccatttggaggcctgggtcctctgacattgagagccatgtgcccttgggcaagtcagttaacaaaaggaaagctgccagccagatgcacatg

SEQ ID NO: 5022 - DNA, 1248 bp, Artificial sequence
  DNA replication origin
tcacctgctgggagctggaggaggcgcggagcgaagccggccctgccagccacgcggagaagcagaggcaggtgagcgcgatgcagccggcgccgggtctggggctcggggactcctccctgcaccgctacctggacggcgacttctggagcctcaagaacgagctgcgcggactcctcggcggcgcccgctcttccggcaaaggtaccgcgctgcggccgtcgcccctgcccgcgcccccgaagccgccgagcgtgtcccctcggtccccggagcgtcgctgcggacaacgccctggcgagggcgaggtggggtgtgcgccgcgcctgagaggcgggtccctgcctcgccgcaggtgacgggctcccctccccaggtgtgtgggcgcagccggccgccgccgacctcttcggccccctgagaggtgccctctcctcccgagctccctcccccacgaagagtcgggtgcagggctgggccccgcggtgacaggcgcggtgtctacgaagaccgtgtggctggaagatcggccttgctggtttgttgaacctgtttcttgagtccccgccccgcgatgtcccacccttggtggggagaaggggacagaaaaccgcgatgggatgggcgcacagggatggagtggccctgtccagggcgtgtctgggcgtcggggtgggacaggcttacaggaccccctcggagtgcaggtgtgcggaatgggcagcttcagcggggcggtttggttataagaagaactcaggtcctcgatgtcatccgatgccaggacagccctgagaagcaggcagagggttgagtgcttgagctgcactggagatagagagatggttcagtcaccggacagtcaggaccagaactcggcattcgtgtctcctgtgggctctctttctcatacccatttcaagcagtctgaaaagcccagttggaggcatgctttggagttctagcttaagaaaggccctattaaaaatgtcagtatgtgcccgtggaggattaattggttagccatgcccacttagccctcgtttaatttattttgcggaaatgagagggaaggagatggcttgagtgaacgtcaggctgtccttggagaatctggggttcctgcactgaggttacctagtggggagttgggggcgtttgaaagttgaaaagtgagaagtgtgggatggtgggtatatccatcagtgtctcgccgacttctctttccctctctctcatacatagttc

SEQ ID NO: 5023 - DNA, 1444 bp, Artificial sequence
  DNA replication origin
tccctccacgtctcttggcagagacagaaagggacaccgctctgcccgcgtccagcgcgaaggaggtgacctaaaacccatgggcccttctcacactgcgttctctgcgctccggcccagttccgggaggacctcccgacggcgcgggagaaggctgtaagggctcttggcccccgacgcggcctgggtctcgggggacgcatgaacccgccacctctggccggcttccttttagtgccccaaatagcagcgcttagcccgttgcttcccccgactcttgtttttcaaagtgttcacagggtcgcgagagcgagcgacgcgggggcggcgaggctgcaaggctgcacaggaacagacgacaagaaatagggctttcttctgcgtggttcttttccggtccctgtctgagtcgcccgaccccgcggggagcgcggagcattgcggcgtgcggcgggcttcgggctctcagcccgcgcagcaagttgtgttgcttttccccgggtgcgacgcgggacggccgcgaagagcaaagttcgtccgcggtaggaacttcgaggcccggttaggaccgatctccggcctccgagtctacttagccgtgtccacgctcgtgccttttccctcttgcagcgaaataactgggcggggcccgacgcgcgtcctccagcgactccgggaacccaaggcctccttcacctcgctcaaaattcacccgaaaatgcgctgagactttggcatggggctgcgctgtgtcccactgacgttacagaagcgcttatgaatttaaaaactgctccaggcggccggacggcgggacaacgcctcctcacttgctcctctacggcaaggccccttccttctccctgccggctgcggtggtgtgtagggtggtccctttacagagtttccttaatccatctagcctgacctcacctgcgggatgttccatttcccgatccacctcccacacccccgctgcagttgtctagaagctggggctggggaactgaggcgcgggaggagcagacaggagggccggggttggggcgccagccacgcgttgggagagcagacccgggtgcagactcagaggactggagaggcggcatggagtttggtctcctgggaggtagagtgaggtgctgcggactccagggaggaaagggatgggtggggaggcgggaggggaggagggacggggtattttgcgctcccgcaccgcggcccgaactcagctgttctgccttcactggcctcagccagtcgagggagctcctacgaggttatctgcgagcccagcaaatcttgggggtcctagccaaatgcagtgcgcaacgttctctctcacttggaggccgccattcacctcgtttttttttttcctaaaaggatttttttttctgagtgcttttttcatttccctattttacctgctttgcacatg

SEQ ID NO: 5024 - DNA, 1366 bp, Artificial sequence
  DNA replication origin
tgagagcgcagggcgcctcccgaggcttcacaccgccggccgggccagcggaggctgtgaccggagcgccccctctgtgccgcgcacgccgcggccgccgccgggttggggtaggtgagcgggaggctagggtacacttcggggtgggggatgggcgcgcacatggccgccagcaggcagagttactccggtaaacacgccagggacggcggcgcgcgcgggaggcaacccagcggggcaacccccgcctttacctgtccgagcctgcacgcgccggcggccgcggcgccgaggggggcggagcttgccagcccgcgcgccggggcgggacctagcgggggcggggtccgcagtgattgggcgtaggagcggggccgccagccagagctgggctgcagggccgcgcaggtttcacttcgctccgcgcagccgcctggtctgcagtttgttggagctctgcgtccagcgccgctgccgctgccgccgccgccgccgccgccgccgccgccgccgccgccgccactaccaccacttgattcttgcagccaccctgcgaaccctgccacactgcgatcgcatcatcgcggtattcggttcgctgcgttcccgccgccaccgcctcggcgccctttcttggcccttgttcccccaaatgtctgactctgactctcggactgagaaacgcaaggtaaatacctccaaatcccggggcgcgggcctggcaccgaaggaagactagcgctggagcccgaacggcaccacctactgcccgcttcccgtgcacgtgcgagcggagacgcttgcatcggcgccgcttgtcgccggcgggaggtggggatccgtgtggatcgggttccctctcgggcaggttctctttaaagaaaagtcgttcacgcggaacctgcaggctcttggccgaagtgcggcttgggacgggatgctgcgcgcgggcctggtgaagggtcgtaggtccgggcaggaggagaggcagcgcgtgcctttcggcgccggcccgggagctgaggacctgctcgtagtatcgggctgtgcgcccagctggaaagtctcgccgccggctccggcgccctcagagtagcggccgcgcagtgtgagggtgtttcgtgtcttggttttttggggcgcgtgggcctgttgcggaggatttgcggaactgcggtggtgatttaactgacgagacacggcttttccttttactcattcaggccaaggtttcggggccactgctgcgttcgctttctcaagcgtacctggggcccctgcttgctctgcaggagtcctgcggcctgtgccatccgcacgattccctggcagcgagaaatctaggtcctcccctgaccacctggac

SEQ ID NO: 5025 - DNA, 743 bp, Artificial sequence
  DNA replication origin
tcactctcgagcgtgcccttgcttgatgattcctatctggcttggataccctcacttatattaccttatatctgctattatatttccccaagaagttgctttacaaacactgactcctcaacacacggtcatctctaaaagaaagggtgtttggcagttcctcgacagttctggaaaggctgccttactagaagcagagtcagccatgggggggtgagaacaaaagtgtgcactcaagcatgtgtgtgttcggggtgtgtgggtatgggtgtgagacatggtcatatgggttctgtgtacctgcatgtgtgacacaggtgtgggtgcagaagaggacacggggtgtctggtgcatgggtgcctgtatgcacgtggggtggttgcgtgcatctgtgagtgcacatctatggtatgtgtgtatgcttgtgcatacatgcctgtgtgtttgcatgtgtggtgtggtatggtgtgcgggaatgcatgggcggatataagtgtgggtgtcttagtggatgtgtgcatggatgtagtatgtgatgtggctggatgtgggtatgacgtgtgcagtatgagagtagggttctgtagcacgtgtgtgtatgcagtatgtatgtttgtggtacatgtgcattgtgtgtggctgggggtgggttgcatatgttgcatatggagtgaggtgtttgtgatgtgtgtgggtgtgtgcggtgggtatatgctggtacctgtgtgcatgtgtgttggtg

SEQ ID NO: 5026 - DNA, 1176 bp, Artificial sequence
  DNA replication origin
tcctccactcctcttcctaaacttaaactaacccatctcatccttaatatgccttggaaataaaagcaatatttgactctgctgccttcaagtttctcttcccttatcacttccttccaccttccttctgtgatgctagcccaggagtgtgaagcctggcctctccccatggcacccaaggtgaccctgctctctaatgacacaaatctatggtgcttcccccttcactgtgcaccctcctcagacagcacatttacatcttcataaatgctccccagaaaacatgtatgcgtgtgtgagaaagtgtgatgaagcactgtgcaggcagggttttaaagtagtctttaaggtctcgaactctttcttcaggtggaattttatgagaaactgcaatatgagaaacaaatcatggggcttgtctcagactgaagaaggttttacaagtgtaatctgaaaacctctgctctgagtgtggtccacatgtgggatgagggtggtgaggatgctgctggtggtggtgatggggattatgatggaggtgatggtagtggttgtgatggcaacagaggtggtgatgatcattgtagtggtggtgagtgattgtagtagagatgatgatggtgatggtgatgttgggactgaggtaaaggtgacagtggtgttagtggtagcggtggtagtgacagtgatggcagggatcttgggggggcggtagtagtagtaatgttatgctgatgggattggtggtggtgatggtaatgttgatacaggtgatggtggtgatgatggtaatagtagtggtgatgaccattgatggtggtataactgcaatgatggtggtgatggtgatggtggtgttactggtaacagtggccatgatggtgttgttagtattcatggtagtgttgatggttgtgtcattggtagtgacggcagtaatggtgatattagtagtcatggtggtggtgacggtggtgttagtggtagtgctggcagtactggtgatattagtggcagcaatgatggtgacagcagcattagcagtaccagtggtgatgatggtggagctgatggtggtggtgatggtggtggtggtggttataatggcaacagtattaggtatagacaagattctactgaaacaaaggtttattaaaatgttattaatttcaggca

SEQ ID NO: 5027 - DNA, 824 bp, Artificial sequence
  DNA replication origin
gcccatggagggggtgggaggctcaggcacggcgggctgcaggtcctgagccctggcccgcgggaaggcagctaaggcccggtgagaaattgagtgcagcgctggtgggctggcactgctgggggacccagtatatgctccgctgccgctggcctgggtgctaagcccctcattgcccggggctggcagggccggccggctgctccgagtgcggggcccgccaagcccacgcccacccggaactccagctggcccggaagcgccgcgcgcagccccggttcccgctcgcgcctctccctccacatctccctgcaagctgagggagccggctcctgccttggccagcccagaaaggggctcccacagtgcagcggtgggctgaagggctcctccagtgccgccaaagtgggagcccaggcagaggaggcgcggagagcgagcgagggctctgaggactgccagcacgctgtcacttctcaatatcagagaaaagaacctggaggcagaggtgaggactgggtgatgggtgtgatgtgggaggtgtgcgggaaagaggaggtgagcttgactctaaggcttccagcctggacacgtgagcagatggagaaataggaaggcgggctcatagagaggggtggttggaggaggcatgagaagggctctagacttcatgtatttgacatgtttgaagacaattggttggggagacttacagtctgttggaaaaatatccagtgctaaggagagaggtggggatagactgggaagagccactgatagctatactttcttctatactcatttttgttaactttgccctctga

SEQ ID NO: 5028 - DNA, 958 bp, Artificial sequence
  DNA replication origin
gagtgttttggtaaatggttacataagtatgaggaattttaattttttcattagaaataatgtgtggaatttataggacaatttattaagaagcttaaatgtatgtatggtcgttgattaatctagggccatttctctcttagagtctcttagagaagttgctaagcattttgattgctgtcaatagagattgagtgtgtggtaaggcttcctccttggtgggccttttggtgataggatggtcaagtgaggaagggctgtgctcctgcggctcctaattctgaattatatttattgggccatgcagtctggttagtgcctgagtttatgtatgggaaatgaattccatttctacatgctgggtccttatcagagcagaaaaaagaacccacgctatgcagatacataaatgtcacccacatgaacaaggcactgtcttcagtatggcatgaagggggcagtgatggatgggcagctggagaggggagcgtgttcagatgagacaggctggtgcagacatctggggtcaaccacagcagacactaaaatgcagtggggccgtggtgagggggatggaggggatgtgggaggtgagtgggagctgagggaagaggagtggctcagaatgcagcggggggtctgcgagaggaccagagagggaggaagcctctccttgggaagagttgggggcaggtcaggagaggttccaggtagagtcagaggtggctgggctggggtggtgaaagccacccttatcctccctgtgactcttagggtcattgcactgcttttctgcttccagatgagatggagtagcagggacggcgtttatcctttcacctgacataattaacacaggacaaaatagatgaggaaaaaaacaacaaagcgaaactcttgccatcagacagcgcagagctgtggtccctgagagggagagacagacaagaggagtgct

SEQ ID NO: 5029 - DNA, 1110 bp, Artificial sequence
  DNA replication origin
ggggaggaggggcgtaaaggggaaagggagggggttggagagaaggggcgggccgaaggccgccgctgggcagacggcggggaagggggcggagaggaaggggagggggctgagagacccggagggagccggaaagagaagtgaaggggaggggtggactggaggtccacagcggaaggctctggccgctgcgcgggtccggggccccacacgtgtgggtgggagatggggaaggacagaaggtgggagaggagtagaggatgcccgaggcagcccccagacccaagaggagggtccagaggcgcccccgcattccgggcttggctgacacagaaaaccctggccgcgccgctcccagaggccaaggccagggcggcagcgctccctgccgagcgctcctccacatccattccgctcgccgccgagcgccgcctgggtacccggcccgaggtgcgcgacacggccctggcggcgaggagctcacctccccagggggaggggttcctgggaaaggacgctttgccgtggctccgtgacgagccagagagaggtgacactcaaggagggagatgaacgtgaatgacaaagtgcagagcaggagtggggagagggggaaccacagcacgtcactctcatgggcctccacaaggtgtgcagggtccaagaggcagtagcagagagtgagtcgtaagagaaatgtaactacttacgctaataatggcaacagtaacttaatttatatacgtagtttcttaaaggtaacacttttagaatgaatgtattttaatgtggtccctttaacaacataacataagccaaatcatgtccctctcctcaaatctccctaaacctatcagtggttcctgctgtctctgcgtacgtaagccaaggttctgcagtggtctacgaggttctacgtgacctggtcccctttcctctttggcctcatctccttacgcctcttcaatttacgttggtctcgtcaagcggtcccttgacccctacactggctggacacttcccgtagatttggctacgggaaggagacaggcagcccagatgggtttagacaggttattacttacaccgacagcaaaagcaaaatcagtg

SEQ ID NO: 5030 - DNA, 1957 bp, Artificial sequence
  DNA replication origin
acgaggcggggctcgggagtgtgggggcggggtgggaggcgtggctcggggccaagctgggtgtggggacagggcagggttggaggcgggctcgggactgtggaggcggggcggggctcgggaccagggcggagtgcggaggcagggtgccccaggaaggaagagcttggggccaggccgagcgtggaggcggggccgtgtggaggcggggccgtgtggaggcggggccgtgtggaggcggggccgtgtggaggcggggccgtgtggaggcggggccgtgtggaggcggggccgtgtggaggcggggccgtgtggaggcggggccgtgtggaggcggggccgtgtggaggcggggcggggctcgggaccaggccggagtgcggagacagagtgccccaggaaggaagagcttggggccaggccgagcgtggaggcggggccgcgtggaggcggggccgtgtggtggcggggccgtgtggaggcggggcggggctcgggaccaggccggagtgcggagacagagtgccccaggaaggaagagcttggggccaggccgagcgtggaggcggggccgcgtggaggcggggccgcgtggaggcggggccgggatttggaggcaagacccggcggggaggcggagcctgagcgtaaaggcggggctggtcagggagatggggtcggagtggggaggcggagttgaggaccaggcagtagtgtggagacggggctggacgagaagggcttggggttaggccgtagtggggaggccaggttgggcgaggaagcagggcttggagcaagccctagtacggagacgggactgggcggggaggcgtggcctgagtgaggagacgggcctgagtggggaggcggggcctgagtggggaggcggggcctgtctgggagatgaggcgcagtggggaggcggggctcgccgccagcgagcgcgagtgtcaaggtcctggagtcgaatgcctagtaagtgctacggttggagtgcagtctagagttctgttcccagggtgtctccatttcttgcgtcttctacacttacccctgcctcgaccctctcagctgtatggaaaccgttctttaaattcagggaatgtgccaggaaagtgctttgaggccaaggccagttgaacacaaggcattgtgttgtgaaggttaacgttaataggacagttaatacttttcagaacaagtagttacttgactggcttaaagctcagaggggtcagggcttggatccgtcttattgtgtaccttcccttgcattttcggctgtaagctgaatacatgttttgctgtcaaagagaattagttcattcattatcaaatgtaaataatatccagcaagggaatagaatcctgtgctaatattgttattaacgtagaataagatcgatttatagtccaaaggccttggctgctttaccagtcaccagtaattattgaggacctactatacactagagattgcatgtgcatcttcccagtaagcaacgtgatcagttctgtttaggtcagaataactgtaacaggaccacaggggaacatccaccagagatttaggaagtaagtgagggacagaaggagagaacaatacatgaaatttaagttctacaagaagagttaagggcgagttacctgtgggagtgaggggtaagtctgaaatcgttttagttacgagagaactggaggaatggaaagatcttccagatgactggatgttggtgtgagacggagagtggcaaagctgggaatatttaaacagtaccaaaacatacaggcattcctaaattaagttaggcagatggcacctttagttaagaacactggagaggcaatgattttttgttttgttttgtttttgagactgagtcgcgctctgtcgcccaggctggagtgcactggcgcgaactcggctcactgcaagctccgctttcctggttca

SEQ ID NO: 5031 - DNA, 1012 bp, Artificial sequence
  DNA replication origin
tcctgacggctcttgcctgcagcccaggtcgggccggaggaggggccgctccccgctccccggctgtaacagacaaaaggctcagggagggtatcaggggacccggtgctgacccggcagaggcagggtgaacaagcccggggtcaagcgaagccgcacgacggccctgacggcccgagacgtgccacgcctgggtcccgacactccacttacgtcgttgactgtctctaaccagagcccgagctcagggaccgcgcgcacagccgccggggtccagcacaggaggcagagggcgacgcgcagcagcggggcccgggcgggaaagcagcggcggcggcgtggcaggagcccggctaccgagcggcaggcggcgaccatcttgaccaggaagctgcacctggcgctccgagacgcctgccacacccgcacctggtgcagcaccgccccaggcaggcgggtccgaatccgggacgcggggctcggactcgggtgtggaggaggggctcgcgcttgggcctgggcggagaggcgccgtgcagttctgggaaacccggccaggaccgggaggcagggcttagggctctgagccgggcccgagcgtgcagctgggagatgcctggaaggcagagataggagccaggatgtggagttggcggcgagacgtggaggctgggctcagggcctagcgtgggcgtgaagatagaagaggagccggaacgtgcaagggagggctggcagcccgagcgcggaggcggggccgggtagggaggcgccgccggagtgtggagacgaggcggggctcgggagtgtgggggcggggtgggaggcgtggctcggggccaagctgggtgtggggacagggcagggttggaggcgggctcgggactgtggaggcggggcggggctcgggaccagggcggagtgcggaggcagggtgccccaggaaggaagagcttggggccaggccgagcgtggaggcggggccgtgtggaggcggggccgtgtggaggcg

SEQ ID NO: 5032 - DNA, 1118 bp, Artificial sequence
  DNA replication origin
gacccgcctgcctggggcggtgctgcaccaggtgcgggtgtggcaggcgtctcggagcgccaggtgcagcttcctggtcaagatggtcgccgcctgccgctcggtagccgggctcctgccacgccgccgccgctgctttcccgcccgggccccgctgctgcgcgtcgccctctgcctcctgtgctggaccccggcggctgtgcgcgcggtccctgagctcgggctctggttagagacagtcaacgacgtaagtggagtgtcgggacccaggcgtggcacgtctcgggccgtcagggccgtcgtgcggcttcgcttgaccccgggcttgttcaccctgcctctgccgggtcagcaccgggtcccctgataccctccctgagccttttgtctgttacagccggggagcggggagcggcccctcctccggcccgacctgggctgcaggcaagagccgtcaggattgcgcatgggacggccctcgggtccgagcgctcggactgttactgagggtcaccatgcccgacgccgtggccctcattctgctctgacatgttttggctggatcaggaatctctcggcacatctagcagcatctttgggattcgactcttcctgtccggatgcagccacagtgggccacacccctgaggccgcagggaggacttgccagcgcttcagtttctgcataaacttagaaagcgggtctgccgcttccttaaaaaaaaaaaagaaagaaaaaatttaaatgagggggaaacgtgcagtagtcaccctacctctatttctctcttcttgagttcctgaatttctctacagttcctgtcacagttccgggagagagagtgtgtgtgtaggtggggcgggacttgtgattagggagtgcttgaaaggcgaatctggaggcatgagtgggtggaaactcttctttccaaggcaggctattagaaaacttggcgtctggtaattagaggagatgatgtgggagagatgcaggggcagaattatggaaagtcttgcaaaagagagacaggaagtctggaagaggcattatctccggcttctctggggtcagatgactcatccagcactgtttgggatgggtattttccacatgcatg

SEQ ID NO: 5033 - DNA, 1568 bp, Artificial sequence
  DNA replication origin
gcgggagggacactgacctgggaagcccgcggctcggggcaggcgaggatcaggagcagaaggaagagcgcgcgcggagagctgggcaccatcttgccagtcggaatcccgctgcctgggaggggaaataactttgcctccgctgccgagtttgtcccagcgatgcggcagccgtccctgcagggtgcggggcgccgcgcggccggggggcggctggggcagggggggaggcgggaggccccgagcgcagcgcgtcccgcggggatcggcgccgcccgggccttgcgagggtccaggtgcgcccgcagctgcccgcacgagacagtccgcgcgaggcggggaggcgccggcccctgggctaaggacgagggaggaggggctgcccggccgggaatgcgcccgggagcgcgcccaacccgcgacgccgaggacgagcgcgggcatcctcggggcctggcagggatgggcggccagtgccccgcatatgtgcgggtgactggaagcccaccctgggcgggttcactcccgaccgtcctatttcccaaccaagtagactgaggctcagtcaccaaggacaagtggcagaacagaaacccaaacccaggtctgtcctacttcaaagcccacgcgacaccctcctcccgacattcctagaagggggccaggaaatgggcttcataagcttgacgtggggtggactgagctctccatccgaataaactagtgtccctttaaataatgcaatggggccgtgagaacacgcacgcacagtgagtagatacacacacagtgatacagtgaggggatctacgtccttctgattcactgtcctccttgctcaagggaaggagaaactcagtttaaatcggaggtcaggttctagaacattgcctgccttgctgaagtcgaatcaggaagtgccaggccggcatgagcagtctgaagtcccctgccatcagggctgtggtacaaccagatgcctcagacctgagctcccggaaggcatgactgacgttcttcctggaaggttttctgaaggcagtcactgcagatgtcctgggacacacaagtctggtcaagccccagatctctttttcctcttccacatttcactttgttgagcccactcagagctcagggaacggggagcccacaagactgtgaccacagagcaggagctgtttcccagcagaggccagaaaggaaagctggagtcctggcttagtcccttcaaactgctatagcaaaataccataaactgagtggcttataaacaatagaacgtgtttctcacagttctggagactgggaggtccaagatcaaggtgtcaatagattaggtgtttggcgagggccagagttctggttcccgtgtcctcacaggggaaaggcagctctctggggcctcttttctgagggcactaatcccaattttgagggctctgcactcatgacctagtcacctcccaaaggtcccacctcctaatgccatcatcttgggaatgaggtttccaacatataaatttaggggagacaccaacattcagaacctagccagtgccccaaaa

SEQ ID NO: 5034 - DNA, 2249 bp, Artificial sequence
  DNA replication origin
cagaaaaattaaacagcaagccgcctgtatatgtgtttaagaaaatgtagtcgcacatccagggcctcgccggctcgggaagggaccgcttcggaaacctcccgggccacctctgcctgggaaatgccacaaactgctgagaaagtcccgtgagtgttctgatacttcggttggaaatttaaatgtcggagtttggagggcggggacgttctctaagctaattaggtgacctggagctctcatggagacccaggaaagaccaatgtctcatagctccctgagaaatcttcttcctcccggcggtgctcacgtggagtcctcgcccacaatggaccgacgctttcgcagcccagcccgggtcctcccaggggcccggccagcgatgcatctgaggtgacaggtgggggaccctgcacctctctctgaaaactgaaccccagcccaggcatcgctccgagctctcaacccaggcatccgagtggaaagtggcaagcccgggtcccccagccttggtgctgcctcccctgcgcgcgggacaggggagagaggaaggagggatgctggcctggagagaggcaggagggacactgacctggagagaggcgggagggacactgacctggagagaggcgggagggacactggcgtggagagaggcgcgcgggacaggggagagaggcgggagggacactggcctggagagaggcgggagggacgctggcctggagagaggcgggagggacactggcgtggagagaggcgggagggacactggcgtggagagaggcgggagggacgctggcgtggagagaggcgggagggacgctggcgtggagagaggcgggagggacgctggcctggagagaggcgggagggacgctgacctggagagaggcgggagggacgctggcctggagagaggcgggagggacactggcgtggagagaggcgggagggacactggcatggagagaggcgcgcgggacaggggagagaggcgggagggacactggcctggagagaggcgggagggacactggcgtggagagaggcgggagggacactggcctggagagaggcgggagggacactggcctggagagaggcgggagggacactggcgtggagagaggcgggagggacactgacctggagagaggcgggagggacactggcgtggagagaggcgggagggacgctggcctggagagaggcgggagggacgctgacctggagagaggcgggagggacgctggcctggagagaggcgggagggacactagcctggagagaggcgggagggacactggcgtggagagaggcgggagggacgctggcctggagagaggcgggagggacgctgacctggagagaggcgggagggacgctggcctggagagaggcgggagggacactagcctggagagaggcgggagggacactgacctggagagaggcgtgagggacactggcctggagagaggcgggagggacactggcctggagagaggcgggagggacactgacctggagagaggcgggagggacactggcgtggagagaggcgggagggacgctggcctggagagaggcgggagggacgctgacctggagagaggcgggagggacgctggcctggagagaggcgggagggacactgacctggagagaggcgtgaaggacactggcctggagagaggcgggagggacactggcctggagagaggcgggagggacactggcgtggagagaggcgggagggacactggctggcctggagagaggcgggagggacactggcctggagagaggcgggagggacgctgacctggagagaggcgggagggacgctggcctggagagaggcgggagggacgctgacctggagagaggcgggagggacgctggcctggagagaggcgggagggacgctggcctggagagaggcgggagggacactggcgtggagagaggcgcgcgggacaggggacagaggcgggagggacactgacctggagagaggcgggagggacaggggagagaggcgggagggacaggggagagaggcgggagggacgctggcctggagagaggcgggagggacactggcctggagagaggcgggagggacactggcctggagagaggcgggagggacactgacctgggaagcccgcggctcggggcaggcgaggatcaggagcagaaggaagagcgcgcgcggagagctgggcaccatcttgccagtc

SEQ ID NO: 5035 - DNA, 1611 bp, Artificial sequence
  DNA replication origin
tctgcagggctgtcacaggatcagcctctgcacgcataaagtacccagcacggggtcccccacacacttagaaatacaatacatgatggcgattttttaaaaagagaatttggcactttaaaaaatgttgtacatttcagagatgaaagcccctgaatcttgggaaggaggatgaataatgtaataataactgcctttctatctgtctagcgggcagggccctctcacatgggcagggccctctcacatgggcaggggaattgtataacattccctgtgggctccactgaaactcccagggaccgcaggcagctctgaccccatgaaaacaaggaaggctttgtggagtcaggccttgaccgctaacttacttgtcttggcctcagtttccccatctgaggcaggaaggaaagacaccctgcctgcaccatggagttggggtgtgtggagccccagtgagggcttgggcctcacagtgccttggaaagtgtgaggcttggctggtggttatttctgcagctgtggagccaaggaaaacaggaacggactcagtgccgttgagagctggatttgccaccatcatctccgagaaggtaggaaatccaacgccttccccaggaaacttcaactcactcaacaaagacagcccttgataaatgtgtctgcagtgagtaaatgatgtcagatattccacaggctcctgactttgaatgaacatgatgactggcccctgtcccccagcaccctaagacaccggaggaaaaccagccgcccatctctgggtcttggcggtgtgaaagctgttacagggcaagcatgaaaaagtgcccttgtgtctgtcagagtcctgccctcatgggagggagtctggggtgtcggctgtagcctcatcagacaagtggaacttgtcctcagcagcccttccctcccaaccgtcctggtactaacggggactccctggagggtgcactttcacgcctgaagcactggagccaaccttggtcatggactggaaccagtgtattgcactggctcgggctgagtgtgtgtgtgtgtgtgtgcgcgtgtgcgtgcgtgtatgcgtgcttgtgtgtgcgtgtgtgtgcgtgcgtgtgtgcgtgtgcgtgcgtgtgcgtctgcgtgtgcgtgcgtgtgtgcgtgcgcgtgtgtgcgtgtgcgtgcgtgtgcgcgtgcttgtgtgtgtgcgtgcgtgtgtgcgtgtgcgtgcgtctgcgtgtgcgtgtgcgtgcgcgtgtgcgtgcgcgtgtgtgtgcacgcacagagggtgtggaggaacgcagtgctttccactcaactctgctatgaacttaaaactgctctaaaaaattatcttaaagtaaaatcaaaaatgaaaacaaaaccaaaactggatccaacttgtggacggggaagggaaaagcagtgcgtgatctaaaagtggcgccttgcaacagtttggtccgtatgaagacgtgatagttgttaaggccagaatgaaaaggctgaagaagaaaaggggtgacattgaggctgagggagaagaaagggggcagctgcctttctaatgtgctccccccacccccactgccaccaaccaggcttacaaatggg

SEQ ID NO: 5036 - DNA, 1733 bp, Artificial sequence
  DNA replication origin
tttgccccagctgtccttctcggggtgcggcttggtggcctgcattttcctgcaccattctattccagggcgcttcctttcccgcgcccccttcgcgtaggccctggacgggtcgtctgggtctgtggttgattacttgtctctcctttccctactccagagtaagccctttgagaaggggccgtgcctccgtcttggttctgctcccggcccctacccaaggtcgggcccacggcaggtgcgccagggcccggcactgagcgtgtcttctccccgcagccgcccccgagggcagcgtggccggcgactccgccttcagccgcgcgccgcgctgtgcgcaggtggagcgggctcagcactgcagctgcgaggccggattccacctgagcggcgccgccggcgacagcgtctgccagggtaggcgcgggctccgccaggacactggggacagcacggggaggacatggggcggggaaggggctctcacccaccgccctcctgccggcacgggtggcttcctgcgcgcggtctcagaaggcctggccactttgcattataggtaagtgttgacctagtgatggctagaaggcagctaattcacagaaatcagagctcgccccgcctcagaacctggtccagcctatgcccaagccacacgcgcttggttcaggagagccttgagaccctccatcccctccgccctggctggaatcacgtctacgggtggcaaggaggagcttaaatcgccgtgttggtagagcgggcccggagctgggtaggggtgtgggactcattccttggtcccctctgggcttagctttcctgacggctcagttttgctgtgctctcctgattaccagagttctctccccaaacaacgcaaagcaggagttcaaagctgagatctggtcagttggtgctaatagcctcattttacagcacagaaaggaggattcccaaagataaagagagttaacatggggctgttaacccatccctactttctgggaataggcttgatttgccagcctctgcagggtctccccaggtgtcttcagcctaagacagtgatgcctttctagggcctagcacttcagctccctctcactcctccttttagccctctgggccctcggcttaggagaaagggaagcacacctgctcctcttgtgagtgctctgctgggggtagggcatggcggctgcccgaggcccagccacttaactgcagctgccactgcctccaggaattgaagcatgattgttctgggtcacagctggcaacacttgctgcatggctcctaaagtcacagtgagcacttctgtctgcagacgtgaacgagtgtgagctctacgggcaggaggggcgcccccggctctgcatgcacgcctgcgtgaacaccccgggctcttaccgttgcacctgccccggtggataccgaactctggctgacgggaagagctgtgagggtgagtgaggctacagagtgtcgtctgcacccagccacctgctgctgtgctgaacccccaggacctcacagtcgggagtgaggtggttaggagagtcacagtttcagatacattggatttttaaaaagccaccaaccaaagggcttctcaaaggtcaggccacattatcatctacataaataggaaaatgagttccttaaacatcttggcaactagtcttttccgactttatttgagtaaatgggttttttgttttcttcaagg

SEQ ID NO: 5037 - DNA, 1476 bp, Artificial sequence
  DNA replication origin
gataatttctaggtcctaaaagcctcaattattggacaatattgcatagctagagaaggaagagaattcactcaccccgtaggatgacttagttatctgagacagaaagtgtataatggtaccacaaaaacagtcacttggtggagttcaaatcacacagagagaaatccatttagtaaattcccaaagttgcaaactgtgtggacccacccagagtcccaccgggactggacagcccccactagattgtactggatatgtaggcatagagcttacgccaaattacccgaccagcaggcaggtagttgtgttactggcactattaaaccatctttcttcttactgcccataaaaacaggcgaaatcctaggcttccctgtctatgcttcccacgaaaagagaaacatggctataagaaattgaaaacatgataaatggccccctaagagaatcatgcaatattataggcctgctacttaggcacaagacggctcatgaggataccagaccagatggtggtggtggtggtgatggtggtgttggtgatggtggtggtggtggtggtgatggtggtgttagtgatggtggtggtggtgatggtggtggtggtgatggtggtagtgttggtgatgttggtggtaatggtggtggtgatggtggtggtggtggtgatggtggtagtgttggtgatggtggtggtaatggtgatggtgatggtggtgatgttggtgatggtggtgatggtagtaatggtggtggtggtggtgatggtgatggtgttgctgatggtggtgatggtggtgttgctggtgttgctggtggtggtggtgatggtgatggtggtggtgtgatggtggtgcgatggtgatggtggtggtgatggtggtgatggtggcagtggtgatggtggtgatggtggtggtgatggtggtgatggtggcagtggtggtggtgatggtggtggtgatggtggtgatggtggcagtggtggtggtggtgatggtgtgatgttggtggtgatggtggtggtggtggtgatggtgatggtggtgatggtggtggtgatggtgatggtggtgatggtagtaatggtggtggtggtggtgatggtgatggtgttgctgatggtggtgatggtggtgttgctggtgttgctggtggtggtggtggtgatggtgatggtggtggtgatggtggtgatggtggcggtggtgatggtggtgatggtggtggtggtgatggtggtgatggtggcagtggtgatggtggtgatggtggtgatggtggtggtggtgatggtggtgatggtggcagtggtgatggtggtgatggtggtggtgatggtggtgatggtggcagtggtggtggtggtgatggtggtgatggtggtggtggtgatggtggtggtgtgatggtggtggtgatggtgatgttggtggtgatggtggtggtggtggtggtggtggtagtctggag

SEQ ID NO: 5038 - DNA, 1001 bp, Artificial sequence
  DNA replication origin
ggaccaagcctggatattcatttcctttatcaataacagacactgttaatcccacaagagccacaaaaaatgggttccaagggggtcaggcgctgcggctcatgcctgtaatcccagcactttgggagaccaaggcgggcagatcacttgaggtcaggagttgggagatcagtctggccaatatggtgaaaccctgtctctaccaaaaatataaaaagtagccaggcatagtggcctgtgcctgtagtcccagctactcaggagggtgaggcaggagaatctcttgaaacccggaggtggaagttgccgtgagctgagatcacgccattgcactccagcctgggcgacagtgcaagactccctaacagacacacacacacacacacacacacacacacacacacgttccaaggaggaaagatgagttaccttacaaagaaaagggaataagctgggtgtggtggctcacgcctgtaatcccaacagtttgggaggctgaggtgggaggatggcttgagttgaggagttcgagaccagcctgggcaatatggtgagaccctgtctcaaaaaaaagtggggtggggaataagtagtaccgtacagaacctacagctaaaagaaacaaaaatggtgctcgctacaaaaagtgagaaaaaggaaaaaggtagcttctggatttggaaattcaaaggtcactggtgttcctaatgagatccacggttgtggagtggcagagagaagccacctgtggcacaggagtcgtcagtaggagtcgcaggaggaattgatgcagcatggtgggagtggacgtcactttcaaggtgatcagccgtgaagagcggcaaacacagcgtcttggctcgagttcccccaaacggtgccccctggaacaagaatttgagcacgagtacagtagtttttttgggaggtgatcccaggaaacatcggtagtcagggaaaggaaggaagccaacagaagatgccctgatgagcaagttgca

SEQ ID NO: 5039 - DNA, 1147 bp, Artificial sequence
  DNA replication origin
attgatgcagcatggtgggagtggacgtcactttcaaggtgatcagccgtgaagagcggcaaacacagcgtcttggctcgagttcccccaaacggtgccccctggaacaagaatttgagcacgagtacagtagtttttttgggaggtgatcccaggaaacatcggtagtcagggaaaggaaggaagccaacagaagatgccctgatgagcaagttgcagctgtggacaaccgcagccgtggcctacagaggaccaccgcaatacgcctaggacacacgcctccccgcagggcacgtgcggagggcgagagggccagggcattctcgaccaactctatccctcgtggagggagagcagctgggaaggagtgcaagcacccagcacctctaagtctgccccatttctgctctgagcgggctctccacagccagcggttgcctgcaggtggagccggtgcgcaagacaggcgagtgagcgcctggcggccccgtggaatctgggcaacgatgggaaggagaagggcgcttttacaatgtgctcgggtagataccgtgagcatcgggggacaggaaggggagaggccccagggtgttctttatctacaggagagtaaaagatgcaaggcgcagggctgatgtgggtaatttatgagggactgtaggaagtttgggggagctctgatgatcattgccttctctttgtatctcaaatgcagcagcacagtcttcagagtgggctatcagaaccgaagggacttttaagagccactctccgccgctcataaggggaaatcgaggtccggagaagggaaagcaagtggctgaatgccggtaaaaggcaggaaaagagcggagcccagggctccagggggtcggtttgggacctgcttccaccagcagagtctaaggtcatccccttggccgtgcgccaccctgggctcagccgaaggaaggagcactcgacacaaacaaaaccgacgctccgggtctccgtagtcgttaagcaaagaggaagaggaagcgcttcttcattaggccacaggaccgggccttagaacttttgggttttatccattaaaggtcctttggcaatagaagaaaaacccagatcgagccctgcaaactgggatcttccgccggcaccgccc

SEQ ID NO: 5040 - DNA, 1134 bp, Artificial sequence
  DNA replication origin
gggagagaggaatcggctgcccttcgggagactgggtgagcccctccccgattcccgtctgccctcctcggagcggccctgcgcgcctcccgcggcccgttagaaccggcgcttttgtttttaaaggtcatacattttctcctctgtcgcttgtcgggcacatcagaaacggattcggaaagatcgaaacctgtcgtttttaatgctttcttgtctcctaacttggatttagagtcggagtcgcggtgcggccactcggggccgcagctacctcccgacggtgaccggtccctgcagcccgggagacgctggccgccggggctgggacctgaggcgcgagtctagcggctcccccgggccgaagcccccagatttggcgggtccgccgcgctgggcgcggctccgcagagcgggcggctggagtcatcttttgcagctcgtctgcactgaggatttctccctgcttggcgtgggcgcgggcgggggagccgtaggtgttgaaacccctgaggcttctgccccccgaaggcgcggaggagcgatcagaggatttggaaaagacccccggattccaaaagcaggagctgcagaagagaccctagcccagggaagtgtggagggatgtctgattataaacctttccttagtttcaccaaataatgtgttttcgcagttctgcattggattaagatcttacacgaggctgcgttcgccctccctgtcttccctgctctccccgagggaattaccttcatccacatggttgaagctggctgggcaccaccatacccacatgtccacgggtaggaaagcgcaggagataggaggggactagcggctcctttgtaagtgatgtcatccagaagttgcccagatcggttcaactcacatcctattgacctgagcatagtctcatggcctccctctctgcacagtcatctgggaattgcatcttctctccggggagccatgttccttgccagaattcaccagaggtgggggccaattgtattccaaagacaaggggagaatcgatacggaggaagagtcacctctaccttggagggcaacccagagagagcaatgttctatgtccaggagagaaaacagtttttagaaataggtgtggtcaga

SEQ ID NO: 5041 - DNA, 1627 bp, Artificial sequence
  DNA replication origin
taatcccagcactttgggaggctaaggtaggcagatcactaggggtcaggagtttgagactagcctggccaacatggggaaaactccgtctttactaaaaatacaaaaaaaaaaaaaaaaaaaaaaaaagaagctgggcatggtggcgcatgcctgtaatcacagctactcaggaggccgaggcagtgagatgagatcacaccaccgcactccagcctgggcaacagagcaagactctgtcaaaagaaagaggaagggaagggaaggcaagagaaggcaaagggaggggaggggaggcaaggggaggagaggttaggtgaggggaggcgaggcgaggggaggggagggagaagaagggaaggggaggccagggaaggggaggcaaggggaggggaggggagggagaaggaggaaagggaagggaagggaagggaaaggaagggaagggaagggaggggaggggagagaaggggaggggaggcgaggggagggaaagaaaggagggagggaggggaggaaggaaggcaggcttgactgtagcttaggaaggaaggaaggcaggcaggcaggcttggctgtagcttaggaaggaaggggaaaatgcttgtctgtagcttagaattagcacccacactcgacgggaggcgatgatacaaggcatgtatatgagggagtgggaatttggggaccacctagaattatgccttcccatccctgagagcatgtgcatagctaccagctataaagctgcttggctgcagtgtggtatgggcttcacctggcactcatgttgctgccatttggcccctgttgttttggtgccgccctgtgcaagggtcacagggacctggcacctctgtctacttgcgctttcaccatctgtatgagtaatataaactgcctgatctaaaaaatggctccttgttgctttcctgaccatgcatgtcagccaggccttgccttgtgcttgatacatagcagctgtggctcccccaggctgctgcttaggggctgctgcttaggggctgctgcttggccatctgacaggaagatactcggtctactaagggaggaaagaatgatacatgaaggaaccacaggacgtggccaaatgtccagtaggtgctggggagacacacggggctggctctcctcatgctgcatcaagtgggacaaagttggataaagggaagtttattgatgcgagagtgctgctgtggggtatgggattcacaccccagcaaggaggtgaagatagtactaacactccactcaatggtctcatggaagcctggaaaaagcaatatcccccaggaaagcagaactgccagaaatgccgtgcaatagtggatacaggaatgaggtggctcagagaagcaggcatgctggagtggatatgctactgaggaaagaaaacccaccaggtcaccgcagtccacaggggagccgtgggcaccttctgtttatccaaacgaggaggaatgtgctgttcaatggggccaccagcatcagcaagaagcttggtggtgactgtgggctgatcgtgggagatgatgttacagagctatgttcccaatactaatgaggatgagtcctgaaataatagaggccaggtgacaacacttca

SEQ ID NO: 5042 - DNA, 1019 bp, Artificial sequence
  DNA replication origin
ttcggcggccacgcccccagcggggagccggtccacgtggggcgggacagccccctccctgcggcctcgccctggagtctcggcaccgtctggccccgccggctgattacagccagagatcgagggggacctcgctgtccccctagaggccgtcatgcggggttacagaggctgcgaccaaagtcattcctagctcctctctcggggctccggaaagccgtccgcgcctccagccgcactttcagcgcacgcaggacctgccgcgcccggtggccacacccgtccctctgccgggtgacgctgcgggagatcttgcgccctggggctccggatccagttctggcacgttgttgcacctgtgacttgtccttggcctggcactgtccctcgcctgggggaagcgggggggtgggggggggatgctcacgtggtcgctttgctcccgcagtcatgcacttgggtgaaaacagactgaagagtcacgggaaccagcttgtctccccagttatggcgcagagctgcaaggatggctgtgggtcattaatttctccgtggctgacctgtgtttgtaacgccgcagctgttgcgagggggaaggacactgcttcggattcaaattctgactccttgctgcagtgtgtcaccttgagccagtcccagatctctgcgttctcacaattgtaaaatgttaacagaggctgcctaccttgtggctggaattaaatgaattaacgtgtgtgaatgtgactagaattcagtacatgttcaggaaaagctgatttccgctttgctgttaccgtgaatattactgttttagggtgtagaaaagggtggaaggggatgttattgcatcctggaagcttatccttttgaggtaaagattgatttctggtcccctgcgtggtatatagtgtagttttgacattatttagatgtgttatgcacatttgggtgttgattatatggcttacgatcaagactaaccagtcatgccgtgggagattaaggtcgtggtctct

SEQ ID NO: 5043 - DNA, 1265 bp, Artificial sequence
  DNA replication origin
aatggccgttgaaccatgctatggtccccaggtgtctgctcccctctgatgtggccacactgctaaaaggcatgttctaggctggctggggagggactccgaccagtctgtgaccaaagggtggtctctactggctggggtcagagaatgagtcagggacatggggcaccattgtccagattcaattctaccttacccagggcaaatgctggccactttttggggctcagggtcatggagggagagatttggggtaagagattaggaaatttccaaaaacctgtctctccttccatcaaaacaatggacattgctaagagtttgtggtgcgtgtgtaagtccatctgtgagtgggggatgtgtgagtgtggatatatgtgcacacgtgagcaggtgcacacatgtgcatgagtgtggctgtcagcttgtatgatggcctgcatgcatgtgtgagcgtgggtgggtgggtgggtaacggggtgcgcctgtgtgacctgggtgggcatgctgggaccagggccgggcagagggcatgccagacactgaccccaagcttgggctggagcccttggagcctgcagtttcagggaaaggtggaagagaggtggggacaagaatgtcattacacagcccagagaaggcaggggagaccaggagccaagagttcccccaaagtgccatcagtgcaaggctcttgggactcctctttaacccctgagggggcgaagccttatttactcctaaattggaacagcaaggggtccctcatctcagcagctgtgcagtcctgacaggtcgtgtctccccagggaagcatctgaggatcgcggaggtggagggcaccggagtctcaggagacagctgtgtcctctcctggaggaacatgtcagggagggtgctggaggcctctagtccagcagcagagggcagggatttgcaggagagcaccgaagcaagatctggggcagaaggaagggcatccaaggccacggcaaacctgctcagctcccactgaggttcagccaggggaggccgagagccaaagctggggcacctctcccacagagagccacgggccccctccctgcaaccttcagagtcggaagggacgagtatctacacagcaggatgtggaagggatgaggaggggccagggcagagttcagaggcaaggggaagctggtgggagtctgagatctgcgcattccaggcagctcctattcataaaccatcctagtcagacaacatgcattgattacgcatct

SEQ ID NO: 5044 - DNA, 838 bp, Artificial sequence
  DNA replication origin
aagctaggtcttagccatttggtggaggtttagggactgggattcagcctctgggggaggacactaagagtaagcatgtaggttaggattctagtccagcaaatcaggaccatagaacaggagtcacagtgggagagctgtaggttcttaggaaaccacaacagacatacttacacagacaaggaaacacagttggactaccagcacttcattcatcaaacatcattgagcatctaatgtgtatcaggttatgtcacagccactggggtgacaagatagacaaggctcctgttcacatgcagcttatgttcttgtggtggagacaggcaacagaccagtcacaaaaaataagttagggaaatactgggatggtaactcgctctgtgaagaaactgttacgtgattgggggagggtggcaggtatggaacctggagaggtggggcagggacagtctctgaggggtgctgatgagaagcagctaggcatgagaagatctggggaggagccaggcagagaccgtagcatgtgcaaagtccctgagctatcggtggaatctaagaaggaacctggggaagcccttgagtgtggcagggtgagtgcaagactgagagtggagggcatgaggtcagaggcgtagatggggccttgtcagggtgaggaattttaactaagatgggggccattgaattgtttaggctggggaatgacaagatctaattgacactgtagaagggccattttattctgggcagggttgaggcagggactctgttaggtccacaggagaagagatggtggcttggagctgggtggtagcagagggcaaggagggaagtg

SEQ ID NO: 5045 - DNA, 1691 bp, Artificial sequence
  DNA replication origin
gccagacgacggcgccgtgcggggcgcgcaggaggtacccggcctgcccggcggcccagcccggcgccacagcggtcagaccagtcccacagcttcgcccccgccacccccaaccccggcccggcctcagcccgcccctccccgccctgcgccgccgcccgcccgcctgcgctcccggaaaccgagtccctcctgcgagcgcgcagagccggactggcccagccccccgcgcgcgcagccgaggccccgcagctctcgccgcccccagccggcgcctgggcgcggggccgtggggcgcgcgggcccgcgggaggccggagcaggagcccggcgggaaatgggtaagggaccacggggaggcctgggccgggcgggggcacccccggccgtcgccgccctcgacggtgaccgtgtgccgtgcagcgctctcgccacgccggcgagcacctgcggagcggctgtcgctgagggttagggtccctggagccggagagagggttgagagcgagcaggggaccctgaggatccagcctaaccgagcggcggagactgggacggcaaggggacgctgtctccactgaaggagtcagcctgggctctctcgccgcgggcgactccagccgcgctgttggatcctggctccaagccccgctggctggcgagcaggaggagcccttaaagccatccaggtgtcagaatcaggcgacactgagggctttgctcctaatctgtcatggccctgtgcctcagtggtttctggtgctcatgaccaggccaggctgtggccccggcttggtgggagctgcccccccgggactgcactgggctagaggaccaggcagctcttctctacccccttgggtgctggccctcctcctaggtgtgtctagcaagaaagtatgagagatttctgggaaggtaaaaagtgtctgcacagctgacaaactcatatccctctaggatttctttttggctctagaattgtctagctcatcttttctgtaggatgatggagctaagaatgtgagtgagttctttgctggatttttccacgctgcaggatggacttgctgctctggtcaatgcactcgccagacctctgtgtccatggtccgcatgtctaggtcaggggaccagtatcaaagtgaagactgggcaagtaagccccacctgcccttgaacctcaggcttggcccctcccgaggcccagagctgattgaatgttaattagcaactaattggatgtccatgagactctctacataaagaacacaccaaggtcaggtttagacagtgtgtagtgccaagtgattcattcttttcttccagacgtgatatttcctgtatgtgaagcatataaagaagagtcattcattcactcatctagcagatatttactgagtgtcaactacgaatcaggcatgcaggcactgcgaatactactgctcttatttgcatatgggttggaaagagaaaataagcaagtaagctgttgaatgacattatttcagagagcaataaatgctgaaaacacaaaactgaaaaattcccaaaaagagggatatggggcatgacagtgaaacgtataagagaaattgggccttaactagaaagtgtagcaaacagactttctaaattaggtgggaaaatggtctcatgttcaggtcctcaaaatctaggggcacagaatg

SEQ ID NO: 5046 - DNA, 952 bp, Artificial sequence
  DNA replication origin
tagcttctctctccccgccttgccacgcctcgtgggccccggctctccccagcccagactctgagggcagctgagcctgccccgcgccccgcccgcaccctccacatcccacggcttggcttgtgcgtgttccctccccgccatctcacacccctctctccttgttgtctccctccctccggcagatcctcactcacccttcgccataaagcaggaaacccccgaggtgtccagttctagctccaccccttcctctttatctagctccgcctttttggatctgcagcaagtcggctccggggtcccgcccttcaatgcctttccccatgctgcctccgtgtacgggcagttcacgggccaggccctcctctcaggtacgacagggaggtcccggggccatgcagctatggcggcgggtgggacgggggtcctcagggcagaccgccagccccctctctggcctcagtctcatccacccccaccctgttccctaattcctccggcaacttttggaggcgccaacatgaagttctctgtgacggggaagacatgctcggaaggggcggatgctgtaggggtgccggggatgcaccaccccaagaccccatggaaaagcaggaaccctaaggccgggagccgggtgctgtaacgtagcaacttggccttggtaaatgcataaatagatagaaggaaaaatgaacattttggagggaaaaaggaattggcttttggagcccatttctggatcaaatttctaaaaaggccaagggtcagtcccagttgtgtttccatgatgcagctatcttcattcctagcttaacagcatcaccgggaggacagtcagacatctgttaaacatgataaattcagtgattcaacaacttgagaggagtgggggacctcccatcaggaacctcaactgcctcaaaatatttaaagctggaagcaccga

SEQ ID NO: 5047 - DNA, 910 bp, Artificial sequence
  DNA replication origin
taggaatgaagatagctgcatcatggaaacacaactgggactgacccttggcctttttagaaatttgatccagaaatgggctccaaaagccaattcctttttccctccaaaatgttcatttttccttctatctatttatgcatttaccaaggccaagttgctacgttacagcacccggctcccggccttagggttcctgcttttccatggggtcttggggtggtgcatccccggcacccctacagcatccgccccttccgagcatgtcttccccgtcacagagaacttcatgttggcgcctccaaaagttgccggaggaattagggaacagggtgggggtggatgagactgaggccagagagggggctggcggtctgccctgaggacccccgtcccacccgccgccatagctgcatggccccgggacctccctgtcgtacctgagaggagggcctggcccgtgaactgcccgtacacggaggcagcatggggaaaggcattgaagggcgggaccccggagccgacttgctgcagatccaaaaaggcggagctagataaagaggaaggggtggagctagaactggacacctcgggggtttcctgctttatggcgaagggtgagtgaggatctgccggagggagggagacaacaaggagagaggggtgtgagatggcggggagggaacacgcacaagccaagccgtgggatgtggagggtgcgggcggggcgcggggcaggctcagctgccctcagagtctgggctggggagagccggggcccacgaggcgtggcaaggcggggagagagaagctagacctccctgctgcgcttctgcagcgaaaatggagagacccggaaggcgtgtgtgcgcccgcctctcccacaggagggagcgcggagacccgggag

SEQ ID NO: 5048 - DNA, 1180 bp, Artificial sequence
  DNA replication origin
cctaggaccggaggcgcgacccctcggcccaccttgcgggagccgcctaggaccggaggcgcgacccctcggcccaccttgaggcccggcctaggaccggaggcgcgacccctgggcccaccttgaggcccggcctaggactggaggcgcgacccctcggcccaccttacgggagccgcctagggccggaggcgcgacccctcggcccagcttgaggcccggcctaggaccggaggcgcgacccctcggcccaccttgaggcccggcctaggactggaggcgcgacccctcggcccaccttgaggcccggcctaggaccggaggcgcgacccctgggcccaccttgaggcccggcctaggactggaggcgcgacccctcggcccaccttgaggcccggcctaggaccggaggcgcgacccctgggcccacctggcggcccggccggcacagcccgcctctcctctccaggccagggccccacaccttccgcctgacagccagccaagctcttcagtcccccgccctccacctgccagggaggctccgggcgttgtacctgccaccacggggtaggtctggtgagtcgagaggttgcgccccagtggcgtgttggaaggggtcagggtggccttcccgtcgtccagggtgctgttgagcaagggcagcgggtagaggccctggggagcaaagagaagtcagcgcacagagacgatccaacaagccgaccttcctgcagaccctgagcctgtgtcttaggacttggcagccctcatctccccaggagaggtcctcatcgcccccttcttcctttacgttctcaactccactcggcacgtttcgttcatgctcattgtcctcccgcatccctggaattcaaggccagctggtagcatgggtgcccagacgtgggatagagagtctcagccagaggaccacaccctggttggatggctggtcggcttcctggtttcaccacactgttgggacccacagaatgcaggacggtgccaaggactggagcagtctccaaccggactgttcagggtccttgcatctgttaatttattcttccccagataggaaacccaggcacaaaggtttaagaaacttgtcccacttccagatgggccaaagataggattcagattcgagggatcagaatgtgtctgctctcaacca

SEQ ID NO: 5049 - DNA, 909 bp, Artificial sequence
  DNA replication origin
atcatctccattgtcctactcggttcttaaaggcatatggacttgcctcactcctacagcaaatgacggcatgggcaaagaggggcaacagacccaccctgaagacactcctcatctggttgacttggcagggttaagggaaaaagatgtgatgactaggagctgagagcttagtggttctgccagagctgcagagtctttgttggcctcagggtgggacctctcacatctctgtcagcttttcacggacaccaacctgttatgattcatttcacctgtcctgagcactagcaagaaaaattcgctgtagcttgtgatgtattattctggatttctcaactcattcatttgttcattcattcactataccattactgtctattataaggggggcacaatggtaggtgctgggaataaaaacgatgtttaacgtttcatgaggcttccctgtccttaaggagtccgcgtgtctttgtacctgtctgtctgctagattattaagtgacactgtgagaagctactgagagcagcatgtgggacatgcagaagggcaagaggcaggagagatgattcatgtcggaggggcaggggaggactgacggagagggtgatgtttggctgagtcatgaaggctagtggtatttttccatgcagagaagtgggaggaaaggcattctgtgtggagggcacacagtgtgcaagggcagagaggtgtgagcgagggtggtgagctcggggccatgagtaatgcaagagcatggggtgtgcaggatgagtggccaaaggtggggctaggaaatagtggctgaggtcattatgtgaaggctttgtgctactgcttcagagttgtggaacgtgatgttgcaatctgggaaagacgctgatggcaagggatagcatcatcaggtt

SEQ ID NO: 5050 - DNA, 1506 bp, Artificial sequence
  DNA replication origin
cttcgtgctctgtccctgggctgcaccggtgctggacttgccgtttccccgtccccgacctctaagtcctcttcctcgggtgcgcgcagtccttcccagtgactcccctggctggactgtgagctccccgcatctctcaagccaacggcaatggagccggtggtcccgggcccgggagccggcagcgcactcaggtgctctccgactcctcctggcccagcaccgggcaggccgggcgccgcgcgcggggcgtccggctggtgaggactaagccgctcgcggagtcaaaaccccctccccacctgcgcccggaagcagggccttcaaacacactcgagctcccaggccgcgatgcctgttttcccccttcccggccagggctgggcagggtctttgctgggaaggagctccagggtcagggctggtgggcgcagccgtcccggcgcgcagcgagtgcggacagcggtggaggcgcagcgcggcccgcagtgatggatggagcccggccggccgcagagaaggcgatttatggggccagggcgcatcgctatcgatttgggccggcgaagtgagaggaaatcaatatttcagaatgaattctccgcgaatatgatgtcccgctctgcaaacgggacatttgttataataaggagggtcggatcgggcgcgcagcgaggctgagatctctatttagccaagcgcactgcgggggcccgggctctgcggcgcagtctccagtcccagggccatggcccaactaggaggggagcgggaaccccctggggcgccggaagatttctcactcgggttctctctagagctgcagacgaatgctccctcccggcccccattcccctcagagacctgggccagaatcgtccggctgcccccagaaggcgcggggtcccttcaaggtcctcaggggagagacctcgcagccattccccggcgcggcggggttggggagccctgggaccgagcagagctccctggcacctctttacggtccgcgtcctggaaccacgagcgctcctaggccactatctaaggtcaggatcaggttttagtcccttaatctttagccaaaccgtggtacgataccagacatcgccaggaccatccctgaggcctaatgtgcagtgcccggtgcccatgccaagctggtgcaatggcacttctgcgccaagctggtgcaatggcacttctgctcggctctggaggtccatctttcctcctaaccttcccctgacccttccggcggtggcaggaggagtgagtgctctcggaaatcaaattcactgtggccgggctggacccttactctctgccgctgcccaagaaatgagacgatgtccccgtccctcagatgagctttttttttttttcgcggctacttattttcattctagaagtactcgttagaatagatggaaatagagtatggaaagaataaataaaggcacaatttatttttactgtagttttaatcaggaacagtcccagatg

SEQ ID NO: 5051 - DNA, 792 bp, Artificial sequence
  DNA replication origin
atccgaccctccttattataacaaatgtcccgtttgcagagcgggacatcatattcgcggagaattcattctgaaatattgatttcctctcacttcgccggcccaaatcgatagcgatgcgccctggccccataaatcgccttctctgcggccggccgggctccatccatcactgcgggccgcgctgcgcctccaccgctgtccgcactcgctgcgcgccgggacggctgcgcccaccagccctgaccctggagctccttcccagcaaagaccctgcccagccctggccgggaagggggaaaacaggcatcgcggcctgggagctcgagtgtgtttgaaggccctgcttccgggcgcaggtggggagggggttttgactccgcgagcggcttagtcctcaccagccggacgccccgcgcgcggcgcccggcctgcccggtgctgggccaggaggagtcggagagcacctgagtgcgctgccggctcccgggcccgggaccaccggctccattgccgttggcttgagagatgcggggagctcacagtccagccaggggagtcactgggaaggactgcgcgcacccgaggaagaggacttagaggtcggggacggggaaacggcaagtccagcaccggtgcagcccagggacagagcacgaagaatgtccacactaatgcgccatgcaaggctgggaatggagctcaaaggaaaccccctctaactccacagagatcccctcaccgatccatgtggtccctcgaaaccgggcaagggcggctcagctggccggg

SEQ ID NO: 5052 - DNA, 1880 bp, Artificial sequence
  DNA replication origin
gacggggaaacggcaagtccagcaccggtgcagcccagggacagagcacgaagaatgtccacactaatgcgccatgcaaggctgggaatggagctcaaaggaaaccccctctaactccacagagatcccctcaccgatccatgtggtccctcgaaaccgggcaagggcggctcagctggccgggtggaaccccagtgcccgagaacagcgaggcggctccagcggagggccaggccccaggcgccccagctgggtccccacgcgggtgggtcccgcgaatcccgtgctgacgctctcgagatccaaccacccgagcgcacgcacggacgctcagcggcgcgggggctcggggatcctgaccacaccgcgttcttaccagatctgatggagttgtgaggcatcgccggggagtcgctcgcagcccgccgagggctcggggcttcctcccgtaggtccgggccgcgcctgccgctgccctgcacaaacccaggagaagggcatgagatgcgatgagattcgatgcctgcatcctcaggccccctccccaggcctcatcctttacacctgcatcgtctgccaggagtaggaggatttttaggcgaagtagggccaacctcagcctagcctagctaacaggcttcccgggaggatcaaggattgggagtgcgctgaagaagctccagactccaacctccgtgcccactccctccgctgtcccagtcttatcccgtttaacttgggagggaaaaggctgccaggcatcctgggaccctctcctttcttccatcccccgtcctcactgctagccagcttccagctaacccctgggtgacatacctggccggccggctgcaggccctcactgcttgggtccgcccgcgagggtgccctgggcccggtgtctctcctccttctgaagtttgttcccatccacccggcatcaccgaccggttttatcccgctgaggccctgggagatgggtctggcgaggctcgtaggccgcggattggctggctgggtgcaggggggtgcgggaaggggaggattttgcaagggggacatggctgagtggactcaggagttagaaacattcgctgggagcttctgtttccagcggagggaagagggaggcagctgagccctaactcagcaggcctggaaatattggaggagtggggaacagaggcctaggagcctgaggatgaggttctctgggtcctcctgggtcactgaccaccagaagtgagagggatggtctctgtaggatgccctccttgccccctgtctcccctggtttgctcaccaggaagcagccttttcttttgtaaaaggaaggagggaacttctgttttatgcctgattctttaggtagagcctgctttcggggctgtaggcaagatgctattaccttctcaccacagctatgacctcttccagggaagaatcctgagcagcacctgaagccattccctctgttctacacagatagcgttcacacccttgcattgtcaggctaacaaaattgtcacataacccattccacagcaactcctcgcctctctcctctggaacacacacgcagccacctgccctctttcttgctccttgaggattttgaacttggaagaagagttcaggggaagggcattgagggcctagacttcatctctgtgtggaaaggccttagaaaggaacaggactgagctgacctctggcctggtctgtaggaatcaatagcctcagcaatatgggggcctgggtgtggttaagaaggggtccactggtgggaatgatggcagggttggtgagccctgggaccgagcagagctgcctggcacctctttaccttagtgatggcaaaagctgccccctccttcctc

SEQ ID NO: 5053 - DNA, 1096 bp, Artificial sequence
  DNA replication origin
gcccttttcagcgccacatcccaggaaaggaagaaacatgctccagggctggaagttcgtctttgaggggaggaagttccctggagtctgcagcagatgggggaggccccagtggggcgcacgtggatgcatttctgggaggaaaccaagtaccatccgctctcgctcgctcccatccagtgttttcttcccccagtgagtctcttaattttgctcatttatcttaaagagctccgtgagcgccgtgggctctggtggggggtgggggggcgcacggggcctccgacacccgacccccacgcctgcctcccagaggagccatccagcgcggaccaaatctcattttcctacaaatagtttgtcagaagcagcagggcaagtaataaatcacggagagcgagagcggagaggggagggggagactggcgaggggagggcggggccgagggggcggagggagggttggcggcgccgagggaggagcgcgcgggaggctgcgagcggcggggaggggcgcaggccagggagagacaaacggaaaaggagggaaggagatcgaagagacaaagagaggaaaacacgagggaggatgagaaagggagaaggagccaggggagtccagagaaaggaagcaaagggagagggagagactgaagagaggaacggaaaagactggaaaagacagcaaggggtgaatcaggaagcagagaaggggaaataaaaggagaggagaaaatgaatccaaagaggatgcaaaaaaggaggaaggagagatgtctggtagagaggcagacccggaaaaggaatgtgggcgagggggtgctccatgtgtcctgagccccctctatgccctgagccacaggggtgcctgtagtccgactccttgaccacgtcctccccatccttatccctgctgcctgctcccggtggactgatgcaggatgcaggcaaggatgggctcatcttggtccactgttagccggcctagagagacagtcattgcagtgtgtgtgtgtgtgtgtgtgtgtgtgtgtgtgtgtgtgtgtgtgtgtgatggagacagggagggaaacctgcataccaactattatgatga

SEQ ID NO: 5054 - DNA, 952 bp, Artificial sequence
  DNA replication origin
gtgggggggtcggccccccgcccggccagccgccccgtccgggaggtgaggggcgcctctgcccggccgcccctactgggaagtgaggagcccctctgcccggccagccgccccgtctgggagggaggtgggggggtcagccccccgcccggccagccgccccgtctgggagggaggtgggggggtcggccccccgcccggccagccgccccgtccgggagggaggtggggggggtcagcccccccgcccagccagccgccctgtccgggaggtgaggggcgcctctgcccggccgcccctactgggaagtgaggagcccctctgcccggccagccgccccgtccgggagggaggtgggggggtcggccccccgcccggccagccgccccgtccgggaggtgaggggcgcctctgcccggccgcccctactgggaagtgaggagcccctctgcccggccaccaccccgtctgggaggtgtgcccaacagctcattgagaacgggccaggatgacaatggcggctttgtggaatagaaaggcgggaaaggtggggaaaagattgagaaatcggatggttgccgtgtctgtgtagaaagaagtagacatgggagacttttcattttgttctgcactaagaaaaattcctctgccttgggatcctgttgatctgtgaccttacccccaaccctgtgctctctgaaacatgtgctgtgtccactcagggttaaatggattaagggcggtgcaagatgtgctttgttaaacagatgcttgaaggcaacatgctggttaagagtcatcaccactccctaatctcaagtacccagggacacaaacactgcggaaggccgcagggtcctctgcctaggaaaaccagagacctttgttcacttgtttatctgctgaccttccctccactattgtcccatgaccctgccaaatccccctctg

SEQ ID NO: 5055 - DNA, 938 bp, Artificial sequence
  DNA replication origin
acaggtgcccgcccagcaccgcgcccttggtgggagcgcagccgttggcgcagtcctcctcctgatgctgctgctgttgctgcaaaattgtccgacaggcttgacggtcgctggagcagggggcagtagctccacgcggtcggggacaaactctgcgcagcccctgtacccgctcccctgaccccttgcatgatactctcaatgctgaaagagatgcatccgcctcccggtggcgacgccagacccttgccctcctcccaaggctgaggaccaagtgagggctgcagcacgggaagggtgccgggggtcgccaggtccgcgccttctgctttcttcggtgccccggcataggcgggggccgagagcagtaggtagcgaggaggatgcgggtgcagcagagcgtaagggcgtctcccgggggcggtgttggggtaggcccccgggactggctgcggcagggcaggggccccaagcagagggcctgggcgggggttgtgcagggcggcgtgtgcagcaggtagagggaaggggtggggcaggtgggctcccggggtcagttggtggcgcttgaaacgcttcctacgccggagaaagctgccattgtcgaacatgtcctgggaggcggggtccaggctccagtaggtgcccttgcctgggtggcccggctcgcgggggatcttgacgaagcagtcgttcagcgagaggttgtggcggatgctgttctgccaggcggggaacttgcggcggtagtaggggaagcggccactaatgaaggcgcagatgccgctgagcgtgaggcgcttgtgcgggctttgcaggatggccatggtgatgagcgcgatgtacgagtaggggggctttgccggctgccgggcatcttcagaggccgccgcagaccttggcggtgccctgaactcggtgccaaactctgaggggtc

SEQ ID NO: 5056 - DNA, 1380 bp, Artificial sequence
  DNA replication origin
tctttggcttccttccctgggcagctctaggcttagctctcagccatttctcaagaagacgatcccgagggtcgaagaccgcccttgacccttgaccacggactcttcgtgtaactcggaagagccgtgattttaaaacccggcctcggggttacagaagcccgagatctgggaggcgtccgggacctccctcccagaaccgcagggacccggcctgggatccagggtgtggcctctcgctctgcgcggtcgggaaggcggccgggtccgggcaccgcgccaagcactgcgcacccctgggacgcgtcgttgcggggggctgcggggctggggcgcctccacgacgcctggtctgcccggccagtgcttggtgtcgttggtgggttcgtagctgcgacgggtaaacgtccgttccgcgagccgggcaaggcaacccctgcgggtcgcgcccgaaggccggacccctccaagccgcctgggtgcttccaaacaggtggacccgaagctcctgtttgatcggagaacaacgttcaatttactccgccacggaactgatggtttaagtattcatctttggatatgtttcacattaggcaaaaattaggagcttggaggcggttccgggaaggggcctgaccctcagtcacccacgttcgtagccgggtggtctgccctcgggcaagagaaggaagatgattgggagggtgccaagaaagcctagagaaagtcccttctgggttcagcggctgtagccgctctcccaggacgtttgttggcaataaatgaaggaaggtcggcctggagacgttttcgcacaacggacagaggggagttggagcgtaaaccagcgagaagctggcatgacataggacccctctattctcagtttgtttccaaactcttagactgccccagccctgccggatttgctaaaagtggtctcttctggacgctggtggggctgtggggcggacggctgcctgtgcaaagaagagggaagaattggaagctggggtctgggcagctaccaaaggtggggcttgggaacttttcagaacgtcctcagaaccgcaggagccaagaggaaatctcccgtaggggatctcaggtagggcatgccaagaaattccaagagacgggatggagaagagaagccggagaaaaatcggccaattagactcctgtaaaaatgtgtgtctccatgtttgtcctccctcctgaaataagaaattcatagctgggggtggggagtagatgggggctgggggaaaaactttctcacattcacagagcagcttccctcaaagcggcacggaatcgggaaccccactcgggacaggggaaaacggccaagttcctagaaatatgttttctttgtgg

SEQ ID NO: 5057 - DNA, 1066 bp, Artificial sequence
  DNA replication origin
cccgcaaagcctctgccgagtgcgcgcaacggcgccgccggactccccgggaccgcgctcccgcgcacgcctgaccggagcaccccgcttcacgggggcgttctgcgcgtccttcctccccggtgcgatttccattctttttcctctcgcggtccccaggagcccaggcacccctcgactccccgggactccctgcgggcccgaagccgccttcccgaggcggcggagttgggcagctccgggccccgcgccgccccgcagagccggagtttctctccggagtctggatacagctctccgcttcgtcgccgcgcactggaccccggtagcgtggagcctgcccgggaagctgggctgcgccggcctggggcgaaggtccaaggggcgcgggggccgggacgcggggctgtggcaacgaccggccctctgcgaacgctcgggccggcgggtccggggccacaggctgggagtggagctggcggccactggggagtagagaggacgcccaggaacaggtgcaccagggtcccggcggctgggccgagggtcgcaagcagaggggaccggcggctgccagcaagtcccaagcagatgcctctggcggggcagccgcattctacagcgcccattccgcgtacatcgagtatccaaaatgagtaaaatcggtttatacgttggaatgtagcttatgattccaaaatctcatctccaggctgcctagatcacacggccccgtttcattcatttttacttaataacggtcgttggacaatttagagaagcagcagaaaccacgagaaaaacagtggagtcaaacggcggtaaggactgacaaggctggcggggacattgagcaaacggcggcttctgagttggcaccagtccttcaccacgttgtgtgggaagtgtggggagtcaggattcccactcctccccagccttccggaaaaatgctcggaaatttccttccacattgacacctgattacagtctacatagtaaccttattctgatcgttaatgtaaccttctcgtaatctctacaaaaatactttagtttttctagc

SEQ ID NO: 5058 - DNA, 1247 bp, Artificial sequence
  DNA replication origin
ggccggagggaatctgcagccggccgggggcctccgccagcctggctgcgcgccgggactccgcctcgcgcccgggcccctctccagcaggtcggcgccccgcgccctgcacccgcccgcctggggaccgcccgcccctcctctccgcgcggccgctcgctgactccctcggcagggatcgcttctgcctcgctgccaagttttctcccgcccaccttctccgctgccagaccgcccgagctgccctcagtttctccccaagttggactcactttcggggtgtcccacaagcccgatcccagagcctgctagcccgaccccggcgacgcctccacccgcgcctggccgcagcctccacccgcgctcgccgccctccggggcgcaccctccgccagaaaacagccggcgggcggcgagacttcgggcagagtgcgggctcctctccggcgccaggcccgtcccctgtctccctgggagtgcgcagcctacacgcaccagtttctctttagaacaaggactgggagggatttgcgagggggctgaaaccttttgccatcagcgaacagcctcagccaaaaacaaccctggaaaggcgagctaagaatggttatctcctgccagcgctgaaatcggaggccgggcgctgcgtgtggggtgtgtgtgtgtgtgtgtgtgtgtctgtgtaccctcccaccccgaccatttgttgaagggaatcaccactgtcagacttcaatccaacaggacccactcgagccatccacacttgccccagcctcctccaaaacagcacactttccggtatggacaattcttttttttttttttttttcacttatttgtttgttgtggtggttgcaacagcagcaacacagacgacacatatttccctattcttctcgcccttctcaccctccctacccagctcctgccttagaaacaggcttggcctacactgtatctgtccacactgtctgaactcttccctgaattaatcgttttcagtaggagggggctaaatcccttattaatgccctaccaggagtgaatgaataaagccaagttaaaggagaactgggtaccagatactgtgctaggtttctttgcatgtaccctttcattctgctggagctaaagattttctgcctcctctccataaaacgcacccaaactccaaaaccaggaaattctccatagaaaataggagtgaagagagaaaagactaacaggataaaacccaaagcagg

SEQ ID NO: 5059 - DNA, 935 bp, Artificial sequence
  DNA replication origin
aattcaaatgccagagaattgttcagtttcgcttttaaagatgttaacactcatttatacatctgcaagacactccccttaaagaaaagttctatgagtgtgggtctggttgcatgaataaggataaaattacttttttagacgatgtttcccacatataattcagagacccctgaaattaggtatccctcttgtagatgtccttgagatgctgctggacctgggaaagaggaaactgggatatgggtctatgccaaaaggtgcttctagttacaggacagagaggaaaggggcagagggagaaaaacctgaagtctgagaatctggattgcagaagactaccgaggtcgtgggagaagggagagaaaacaaggatgaaaaccgaaaggggaagaggcatgaaatgttgccagatgtcaaaaggcatttggagagaagttgggaattgcattaagaaaaccactgcaaatctcatttcagaccatttagagatatgccccctgggaactgcgagctcaggctgtttagcatcaaacaaatggatccactccatccccaccctaattaaataaatcattcagtaattccactgggttaaagaaccaaaatattaaaaaccttcagggcctactcttgccaaatatgtcagggatcgtgtgtgtgtgtgtgtgtgtgtgtgttctgagacaccactactgttaaataggcagagctaagacttaggggactggcagactattgcaaaaagggcacggggcagagggactatgttgtgagcctgcgaaagaagtttgtgtggggactgtgggcagtgaacgcgttgggaacaatatggaaaactgggagccgccttggaatctacagggccgggtaagagaatgtccgaaagaaaaatgagcaggtgcgggatgtgcgcagagtcggagaagagtcca

SEQ ID NO: 5060 - DNA, 1225 bp, Artificial sequence
  DNA replication origin
ggaccccgcagagcccgggtccctgcgccccacaagccttggcttccctgctagggccgggcaaggccgggtgcagggcgcggctccagggaggaagctccggggcgagcccaagacgcctcccgggcggtcggggcccagcggcggcgttcgcagtggagccgggcaccgggcagcggccgcggaacaccagcttggcgcaggcttctcggtcaggaacggtcccgggcctcccgcccgcctccctccagcccctccgggtcccctacttcgccccgccaggcccccacgaccctacttcccgcggccccggacgcctcctcacccgcgagccgccctcccggaagctcccgccgccgcttccgctctgccggagccgctgggtcctagccccgccacctccgcccgcgcctccgggtcctaacgccgccgctcaccctccgctgcgccctccccgagcgcggctccaggaccccgtcgacccggagcgctgtcctggtggaccgagtcgcgggcctgggcacggaactcacgctcactccgagctcccgacgtgcacacggctcccatccgttgtcttccgagcgtcaggccgcccctacccgtgctttctgctctgcagaccctcttcctagacctccgtcctttgtcccatcgctgccttcccctcaagctcagggccaagctgtccgccagcctcggctcctccgggcagccctcgccctgggtgcgccccggggcaggacccccagcccaggcccagggcccgcccctgccctccagccctacacattgacccgctttcctgcgtctctcagcctatctgaccttgtctttacctctgtgggcagctcccttgtgatctgtttagttcccacccccctttaagaattaaatagagaagccagacgcaaaactacagatatcgtatgagtccacttttgtgaagtgcctagagtagtcagaattcacagagacagaagcagtggtcgccaggaatggggaagcaaggcggagttgggcagctcgtgttcaatgggtagagtttcaggctggggtgatggaaaggtgctggaaatgagtggtagtgatggcggcacaacggtgtgaatctacttaatcccactgaactgtatgctgaaaaatggtttagacggtgaattttaggttatgtatgttttaccccaatttttaaaaagctagtgaaaagctggtaaaaagaaag

SEQ ID NO: 5061 - DNA, 1179 bp, Artificial sequence
  DNA replication origin
ctaaaatgatgtcctcagggcctggttttgctttccttccatgtcagtttgcttctttgggtctggctgcattcccagacaggccatgctgtcgtggtagcaaggtgacatgacacagggtcaggtccagcaggaaagaatgctctcctgtgtccccacttcctccagaagccacactcacccatcccacctggcttggtcctcatgtctatcccagaatccattactggggccaggggactatgacacaaccacttggcttagactgaggagctctgtgggcagccccacctgaagctctgggactaagcctgcgagagagatggattccccaagggaaatggggccattgcttgagtaaaaaggaaatagttgctgaagaggaaaaccacgtgcttactccacacagggcagactcctggaagaggggggcagggtagggaggtggatatgcaggttgccctggtggggtctggaaatgggggccgcaggcttggagggaggcctcagtgtggcttggaacgtggtgtatggtggtctgccgcgaaggccggcctgcacaggggtgggaggggggtgcttctgcatgggaagcacagacagcgctgcctctcccttgcactcagctctcggggcatgagaggctgactttccgtgagcctgtgggccaggcctctttgaatggggctgagggagctttgccctggttcctttgtgtccccacggtgccacgggaggctccctggcagggtgtggggcaaggcagtgagtgaagagttgggatgagtgagttagggcccacggattactcaagacaggacttcacgttgattcaggagtgttagggagctgtgattggattttgagcagggcagggatgggacagaagagtttggggaaggttcctcaggcatccgtcacggaagggataagaagggagagagagtggatgccggggacacccagaagctgttattgtagtcaggatgtgacaggggtgaggctacagacaggggacttgcaagcagggagggcagggtgagacattcagaggaaacgacgacaggaaatggtgacagatagggaatgaggatgaagggaagggagagccagtgacgactggcagtggagtggggagcaccgccacctctcctcctccacttgcccctcctgtggcac

SEQ ID NO: 5062 - DNA, 981 bp, Artificial sequence
  DNA replication origin
cagaggggttttgtgccacttctggatgctagggttacactgggagatacagcagtgaagctgaaatgaaaaatgtgttgctgtagtttgttattagaccccttctttccattggtttaattaggaatgaggaacccagagcctcacttgttcaggctccctctgccctagaagtgagaagtccagagctctacagtttgaaagccactattttatgaaccaagtagaacaagatatttgaaatggaaactattcaaaaaattgagaatttctgaccacttaacaaacccacagaaaatccacccgagtgcactgagcacgccagaaatcaggtggcctcaaagagctgctcccacctgaaggagacgcgctgctgctgctgtcgtcctgcctggcgccttggcctacaggggccgcggttgagggtgggagtgggggtgcactggccagcacctcaggagctgggggtggtggtgggggcggtgggggtggtgttagtaccccatcttgtaggtctgaaacacaaagtgtggggtgtctagggaagaaggtgtgtgagcagggaggtccccggcccagctcccatcccagaacccagctcacctaccttgagaggctcggctacctcagtgtggaaggtgggcagttctggaatggtgccaggggcagagggggcaatgccggggcccaggtcggcaatgtacatgaggtcgttggcaatgccgggcaggtcaggcaggtaggatggaacatcaatctcaggcacctggcccaggtctggcacatagaagtagttctcagggacctgcaagattaggcagggacatgtgagaggtgacagggacctgcaggggcagccaacaagaccttgtgtgcacctcccatgggtggaataaggggcccaacagccttgactggagaggagctctggcaaggccctgggccactgcacctgtctccacctctgtcccacccctccca

SEQ ID NO: 5063 - DNA, 1459 bp, Artificial sequence
  DNA replication origin
cttgtcaattgtggttaggagggagaagaggtacctacgcagaaacaccctagaacttctcttaagatgccccaatcggatgggcgcggtggctcacgcctgtaatcccagcactgtgggaggccgaggcgggtggatcatgaggtcaggagatcgagaccatcctggctaacaaggtgaaaccccgtctctactaaaaatacaaaaaattagctggcgcggtggcgggcgcctgtagtcccagctactcgggaggctgaggcaggagaatggcgtgaacccgggaagcggagcttgcagtgagccgagattgcgccactgcagtccgcagtctggcctgggtgacagagtgagactccgtctcaaaaaaaaaaaaaaaaaagaagccccaatcatcattcattctgcaataaaaatgtcagaatattgctagctacatgctgataagaaggacaaaggggacattcttaagagaaacctggcaccataagtacagattaaggcagagaaagacattcaaaagaggcagctgcagtagatacaaacgtgaccgctgtcagcctgcctggtatggtgggaaggaggctggtgccagagtggattcggattgatcaccacacatgtacctcaatcaagtgaggaggtcccacaaggctaagtggggcaagtcggggacctaaggcagtagcaggaaaaccaaagaaaacaggcggagacttgagacagaggtaggaatgtgaagaagtccaaaataaaaatccctgcacaggactcttaggctgttttcatgcagtatcagcctactcctccctatttttgtacaataagctctttacactgtatttcttttcaatgaagttatcttccatctttgtactgcctcttggtgaaaagctgtcttccaagttaataactgggacatcagctctccgcagtaatagctccttttcagttttaatttacagaactgatggggattaataactggcgctctgactttaagtggtgcaggaggtggccaatatgggacgccagccgtcacaccgggagcaagagggccctgcgtagtccccatgtgcctgcatgtggcgtgcagccacgacaatgcgagcaagagggcccggcagtgtgcccagctgccagcaggcgggtgtgctgccactacaatgtgaggaagagggccctgcaatgttcctagctgccagcaggcggcatgccaccactatactgcgagcaagagagccctgccgtgccccggcgccagcagggggcgctggacagcactgtaagcaagagggccctgtagttgtcctagtcgccagtagggggcgcaatggcagagcaccgtgggcaagctggtcctgtagtgcccggctgcaagcagcgggcgcccgaaacgggcttttcagattactcaggttccactcgtctctgcgccgccgggtacgtgtgtctctgc

SEQ ID NO: 5064 - DNA, 1213 bp, Artificial sequence
  DNA replication origin
tggtgaaagcttgacctgcgccccccacccctgacgtgctcaccgctccactccctctaggcgggcggcacccgctgaagcctcagtaccacacccacagccaggagccccagtcccgcactcggccgcatgcgcactccctgcggccctcccgccaggcgccgcgctgggcagccagcgccccggcggggtccttcaggccttcggccgggcagcctccctcggggtccttgcgcggttgcgtagcagctgcgaggacgcggggcgagccggaagtggagtgcgctgcggtgcgagctgggccggcggggtggttcgagagcgcgcagagtccagactggcggcagggcccgaggggccgacccgcagcgtccctggtctctccagccctcactcggaaccgcacgtgagggcaaatccgccccggtggctggcttagcacgcggggacagcccctccgaggcctccctagcggtgtgggcgagagggcgtccgggtcgggggaagcacggaaaggtggcttcgcgaggctgttgtggggggcgggacgggcagcctggcgatgcctggacatggttggtggccaaaaacatttatcgaaagatagcatacccacttagatggcgaggacatcgacaagcaagtcttcgcccgtaagcggtggctcacgcctatagtccagggatgccgaggagggaggatcgcttgagtccaggagttggaggctgcagtgagccgtgatcgcgccactgcactccagcctgggcgacagagtgagaccctatctctaaacaaaagaaagaacgtcttcaagcatggagccatgaagctggatttggctttctgtcgctctctctacagggtacaggtgaaagggggcagacccctcatcatgctttccaggcatctgccacttcccaggaattgtctccctggataaacaaggcgaagtccctggctgtgcagaagcagtagctgtgtggtggcacagtcaggaaaactcgggggccctgttggtattttctacccctgacccgtgtgcatacttctgtcgtagctctcaccacagtagactctgctatcattgtgtcttccatcctctgaaccctgtgcaaggtctgctcatggtgaatgcccagtaaggctcacctattgctgctatctcatcatcatatcatttctatgtgcccccctagctaagagtctggactgt

SEQ ID NO: 5065 - DNA, 1883 bp, Artificial sequence
  DNA replication origin
aaaaaacacgattggcactaatgtacaagcaattctgccttattgtagggtgaaggagagagggtagattttataggggaaatttgggttgggaggggggataggaagaagtccagaaagcatctcttgatgtatatgcatgtatacatacggatatgtgtgtgtgtatatctatatatatatgtttatttatttatttcatctttcctttttctcaggagtgaagggctcactgggtctgttgagaaccaggtcagatcaggaggtcgaggtcagttctgggagctctgtggtctccatgtcataatggttctttccgtcggaataggtcttccccttcaagacctctatgagctgctgtaggcgcttggcaaaagaaagtccttggggaagttttgtggtagatgagggtgtaggtgggggtgggggtgggggtgggggtaaaggtgagggtgggggtgggggtgggggcgggggtgaaggtgggggtcggggctgggctgccggtggtcggggtggaagtggtcgagggggcggttggaaataccaaggaaggtgagcagagagagggtgggagaaggggggtcgaatcgggggcggtcgagtggtgggaggtggaggggtggccgattgaatcatacgcaaagcgttagaaccaatcttggaggcgatccagttcagatagggccaggtggccgtgtagattccggggcgcttggcacgggcacagcctaccccccagcttgtgattcccacgaccacacaggcgctttccttgctgtctttgcacatgagaggcccgccgctgtccccctgtccagaaggacacagaggtcactatctgcctgagccactcttcccctgcccagaggggtcagaaggctctgggaggacaatttccacagtcacatggtctcctgctgctgtaaacgcaagtggttgtagtaaagtttgagggggtgtcaggggcttcatgtgggatgtgaggagggtgtgaattgtcagggctttccttgcagtgagatgagcaaacccacgtgtccacaggggcacatggcaggggcagccggtggctgtcaccgctcatccccactgtgagagtaggtgctagaaaagggaccggggaagcagtcactagagaagggccctgggcagagcagtggagatagtggagcttggggatccaaaaggaggatgttctcaggggccgggagagtcctggagggacccaggggcccagaagccagaaggaaggttacctggcaggtgtcgatcttgcctacaggataccccgcgcacacattggttggctgaacgtgctcattgtaccactgggtcgagttacacaagtccaggtcgatgagatccacacgtgcctccatcagcatagatgatggcctgggggctacagtcagaccactcggtggtcagtgatcacgggagacacggacaaaagccctgcctccttgccccaccgaaccccatcctctgtgatgctccagttaaacctcagacccatccagtcgatgccccgacccctccttatacaccagaaagagcagacgagaggtggtgggaggaggtggggaaacgttacccaaatcaaggccagaggagagaggaagagaggaaggaagggtggaggcccgtggacaggtggatggagggtgggtgtgcgtattaacgatggattatggaggttagttgcagtattgccaataacacctggtgcgcaccaagcactccctgagtcacatggtcccgttattcccgttttggatcagaaggctggagcaccgcccacccaggtcacagtagagaggtggtggggctgcagcctggcctcaggactgctcctctccagactccagtctgagacacac

SEQ ID NO: 5066 - DNA, 1026 bp, Artificial sequence
  DNA replication origin
agcccgccgctgcactgtgggagccccttcctgggctggccgaggccggaggcggctcccccagcttgcggggaggtgtggagggagaggcgagggcgggaacaggggctgcgcgcggtgcttgcgggccagcgcgagttctgggtgggtgtgggctcggcgggccccgcactcggagcggccggcaggccctgccggccccgggcaatgaggggcttagcacccgggccagcggctgcggagggtgtgccgggtcccccagcagtgccggcccaccggcgctgcgctcgatttctcgccgggccttagctgcctccccgcggggcagggctcgggacctgcagcccgccatgcctgagccttcccagctccgtgggctcctgtgtggccagagcgccccctgctccgcggtgcccagtcccatcaactacccaagggctgaggagtgcgggcgcagggcgcgggactggcgggcagctccacctgtggcccctgtgcgggatccgctgggtgaagccggctgggctcctgactctggtggggacttggagaacctttgtgtctagctcagggattgtaaacgcaccaatcagcgccctgtcaaaacagaccactcgctctctgtaaaatggaccaatcagaggatgtgggtggggccagataagagaataaaagcgggctgcccgagcccccagtggcgactcgctggggttcccttaccgagctgtgggagctttgttctttcgctttttgcaataaatcttgctgctgctcactctttgggtccacactgcctttatgagctgtaacactcacggtgaaggtccgcagcttcactcctgagccggcgagaccacgaacccaccagaaggaagaaactccgaacatcagaaggaaccaactccggacatgccgcctttaagaactgtaacactcaccgcgaggagccacggcttcattctggaagtcagtgagaccgagaacccactgagtccggacacattaggatgttagagtcccaccttc

SEQ ID NO: 5067 - DNA, 1031 bp, Artificial sequence
  DNA replication origin
aggggccacaggtggagctgcccgccagtcccgcgccctgcgcccgcactcctcagcccttgggtagttgatgggactgggcaccgcggagcagggggcgctctggccacacaggagcccacggagctgggaaggctcaggcatggcgggctgcaggtcccgagccctgccccgcggggaggcagctaaggcccggcgagaaatcgagcgcagcgccggtgggccggcactgctgggggacccggcacaccctccgcagccgctggcccgggtgctaagcccctcattgcccggggccggcagggcctgccggccgctccgagtgcggggcccgccgagcccacacccacccagaactcgcgctggcccgcaagcaccgcgcgcagcccctgttcccgccctcgcctctccctccacacctccccgcaagctgggggagccgcctccggcctcggccagcccaggaaggggctcccacagtgcagcggcgggctgaagggctcctcaagtgccgtcaaactgggaaaccaggcagaggaggcggggagagtgagcgagggctgtgacggctgccagcacgttgtcacctctcactaatccaaagactgaagattaattgttggccaatattgcttcctttgtggatccgtatcagtctagtatagagaacactagactgacagtcagaaaatgtgaattttgtcagcagcctagatgttaagaaacatggggcatataagggtggtcaggtaatttaatgtctaaactatgacacttttgaaactgaaaggggcactattcatgattgtcctaggacagcaggtagaaactgggactgtccttggcaaacccggacacctggtcaccctagagacccttgaaaaatgatgctgtgggccgggcgcggtggctcacgcctataatcccagcactttgggaagccaaggagggcggatcacgagttcaagagatcgagaccatcctgaccaacatggtgaaaccccgtctctactaaaaatacaaaaattagc

SEQ ID NO: 5068 - DNA, 688 bp, Artificial sequence
  DNA replication origin
gcagacggcggcagcagcagcagcaggcgaggaggaagatggcgggacggctgccggcctgtgtggtggactgtggcacggggtaagggggcttacgggcgggggtggggaaactgaggcggaggaaggaagatggcgggggagggaggaggccgggaaatgaatggtgcggcgaggtgccgccgccggctgtcagtcctagacccgccggccagcgaggggtggggcccgcagccagggcctcgcgggtcccctcgtttctccctcctgggactggggcgggggcgcgggcccgagattcaacccccaaccctcccagcggctttctccgcgcgacccctcccggcccttcccccactacggtgggcagcgccgcccaaagggcgctggggacggtcgtcttgggggtggtccccgggcccgacccatccggctttcctttccctccgcgcccgtttttgccagtcggtttggggacccaggggccgagctcggggactggcctggcaggggagctagaaaagagaagcgctcctggtaggtttgacaagatcgctgtgacaacattctgcccagggtgtgggtggggaaagggaagaatcggactctgaaaatgggaacctacagtggggctttcatttgaccacccaccttctcctttcgactcctggtcatttccatctccctc

SEQ ID NO: 5069 - DNA, 1349 bp, Artificial sequence
  DNA replication origin
ggtccctccctcggccaccgcagaccctctgactccccgctctccccgccccccgccacccaaagcgcagcgagccgcggcggcgaggcgagaccaagcggcaagttagtgcagcggcgagcggcggggccccggcccctgaccgagctgcggcgacgcctcgtgccttcttcccgcagtccgcgccccccaccgcccgcccccgggggctccccgcgcggtgctcagcgcgccaggtggagcagccgggcgccgcgctccggcctctcttcggcaaccgcagccggggggggggagagcccggagcggcgcgagagcccccaacccgcgcgcccacggccgccggcttccgcggttaccccgccccccgcaggcttccgctaaaacccggagaagcggagcgcgcccgtgcgaagcactgggtggctccagctccgccactgcgcgcgctccagcgccccagaaggcagggggcagcccggggaccggggtcccggagccccgtgggaggcgggcaacacctgtcgggacccgagggcgtgtctgagattgtggcctgaggtgctgcgccttccgatccggggcagcgggcgtcctgtagctgcgccttccgaatccagcccagattctcctaccagctgcttgggtcacgtcggtggaactcctaaaggtcggttaaaaaccataagaactgtaatgatgataagactctgatactcatttcttttttctttttctttcttcctggacacgtgtaggaaaaccttcaaatcttaagtcctcccagcctttcctttcttcaacacaaccctctcccattcaaagtaggtttaccgagcacctaccacgtgccaaacacactgtgaggctcagagagagggtcgcaggggagagaaactaaacaacacggcaaacctaccaaatcccctggctgcagggagcttacgttgtgtgggaattgggagcccggagcctggatacaaatcaatgagtcaatgtagctcttaggaagttgaattaccgcggatagacaaagtccacagttcatccagatgcactagtgcacgtggctttccctagggcgcctaaagcctgtggaccacaaacagcctccaagtctcaggcacaggttgtggaagattgcttaccggagaaatggcaggagtgagttgaatatttaggtgttcatgtattcagcacaagacagttccagcagagaggacagagaatatggggcagtggggtggcagtgagttgggctttattggctaaggactggctccctgctctgagccactcagtccattaattagtcacttcttaactgaaagacttttgtagaatggtag

SEQ ID NO: 5070 - DNA, 876 bp, Artificial sequence
  DNA replication origin
agccgcagcccaccccgggggccagggcgagccaggcgcagccggcggaccaggtgagagtcggcagccgcggccaggccctcccgggaggggtggctccagtgcgcgctccgcccgcctcccgcttcccaggctgggctcccgcgcctccctcttctcaccctcccccgccccgccccagttccaggctctcctgcttctccacggactctgcgggaagttagagcctctgcgtgcgctccggggcccggcgagaggatgcgcaaggtggagagccgcggggaagggggcagagaggtaaaggctgaaggtgccccggggaaccccggcgggcggcccaccgagggagggagaggcggccgggaccaaggaatggggcctcttggttccccattaacgcacgctgaagaaatctgctgcgctcctgacggccgctcaccgggttcgagccccgtcctcctatagccggggcgctcgctggccaaagcgacccgagcaggcgaatgacctttaggcggacggggttttccctctgctttcttgtttcttttgaggagacgggtgtgtgtttgtgaggtggggatgggggaagagtgtcccagacatccgtagtctgctgagcggaacggagcttggggagcggcgaggcattaacgattaagtggagccgggaaggcgctggctttggtgatgtgttgggtttggatgtgtcgcgtctgcacagatgaggtgccctgcgtgggctgagggttattcctgtctctttcccgtccgtctacacccgccaacccctttttgttttggtctttagaaatctgtagcataaccgtaccgtcgtggatccccatctcgtctctgtccctgatctggggtgat

SEQ ID NO: 5071 - DNA, 1373 bp, Artificial sequence
  DNA replication origin
gtgccttccaccgcgtgccgcataacttggtggcctcgacggccgtctcggacgaactagtggcagcgctggcgatgccaccgagcctggcgagtgagctgtcgaccgggcgacgtcggctgctgggccggagcctgtgccacgtgtggatctccttcgacgccggagcctgtgccacgtgtggatctccttccacggctgtgctgccccgccggcctcgggaacgtggcggccatcgccctgggccgcgacggggccatcacacggcacctgcagcacacgctgcgcacccgcagccgcgcctcgttgctcatgatcgcgctcgcccgggtgccgtcggcgctcatcgccctcgcgccgctgctctttggccggggcgaggtgtgcgacgctcggctccagcgctgccaggtgagccgggaaccctcctatgccgccttctccacccgcggcgccttccacctgccgcttggcgtggtgccgtttgtctaccggaagatctacgaggcggccaagtttcgtttcggccgccgccggagagctgtgctgccgttgccggccaccatgcaggtgaggggtgggctgaggaacgttgctatggggaagcggttgctagagaaggaggcagcttcgcgaatgggagagtgggcggaagcttgtactaatggagcgcgcgcccagagatcacctggggcgcacgaggacaagtttgccatcagttcttctgaagcgggcaccgaggggcttgtcaccggctcacctggcacgcaagtgaggggttcgccagctgcgtacttggtgcgcgcagaggaaagggtttcacaatctgcacgttagggaggcagatctgacaccgacccacgacgcacgatatggccggaggggcttgtaggttcagcccgtctcagtagcgatgagggcacatcttgttacctgcactatctgttgttttccccctcaagggcccctgtccatgtgagtcctggagccgccggcttccttgtcccaactagacctagaggggatgcagtggactgggaattcgtctttcagaaattcctgtgaccaatcacgccttattttctgtctccaccgtaccccagtctatcctctgcagttcagagactattccccaactccattagccagcaccctgccaaggggaatagtgaggattttaaaatataataattggtgtcactttgctttccttatctcaaccccggagctatcctctagtgatttaggaaagagaaccatggattcaaatcccagcttgggacattaggacagttgcttaatatctgtgggtctcatttcttcatctttaaacatgttcattcgtaattgatagggctcttggtgaggattac

SEQ ID NO: 5072 - DNA, 1192 bp, Artificial sequence
  DNA replication origin
ccaagagacccgggagcggcttaagtttgtcctcacccgcccgccgccccctgcccatgcaggggtacctgctccccgcctccaagaagagggtcggcgcttccctgaggtggatacgcctgaggaagggggcggggcgcccctaacgcacccagggcccgctcagcccgccgccccgcggctcggccctctcttcaggaaccccgacgtgtcagggaaggaggaggcgttcttacctccgggagaccctggccctccggccccctgggcaaccccatgatccgaccgggctgtcgtaaggcgagagcgaagcccgccaagcgtccggaggaagctgtccctgccgcggagctgctaccggggtggagtacaaagcggaaactccctctgccgccgccgccgccgccgccgccgcctgcccgaagcgccgcagccgggcagagcatgcgcgctggggccggagcgcggcgccactgcgcctgcgccacagcagcccggggagaggtgggctgggctgcaggtcctggcgttgtgctggatcatcgcgcccgtactctgaagttttctccgtggcgctctttgagaggggttcctcctgcatcttgagaatattttgcatttcggctcccttctcttctcgctgccatcggatgccccaaataggtcctgtcccctcggtgaatcagacttcggaaaccgcctcgcttcagggtcagagtccaagtacagatgagcttgaggattctgaatgcacgcccggctctagaccttacagacacacgcttggacagacttctccatatacgacccaggaacggaccccttgagaagggattcttcaagcccgctgccctctccagcgtcctggccagtggcatcgcgttcccaggaaacctcgcttcagatattgcccaccaccccgccctattcacggttcctgggtcttcctggaggaatgacatctcagagaatgcggactcctatgttcatgtcatttgagccgccgcgtcccttatttgatgtaccccttgttggtcccggaggatggcaactagacaaaaggtcacaggcccccacacccgctccataacggcttcttggctttttgtttcttttaagcaatgaggaaagagatgactttcgtgaaaacttttgctggagaagagatccttccctctgtatatgtgtgtgg

SEQ ID NO: 5073 - DNA, 1481 bp, Artificial sequence
  DNA replication origin
atcagtgcatgattcctttactccgcccacagggtctgggcatccgtcattacctacggctgcctggtcagcaaacaacagcagatccgacaaccgccagtcacctcgacggtccacgcccaccgctagcctccagtttcccgcagaccggaagcccttttgccccggctcgcaggtccacgtcttattgacagcaggaaccggaagctcttctgccccgatcgcctgcgcgcggcctcgttggccgcacaggcgcagtggagctcgggcggagttgtgggagtggaggaggaagaggcggtagggggtacgggggctggtcccagaagatggcggaggcgggggtgagttgggggtctcccggcgaagcgcgggtgacgtggtgctgaggaaagcggcctgaggaggagggtggcccttgggaagaagaactacttgtgtttttgcagcctgggaaccctggtggcaggtgcggggagccaggaccactgatgggcctgcagggcaaggggctccgcttacctgagaggggtccgcaaggtccagaaggggactgcgggatcggggagggggtataggaggggtcgaggctccccggacagtggatgagtgtctgagcgggaagaaggctggaggacggcgagaagggcgacccaatggtctgatgaggtggaggtcagcgagctgtcaagcatagagctgccaggacttgggggcttgtagcctgggagagaagactcagacttgggcggggattggatccaaagaagacaggttgtcgtagtaagtttataatccactaaggagatagggcattgggttgaggagtaatactctggcatttttgactggaattggttacctatggaataggtgtttcggtaaagccaaataattcttgccagggcctagaagtggatttgatgataattactagattttagggttgcttagtggggattggcaatatggagaaggaaagcagtgtggattatgggagtgggcgcgggcaatggcgctaacacttaagtgataatgacccatgtccagttaacgttggaaaaagttgttaaagtatgatattagctagatgctctaggaaaatataccatgaagaacttgctgttttgtaggattgatgaagaaatgctttaaaaaggaatggttaggcttggcagctgggccactgaaactgtttggtatcagtattgcggtggagctgaggactgcaggggaatgcgtgctcccgtcctggtgcagaaaaaataaaagcagccagacagtagctagatggtgttttgtaacttttgggtttggccctgatagtgaaccactgaatgaagatggatgaagggaatgctactaatgggggccccaaagaaaacaaaaatcagacgtgtgctcttcctgttttctgtctttcattctttccctgtactttgtgctcagtactgtgttttgtcattgtgttatgtcgtagt

SEQ ID NO: 5074 - DNA, 1149 bp, Artificial sequence
  DNA replication origin
agaataaagcagtcagggttaagaggtgggaggaggcagcaagagctatacacagcttagagagcagggatggggaaaacactaaggctgggatgagggaagatatctggggtttgtgatctggaagggaggtttgacctgatggagaaaggttggaccagcgatcaggaggaaagaatcccagggggatcggagattgacttagattcctccagtgaggggatgagagcttgggaagggctttggctagaggagtcctggagactgagagcaggttcatacctgagcaaagggaaccagcaagctggaggaggcccagggtgtagaaccaagatggagccaagctggtggtgatgagtgccaaagggttatctgggccaccgagttgcacaatcctgggaggcaccttctacttgcaattgtacatacaactgaatgggggaacatggctaccatggctgggacccgggaggggtgctgggtgggttgagggaaggcaggctcagttgggggactaccagaggtgagagttgagaaaaggcaggatggaggtagaggattaggaagggctctacactgggatgagctgcagtctaggagatgtaggggcaggcggctagtcagggaagatctggtttgggcaatcttgtgtcccaactgcagtaggttaggtgggctgccttcctgatgtggaacatgaccatggtgtgcctgcaggcaaactcttagcaaatgaagtcggggtgttatctgagaattgcttaatcatctccattccagtgggggcaggcaagtcacgccttaggaaatgttggctggggttaaggtaggactagatagcctcattggtcatacagcaccagtagatgcaggattctaagcagctgagaagccctaacttgctggagtggttgaggtagagggagggctcatggtttctggggagagggcccatggtttctggaggcagaggtgacaaaagtgaaagagagctatggaagggagggtaacctctaaaaattgatgcattgaatccatgcatgatgttctcataggaagggtggtgggcagcagggaggaagcaaacatagtcatcattttccttgacctcatggtcattcaacgggtcctgctaggtggaatttaata

SEQ ID NO: 5075 - DNA, 1075 bp, Artificial sequence
  DNA replication origin
aagaagtgggctgatgaaagagagagagagagagagagcgagagagagagaggaggcggaatggacaaggagatgctggggtcaaggatgatgtgcagagttctggcttaggcaccaggtggattgtggcctcttttccggggtgggaaagaatggagcagagcagcatgggtgttcaggtgcggctgtgttgattttgagagacccaccgagaagctggagtcttgagtttgggatgagatgagagacctgggataggtctatcattctgggaatgccaaccctatggtagaggctgcaatcacacagggtgggtgtgagtggggagaagagaagggctaggacaagccttgagagacctctgctgaaagcaactgagaagcacctgctggagaagcagaaagacaaccagagtggggacctcattgggcaggggcggggcggggcggggcggggcgggggcgggggcggggcgtggtggcaagaaggggtgtttccagaggaagagtggtgaaaggtgccagacgctcacagcaagtaagatgtaggcggcaagttgtccacggttgcctggaggtcattatagggaaatccctgggggagtccaggggctggctagggaatgggaggtggggaggtggagttagtgcactgaatcaggttcaagtttgatgttgtgatcctgcaaaggtgctttccctttctgggtcccagtgttctcacctgaaaaatgaaggggaagaactgtcagctctaacagacattctctaatcccagcaaaatgggattattcccattagcagcgtgtaactgcgagagctttttaatgacatgcacttccgctggctcctcggggctgtcaagcctagtgtgacagaccaactgggaaatttcctgctcggctccacatttccttcgcttgatttcaggtcattgcccctagcgacgttcctctccagactatcaaatattctgatttctgcacctccggaacacttactcagtggcataatactttccttttttttttggtcttaatcctttgctccatctctttcctcctatgaccttgcca

SEQ ID NO: 5076 - DNA, 1352 bp, Artificial sequence
  DNA replication origin
tgcataggaatcacccgtgaagtcgttgggtctgcccggtgctgctgctcactgaacatctgcctttgtagagcccagtctcccagccatctgctcaccttgacatgtccccagacttggacccagcgtttgcttagtgtgtgagtcaagtagcttctccaggttccattgtggtgcttttcattacccactcaagcctccctcttaaacggagacaaaagagaagggtgggaagagcccccactgctagatctgcatgcagtgatcacctccctcattttgtcagaatatttgttgagtatctgctgcctgccttgctctgtgcttggctcccaggaacagtgacaaactaggctggcacatctccgaccctcctggagctcatggtttagaggagtaaggcaccgtcacacagataattttaggtccttggaaaaggatgataaagaaaaaggagaatataaccagatccaacctcttttgggggccagcggaggctgcctggaggaggaggtttctaagcttaaatctgagcgatgaacagtagtctggagtagggaggaggtgtagggtaagagaaggagggacttgtgcaaacacccggaggcagaaaaaatctcggttaaattcaaaaacctgaactgcctggaaccaagtaagtgtgtgtgtgggagggagtggggacaggatgggagggactggagggagattgggagtgttacatcatgaggctgaaaaggtccccagaggccagatagtgcagggcctttggcctttatgctaaggggagtgggataaaatgaagaatcttggatgagaatagcagactctgcttttcactttcaaaagatctctctgtcacaaaggatgacttgcggcactggggatacaggccgggctggaagctggaagcaggctgtggcagtgggccgggcagggactaggagctggccagggtgtggcccatgatggtggaaagaagtgggctgatgaaagagagagagagagagagagcgagagagagagaggaggcggaatggacaaggagatgctggggtcaaggatgatgtgcagagttctggcttaggcaccaggtggattgtggcctcttttccggggtgggaaagaatggagcagagcagcatgggtgttcaggtgcggctgtgttgattttgagagacccaccgagaagctggagtcttgagtttgggatgagatgagagacctgggataggtctatcattctgggaatgccaaccctatggtagaggctgcaatcacacagggtgggtgtgagtggggagaagagaagggctaggacaagccttgagagacctctgctgaaagcaact

SEQ ID NO: 5077 - DNA, 813 bp, Artificial sequence
  DNA replication origin
cccacagaaaaagatgttgaggaaagaagaggagaccccggcctaaacaaatcgaaactgtgcaatgaacgtggcccgggagaaccgggggtgaggggcgatggctggagctgcggcccaagcacagctttcagacgcttgcccggaccctggcgcggggaggcggccgggactgcctttctgcgcgcgtccctggagagcgggtgggcaggacctgcgccccgcggtgggcaagaagatttggggtttcgcagttcctggggtcgggggcgggggtgaagtgccctcagagacctcggcggagccccagttgcgctcccatctccagcccccactggagagagggggtccagggccgtaccctcctgcggcctgggctgcgctgaccggaagtgcctgtaagaagcgccctccgcggaccgtgccgggcgcgggcagctccagccgggttggagcaaggccaagacgcccggatggggcgggccgtttcggcggacccagtctggacgcaggtgcgggaggaaagtgtgaggggggaaactgctgattgtgcggggataggggcatcttaatctgggaaaagatcggaatctcttgggacgctaatctgagacccgggtcggaggtgtagagtaggggtgtgtgagcaggaactcggacctgagttacagagtaagagggaagagggctggagaggtgctgaggctactcctagttaagactgaaggagaggagaggagggataacagcccttcacgcaaatcagtgctccccctgctcccccaggtgccaaagtccaggaccaatgtggag

SEQ ID NO: 5078 - DNA, 1610 bp, Artificial sequence
  DNA replication origin
ccactacccttagctgctgtatttgtctcccttgcacttgacaatatgcaagatactttatatcatttgttgtgtgtatttgtttgatttttcatagtgggtctctcctaccagactgtaagctccttgacagcaaggactcactgctgtgttcaccacagcatctctagtgtctggcacattgtcggtgctccacgaatacgtattggaaggcaggcaggaaggagggatggagggagcagaggagggatggagggaggagaggagggaggaaaggaagaaagaaaggagtggggctcttgggcaggggtgggggagggcctgactcaggccgattaacgggatattcaggggcccagcttcaagaaggaaaggtgggaggaaggaggtggggaggcaaaaaggaaaggaagggaggaagggaggcaggcagggagggaggaaggagggaaggaagaaaggaagggaggaagagagggagagaggaaggctgagggagggaaggaagaaaggaagggaggaagggagggaaggaggaaggaaggaggcgaaaggaaaggagggaaggaagaaaggaagggaggagagaaggaaaaaagggagggagagagggagggagggaagaaggaaggaaggaaggaaggaaagaaggaaggaaaggtcttttttcagccagatgtgaggtcaatcactgcacccccagtaaataatcagtaagtgccttgagtgcatagtgcccaggggaatctgatgtgctcctgtacagtctagctggggagatgcagcaagttctgactgaggagtctgggctttgggcttttttccccactggtggcttctcctctactcactgccacccccaaggtgcctctgcactgtgacctctgacccctggaaaagagcatctccctgtcctccataaaaacttcccagacatgaaggctgtgctgcttttcctccaactggaaaagcagtgagcatggaaggagggagattgatagcttggaggggaccagcctttgtctagtctggggcttgactccaggtaggatcctcactttgggaaatactgccatttttgtctggattcccaattggaggagtttgtaactcaggcatgcttggacatgtttcttaatctctctgagccttggtttcccctctggaaaatgaagctggagatgcctgctgtgaagatgcttgtaaggagtgatgtggggcccacaggaagtagttagtgcagtgccgggcaccgggaaaagagaggttcaatggacatccactattctattattgttgtgggtggcattactttttaacggagagagtatgcacatatgataaagggcatcaatctcaggcgtatgatttggtgggttcctacttgtgtgtgcaccacccacatcatggtgtagatcactgccacactcacacaccgagaggtaaccccgagcctgacctccagcaccttggatgagttttgcctcttcctgacttcgtgttggtggaatcccacagtatgtgttcttttgtgcctggcttctttggctcagcactaggtctgtgcaattcatccaggctgtgcaggctgttattcctggtcctctgcc

SEQ ID NO: 5079 - DNA, 1173 bp, Artificial sequence
  DNA replication origin
attcggcagactgcaggcaggtgcttcttgggcacgccctctctggcccactccctctccaggacacttcctgtccctggcacagacagtgagagcatcactccttcctggccagccgggtggtgactgtgctctcctctctggtgactcatcagtctctggcctgctggggtcagctctgtccctgcccatggcccctcaggttgtacaaatcgtcaggagattggggagccttcgaccttctctgtcaaggcctgtcccacatcccaggccctcctccttccaggatttcttacctccatcccccccgcccttcccctgtttacccatcatgaggcaacctccacttctagctgtgtgtcaccagaagtggggtgaatgctgcttcttaaatccagaagtcaccccagggcagtaaagttcagtatcacaaagcccagggagtccacctgagagacccagggaaagccagtacgggtggagagggggtaatgtcggggagagtggtgggtggagagggggtaatgtcggggagagtggtgggtggagagggggtaatgtcggggagagtggtgggtggagagggggtaatgtcggggagagtggtgggtggagagggggtaatgtcggggagagtggtgggtggagagggggtaatgtcggggagagtggtgaggcagtctgggcaggtcggggagaggctggtgtcctagagacagagctggtggatatgcctctgtggggcagcagatggggggcccttggaggaaagggaggggcagtgccaaggtagtgccaggtgctgtgagccagacaggttgcggtagtggggaactagaggagcagaaaagaaagtgggagctactgcagacatcggagtgagtgaaaactggaggcctggcagagggcgatggctgtggggatggaaagaacaagataggtgtgagggtgtctacgagaagggccgtgtaatccaggacactgaagactcggagctgcaggggccaaacactgtggggtgcatgggggtcccgaaggaggggctgctttggagaaaggagagaggaagaagcaggttgtgctggtgccctttcctccttcaaagcagtgtcattcccacggtgtccaaactcaccagtaaacattcaggacttttatgagccagaaaaccaa

SEQ ID NO: 5080 - DNA, 791 bp, Artificial sequence
  DNA replication origin
agcggagggctccgggccctggccagggaggtaggccagagggagcgcgggcttcctggggcgtccttctttgtgacccgaaatacttgtgcagatttccctgtccatcagccaaaaccccacccacagcagaattccagcaaacagaaaattcacctctccacaccgcattccctcctgactcagactcaccgcgatgcattaaattatgtttttagactatgcgttctgttgtctgtatgtcgacacatcctggaccagggctccagatgtccgccttggcataaagaccttacctgggcccaggataggcccatctatgacctgctccccagccgctgctatgtccctgccaccagaagttgccgaaaagacatggggtaaatgggagctgcatcccacccttcccagaagctctccccaggctgcagccctgagctggagaggccggaggtggggttgggaggaggggaggaggcggggaaaggcatcagggagagttagaggaaagcaggagaggaatgattgggtctccagtcttgggcaacttgggcaacttagtcctcccggagttgtgggtggaggtcagaggggaggggcttctggggaaggaaggggaagagaaggcatctatgggaaatgggaggcgtgagtgacacttgccggggagggatctgtaggatgtttggctcctaaaaggaagtgcagaagtccctagcagacacacacccgctcgagcggatggttcactaagcacaggcctgtttactcacagccgccagggccaccgc

SEQ ID NO: 5081 - DNA, 2240 bp, Artificial sequence
  DNA replication origin
aagctggatgatccgcggaattgcctcagtttaccagctctccggagagcggtggccctggcggctgtgagtaaacaggcctgtgcttagtgaaccatccgctcgagcgggtgtgtgtctgctagggacttctgcacttccttttaggagccaaacatcctacagatccctccccggcaagtgtcactcacgcctcccatttcccatagatgccttctcttccccttccttccccagaagcccctcccctctgacctccacccacaactccgggaggactaagttgcccaagttgcccaagactggagacccaatcattcctctcctgctttcctctaactctccctgatgcctttccccgcctcctcccctcctcccaaccccacctccggcctctccagctcagggctgcagcctggggagagcttctgggaagggtgggatgcagctcccatttaccccatgtcttttcggcaacttctggtggcagggacatagcagcggctggggagcaggtcatagatgggcctatcctgggcccaggtaaggtctttatgccaaggcggacatctggagccctggtccaggatgtgtcgacatacagacaacagaacgcatagtctaaaaacataatttaatgcatcgcggtgagtctgagtcaggagggaatgcggtgtggagaggtgaattttctgtttgctggaattctgctgtgggtggggttttggctgatggacagggaaatctgcacaagtatttcgggtcacaaagaaggacgccccaggaagcccgcgctccctctggcctacctccctggccagggcccggagccctccgcttctaggcactgggaggaggctgtctgaggagggcaggctcccggccctgcctgtccagtctaatcaggtttgcaaagtctgtgccgccgcctcaagggctcgggcgtcccttcctcccttgccgggatggggatggagaccaggagcacagccctgagcgtggtgggtcgcagacgcactgaggccaggagcggggcagggaggacgcagggatttgtcttttccaaaggagatgtcaggaagtgttatgaatcgagagtggcctttgccaaggagccgcgcccgggcggagaccgggcggcctgcagccaccccgcctcgcaccccccgcgcccctaatccgggtacagaagaaagcccgagaacgtgctgtacttgttattattgcctccgtgagccttcccgccatccagcttcacatacacttcgtcccctgaatccaagtgcagcaccacgctgttactggcgtagtcgtagttctggtcggcgtcctgtgcaatggcgctggcccggacctggggacaagcggtgggagcaggtgagccggggcacctcttcccgcgcctttgctcagcccacaccaggcgcgccactcacgggcctcccgcctgctgcttcagggtccacactcccaccccagctccatgttctctctccaacttagtcaactccttccaggtcccccctcctcctcgcgccgacgagtctgggaaatagggagaggggaagcttcatgaacactgacccagagtggaagggtgggagccaggggccagggccaagaggaaaggaggctgcagggcaagggggcgacctggagagaactaaagaactgaggtttccgagaagcccacggagaggcaggcagggacgcaagtggccaaggagtgtagtttaggtatgggggtctctgggctctcaaggcccaacatttggctctacgtcccggtgagcgcggcctcggcgcatcgggaagcggagatactgtggcaccgaggcgcgttcattcccggggctcgcagggtagcccgcgggtggagagaaaggaggctggttccctgggaggttcagggcgcgggcgagggtttacgggggccggtgagtgtaggggtcactgacctgcccgttcttgcagaggtccgcccacatgctggtgccgtcgccgccgcgcatgaggatgtggtaggtgaagaagtagatgccgcgtacctggcagctgaacttgcccgtggtggggtcatagtgattgccgaggttggtgaccacgtcatcgaacttcagcacctcatagccttcgtgggggctcttgagacccacatagaaggcgatcttggggccgctgaaggtggcgctcagcgcactggtcacttcaccctcggaatcgccacctaccccggcccc

SEQ ID NO: 5082 - DNA, 1504 bp, Artificial sequence
  DNA replication origin
attttaattaacccgtaagaacctagtgcaggacaaatgagagttagcttcaaagcaatagccttaggtgggtgcactgttgttccagagatgctgatgctacaccaaacactgacaccagcccttagattctccccccaggacaggcctggtgtgattcccatgttgggggtgctagggcaggaggcggccttttaaggaaactgagtctcagggacaggaaccacctggcaaaatcacacagctactcagggcaagagcagaagctggggctttgatttctccgctggaagtctctcccacaccggcgggcctctcatccttccttagcctcacatgctacattggagatagactattctgctctcatctgaggccatggtttattcaagactggctcagaatggctttggactatttggactattttctaaaataactaaacccatctcaggaggaggaagctggggatgtccaagggaatgtgcccatgcatctgcctggcagtggccgggcttggagtagaagctgagtgcaccatgatcactgccaagtgccggcatcaagcatttggtttctacaccagcttcacgcagaggacaagggccagccattttctggtggaagaaaaggtctgaggcgaatattccttttttttttttttttttttgagatggacttttgcttttgttgcccaggctggagtgcaatggcacgatcccgcctcaccgcaacctctgcctctctggttcaagcgactctcctgcctcagccttccgcgtagctgggattacgggcatgcaccaccatgcccagttaattttgtgtttttagtacagacggggtttcatcatgttggtcaggctggtctcaaactcccaacctcaggtgatctgcccgcttcggcctcccaaagtgttgggatcacaggcgtgagccactgcgcccggccgcaaatattcttgtattgggagccttgggctttttagagtcacctcagaggttagtggggtgctctacgggagcctgtttaagagtctggagtccttagtctaggtttgcgaaagatcttccagaagcgagatctattcaattctgaagaaataactcaggaggtctttcagaaactccttcccgctggacctcacgggactctcctggactcggtgggttgaggtttgatcctctttgcaggccaggggatggattaggtgaccccagaggagccctgctgacacctggattccagctgctttcgtggccatgtgggggtggctgtgcgtgccccgccactgcgtgcgtgggtgtctgtgtgtgttatcggtggggggcgcgtgagtgtggccgcgggtgggtgtgtccgatgtgccccggcttgggaccgcgcccgctgcgcccacttgtggctcctgggagccgccagggggaaccgcgccttcaccgcctctgccgaggacgccgccagataggaggctgatgacatgagggctccgtctcccgagtg

SEQ ID NO: 5083 - DNA, 804 bp, Artificial sequence
  DNA replication origin
agaaagaaagagagagaaagaaagaaaagaaagaaagaaagaaagagagagagagagaaagaaagaaagagagaaagaaagaaagagagagagaaagaaagaaagagagagagaaagaaaaggaaggaaggaaggagaaagagcaaaagagacagagggaaggaaggaaggaaggaagggagggagggagggagggaagagggagagaaggtgagaaggagggagagagggagggaagagggagagaaggtgagaaggaaggagggagggaggaaagaaggaaggaggggagggaggaaggaaggaaggaggggagggaggaaggaaggaaggaaagaaggaaagaaggaaggaaggagggagggagggagggaagaagggaaagaaagaaaggaaggcagatttctactgaggctgcctctttattcccctctttattcccctcagagaggtcatttaacctctctgatctctgtggttgctgtagggactaaaggacacaatccttgggaaagtgcttggcacagaacttttcagcttgctatggggagtgccagccaccggcaacaggtgtgactgcaggggaaagccccgtgcaggtgagagaaaggggccagaatgagaagggctttgtaaggctgggaccactatgttgggtctgctatggaggggggagctcaggagtaggcagggcagatttgaacatgggaaggggaaagctgctgctggaagcagtggcccatgcccaggtgcatggagaagagagcctggaagcctctcttggtccctctaggctggcagagg

SEQ ID NO: 5084 - DNA, 1247 bp, Artificial sequence
  DNA replication origin
ttctcaaagtttacaacccactgcaggggccactcaccagccctggcaccctaagggcaggaacctccattgggcacgtgtgtctccagcactgggagcactgtctggcacctggggcactgtgagtgttgaatggataaaggacctgtaagaattgccataagaggtgttgccctggggcaaggtgggacaggaaagttcttgcaagagaagagaggctctggccttgggccctggctgagcagagagctgggaggtgggtattcgggtaggaggaaagctgtggagggggaaagcaaactgcctgcgggggtgggggggttctcggcgggagttgggggtggagggaaaggcgctttacagcagcactccctccacagggagaccagagctctgcctcttcctccccaccgtgccctttggggtccagttgtggggccttccttgaggcccagctcctgcctctggcctccggaggcttatctccccaacagaggctggctccccagaaaacaggattcttagacttcctaaaaataacctgaagctccttatcagaggctaatagtgtatgtctcccaggaatactctagaaagagtaccaggggtcaggaacccccactcagcctccacgaatctgagcggaaaagcccgggtctcctcacctgtaaagaaaataactgcagccggcaaatgtgaccacaggtgagaaggggcttcggaccagggcgcacacctctagagaggtgcccacagacagcctccccttacttacgccctgcttcgctgcagtgctgtgaagccatcggcattggaagtgcggagggcagcgggcagtgccccagggggaaggggggacgggtagggtttcagagcccagaaggcctagacagggaggcagctccgggagaaaggtacccgccatcccaccggtcttggaacctgaggactgctgggaagggtcaaaagtctgccctaagggtggacaagggacagagattggggggggaccacaaaggcctgggcgcaaccttgttgagagggaagggatccggacccaatctggagccctggtctcttcccacctgcaaccgtggctgccacttggcctcggttataaaatggacaaggattcgaggtgctcctcaggttaagagaggggggcctagaggtcaccctggcctcggtgccctccgtggccgggttaagaggaggtcccggagttctgctcacttcagccgtgtgcc

SEQ ID NO: 5085 - DNA, 1735 bp, Artificial sequence
  DNA replication origin
agccggataagctgcggcgggctggagggcggccacctcccctgcaggtccggccctcccgggcgggtggggcgcgggggaggaggagcctcgggccgagccaccgccttcgccgcggaccttcagctgccgcggtcgctccgagcggcgggccgcagaggtgagtgtaccctcccccggtctccgcggggctgcgtgctgcgcccggtccccgagacgcccgcccggttgcaccctgcgccgtcgctgcgcggacctcgggtgccgccacacgtctggaggcgacttctgtcccctgggaccgagccacgtgcgcccggcggcagagaaaccgggttccggggcccccaccccgtgtgccttccttccctaggcgtggaagccgcttgcgccgcgcaggttaggcagggccggcggcgacagtggcggggagcaggctccggagccccgggtgcagatgtgggcgcccctccggatgaccccggctgagtccacaggtcccgtgtgccccacggctggggctctggccagcggtcccaaaggagggctggtagctgtgggcggggatcttccaggctcttcctcgccagacctcccagtcccttcgcagccgaacagggcagggacaggggcaggtgcaggggctgggcaggggcgcccgaccttggtccccaggaggaggctggcctcaccagtgcccgcctctgcccgcggagcccttgcctggcaaagttccccctcctgcccggcaaagctccccctcctgcccacttccccgaaatttggggacaggctgcccggagaggtgtggttggaactttggtcactctgggtaaatgaaggggagggtgtgcccagataatatgcggtttggggaccagaaagccggatccgtggggagaagcaggaaggtcccgctggagccctggcagagggcacagagaggcctcccaaatatccagggccacctcagagatgggctccagaagtggggattctggaaatgcccccagggaggtatttctgtccatcagagtgcagccataatataattaacagcagatattcccatttatgtgtgccaggcatcttgctaagggctttgagcacaatatcccagttaatcctcacaacaggaaggcaccattatctcttgttaaaaatggggaaacagcctcagagagtccacgtattttgcaaggatacacagctaggaagttgcagaagtagaatttgaacccagagttatctgacttggagcccagaggaacctaccactggggcgaaacaggctgtgtcctcacggggattctggcagccccaagaatacagtgctgagagccagaaggtccacaaaaccaaagggtctcacctgggtgtgtcctctcagtcacctgcaaggcttgttaaaaatatagatccccaagtcccatccgaagctgactgaatcagctaggggcacctggaggacccagactatgtcttactcatctctgtccctggtggcctgcagaggggctggcaaggagcaggtgcttagtgaatgtctaatgggtaagtgggcggggtggggtagatggtgtcactagtgtcctgaagggggcttaaatggagcaggtggcctcagccaggcaatccggcagcaggtatggaagtgacacagtctaatgctggcctcagagccagcagggagctcaggctgggccacttgtccacctgggggttgaacagcctg

SEQ ID NO: 5086 - DNA, 1783 bp, Artificial sequence
  DNA replication origin
agtgaaaaaggtgagaggcgcctgggccctggatatactctgaacgcccgtggagcagacagaactggctgatggcctggctgtgggggtaaaagaaaaaagagatatatatccaaggtttctggcctaaacaaatggaggactggaggtcatgtccttcagtggagaagactgagcatggtccaccctcagggagaaagctcagaggctcagctggagtgtgttatcatctgaggcatctatcagaggatacctatcagccacctcaccagggatggggagcacccagcagggactccagcgggcagctgggctgtggactgaaatccggagtctgcagcatttagttgttatttaaagctgggagcacgcatgaggtcatctagggagaagatataattagagaagtcagaggaccgagccctggggccttctacatcgtaaaggataagggatgaggaagaaccagcaaacgagatggggaggagtgaccagtgaagccaagcgaagcaagtgttggcaagaagggtgtcagttgattccatgtgtccagcactgctgagaggtgaagcaattccaagacagaatcctattcctgtggcaacaggaacctttggtgaccttggcaaaagctgtctcagcagagtgctggacggaagccctcatggaggaaagagggtatggagaactcggttcaggaatttggctgtgaagggaagatggggcggctcttgtggtagggttcggaagggagagctgtccgtatgctggtggggtgcagaacttgatggtgtggaagagggaggacaacgctgaagtgtgctcattggtgttccagaggtggggagcccaggcacgagggaggacagatagcactactcgctcgcccacccacacaggaaggcaggtgagggacatgtccgggagcaggagcatgttgtctaggatggcccgaagtgaagacagcagctgggagtgagaggaggggtctcagagttgagggtctaaaggaacctggagagcgagcggaactgcagggcagcgtgaggacctgactgcagctcagcagccatgaccgacagcgtggccagtcagcactcgccctccaccccaccacgcgcagtacagctagctgttcaggtgcaggtgtagaaggcggagcgcggcagggttaggcctggggccagaggggtccgggcagcaagggtctaggcagagattgatgagaaggcatagaggatctcaagtcagggagtgggatagtgagaagacagcaggatcagtgaaggtgggggttgaagagccttggagggggcaccagaggcagagaaatggaaagtcaggagacagcagtcagagaacgggaggtggatattgagacggtgttgtggactagggtgcagttattaatgactacggcaaaggtgtgcctccaggaggaggtggctgagacagagacgacaagaaagttgcagtgagttcttcaatgacctaagaggccccagggtacaggaaggtttgtctatgtctatcctgaattacgagagatagctgcggtcagccaggagctaaaatcatcaggtaataagggagagtggcacagggcctgcaggtgtcggcaacaaggttaggggacggcaataatgtatagtccgatggcataagcctcaaggtcacaggatggagggaggaggaaggggcactgatcaggaaattaaatgaggttgttgtgctttgctaaacagaattaacactgagtggattgaagatgacagctcccgat

SEQ ID NO: 5087 - DNA, 1093 bp, Artificial sequence
  DNA replication origin
ctccggacccaggtttgcaacagggggcgggcacggggggcgctcgcacccccagcccgacgccggcgctcgcggtgggtacgcccctccctccgtcctcccacccccaacctcccacggcggggcagcaccccgggtcagcgccccgccaggcgccggctacctgcacgccgacggcagtcatgctgcgcccggcggccgcgctgcagcctcgatcgctccagctgctccgctgtggccgccggcgccagcccgggacttctccgcaggggcggggcggctgctggaggcgggcggggcgggagggggcgttcaaagctcggcgattaaccccgggcgggctccgccaaccccgccgccctccgcggctcggattacgctgagtcagcgagggcggccggaggagcccctggggagccgcggggaggacccggcacttggggggagggatccctcgggtcccaggggaaaggatcgggaagtcactccgacgctcccgaacctccgaggacagcttcgcctggggcgcagattcctcgagggctgggacggcgacgagggcctgagggttcgattcctgttccagcttgctgagtccagcctctgggaacgcggcagggtccgaagggaggaggcaggcgcagaggctctgctgccctcactctgcggtgtgaccttgggctgcttgtttagcgtctcggagcctcggttagtaagggaaataatgaatgtgaaaggtggggctcttgccgggccctcgctgagtgtgaacggagtggaactttttggggcaatcctacttgcgtccctaaaaggggatgtaaaaccctgtttcctcctgaactcctcagggactattaaaaatgcaaatatgccaaacaaatgtggttattttttctccacctcgatgggaactgaggtctctctttttttttttctggacgttgtctagcgcttgtggcccaggctggagtgcaatgacgcgatcacggctcactgcaaccttcgcctcctgggttcaaacccgttcaagcgattctcctgcctcagcctcccgagtagctgggattacaagcgcgccccatcaagccct

SEQ ID NO: 5088 - DNA, 1106 bp, Artificial sequence
  DNA replication origin
ccagcagccgccccgcccctgcggagaagtcccgggctggcgccggcggccacagcggagcagctggagcgatcgaggctgcagcgcggccgccgggcgcagcatgactgccgtcggcgtgcaggtagccggcgcctggcggggcgctgacccggggtgctgccccgccgtgggaggttgggggtgggaggacggagggaggggcgtacccaccgcgagcgccggcgtcgggctgggggtgcgagcgccccccgtgcccgccccctgttgcaaacctgggtccggaggaggctgggcggggagcaacctcggggggcctgcctgcctcacatagctgctcccgaggcgcggactccggctgcttctgctcgcggccttgcaagcacccgaggctcccaaacttcatttggaaagatttttcttctctttggtgtcaccagtgacttactggtcagtttaccataagggtccccctttgtgagaaatgaggcgcgtctggggtggagggacagaatcgacttgcaaagtgaggcttatgtaacagaggatgcgtctcttgggaagttagacctttctgggggtggaggttaggaagaccgtctccctccccaaagctgcgtttggggtgctgggctgggggtggacttgctgagtcgcgcggacacctcagggaaaggctctggcgagggaagaagcccgtgtctccgaagatttggcttctccttagcgtagtgcacgatgtttatgttggctaagaacctacacattcctacccgctccctcgggcctgctgctccccaaagggaagtcagtgggtggcggtaccgctgcccagcgggcgaacttcctttccgcgcaactcgcccgctgcagagtctatccgctggactgtctccaggattagagaggcccgttgacttcgtgtacaaacgctcagccacaacactgacctagtagacaccgttctgcccattgtatagatgaggtaaccgagactcagaagtaaggtgccctccgtggctggccaaggaacagaatcaagattcaaacccagggctttctggctccaaatcccactggctcctcctgcctttacctaacgggag

SEQ ID NO: 5089 - DNA, 594 bp, Artificial sequence
  DNA replication origin
ataggacacaccccatgttcctcactgctccattctcctgggtcctagcagtgaccgtcatgcgtgcctgttttgcatacctcccaaaccgaggtgtaacctgggcagcttctagacacactgcaaagcaggtcatttaatgtatgactgtgcaggagactcagtttaaaggagcttcagacggaagtgacagtggttgccaatgacctttgacttatctcacagctctcccttgagcacccactgaatgcccaggtattggggacacagcagtgcctaaacacagaatgtggtggtgtgggggtagggggcggccttcccagagcacacagtgttggaatgagacagaaataatatgtaactacaaactgtcctcagaatggtgaagaatttgaacaggtgcctgacacagaataccaggaggggcctgactctgggttgagtgggcaggaaagcactctctgtggaggagactttaagctgagacatgaagaatggagaagaggtgttgtcctggaggggtggcaggagctgcagaagagccactacaggcttaagggccagtcatctgaggaaagaaagttctagacatgg

SEQ ID NO: 5090 - DNA, 1434 bp, Artificial sequence
  DNA replication origin
gtcaggtgaagccccgcccactggctcgggcggctccgccccgtccgtcttctctcccgcgctccgctcttgaagggttccagtgtgtggtgtttccaactttctcatgtcccctcgggaatccattcgtatcccatgccataagtcgcgctgtctattcttgaccaggcccggcaaactgctccgagctcccaggaatcacccgccgcctccggtcgtggcccgcagcagcccggctcccccgccctggggcgtttggtcgcgcccggccgccggccctgggagcgcgtccgcgtcgtcatggcgacgctccgagcgggcgccggcgctggcgccggccgaatccggcccgggaaccacctccagggtgagcggccagggacctggggcccgggtggcccagggtcggccgctggggcgccgcagcctagctgctgaggcgaccgagccccgggtggtgtccagccgcaagtcggccgcggcttgggtccgaggagagtcgggcccagagggtgacctgaggatggtggggggagcggtgcgcgggcctggggcgaccctgacccttagcaggagtggaatgaaaggtcgcggaggggaggaggcgcttggccggggcgagagggcctgcccggggtgagagaatggggcgagggaacgagggtgcggcggtgagacccggagccaggcctaccggggcggtgggcgagccggcgtgtgggcggcgtggagaccgcctggctcctgggcctgcctgaagcacaggggatgtgaggctccgggaggagacgggctgcaggctgatcctagggctggcgttgaagggctggagggaagggaagcaggtgaggagggggccatgcagccttcagcgatgctatgagaggtggtgcgaggggaggggagaagaggggaggggaggggagaacttctttctgaaagttattgttaagcgccttccttcatagattcactgcctgtcgcttgatgttgtccgtcttgggagtctgaagctatgggtcttctccagaaaaaacaaaaccgaaaaaacacacaaagatccacactaattaacattccatttcagaggcttcgccgaccagccccatggcctgcgcaagggccccaagttaagagatttagttgtgcaatatataagggaatgtgagatttgtaaaatgttgttacagggttataaattattaacaccaaatgagtaatagaagcagtgattgctaaagaatgttaaagtgtgttgggatcactgtgaacttcatgaagaaagtggaacttaaaatgagtgtgttaagggaaggcaaatcggacacagggttcgacatgaatcaagatccacagagctggaatacccccatgtctggcacctggctggccgtaggtttcaccacctcctcatcaccccctcctcatcaccct

SEQ ID NO: 5091 - DNA, 1519 bp, Artificial sequence
  DNA replication origin
caagtagctgggattacaggtgagcatcaccacacctggctaatttttgtattgttagtaaagacagggtttcaccatgttggccaggttggtcttgaactcctgacctcaggtgacccgcctgcctcggccttccaaagtgctggaattacaggtgtgagccactgtgcctggcagggataaagacttatcttaccagagttaaaaaaaaaaaaaaaggtagggtagggggttcttagctaaggtggtaagggaaggcctctccgaaaagggtatgtctatgctgaaacctgagtgaggggaagcatgagagggctgtatgtgtggaaaatgtcctcagcagaggaaatggccaggtccaaggcccaagggcaggaatgggattgtgggcccagggggcagaaagtccagtgtggctggatgagagggaagcctgaggggaaggtgggaggggactttggggaggtgggcaggggctggactgccacagtcttgtaagctggagtgaggtccttgcatgttattctaatggcaatggcaggtcactggtgacctagatgagagctgatctgtgaggtgagcaggaatgttcgaatggttgaagagagaatgggcagtgaggaatatggaccactcttctggctgtgaagaggagtaaagatggggtgatggttcaaggtgcacatggggtgcaaggagggcttcgtttgttttgtttgttgccagagagagggaccactgcaggaaggttctccatgggtaggtaagaggggatgggtccggggtagggaggaggaggggggtcaggagcacttcctcactgtaacgggagggaagctatggtcaatgggcccaggctggtgaagtcgtgctgggaagagaggttgtccttattggatgctgcttctttttcccagtgatctatggagtgaggtcatcaggtgaaagtgcagtggggacagagtagggagggagtggtgaaggtttgaagaaagcagaagagatgtacatttctaggtgaggaaaagaaagacctttctaccaggaaaatgaaatgattgttgtgtaccgttgagtgcccatttgggatctgggacaaaaccacaacgttggtgagacaagttagtatggttgtgtgattctttccaacaatgttgggatgctcaggtacaagaataaatagatggatagttgggtttaattagagctgggtttgccagtcaagtacaaagtggagagaaaggggcaaggttggtgagggtgtttgcaaagaagtgatgacatagtgatggaccatgaactctcagccagcagggaggacagtgagggcctgtggggtgtctattttacttaacacctaaatgttacacaccatgtgccctgtgctgctcctaagcactttgttcctagacactttgcagaaggaagagatagcgagatcattggcctggtggaacataaggaatgttctaatggggtcaccatagtaagccaggtagaagtataaggaggtgagtac

SEQ ID NO: 5092 - DNA, 951 bp, Artificial sequence
  DNA replication origin
gggtcggccccccgcccggccagccgccccgtccgggagggaggtgggggggtaagccctccgcccggccagccgccccgtccgggaggtgaggggcgcctctgcccggccgcccctactgggaagtgaggagcccctctgcccggccagccgccccgtccgggagggaggtgggggtgtcagccccccgcccggccagccgccccgtccgggaaggaggtggggggagtcagcccccccgcccggccagccaccccgtccgggaggtgaggggcgcctctgcccggccgcccctactgggaagtgaggagcccctctgcccggccagccgccccgtccgggagggaaggtggggggggtcagcccccctgcccggccagccgccccgtccgggaggtgaggggcgcctctgcccggccgcccctactgggaagtgaggagcccctctgcccggccaccaccccgtctgggaggtgtgcccaacagctcattgagaacgggccaggatgacaatggcggctttgtggaatagaaaggcgggaaaggtggggaaaagattgagaaatcggatggttgccgtgtctgtgtagaaagaagtagacatgggagacttttcattttgttctgcactaagaaaaattcctctgccttgggatcctgttgatctgtgaccttacccccaaccctgtgctctctgaaacatgtgctgtgtccactcaggattaaatggattaagggcggtgcaaaaaaaaaaaaaaaaaaaagaaaaatgcataccaattcttggcagaatattctaaaaaagctcaatataatccaccatatttagtttatttgtttaaaatttatttgtttgtggtaatccactatagtaacaggctaatgaaaagtcacatgatcatatcaatagacagacaagaatcatttttaaaaatgcaacattcgttcgtg

SEQ ID NO: 5093 - DNA, 1339 bp, Artificial sequence
  DNA replication origin
acctcccggacggggcggctggccgggcggagggcttacccccccacctccctcccggacggggcggctggccgggcggggggccgacccccccacctccctcccggacggggcggctggcccggcagaggggctcctcacttcccagtaggggcggccgggcagaggcgcccctcacctcccagacggggcggctggccgggcggagggctgacccccccacctccctcccggacggggcggctggccgggcggggggccgacgccccccacctccctcccggacggggcggctggccgggcagaggggctcctcacttcccagtaggggcgggcgggcagaggcgcccctcacctcccagacggggcggctggccgggcggagggctcacccccccacctccctcccggacggggcggctggccggacggggcggctggccgggcggggggctgaccccccccccccacctccctcccggacggggtggctgccgggcggagacactcctcacttcccagatggggtggctgctgggcggagaggctcctcacttctcagacggggcagctgccgggcggaggggctcctcacttctcagacggggtggttgccgggcagagggtctcctcacttctcagacggggcggccgggcagagacgctcctcacctcccagacggggtctcggccgggcagaggcgctcctcacatcccagatggggcagcggggcagaggcgctccccacatctcagaggatgggcggccgggcagagatgctcctcacttcctagatgtgatggcggctgggaagaggcgctcctcacttcctagatgggatggcggccgggcggagacgctcctcactttccagactgggcagccaggcagaggggctcctcacatcccagacgatgggcggccaggcagagacactcctcacttcccagacggtgtggcagccgggcagaggctgcaatctcggcactttgggaggccaaggcaggtggctgggaggtgtaggttgtagtgagccgagatcacgccactgcactccagcctgggcaccattgagcactgagtgaacgagactccatctgcaatcccggcacctcgggaggccgaggttggcggatcactcgcggttaggggctggagaccggcccggccaacacagcgaaaccccgtctccaccaaaaccagtcaggcgtggcggcgcgagcctgcaatcacaggcactgggcaggctgaggcaggagaatcaggcagggaggttgcagtgagccgagatggcagcagtacagtccagcttcggctccgcatgagagggagaccgtg

SEQ ID NO: 5094 - DNA, 1344 bp, Artificial sequence
  DNA replication origin
gatgttaaagactctatgaaatggaaattagaactaataagtgatttcagcaagttttcagggcacaagattaataaacacgtcaattatatttctacatactagacacaaaccatttaaacttgatattttaaaataccagttacaaaaccatcaaaaaaattaaatacttgaaataaatttaacaaatatgtgcaggcaaattttctcggtaattatttgcctccaataagctgcacccatttaaagtgtacaattcagttacttttcttttttgagacgaagtctcactcttgtcgcccaggctggagtgcaatggcatgatctcggctcactgcaacctccgcctcctgggttcaagctattctcctgcctcagcctcctgagtagctgggattacaagcgcccatcaccatgcccagataatttttgtatttttagtagagacggggtttcgccatgttggccaggctagttttgaactcctgacctcgtgatctgcctgccttggcctcccaaagtgctggtgtgtccggaattggtgggttcttggtctcactgacttcaagaatgaaaccgcggacccacgcggtgagtgttacagttcttaaagacagagtgccctgagtttgttccttctgctgttcggatgtgttcggactttcttccttctggtggggttcatggtctcactggctcaggagtgaagctgcgaatcttcgcggtgagtgttacagctcttaaggcggcgcgtgtggagttgttcgttcctcccggagggttcgtggtctccctggcttcaggagtgaagctgcagacctttgccgtgagtgttacagctcataaaggcagtgtggagccaaagagtgagcagcagtaagatttattgcaaaaaacgaaagaacaaagcattcacattgtcgaaggggacccgggaagcttgccactgctggctgggggaggggggcgggcagcctgcttttattctcttttctggccccacccacatcctgctgattggtccattttacagagaacagcgtggtctgttttgacagggagctgattggtgcgtttacaatccctgagctagacacaaaagttctccaggtccccactagattagctagatacagagggtcgattggtgcattcacaaaccctgagctagacacagggtgctgattggtgtgtttacaaaccttgagctagatacagagtgccgattggtgtatttacaatcccctagctagacataaaggttctccaagttcccactagactcaggagcccagctggcttcactcagtggatctcgcactggggctgcaggtggagctgcct

SEQ ID NO: 5095 - DNA, 1063 bp, Artificial sequence
  DNA replication origin
cggcggcgggaccgaggcagcgcccagtttgtaaccgccgcgccgcccgtgcccgcgcgcgccacaccccagcgcgcttccggccgggccacgtgaccgcgcgtgcacgtgttccggcctctccgcttcgccgctccgaacctcctcctggtcgtcccggcattcgtccacgcggagccggcttgggcggggcccgggaggcggcggccggagaagccgcggagacgcgagcgccgagcgtcgcgagggagcaggcccgggcaggcaagcggcggcctccgccatgaaccccaggggcctgttccaggacttcaaccccagtaagtttctcatctacacctgcctgctgctcttctcggtgctgctgcccctccgcctggacggcatcatccaatggagctactgggccgtctttgcccccatatggctgtggaagcttctagtcgtcgcaggcgcctccgtgggcgcgggcgtttgggcccgcaaccctcgctaccgcaccgagggagaggcctgtgtggagttcaaagccatgctgatcgctgtgggcatccacctgctgctgctcatgttcgaagtcctggtctgcgacagggtggagaggggcacccacttctggctgctggtcttcatgcctctcttcttcgtgtcccccgtgtccgtggctgcctgcgtctggggctttcgacacgataggtcgctggagctggagatcctgtgctcggtcaacatcctgcagttcatcttcatcgccctaaagctggacaggattattcactggccgtggctggtggtgtttgtgcccctgtggatcctcatgtcgttcctttgcctggtcgtcctctattacatcgtctggtccctcctgttcctgcggtccctggatgtggttgccgagcagcggagaacacacgtgaccatggctatcagttggataacgattgtcgtgcctctgctcacttttgaggtcctgctggttcacagattggatggccacaatacattctcctacgtctccatatttgtccccctttggctttccttactaactttaatggccaca

SEQ ID NO: 5096 - DNA, 1400 bp, Artificial sequence
  DNA replication origin
ggaggttcggagcggcgaagcggagaggccggaacacgtgcacgcgcggtcacgtggcccggccggaagcgcgctggggtgtggcgcgcgcgggcacgggcggcgcggcggttacaaactgggcgctgcctcggtcccgccgccgcccgcgttcactccgtacccatcaagaaggcacctaatgcgtgtggggcccgaaggggcctggcgcgctgctgactccccaagcggcccgcgaccttgggcggacgcttccaggcgactccgggaacatggaggcgggagtgagctcacatcctccctgccggccggggcgggccctgcgggggcggggccgggtggagagggcggggcctgggcgttggcaccctacccatctctgccgggatcctcgcctccccgcgctcgccgcggcttcccgggaacccgcccggggctagagcgcccgcggtgaggctccagcaccccgcgcgcgcgagcagaggcggtggccgggctagtgcgggagtttgcgagcgagggagcgggtgccggtaactgaacggatgcaaggcgatgtgcatgagcgcagacctgtgggggccggcggcgggtgtatccctggctcaaaggaaaaggcccgcgcgtagactcagggcacgaggtgggggggccttacctgggatgaagactcgcggggcagaactccgcctggtggagcaacggacgtttctcaggctgcctgcgaagtggctgtgcagagatcccaggcggcagcggcgctcttgtacctgtccctctcactccagagtggaaggtgctggtgagggtgttagaccccactcgggaggaaactggatccagaccagggttgggggttgctttctgccccaggtcacccggcaggttaacagagaatcgcgtcgcagatacagggctcctaccttcaagtgtctagtcctcattttgacttatttggccctgtctctgtgttattctcgcaaaaccatgttttccttttcctttggaaaagggtactggaccagaggtcaagagatttgggttcttgtccaggccgtgccacccatcagctgagaaacctaggcaaattcacctctttctctctgggcctcagtttcctggtctatgaagttgggggacagacctgggtggtgtctaagggcaaggctgcagcgggtctgtgatttggagcacccctttcgccctctggccatctgggcagaccctggaggatttctgtcttccccgctgtcccactgctcagcagagccctggctgccctcaccagtctctcctagtcctcttttcctgaagtggctgtgggatgttgtcacgcaggtcctgggctctgaagtgggacaggccatcagaggaacgcatggcctgtcagggcctccgcg

SEQ ID NO: 5097 - DNA, 960 bp, Artificial sequence
  DNA replication origin
acatgtcgcgccccgaggccggcggagggcgacgccccggcagcggccccgctccgctccgggaggactccctgggggagtctcggcttcctgggctgcctggggctgaggaagtgggggcggcctccgcctctcccttgtagccgcggttccttccctatcccgcagatggctctgcttccacttcctgccgcgggcctcccgctcgggaccgtccacttcctcagtcctccggccgcggcttgggcagggtcagggctgggaagtgttgcaaaaacttaactgccctcggaacttgcacgcgccgtgaactgggcggtgttcctaaagggcttcggtttgctggttttgttttggtcctgtcttgcaaatgagcataaagttgtttctcccccagcctcctcccctttcctttctgataggggccagcggcgaaggggcttctaaggggaagcgcctggactgggcatcgccgtcccggttcttgccgcctgtgggagtgtgaggttaaccgtgctcggtgcagggttgcggggcgcggagcttgctgcgtccacactgcttgtgtgagcagtgtcctctctgtgctcatttccaacgagaaacgttggaactttggtgttcttatcaggtgagtcttcgggagagaagtgcttgtgcctggcggactgaatgaattggccgtggaagagacttggctgattgctcatctgggttacctgtgactcatcttcagcccttgtagaacagtgcactttctgctctgtcctggtttcctaacctcatttcttctgaagttttggggatggatggtgggcatggagtatcagaggggatagtgaatcttttagaggtgtcaatgactgatgttccaagcagagccataagattgttggatgtcaaagctcagaaccggtcaaggctcagaatgctccttaaacctggagcaatagaagcaca

SEQ ID NO: 5098 - DNA, 1041 bp, Artificial sequence
  DNA replication origin
cgcagtgccggtgggccagcactgctgggggactcagtacaccctccgcagccactggcctggctgctaagtccctcattgcccggggccagcagggctggctggctgctccgagtgcggggcccaccaagcccacgcccacccggaactccagctggcccgcaagtgccgcacacagccccggttcctgctcgtgcctctccctccacacctccctgcaagccgagggagtgggctccggccttggccagcccagaaaggggttcccgcagtgcagtggggggactgaagggctcctcaaatgccaccaaagtgggagcccaggcaggggaggtgcctagagcaagcgagggctctgaggatttccagcatgctgtcacctctcactagtagtgacttcagtagctaataaatgggggatagtgaaggagcagattttaagagggaagaatcaagaattctattttgggaataagttgagaatcttgtggcagcccagtgggcaggggcagcagcaaggctgtgagcctggggccaggagagcggtcagggctgcatcctcaggttcgtaagttgtctgtacagccactgggctgtatgtggtgcagatgaggagggagcaagactgagctccgagaagtgctgacatctagatggggaggaggaatgcctggcaagtggcgccgagaaagggcccagagagccacccgggaagcactcagcctgtgggagaatgtgggctgtggaagccaggagggatggcctcaggagggggacgctggaaggggccctatacaggcctgctgcgggccttccctttccaggcagcgttttgtcactcttgctacttgctcattttaaagaggaggagggcatgggaaggaagaaagaagagtttttattggagctagctacgtggagtttgtgggtgatcttgatctcacaaatttctgtgagcttatattgggaggaagttggattggaatggtttccgtaaatagtgagggaaggaaacaaaggcttttgctacacagtgtgggg

SEQ ID NO: 5099 - DNA, 1236 bp, Artificial sequence
  DNA replication origin
tacttgctcattttaaagaggaggagggcatgggaaggaagaaagaagagtttttattggagctagctacgtggagtttgtgggtgatcttgatctcacaaatttctgtgagcttatattgggaggaagttggattggaatggtttccgtaaatagtgagggaaggaaacaaaggcttttgctacacagtgtggggtctgtgggtcaggaacatgattagagactaggttagtggtgccaaatcttgggctccactccagacctactgaatcagaatatgcgttttcacaagattcccaggtaaactatgcattaaagtttgagaagcattagcacagataattcctatagaggaattgtgtcattagctagaaggatatatgggggtcaaaggcacacacgcatgtgtgaatctttagggtgaagattcaatagaacgtgtctacatgctgttggggatgatcctgtagcaaagtaaagactgattgatgctgcaggaagaagggtagtggtaggaattaagttcttgggcatggtggtggtggagggcttggcctttgctaagagcaggaatgtgtactccatgaggctggagacaaggagaagaagggcgtggaaggtttgtagatttgttgaaggagctctgagggagttagggtttgatggcttggtgttctctgggacaaatgaggttaggttatctgtcaagagtaagcagagggagggcacaggggagagtcacagcgagattactaggaagtgtgggggaatgcccattcgtggtttgtgatcataagtgcattgagagtggagtgctgggaggctgctttcttgagtttctttccctcgacagcagcatttgcatgctgggtgcaggtgctgaaaacagtgagtgagatggaggggaagggagcagggagatgaggtatctgcaagagggcttttctcatgtcaggctttgggatctaagctggtgaagggaggcagtgcagcccagagggtcttgttatgcagagagagagtgctggaggccaatgcttgcaggtgtcaagagggcagagaattgtgtgtgggggtggtatttgaacaagtgagcaagaaggatggaggctgaggctagagggttagaggagataactgtttctggtgacggtgaagttcaggtaatgaccatgataatgttagatagaaggaaagaaagggttttcggagaagagaggatcaaggacttgagag

SEQ ID NO: 5100 - DNA, 1716 bp, Artificial sequence
  DNA replication origin
ttcttctgtgaagggacagtaacacctgtatcacaggggctgggtgggaggcccagcgaggcaactgggccaggctcttcacacaacccgataaaggatggttctagggtcaccgttctcaggccaccggacaaggaacactgtcagtggaaacttgactttcagacccgtccggggccccaagtgcaatgcgctcctctgtccttcttcacgcccccacccgggtctggggccgcatgacaatgcccacaggacacggagccgtaccccgttccctcgcaacgggctagactcaaggcagaagcacgatgggagttcatcctggctttcccaggatattggggaatcggggacgtcggaggcggagcgtggcctcctgcccccgcctcccaccgccagtctctcgggccagccctgccaccgtggagctcggccgggaccgcaggcccgcggcggcctgcaagtctggaagccgagcgccccctccctcccaatcggaggaaccgacccgaagctggcgggcaaaactagggcgggtgtgagtttgccgaccgaagtcagaagcagggatccaggaggatccccgagatggcagcccttctgcctccttagaatctccaccagggccagagtctctgctctcccatcaggttgcccttgccctgcctgggagcctgtggcccgggagcttctgcctcctgggaagcacctcctgcatggtggccttgagccaggctggccacctcctggttttgcttgcatctgcccacccggctgtctccgtcaccacagccaccagctacttgacaaactcattctcaggctctcagagtcagcccagtctctcctccttggcgaagccttccctgacccggttgtgccctgtatagttttttacctgagtgaggctctcagcccagtgcctggctgttatctcctcccttgtctgtctcctgcatgggaagcagacttcctgggccctatctggtgccagacctggcagatgatcagggagaacttattgaagtaatgattgaatgaagaaatgagagaagccataaagccaatgaaggagttcacaacccccactccccaacacaagccctcacaggagtgttcctggccagcccttctcattgtcagccccacctgggctggacagggctgtggaaagggagagaatatgggtgaggtttccctgccttcaagccttcaagaagatgcagcatcctgcccattgacctggcaccagggaggggcaaaagccgccgtgtccttgctggtgggaggagggaagaggaggttgggaggagggtccacactttgctcccctagtggaggagctgtcagccccgctgccagtcatctgctgggagggaactgggtcaagcggtagtcagaaaccatctgctcgagaagctgggattatcctgccctctgctgatcccccagcccacgggagccaagggtgtaaattgagttcttccaaatcaccttgtgtttctggggggggctccccttcccctcctgaggggcaaggacctgttcctgttgcttcaaagcctcatttagcatcgagcttggttctccttgtactggtaaactcagccttccatctcggctaaggatgtgactgcgtctgtcagttttgaatacaataatgcacatcagtgccgtagccaacaccctccaagcagctgcaagaccaggccaccc

SEQ ID NO: 5101 - DNA, 754 bp, Artificial sequence
  DNA replication origin
gccgtgcctaaggccgccatggtcacggccctgcgcaagctgcacgcgggcaaggtgcgcgaggacggccgcgtggagatcccgcacctcgacggccacgccagcccgggcgccgacggccaggagcgcgtttccgaaatcatcagcttcgccgagacaggtgggtccggccctccggctgtctgccgcggtccccgctcgctcccgctctccctctccttgctagctccggctgccaccgccgccaccgcagcccgcgcgccctggggcagcctggactcccggcagagctccttcggccgtggccctgcgcgctccgcccgggttgcagtcctcttcccccaggccgcagacccttgcctgctgcctcaaccccccgccgccgatcgcctggccctccacccctgctctccggaatcgggccccagcgcctctgggcgcgcgtccccctcccggcagatgcgcgcggccctggctctgcgggcacttgcttggtgattgcttaatgtttttgtttcccacgatcggagtgtaggcttagcagtgtggatggagatgtgtgtgcttgttgatatacgtgggccggaggagagagagagtgtgtgtgtatctgtgtgtgtgtctgtgtgtgtgtgtgcctgcgtgagaggcccctggggccgcttccatcaccggcggcgtgggcttgccaggattgctgaagcctcgctggggagagctaggcaacctctcttccgattgtgtgggcaccgga

SEQ ID NO: 5102 - DNA, 1021 bp, Artificial sequence
  DNA replication origin
gtctggcttagagtggggcacacagggtgccctgtggcgcagcccagaggtggggccagcatttaggaggggctactaggtgtccgagctttatacctgttacctgtgacatggcgtgatactattgcctcgggctttaccagagctccaggccatggtgtccctgcagcctcttgcgctgtggccgggctcctgactcacctggagctcaggccagcccagcatcacgcctgcccagacccgccgcaagggacttgtaggccatcacaacttggagaatcctgcagctgcctagagctcccttgaggaccaagagcgaggataggaatgggggtgggaggtcacaggtggccaccaagccatgaaaactgctgagggcttaagaaagtgtggctttgcaggcaaaaagtagaactcaaacaccgttctgcggggagaggccctgggagcgcccccagccctgtttctaggctttcgatgggagcaaatgacaaattaacggggtaggctttgaaagacctgctgatggtggttggctgtagatgaggcgtggagtgtgagcatggtggctgtgggggctctgtgtcgtgtggggactgtgggcgggcagtcactggtgtgtgaggctgtgcgtgtgtgaggtgggcgttgctgctcatgggtgtggcctgggtatcgtgggtgtgtgagtgttggtgatgcactgttttgtgattgtaggtgttactgtgtatgctgagccacgtggggcttgagactgtgatcgtgggcgtgcgcggttggctgtgagtttgtagtgtacggttggctggccttgaggttgtgaggctgcgtgggtgagtgtgtgagactgtgtgtggggtttgagactgtgattgtaggggtgtggttgcatggctggctgtgtgcgtgtcttgccatgttcgttttcttccttacggagaggtgatgcacctagccagttatgtacgttgtgattggggtagttatcatcttgcagttagaatctgtgatcaccctc

SEQ ID NO: 5103 - DNA, 1279 bp, Artificial sequence
  DNA replication origin
caaaagctggaggtgggaaagtactttttaagggctgggaagaaaacaaagcttgtttccttggactagggcagtgattataaacagatgaataagtgaactgagggaacagagaaactgaaaaaatgagtgaattgaggaacaatagaaagaataacagttcacacttaagacactcttacaggtgcacaccttatttaagcctcacagaaagctctaggaagtaggtactagttttatccccatttatatttcaagagacagaggcacagagaggtaaagtgacatgcttaagggcagtcaaatcgtataagtgctggggccaggattgcaaacccaggctgctggctctggaagccttgtccttactgtcccttgatgagatgaattggatggatggatggatggatggatggatggatggatggatggatggatgggttgctgagtagatgaacagatggatatgtgggtggatggattggtgggtgggtaactggatggctggatgggtggacaaatggatggatggatggatggatggatggatggatggatggatggatagatggatgggtgggtgggtgaatgcatagatgaatagatgaatgtatgtggaagggtggatgggtgaataggtgggtagatgaatgtgtgtgtggataggtggaggggtagatgaatagatgggtgtgtgtggaaaggtaaatgggtagatgggtgaatggatggatgaatgattgggtggctgaatggatggatgtaaggagggatggatgggtgagtgggtggatggatggataggtgggtagagggatggatggataggtgggtagaggggtggatggatgggtgggtggatgggtggatggatagctaggtaggtagatggatggatacagcacgaaaaaaaataatgaataggtgaatgggtaagcatggataactgcaggaagtgggctgatgactgaggccaatcaataattggttccaaggtgtctgccaggagggcaggagtcaggagttaaaaatataatggtaatagatgcctggaaaccaatgctcctccccacccgccactcttcaggctttctgctgctgcctgaaatctcacaattcccagtttattccttcagcgtaagcattgccctcagcagcccactgttaaacggcaaagcctgtgggagggacccctttgtagtctgagcttgtggtaatcatgcaccaaatgtgccctctctgggctctgggaaggacagtgctgggaacagggagctga

SEQ ID NO: 5104 - DNA, 664 bp, Artificial sequence
  DNA replication origin
gactgcccccttggatgcagccagccactccttcctcaatcagagggccagcctctcacttccttgacacctgctgagggctggctctgctcctcctggccctggcaggtagtgagtgaggcagggtcgctcctgtgccagagcacacatttgggtgtgggggcacaagcaagcccccaacatgtttgctattggtgaggtcctctcgggggggcacacagcagaggcctgaggagggctgacggccctcagggagagccaggaggcaggcattccaggcagagggaacagcaggtgtgaaggctctggggtggcgtggggcggcgtggcctggcgggcttgagcgccatgaggaggtggcctgtgtggctgcagcagagcaagcctgtgggggtgggggcgggggcgtcccggggaggagtggagcgcagacagggcccgggggaggaagggagctcagaggggtgcagggcagaggaggtgagccctgggggccgggtcagagcttgagactatatcacacgcaggggagaagccactggaagggacttcactcattcccacgggtgaggatagggcagcagacctgtgaacggatgtttgaaacaaaattgtgccatgatggagttcctgccctgtgcagggttttcggctctggttctca

SEQ ID NO: 5105 - DNA, 951 bp, Artificial sequence
  DNA replication origin
ggtggcagaaggggccggcagggcaagggcaggcaggggtcagatggggagtgcagctggaattggggttgatggcttaccttccctaaaaggtggggcatctcccaggggccaggaggccaggtctttggtatggggtgttggagggcttctgagccagtgtcaggaccagaggggcagctgggttgaagaagcggggtgaggtgagaggggggaagaaagagagagagagagagggaggggggggagagagagagagagagagagagagagagagcgcctaaaggttatgtggttaattgaacatcaacagccacagatacgattatgcccctttgtgtctttctcccagtgtgttgatggaaaagtaactagattaaaagggccgggagctcgggttggaggggccgggcagtggggggagagcccttctgaatgccgacccggggctcccgcagtcccagcaaggagggaaaacagtcaattagagaggagagaaaagatggagtgagctgtggcttggcatttgcataaaggctgggccccaaagctgccacccttcgagaggggggcaggggttcccaggagagaggttgggagtgtcatgggggtgaggcacatggtaactgttgaaagtctccgcccgaggcccctatgcacacattgcacatgaagccgaagtaagggttactgggtgtgtgtatggagcatgttgacgtctgcgcgtgcgtattcttgtcatatctgtgaagttgcagacatccacatttcaagtggattgcacctgtatagcttgtgttggcctaactctctgtgttgtgaccatgtgcacagatttatgtaggtgtgaaaagacagtggggaaaatcccgtggggcctctctgatggggcccaagagcatggctgggtcagggggatgtggatttgctgactcgatcccaccagcacag

SEQ ID NO: 5106 - DNA, 2771 bp, Artificial sequence
  DNA replication origin
gagtattatcatcaatgcatccaataaggacttagagaatccacttatcaattgttcagatgacagaaagaactactcagcagaagacaaaaattatcaggcttttgataaacttactttcacgtaatcctcacaaccactccatgagattagggcagttttatatttttgttttacatttgaggggcttagacaggctaagtgacctgccgaaggccacgtggctaggagggagtggaggcagaatttgaatggaaatccagcagagcttttcctggaattgtgtgtgaaacagcagctcctgttgctgcatctgagactctcaagagcctggagaaggccaggaaggaatcattttcaggcttttgttcaatcctttattcaactgatatccaatggacacctaatatgtgccttgcacattctaggtcctgtttatacagtgggaataggggtacccaagggggatcttgcccttccaggccagggaaagtaaggttctgggggaagcaaacaattacaaaatacataagaaaatgaattaggcaattttggaaaatgctaatatagctaagacatgtattgagtgtcaggcattgttctaaactctttgcatatattccctagtctaatccttacaacaatcctattacgcaagtgctgtcattattctaactttgtagataaggaaaactgaggcacagagactttgagtgtcaaagtcacatcattcctaatacaaggtgatcatttacattttgagcctcggcagtgcagggcccaacaacagggttgggaggacactgaccagagggagattcagggcagatcaggagagtcagggaggagggagagtccaggaagagggagagtcagagaggagggagagtccaggagaaaggagagtcagggaggagagagtcagggagagccagggaggagggagagtccaggaggagggagagtcagagaggaagaagagtcagagaggagggagagtcagagaggaaggagagtcagaggggagggagagtcagaaaagagggagagtccaggagaagggagagtcagggaggagagagagtcagggagagtcagggaggagggagagtccaggaggagggagagtcagggaggagggagagtccaggtggagggagaatcagggaggagggagaatcaggcaggagggagagtcagggaggagagagagtcagggaggagggagagtccaggagaaaggagagtcagggaggagagagtcagggagagccagggaggagggagagtccaggaggagggagagtcagagaggaaggagagtcagagaggagggagagtcagagaggaaggagagtcagaggggagggagagtcagaaaggagggagagtccaggagaagggagagtcagggaggagagagagtcagggagagtcagggaggaaggagagtccaggaggagggagagtccaggtggagggagaatcagggaggagggagagtcagggaggagggagagtcagggaggagggagagtggagatgaggaaaagccaaggagaagagggagcaggtggggagaactgagaaggagggtgagctggagaggaggagaaggtggggcagaaggggaattggagaggaggaaggaaatttggaaagcggggacctgggaagaaggtggtgccagggaggactatgagctaaggaggaatgaactggggaggagggtgagtgagggaaaagggagagtgaaagaagagggggaatgggggaggagggagagctggggagaaggatctgcagaggaggggtgctagggacgagggcagccagggagggggcagctggctcagcagaagccttcaaggaaaaggcctcaggaatagaggcaactgcacactgaggggaacagacagcgataggcagcaggccggccatgccacgctctgcttttctgtgcatttacttgttccacttgtcccctgctagatgagggctcctcaagtgcaggactttgttgaccctggagaaggagggatgcttgaagcaggtgatggcccaggcactaggctcacgactgctcctccccttcccgcatgggggccactccatcctgagcagcctagagaagagcgctgggttccagaggacttggtgttaggagcacgggggctcagctgagcttgtttgaggaatcacggctgcctgggaaaatactccagagggcagagctgggactaggatacttcaagccattacaggaagaatcttctaacaattgtgcacattgaaggggtttgcaaagcagggagcactctgtcataggcagtgttcagggagagaatgagtgatcacagtgagcccttggctctgcatctaacaaacgccaagtacctactgtgtgccaggccgtgagtagggtgcagggagcaccaagaagaatcaggcccggccctgccttcaggatgccacacttctgtggcagacagaccaattaacaaaaagaaccatgtagtatgatctggtgatgacagaggtcaccacagcatgagggaaaaaatgggacaaatccaagagggcttcctggaggagatgctgatgaagcaaagatgtcaaacagtaggagctggctaacagcatggctgaagggttcataacgtcgcagctggagatgcagggtggccaggcaggaaaagggttaggggtgggggtacaggggtagaagttgagcaggagctcccaggcgcacagacctgggccatccccaa

SEQ ID NO: 5107 - DNA, 743 bp, Artificial sequence
  DNA replication origin
gttctcagtgaggctggttgaacaactatgttgttgattcaggttggtttcacatacctctgagaggagaagaaagaaatatttctgggctgtttggtgaatgcgtttcatggatagagagagggcaaagagggacaacctttacagattatatattggcttaagtctactcaccaccaagcaattggctaaagatgtcaagttttcctggttcggttttcaaagttacattgcagaacaaacatttaaattcctggtggattgtctcccggtttccctccagatgtttggtgtggtgtagatatcacagtaaataaatgtgtttaaaagtctaataaattaggctagagggtgtgtgggggaggggggtgctattttgctgtggccctgggacaaagacacagtggggatcaagaggttccttgcaccttcggcttggtaggtatggcggggagtgctgtcagcaggctcgggagcagtgaggtggtgtggtgaggaatgcaccggagaggctgacactgcccgagctgtcagaattcacattgccggaaatgcaggaatgagtggagagggggctgcgggggtgtgtgtacgtgggaatgtgcagaaagacagtgcgtgtcctcgttggcggcggccgtggctgggctggaactgaacagggcgggaggcagggcccaatcctggaatccacttgtcaatccctggctccagatgtctgcactgggggattggggctgcct

SEQ ID NO: 5108 - DNA, 921 bp, Artificial sequence
  DNA replication origin
tgaacaaccagctctcacagaagctaatagaatgagaactcacactgctcccccggctgccatcccccaatcttctgagagggagggcattaatctattcataagagatctgcccccgtgacccaaatacctttcactggggatcaattttcaacatgagatatgcaggctgggggcggcaggggagatgcaaacaacccaactctcactacatgtcatttgtctggttctaccagtgttaaaatagtttttattttggtctgatattttacaagggagttttcacatcaaaatctggatttcgggcctcccctgaaaacgtataccaatctggcagcactagacccttattccttcatggaccaagcagctgagccactgccctttaaaggcctgaggatgggacatatggtctgggagtcctgaggagccaacaggacccagtgaacaggcaggtaatgggagcagtggctggtgggcccagagccctagggtagggggtgaggggatgaggctgcagctgtggcagggtggggcagttcctgggctgctgttgtcacccaggcgagaagtcgtggcagagggaatgcgagggagaggcctggctggagggaatttgggacttgaatccacagcccacagggcttgaggacagatgatgtgtgtgtgtgtgtgtgtgtgtgtgtgtgtgtgtgtgtgtgtgtgtgttggggtgtgcaggggagcctagctgttggaggaggaggtgaggaaacaccccaagatgctcacatagagaggtaactgctcatgaacacgtagaccagatccagtcaccctcctgcttaaaacccaagcaccctacctgagaggcccggcccctgcccaccccttacccgagaggctgggcccctgcccacctgggtgatcctttgctctcac

SEQ ID NO: 5109 - DNA, 986 bp, Artificial sequence
  DNA replication origin
cttgaatccacagcccacagggcttgaggacagatgatgtgtgtgtgtgtgtgtgtgtgtgtgtgtgtgtgtgtgtgtgtgtgtgttggggtgtgcaggggagcctagctgttggaggaggaggtgaggaaacaccccaagatgctcacatagagaggtaactgctcatgaacacgtagaccagatccagtcaccctcctgcttaaaacccaagcaccctacctgagaggcccggcccctgcccaccccttacccgagaggctgggcccctgcccacctgggtgatcctttgctctcactctgtgctcccttgtactccaagccacgcagcccttgggccatcctagaaccagccaagggcttttttttggcctcagggcccttgcactcactgttccctctgcctgagacactgttcccctgactccttagctggccagttccctcctcatccttcaggtttcctcttaaatatgctctcctaaaagaggtctggaataagctcctagaggccaagggacagcaggaatgctgactcccacggggtccccgggcccatggaaagaggagtagatttctgagtgcaaagggaaacctttgaagggctggcgtggggggtggggcgatgaagcagctgggtctgatttaccccctgaaagcctgccagtagcacccgcatgggaaaccacagggccggagtggccactggggagagttggagcccttgtgctggtgacaggcgcagaggtagtgcaaatggagagaggacatggggtattctggaacccacaggacttgcggaaatgcgggaaggagtggggtgagagccataggcaacaggaaagagtcaagcggggtggcgctgtttccagccccagcagggggtaggaggtggtgccagtttcctacggtggaaacccaaggaaggcacgaagcaggtgtgctttggaaggaacagttctggcgcagcgcctcttcctgtcggc

SEQ ID NO: 5110 - DNA, 1941 bp, Artificial sequence
  DNA replication origin
gagggcagggcgcgggggctttgtctgcgcggaaacgccctgcccggcgcccgcacaaaggccgctttgtgcccgcggccggcggaggtgggggccgcgcgtccccggatccccctgccccggcccggcccgcggccccgagggggcgcccgccacttcgccgccgccagcccgtggccccgggcgccaaagggcctcttaattgttcccagaacgggtggcatttaggtcaattaatatgcaaaacaggagtaaatcatctcattcgcgggccccacgcggggcggggagccgaggcatttgctaggcagcgaggtcgcggcccccgccgcgtgtttatctggggaaatggaaatcaggcgacgcacaaagccgccccgcgggccgggccgcgccctcggccgccctcggaggggtagccggcgccggtcccgacctgcggcccgggctggcaagtcggctgcaagcctggggtcgcctctggccctctctggtccaccgtgcctagctggtgatagcaggagttctgttattacataaatcaggtattgggagaataatacgattccctaagtgcttctaattggagcttgcgtgctcctgacccattattatgctactgagccttgactgaagtccaaagcctactcgcattcctgcatttaatcctcaaaatcgcactaagaggcaggtgattattcctattgttcagctgaagaaaccgaggcagagaggtgaagatcgtcacctggcccagactaagcccttcaccattaaggtgtgagccccaggcctctgttatttcactgggcagctctcttcgctggggaaaatggcccctgcaggcagagttctgtgagtctcgctactactgcaccatccttactcattctccctgaattccagaaatgtaacaggacccactgtgcacctgcactcttctagactcagacggttccacagggaacaaaacaagagattttggcctcttaggacaccagcgagagcacctccaggagaagccagcagggcgacaggaatggcccctcgaaggaggtgacacctgagcagagacctgagggaggtgagagagacttccaggaagaggcaatggtcttgaggctgcagcataaggaggccagggaggggggtgtgtggagcaaagcgggagggatggagacaaggcagaggtggccagggctggcactgggggtgccggctctagttccagctggacaccggagtctctggcttctcttggtctggggacagtctgtgcatggggaattgtaaaggcttctgcttggctcagcctggttcaagtggccccatcctgggctaattggcagtggctaggggcaggtcacatactggacacactcccatcagctggacacccaccccaatcgatacccactacgcaagtagaccccaaacctgggcagcaggcaaagtcaagagcagtccagggagccagggtccaaaagctggagacatttctgaaggttgtcaatctgtgaggacagacatgagcctggaactgaagatttggataacccacgtgcactggggccaagagataaggggcatcaggtgtccagacgtgatggagggatgggagggagaggtaggtgaacagggagtgctcagagctaggtgagatattttagcaaaatcaccaaacaggaaaagttgaagatgctggtcccgtgcagctgcttctgtaggagttcatggggacaggggttaccagaggagggtttgcaaatttttcctataggatgccctctctatggtgatgtacttggtcgtcagtcaactgcctggacagccctgacttttcccctctctccccacccttgccatgcgctcatcaagcctgcccattcttgctccttaatgcctctctccccaatcccttcctttccatttctgtggttc

SEQ ID NO: 5111 - DNA, 708 bp, Artificial sequence
  DNA replication origin
ctgggcacaggcggtgtgagggcggtgaaggaaggagctggcccttgccctccctgccccagtctctctgccttcagccacatcacccatgccattcattccattgggctaacgcattttctccccccatctccggtagcattgcaaatatgtatgatctgctcaaccccgaacacttattacgggctcctttttcagctgggagaagttcttgggcaatgggacacaggacggcaaatttccatgagaggacaggagtccctgctgagaagaagggcgttggagaggggaaagagaacgctggaggctgaaagccagttctaggacccctagctggccctgggattttgggggtctggactgggcctgggaatcggggtgggggtgggggtgagggtaggaccaactcaggttgcagaagatagagcctccaaactagagtggccatgctcagaagagaagacaagcctggggtccgtgtgtgtgcacgcacgcgtgtgctggggtagagggcgttttcctgagctttgagtatggactgaagtcacttttagtagccaattagcactttgaccctggggaggatggcagctgttaaatgctggggcccagagtggcaccaagaatctactttgaagagggagcagggaaggctgtcagagaagagagagttttggtctgaagtttggagatgtaggggttctctgg

SEQ ID NO: 5112 - DNA, 732 bp, Artificial sequence
  DNA replication origin
cctctccttgagtcctcctcccacgcgcgcgtccccaagaagataagcatcagggcaccaacgtgctactcaaggtcctgggggcagcagcatcaagggaaaggagaccagcaggcagagcatggctgtgggtgacctgaaacagccaccactctctccccctggaaccccgagggccaagggagcaggagggcctggccctgagcagcctcccttctgcagagaaaggcaggcatgggtgggcaacactggggccagacagatgggggtgggctggtcttgggggctcaacttggagggcagggcactgcctgacaacgtgggcatcatgcagagggccgtgcgagggcagctcgtggaaagcgcccagagtggagcgctggccctggagagcaagggatgctcacgcacgctgcaacccggatgaacctcaaggacatcgtgctgagtgaaataagccagacacaaaaggcatggcctgcatgattccactcacatgaggcacctggagtagtcaaatgcacagccgggaagtagaatggcagttgccaggggttgcagggaggggagttagtgtttaatgggcacagggttttagttttgcaagatgaagggttttgtggatgggtggtggtgatggttgctcaacagtgctaatgtgcttaatgcctctgaacggtgcacttaaaaatggttaatggctgggcgaggtggctcacgcctataatcacg

SEQ ID NO: 5113 - DNA, 928 bp, Artificial sequence
  DNA replication origin
aagcataacataaatgaactggattgcattatctatcctgccaaaatctccacccactgcacagaacagcaagtaaaaaaaaaaaaaaaaaaaaaaaaaaaaggctcacttcacacaaattgtttcccaaccttcatatttacagctgacgatcaaaacatgggccagcatccggtttatctggctctttatttcttccatatctgatgtgcttcacttatattgagctataaattgtcattttttccaggggaaaaaatcatttcacgaatgctctgttgaataaaaccaggcagcatttttttgagtgaaaatgttcactttataaatgctgacttgttattcattgggttgttagctcatgaaaagttccaggacattcctcctaaaaggagtcacctctcagccaacagaaggatctggcagcagtgattaaggaggttttatgggttatatggctggaaggcagagcagaagccaagccacgctggggtccaagtctggccagagacgagattgtacaccccagcgtgacagcacctttcctgtctctcccaccacagatcccagcactgcaacgacacacaggacaggggctgggagagaggctgcaggggtgtgttgggctgggggagaggctgcaggggtgtgctgggctggaggagaggctgcagggggatgttgggctggaggagaggctgcaagggtgtgctgggctgggggagaggctgcagtggggtgatgggctggtggagaggctgcaggggtgtgttgggctaggggagaggctgcaggggtgtgttgggctgggggagaggctgcaggggtgtgttgggctgggggagaggctgcaggagggtgttgggtcccagggcctcctttccctgtgataatcctggaatcagtcaccatccatgaccaaggccag

SEQ ID NO: 5114 - DNA, 1156 bp, Artificial sequence
  DNA replication origin
gaacccgccagccagcccgcccgctccctgccgggggacgcagggggacccgaacgccgccggggcggggggaggggaaagggggagcacagggactctccccacccagcaccaaggaaagaaaacgcacctacaaggaaagttcgagaaaggaaccaaaggacgcgccaatctccgacactttttttagacgactaggtgtgggggggggggttgggggtgtcgctaactcaagtcagatgagctccggagctgaggggcaagggctgctctgttttcaatctctgaaatccccccgccctccccacctcccacttccctcctcggggagatgcctgggtcgctgttcccagggcgcccgcttctctggacgcccgcgcggaagccggggacgccagagaagggacgcgggggctgggtccacgcggaccctcttcccgcgggcagcgagcgcaggtgccgggggtcctgaggcgtcccccgccgccgctagccctcgtcgccatctgagcacacgctggcgagaaacgaagcagccttctaggtttggtgcatgtggcttgcagggtgggtttttgttttgttgtgttgtgtgttttagagactccactcgagccgctgaagccagatggaagtaatcagaacccaacaacaacagagaaagaaggaagaaaaaactcctcattgaattttctagccaaagtgtatatggggctgtgtgtgaaagaacttgcttaagcaagctcagtgaggagccctgggccctcaagccacaccacagcccggaactgggccgccaggcttggaggagaattgggggcagctggctaaagtgtcctccccacacccccgggcctgccaccctctccagggcccctgggcctcacccgaagagggtcttggggggaatttctggttttattcttcctaacgtttgtagaacactctaccaagtgccaggtgatgttatattttctttgtattattggactttcacagctctgtaaggaaggttctcttctcgtgtttttacaggtgggaagtctgatgctttaaaaagttaagtaactagtctaaggtcagagcactctgccatcctcccagagcttcgggtggttgtactgtaagttcagttaaatttgccctgttgggccgg

SEQ ID NO: 5115 - DNA, 1288 bp, Artificial sequence
  DNA replication origin
ttttcaaactcccatcaatgagacttcgaggaggagcgggcggcggcggcggctgcgactgcgaacgcggaggaaggccaggagccgcaggaggagccggaggaaagagcttgggccgcgcggcgcgccgcagcctcggggagccgcctgctcgccggcggtaggggctgcgcggcgcccgcccgcctctcggtcccctctcttgcctggcccgccccgccccggctggctggagccccggcacaaggcagccagccgagggtcgccgcgccagccaaggtgggatgggggcccacagccaccgcccggcgcccgagaggccacctgcgtgctagaggcaaacttttgtctctctcggtaaagttgcattggccttcttttgcttgcttttcgtgacgaagcgcctcccacctcggccaagcgcgggccgactgggatgctgcgccgtctcggggggtccctcggccgggtaccggcgcctaggccttgggatcggggccctgggcttcgggggactagaggctagtaggcgcgaccccgcctggggctctggacgagcagggcggggacgtaaggagagtcctggggcttggagctcgtggccagaggtcgatgttgcaccctctccctacctgggggagagcaccactcttctcggggtgcacagcgagccggcctccgcgcgccggcgggggtctgttttttcagggggtggagggtgggatcggaggctgggatgctccgaagctgccgtaggtgggcatgggagcgtgtctgcgggcgtactgagcgcggaggggctgcagccagccacttgagaacttcgaactccacttctccgcgctgcgcgtcccggagccctgcctttctttcttccttcctcaatccttcctccccctcgcccggcccggccgccccctccccctctgctgggctctcctcctcggccccccctctttgcctctcttctcctcctctcctgccctcggccctgagatccgcttgacttcccaaagggatccgcacgtaatcctttgccgggtcctccggttcccccttccacctcactttcatccctgcccccctactcatcgtctctccccacccccgacaatctctcaacaagtatatttgctgaggaatttgaaaaatccactactgcaacttgatctgtatgtgatggatggggagaggcgcggagagagttgggcgccaatcctattaagggtttagagaggggagtcttttccccggacggggcgggggcggggagctgggagggagcgtg

SEQ ID NO: 5116 - DNA, 1171 bp, Artificial sequence
  DNA replication origin
ttgcgtgtgtgagtgtgagcgcgcccgccgcgctggagagctgggagtccacccagctcggcgccttttcagcccggcggtaactgctgtcatttcctaggaaacccgacttttaccgcgcggggagctggggatggagcccgtgcgcctcaccctgggtgatcggtcgctgaggctctcggggacctcgagcccccccgagggtgcctctttccactaccttctcttttgtgtaattgttctgtggctcctagagttgatcccagctggaaaagtagacctgtccctactgtctggtcccgcgccctgggagtcttgtaggcgtccctctgtcccccagcccgggcatcccgctcggtgcgcgacctctggcacgggctttgcagctcggtggccgcagcggtgtcccgggccccctctccgccgctcttgccgggcgtgtgaaggtttaatcccgacagcttcagataaagggagcagttgtaaaacgctcataggctgtttgcagacgaggctctgggggatgtaggagaatttgaaagtaaacgtttccctcgcaagcagcataaaatagtgtttaaacaaatattgtattggcatgctcagggggctcggtgccaaaaagtaaagtaaataaactgtgaaatccaaaatatacagcggggaaagcggaggaataggcgggtttgtcacaggcctccctgatgagaccagtttgttccagccacctcacctgccagctttctctccgcccatttccttaccttgctgggagttcccttggctgggtttccctgtgtctggggacaggccctccctggggcctgggaacggctttgcagttgcttgtttagggggaagctcacggtgtggctacctgggcctgactccacagggacggggggcaccttggctatgcctggctgctttgagtttggaggctctttatttaggcttttcccagcttctggtctgtcctggggcagtcattctagaatgtggaatccagatccatcaggggccttctcttctttttgactatgcttcttgtgcctctttcttcatcgttcttgcttttgttttcctagacttgctgcttctctcttgagggttacaggaaattgtggagatgtttttccctgggattcgaattccactcaagcccagccat

SEQ ID NO: 5117 - DNA, 1221 bp, Artificial sequence
  DNA replication origin
agtttcagacgccaccaaaagtttggtcacggggcctctctcttcccggctcccgtggagtgctctcattcacttcgccagctgtaaaggcaactggaagcccctcctggggaagcgggcaagagggcaggccaatgggaaacggggtcgaggaagacccggggcgcccctcggaacccgcgcccttcccgggtgggagccgctcgcgcgctccgggcgcggctgtggggacctggcccgttggctttcttcccgactcgccacgagcagagtccggcctcccgccactcgccggcggcggccggtgtgcggctgcgacaatgtggccattgtttgggagctgcaaaccaggccggcgcgcaggtgggagggccgcagccgcgggcccggggcgctcggggcacggaatgtcccccggccgcggcacggtcggcgccgctcggacacgcggcctcgccagccagcgctccgcgtggcggaaaagccggcgcggagggagaggaaggtccagacggcgggggcggggaggaggcggagggaacgggagggaaagatgggaaaagatgagaaaagacagaaaagagagggagagagaaggcggaggaaacggaggagggggaaacggagggaaagagaagaaaggagaaggggagagagaacggagagggagagaaaggagagacccagagagaagagggggtgggggcaggacagaagagagagaaaggggaaggagaaagaaaaagacagaaaggacggacggatagctgaagggagaggaagagagccaaaggagggggacaggcggacatgtgtacaatagaggtgcaccacaagctgcccaggaaacctctgggaagagcaagagttcaccctgtttcctagagggaatggctccaaacccagccgagtcagcaaagcgtaatcacatcaggggctttgcttaattacaggtttgggctgggtctggaggaagggagatacttaactgtgtcccagggaaggcccagcactcaaatggtttgtaagtctgggaaatacaaacaacaccccccgccccacctcccccaagcccactgagccaggacccaggaggacatggcgggtaagggctgcggcgtggttgcatacaggctcaaccggcacagccatcgcggacaagctttcagagttcacttgggacaggagtgcagggctgcgcccgtgctgctcagcctggag

SEQ ID NO: 5118 - DNA, 1640 bp, Artificial sequence
  DNA replication origin
tgggccacgaggagaaacaagcagagtatcagaaaatgggaaggagggtttacaagggcccagggccaccatcaggctgtgcgtgcaaaaagagatcagaaactggtggtgggggtgggggtgggggggttgatcccctgtgggctacactgaggtgggacctggatgaaaatgctggaatatagcaggtgattgatgaaaaatgcattggatagcggggtggcctggtgggtggatgaatggataggtgtttgggtaggatggatgggttgatgagtaggtgggtgtttgggtgaggtggatcagttaatgggtgggtggatggatggataggtgggtgagtgggtgggcagatgggtaggtaggtgggtgggtcggtgggtgggcgggcagatgggtaggtgggtggctgggtgggaagatgggtaggtaggtgggtgggtgagcagatgggtaggtaggtgggtgggtgggtgggcagatgggtaggtgggtgggtgggtgggcagatgggtaggtaggtgagtgggcagataggtaggtgggtgggcagatgggtaggtgggtgggcaaatgggtaagtggatgggcagatgggtaggtgggtggttgaatggatggaagctctctagtcaggatatttcctcctgtcatctctctgtcactaccctcctccccacctcactcctctttcctccatagccatttcagtttagatctttgtgatgtgcagctgcccacagagtgggcagtggcttcagaggttaagatccacagccctgcacgtcttgggtgcatcactaagctctaagccttcccctggtctttaggctagcatggccaaaaggcatggaaggatgagcttttctgcccagctttccctccaccccatcttccataagccccggcccacacctttattatttctgcctgcccaggcagctcccaccttgatataaatcagagggcctctgggcccagttcaacccagagagggctactccctccaggcctgaagtgagccaggcacaccaaaggcccaagtcctcatcagaggcctttccgtctggattttatccccattccagccacacgaggcttcttcagacgcccctgaggaatgcagtgggacagccaacagagcagcccaggaaagcgctggtctgcagagccatgggagggcagtggtcaggcaagtagaatgacagagggctcgggactgcagtccctggagattagggggccctggaggttccggtgccatgagagtgttctgtaggcagctgagccagctcccttacacagtggctggtcccaggtcaaagccaggtccggacactgcaaagtctacaggcagtggagatcggggcggtgggcaggtccactttaaaacgaggcccatgatggtgagaaccccatccaaatctctacctaggagccgtcctgcttcctggcccgggcacagtcggcccaaacctgccataaatgggaggcctgattcccaacctggagccccacaggaaggagctagaaggtgcaacaaagggtggcaaggtgagtggcacagcagctctgatcccagaaggcgctgccaatgcccacattagaacctgcctgagctgctagaggtgggcaccccc

SEQ ID NO: 5119 - DNA, 1173 bp, Artificial sequence
  DNA replication origin
cacaaacaaacatagctctgctttgccccaccaagaggctgagcctgtggtttttctgtccaggtcctgaaacaccccagacagcaagaaaaccagaaaaaagcagctatgggctaggttaggacaattgaggtatctgcgtatgagagagattataaatgtgtacctcctggctaaagtatgtctttctctagcagaattgtgatttgaactgcttttgaaaattaaaatgttggtatgtgaggtgaaaatgagcttaatctggggtgttgaataattgttttcagccattgaacacaagtcccagcatagcatctacctagctacatggatggaaatgcaaatatccccccctgcccccaccagggagcaaaatgtgaaatttgtctttcttatttgccatccttcgaaggcagcaccccctgttaccatgataacataaccttgtgcacctccatttctgaatctgtaaaatgggggcaagtcactaaccttataagatggtcggtggaattaactaagcaaatttatctaaagcacctgacaccctttcaggcacacagaggttccaagatcttcaatgtgacgctttcaagaaaggcaactcaagttcagggcttctgaatcctactccaaataccctgtcatagtcaacacatccctgaagttccctacaccatgcctagaagcactgaggctgggcagtatctccttgtgaaaggcctggcccccttccccagggtcctgcttgaatgtcagaggacaggtggggaggaggatgggtggagaaggacagtggcagggaggacagtggggagagggcaggtggggggaggacaggtgaggggaggacaggtaggggagggcaggagtgggaggactgtggaaggtggacaggttgggggaggacagtcgtggggaagacagtggggagagggcaggtcaagggagggcaggtgggaggaggacagtgggggaaagacagtggtggggaggacaggtaggggagggcaggtagtgggaggatagctggggtggcgggggggaggacaggtgggggaggacagtgcaaggagggcagtttgggggaggacagtgtggggacggcaggtggggggaggatagtcgggaggacagtggggagagggcaggtgggggaggacagtgcggggg

SEQ ID NO: 5120 - DNA, 881 bp, Artificial sequence
  DNA replication origin
cccccttccccagggtcctgcttgaatgtcagaggacaggtggggaggaggatgggtggagaaggacagtggcagggaggacagtggggagagggcaggtggggggaggacaggtgaggggaggacaggtaggggagggcaggagtgggaggactgtggaaggtggacaggttgggggaggacagtcgtggggaagacagtggggagagggcaggtcaagggagggcaggtgggaggaggacagtgggggaaagacagtggtggggaggacaggtaggggagggcaggtagtgggaggatagctggggtggcgggggggaggacaggtgggggaggacagtgcaaggagggcagtttgggggaggacagtgtggggacggcaggtggggggaggatagtcgggaggacagtggggagagggcaggtgggggaggacagtgcgggggagaacagtgcggagtggcacggtcgccgggagaacagtggggagaacagtgggagaagacagtgggggagaacagtcgtggggacagtagagggcaagacaggtgggagaggggcatgtgggaaggagggcaggtggagctggcggcatcatgaacttttggaatagcaaagggagttggggctctgaatgtcagcccagcaaccaaagatagctggcaacgaatggtccaggtcttttgggatggaatgtcataggggacaactaaggccctgtaggttgattccagaatacactatccaggtccagggtgcagtggctataacttgcagatcaaacaattcacaccacttcaggagttgaacttggctgtgagtttacgtctggtctctggacccatgtggctgcctacagtgaacttgacctttaggggctc

SEQ ID NO: 5121 - DNA, 1420 bp, Artificial sequence
  DNA replication origin
agaacaaactcgagtgatcgccatcatccatgatggcatcgaagtcaatctggggggcctccaggagctgggagtccacagtgctggacacctggttgacccctggtgagggcaagggctggggctggatgctgtcctgacaggcctgtggctgtggtggctgggaccgcatgacctggcagctcccgaggttctccaggcctccatcctgttcgtacatgtggatctggccgtagtagtagagcatgctgtggtccggggccccacctgcgtcctgcggaggcggctggggaggcaccgaccccatgttgcccatcgctcccttgggcacagcctctgctgtttcctgactggacggcatggcagccatggcatggcctgtggccctggcgtaggccagctgctgctgcacagcacgtaccccacggtggcggccagtggggctgggctcgaggggaggccggggctgcactaggccaaagcctgctgtagccacccccatcgggcctgtttggggctccatgaagccaggctggcgggcaggcagaaggctggggacctggtggtagccctcctggctcatggaggctgccaggtgatggctctgctgtgggtagctctggactgggtgaggtggtggcactccagccagggctgaatcggggaccccaagttccctgtggcgattgcccatcgtggtggggtcaggtgccacttctgtctgctgagggtgccccagatgccctggcttggctggcatgttgctgcaggattgggggaactggttgagggccccactgatggtgctggggctcagctgggggtggacttggccatagcaggcatgggggctcatagtggtagtcatgccaggacactggctgcctgccactggctgtcgcagctgctgcatgtagtttaccctggggatgccctgggagggggctccgctgcggggctgcaggtgtggctgcgtgctgtccaggcccccagggctagcctgtaggccttgcggactgtagcccgggtactggccaaaggcaggcttctgctgcaccaccgccaggttgccctgaggaaagggtggaggcttcacctggctggccagggcgtctacggtgccggagctcacctcattccactgcacaggcatgttatttttgttcaggctggagggcgccccaaagcctaactggcatcctcccagcataggggcggaggggcccacgttggagtccgcagccaccatcctgcgctggccgtgcagccccgggctgggtagtctggggttgtcagagaagccagtgctttccgtgggatacacctgcccggtgccctcgtccagagcgccactggcgtgcgccttgatgtactgcaccacgtcgtctggaagcaccaggtcgtcctccggcagccccag

SEQ ID NO: 5122 - DNA, 754 bp, Artificial sequence
  DNA replication origin
tattctgcggcaaagcacctgtcctcctagagaacaggaagaagttcattcattggcttagcaggcgttctctgagcatttgcacaggccgggcagcagactaggggctggtgcaactgtgagcaaagtgtaccctggctgggtctttgtgaaccttccagggtggagggagaacgaggccttaaacaagcacacaaagcaaagtatcgttagaaaccaggacaagtgccacggaggaaagtgccggagcgacgggaaagctgggcaggggcctggccttgtctggggtcaaggaaggccatctctgacaaactaactttggatgtaagagctgaaggacgctcgggttatccgagtgggcgggggaggggcggcagtgggagtagggagtgaggttctgggatgagaggactgcctgggcaaagctcctggggccagctagagacgcatgaaatggagaagccggtgggatgggcagcgtggtgaaacaggaaccagaggggtcgcaggggtcatagcaccggggcccatgggtgacaagtgactgctggtccttgtcgtggatgcatgggaagcatgattgaatctcctggctgtagggcagagagcgatgggagggccaagagtggatgtggagggtgagtgagcgctctttacctggctctggggagaggcgagggtggcagtcagaagcacagaggcagtggcgttgccttactaggggatgggttgaccagggagattccagaaaagg

SEQ ID NO: 5123 - DNA, 1259 bp, Artificial sequence
  DNA replication origin
ctcttcccgtctcctagaataagcagacgctgcactgggacaagccccactggcaggggtggacttggagccgtctttccaggtggaacactgcgtatcttaaatgaggtggcccctggattgaatgctcctctctgcctctccagacctgccttagagcaggtggtcatcccgagctgccagggctccctaggctggtgcagtgcctgtcaggggatgcagggagctcatgggcctcctagcaatcaactcaactcagtgtgcactcactagatgctagccatgtgccagcaggcacggcgcatggcaggggagaaaacagctcctgcgccaaggagccctaggtcctgggaagaggggtgacaaatccacaaacacatacatgctttgtcacacccaagacaggtgccagatccaggaatcacgaaggcaccaggaggtctgagggcttccctgaggaggtgatgcgccctgagtcctgaagggctggggagccagccacgggaggtgggagggaaggctccaagcaggggcactaggattccccaagcccagaggagggaatagcaggtgtgtggttgtgatggggcagggagggccccagggcagcggggacaggaggcggggtttagactgggtggtaggtgggagtggtgcctgggaccccaggaaaggctgcagccaggaaggctctggatttgtgcccgaggctcctgctagcagctgacggaatggagagggcaaggaggtgggcagggaggcgagctgggaaacgccaagctgggcagaggcagaggaaaaggagaggagagaaactgagggggcagggttggcaagagatggggaggactgggtgggtgccaggagatggggggagagcagccacgcctcccctcccggctggggttttttcatgctggagttggagttggggcaacttttgtcctctctgctccttgatccagggcaaaggcggggggcggggagggggggcggtgaaaacacgacctagtacctctcagttttagaatcagccactatcttttctggttagaaatcggtggcgggaagcggctgggagaaataagatttagcctcccaaacaggcggcagggaaggaagggaccagaagtgctcccagcagctcatttgcatttcaaacagcccgtttgttttatctcctaattagcatactcaccctcagctgaaaatgagtccattaaaggagactctgctccaggctcagctcctcctttaaa

SEQ ID NO: 5124 - DNA, 1181 bp, Artificial sequence
  DNA replication origin
ttgcagatgttgctaaattgggtggtgttctgatcgttcagtccccggaagatagaatggtcccacatcgggcctccgagagatcaggctgggccgatgctaggccacaggtgctttagtgcgtgggtaatagcaatgcactgattatggccagcgtttgttgagcatttactgtgagcccaggaatcacaggtctggatttcagctactcacatgctgggggctttgagcaagagttttgccctctctgggcctggatttgttcatccgtgcaagataggggtccctcacagctgtggcattcatgagcttcagtgtttgggaccttgccaagtggaggcaggggccctgttttccatttcagagggtgatcagcgcccactgtccccgcactaagctctactcttttgggaagtagagagagtcttgagtcccggatcttggggtggggggatctgggggatctgaggggtctgggaaggcctgatgcctgaggatctgtatctgtgtgcagagtccaggggtctaggacattgaggggctttggggctgtaatggttcctaggagtgtaaagagtctagaaggatctgaagactgagggcagtttgtaggggtttgtagagtctaggggtctgagggtctggagggtaggagggataaacggtttggggtccaaggactagggtttgggaagctggaggtgttggggcctgggggatctggttctgagagttttggaggcttggaggttatggagtctggggctttctggaattcagtcttaagggtctgggactctgggatggtttgaggacttagaaatctagcatatggaaagtcacagggtgtgggggtgcagaattgggagatgaggagtctaggagacaggagtttggggagagtctggagtctcagtcttggtggtcttgggaaatctggagctggaagtttgaaggtctgggatctgacggaagagagccaggagctgaaagctgaacgtggccaaatagcgccacctagtgtccatttctccacattacagccagaaaggaggtggcctaggtgggcatttctggaaaccctgagggcagctgtgcagggagggggctgagcagaatctctaggcttacaaacttgcagtgttacgcccgctcctggcagagagtgtgtccatcttgtt

SEQ ID NO: 5125 - DNA, 1005 bp, Artificial sequence
  DNA replication origin
gcagggccaggacttggcaaggcaagggaggggccctgggcgtaacattgaaggaggcgcccactctggggctcttgcaagggcagggtcagcttacctacctcacttaacgcggccctgcatgtgggaccagaaaaggagatgcagccatctgccacggtcactcatcatggctctgccctgaggaatgggggtgggggcgccagagcccctggctccagctggatggactcatctgctcgtctatccgtggctagcctgttggacctttgagagcaggcgcccatggtctggctctccactgcatggcggaggctggagcagagcctgcacatagtaggtgcacaatgaacagaggctgagcccatgggtggatgagtgcgcacttactgttctcaggcgcatctgtccatccacccacctggtcagccacagcacgtgccataaaggccctactgtgtgctaagcactgtgctaagtgctaggcagacacagagagaatataaggcagacttgccccctggacccttcacagcagagagagagagtgtgtgtgtgtgagctgtgagtgtgtgtgtgagacagagagctgtgagtgtggtgtgagtgtgtgtgtggtgatagtgtgagagtgtgtgcatgagagatagggctgtgagtgtggtgtatgtgtgtgtttgagagtgtaagtgtgtggtgtgtgagtgtgcatgggcgtgcgggtgggatatctgggagtgtgtgtggtgtctgtgtgtggtgtgtgtgtgagagagtgtgtggtgtgtggtgtgtgtgtgtgaaagactgtgtggtgtgtgtggtgtctgtgtgtgtgtgattgtgtgtgtggtgtgtggtgtaagtatgtgtgtggtgtgtgtgtgtggttgtgtgtgtggtgtctgtgagtatgtgtggtgtgtatgtgaaagtatatgtgatgtgtgtggggtgtgtgtgtgaaagtatgtgtgatgtgtgtgtggtgtgtggggggtgttt

SEQ ID NO: 5126 - DNA, 1060 bp, Artificial sequence
  DNA replication origin
ggccgggccggcgggccgggcgccgttggacgtccaggggcggagagggggcgcccctgctgggccctggcctccccgctgtccgccctctggggactgagagacccgcccagcgtcccgcctagggactgacagatggacgccggcgggacccgacgtgcggagttgggggcccgctggggaggcgagcgcgcagagccctatgtctgcgagggctcctcccaggcggcagagagggtgcagggcgcgcacctgccggcccgccgcctcccctggcccgtccgccccctgcggccctcctctcccccgcgtatcggagaagcagaggaaacttcctgccagcagcctggtgcccggcccggggaagttcgtcccctgctctttgcccgtctccgccggggcccctctcccagcctcgcgccctctgcagtgcccttccttggacgaggggcgggcggcgggctcggaggggcaggccgccccacttcccgcgatggtcttgcgcgtgttcgcccgaggcccgcgtggttattgcccttgatggaaatctttcttctgctggagggatttgagtagtgcccttcagaggggaaagtaagtcctgcgtgttttgcacagttccccacaggcccctcttagcagtaggaccccgtgtgctctcgctcccggaggattgtttttccctgttctgctgctggccgggactaatgggcagtcatttcactttgtgaactcgcctgaaccagctttagcctgtccttatttccatcttagtcacagtttatgaaatgtgcctaatttaacccaaagggcatttgatatgggctcaaggaaaatgaatgatgaggccgaaggagtcacaggcattgacagcccccatactagagctacctttaagtgctagttttggccccaagaagttcccacttagatcttaaaacgttatttgtaattcctggctgctggtaggtatttgtcctccctgaagacatccccttttcctggaggcgggggaatgattgggtttagtggatgtatctgctgtttttattcatgggcc

SEQ ID NO: 5127 - DNA, 897 bp, Artificial sequence
  DNA replication origin
gatcccagcaccttgggaggctggggcaggcagatcacgaggtcaggagattgagaccatcctggctaatacggtgaaaccccacctctactaaaaacacaaaaaattagccgggcatggtggcaggtgcctgtactcccagctacttgggaggctgaggcaggaaaatggcttgaacctgggaggaggaggttgcagtgagccaagatcgcgccactgcactccagcctgggcgacagagcaagactccgtctcaaaaataaataaataaataataaataaaaaacaaaaaatacaaatacaaaagaaaaacccagcagccatgcagctttggggaagaggatagaaggggtggagtatgcagggagttgggagcgaagggctgggtaggagagggtcccagcggcatcttctccatgggatgctgtttgcagggggctgcggggggctgctggttgcgggtgggctgaagggggagtggagggtggggagagcctggcatcagtgtccacagactagagagcagcgagcagtgggagacgggcagggaagccaggcctggcagcactaggtttgaggagcccagggacagcgtggaggaggctcctggcagacgttgggggtgaggggtgaacgggaggggatgctggccccgtcctgtccccagccccatcatcctcccaggtgggaaagccgcctggaagcccacggttgtcgtgtgaatctttcgcgtggactggggggtgatagggcagagactttacatcggtcgttcatttgtccagaactttgttgagcgtcatgtgtcagaaacgggggcggggacctccatgatagtaataatacaggaattatgatggctgacatttgctgaggcttccggaagggtgtcagaga

SEQ ID NO: 5128 - DNA, 939 bp, Artificial sequence
  DNA replication origin
tcatggatgataccctgaaatatattttgtaagttgtttgctttcttctccctttcagggataccaatttttcatagatttggcttctttacataatcccatacttcttgagattttgttcattccttattctttttgtcactatttttgtctgactcttatttcagagagccagtcttcaagttctaagattctttcttcagcttggtttattctgctgttaatacttgtcattgcattgtgaaattcttgtattgtgttattcagctctgtcagatcctttaggttcttttttatgctggctattttgtccttcagctcctgtatcattttattttggttcttactttccttggattgagttttgctattctcatgaatctcagtgatcttggttcctatccatattctaaattctatttttgtcattcagccagctcagcctggttaagaactcttgttggagaactggtgtggttgttgggagacatatgacagttactggagttcttgcattggttttttgcttgtctctaagtctgggtgttcctttaactgcagtgtagattgagtacagtcaagtgactgatttgctggatgttttcacagggctgagtctttgtttagggtctttgaagctgacttcttgtttttggtttcagagggtggtacgttagtgaggtatttttggtgttgaagctttgggttgtgatctggtatgtggcacgtaggcatactggtcatggtacactcttgcttggttgtgtggctcccccgtatttcctcacagttgcagccgtgttccctctcaattctcaaaaagcgtgggtttctctccaccttgagtactggctatagatcgcagcttggcattcccgagctgcccattgcagctctgggacaatctcagtgtttatgttttttttccagtttgggggc

SEQ ID NO: 5129 - DNA, 866 bp, Artificial sequence
  DNA replication origin
attatttttttttgagacagagtttcgctttggttgcccaggctggagtgcaatggcgcaatctcggctcactgcaacttccaacttccgcctcccgggttcaagcgattctcctgcctcagtcttccgagtagctgattacaggcgcccgccaccactcccagcttaatttgtacgttaccactcccagcttaatttgtatgtttagtagaaacggggtttcaccatgttggccaggctggtctcgaactcctgacctcaggtgatccacccgcctcagcctcccaaagtactgggataacaggcgtgagccaccgcgcccggccctaatttggttattctttcactcacttgtgtgtgagctctcctgtgtggccccgtccgtccgcggcccttggagaacttacagcctgagggcagcatggctgctttaagagaccaaagaggcttgtgggggagaggcacactgggtggcgccggagggtcccccttaggaggtggcgttagcaccgaggcctgaaggctaaagagcggggtgtggagaaccgagcgcctgccgtccgctggaccggacaggcctgcacagtgttcctaggtctagaaagaaggacgcggcagtggggttggagcccagcacaggagggaagagctgcgaggcggcaggctggagccccatgactgtgtgtcaaagtatgaaactggggttttgtaaatgcgaggggatgggcgggtttaaagcgaggctgtggctgtttgcatctttcttttctttttttttttttgagacggagtctcgttctgtcgtccaggctggagtgcagtggcgcgattttggctcactcactgcaacctccgcctcctgggtt

SEQ ID NO: 5130 - DNA, 1059 bp, Artificial sequence
  DNA replication origin
caggagggaagagctgcgaggcggcaggctggagccccatgactgtgtgtcaaagtatgaaactggggttttgtaaatgcgaggggatgggcgggtttaaagcgaggctgtggctgtttgcatctttcttttctttttttttttttgagacggagtctcgttctgtcgtccaggctggagtgcagtggcgcgattttggctcactcactgcaacctccgcctcctgggttcaagcaattctccttcctcagcctcccgactagctgggactacaggtgcacaccactactcccggctaatttttgtatttttagtagaaacgaggtttcgccattttggccaggctggtcgagaacccctgaccttaagtgatctacccgcctcggcctcccaaagtgctgggattacaggcgtgagccaccgcacccggcctgtttgtacctttcaaatactattatactagtgagtaactgagtggagaggaagggtggggagtggattgccgaggaagcagggaggtgaggcgagagcgacagatcaagcacagctggtgtcaggggatagctgcggccgtgttctggaagccgtgaaggcggcccagggtgtgtgtgcccgaagagtggcctgtgggcctgaggtggaggccctgggagggagtgccaagcgaggccagcccacttcctctgacagacgtgcctcccacgctcacagtcttcgcctccttcacccctgcaccctccggctcagcgccaccgtcacccccaagggggcatccctgaccctgtagcaaagtcagttcttccagttaagcgctgtcttcccattgtgttttcatgggtaggctggattttcgggagtgagcgagcaagagcaatttgattctttttcagggctgcccctttccatgggcttgttcttgctccccccaggatgaaatcttggggagagctccgcacttgtgattgctcctcagatgtcagtcaatagaagcatgttccacgcgttcaaaatctaatatcaaatgtctcctctccccagctcagtgtctctggcagagaa

SEQ ID NO: 5131 - DNA, 809 bp, Artificial sequence
  DNA replication origin
cccggcacctcgggaggccgaggctggcggatcactcgcggttaggggctggagaccggccggccaacacagcgaaaccccgtctccaccaaaaccagtcaggcgtggcggcgcgtgcctgcaatcgcaggcactcggcaggctgaggcaggagaatcaggcagggaggttgcagtgagccgagatggcagcagtacagtccagctttggctccgcatgagagggagaccgtggaaagagagggagaccgtggggagagggagagggagggggagagggagaaggagagggagagggagagggaaaaggattcttaaggatacgcttaagtaaatcatagtgacggacacaaagtcgaaaacctgcctcttgaattttccatctatgcatttgttcagtacagttattaaatcattgttctttgcacaaaaacatgcctaacacatagtcccaggagttttctaagaataactgcatttaatttatgtaacatttagcaaagcccacgtacccagtgctgggctacataggaagccagctccttcaaccagaacagcccactttattcgtatctgcagtcttcctcttgtttcatctgcccctagccccaccttctatccccctggttacaatgaaagcttacttatagattctatgagacctcacccttgctagtcacaggtgattgatggggcagtggttggaaaactgactaaagctaagccaatgagaatccttctcctgccattgtatggcttgggaagcagagaaagttggtctacagagcagacagagggcagatgaacagt

SEQ ID NO: 5132 - DNA, 1266 bp, Artificial sequence
  DNA replication origin
gcaaccatccgatttctcaatcttttccccacctttcccgcctttctattccacaaagcccccattgtcatcctggcccgttctcagtgagctgttgggcacacctcccagacgggcccagagggcagaggggctcctcacttcccagtaggggcggccgggcagaggcgcccctcacctcccggacggggcggctggccgggcgggggggctgaccccccccacctccctcccggacggggcggctggccgggcggtgggctgacccccccacctccctcccggacggggcggctggccgggcagaggggctcctcacttcccagtaggggcggccgggcagaggcgcccctcacctcctggacggggcggctggccgggcgggggggctgaccccccacctccctcccggacggggcggctgccgggcggagacgctcctcacttcccagatggggtggctgccgggcggagaggctcctcacttctcagacggggcagctgccgggcggaggggctcctcacttctcagacggggtggttgccaggcagagggtctcctcacttctcagacggggcggccgggcagagacgctcctcacctcccagacggggtcgcggccaggcagaggcgctcctcacatcccagatggggcggcggggcagaggcgctccccacatctcagacgatgggtggccgggcagagacgctcctcacttcctagatgtgatggcggccgggaagaggcgctcctcacttcctagatgggatggcggccgggcggagacgctcctcactttccagactgggcagccagacagaggggctcctcacatcccagacgatggacggccaggcagagacactcctcacttcccagacggggtggcggccgggcagaggctgcaatctcggcactttgggaggccaaggcaggtggctgggaggtgtaggttgtagcgagccgagatcacgccactgcactccagcctgggcaccattgagcactgagtgaacgagactccatctgcaatcccggcacctcgggaggccgaggctggcggatcactcgcggttaggggctggagaccggccggccaacacagcgaaaccccgtctccaccaaaaccagtcaggcgtggcggcgcgtgcctgcaatcgcaggcactcggcaggctgaggcaggagaatcaggcagggaggttgcagtgagccgagatggcagcagtacagtccagctttggctccgcatgagagggagaccg

SEQ ID NO: 5133 - DNA, 854 bp, Artificial sequence
  DNA replication origin
gtctctgcccggccgccccgtctgagaagtgaggagaccctctgcctggcaaccaccccgtctgagaagtgaggagcccctccgcccggcagctgccccgtctgagaagtgaggagcctctccgcccggcagccaccccatctgggaagtgaggagcgtctccgcccggcagccgccccgtccgggagggaggtggggggtcagcccccccgcccggccagccgccccgtccaggaggtgaggggcgcctctgcccggccgcccctactgggaagtgaggagcccctctgcccggccagccgccccgtccgggagggaggtgggggggtcagcccaccgcccggccagccgccccgtccgggagggaggtggggggggtcagcccccccgcccggccagccgccccgtccgggaggtgaggggcgcctctgcccggccgcccctactgggaagtgaggagcccctctgccctctgggcccgtctgggaggtgtgcccaacagctcactgagaacgggccaggatgacaatgggggctttgtggaatagaaaggcgggaaaggtggggaaaagattgagaaatcggatggttgccgtgtctgtgtagaaagaggtagacgtgggagacttttcattttgttctgcactaagaaagattcttctgccttgggatcctgttgatctgtgaccttacccccaaccctgtgctctctgaaacatgtgctgtgtccactcagggttaaatggattaagggcggtgcaagatgtgctttgttaaacagatgcttgaaggcagcatgctcgttaagagtcatcactactccctaatctcaagtaatcagggacacaaacact

SEQ ID NO: 5134 - DNA, 1017 bp, Artificial sequence
  DNA replication origin
ccctgcgtggccccagggtccacattcctggagttttcctccccagtaaatagtgctgtcccccacttaacagcagaggcgcccaggagttcaggcgatgtgtccaaggccgaacagagggacagcagtgagctgctcaacctttccagctgcgcagccaggacacggctgggggcgggtggagatgtggcgcagggttagggtccgggtcccgggaagtaatgaccgagggcggtgaccactgtcttcagcttcccggcgggcttccctccaagggatccctaagcccgaaggtgcccggctgggagagcagaaagtgtactggcactgggacagaccgctggggtgaggcgggggcggggagagctggccaagcgcctgggcggggctggggcggggcctgggcggggctggggcggggccagggcggggccggggcacgaaggggtctgtgagcgaccccttgcccgctttccccgctgtacaatgggtataggtgtgctgccctttctactcccaatggctttgtccagagtgaccacactcgggaattaatcgcggcacactccctgtggttgtctccgggaaactcgcaggcgcctgggatgaaactgggctgtgtggccctgaagtgaggtcctcagtgtgcctctcaggctgactgaacccaggggggagccgtgcctggcttatggtggtccccagtcctgcccttctcctggcttcatgttcttactgaggccacgtgccccatccccaagacacccacctgccccatagagacgcctcctcctgcatccttctctgctcctgcaggactcttggggactccatccctccctcttcccagctctgcactggctaggtggggcaccttcattcagtgttgttacaacagcctcaggacttgcctctgtgcctgcagccagagagcaaagcagaaaccgatcttggccactcatcctgcctaaaccttctatggctccccagtgccttctgggatcaattaaacccctt

SEQ ID NO: 5135 - DNA, 1341 bp, Artificial sequence
  DNA replication origin
tggaggtccctgtggctggaacctgggcctccagcatacccgtccggggctcagtgtgtgagatttgagactgggcccctctgtatggggccgtaacagcttcattcatcaaatagctgagcaatgccgggtctggggtgcatgggttcagccattggagatgggcagatggggaaggggctgggagagcaaaatgaggcaggtggttggaagtgggaggaagagagaccaagcctcagcttctcatatgcagctccagggctccaggggcccttccttgtcaaaggaagcctattctccaggcttctaggcctgaactaactttgaactcagctgacattgagacatcagtcacttggaggctgggagtttattatcattctcttctttttgtcttgatcacctattcttctcttacttttcagttttctctcaggctcccttccccttttcttcataaagtggtgtagctgtttgagacaaatctttgtctttttgatgctaatgatgatattagtgctagcctttgtgttattgttggcagtggtgttagcgttggtgcaggtaagggtgctattagtgctggtgatgagtgtgcttgtgaggagtgtgctggtaatgatggtggtgatggctggtgttgctggtgacagtggtggtgataatgatggtatttctggggatgatgatgatattgttggtggtaatgagagtggtggtgttgctgattaggtggcaatgatggctatggtggtggtgagagtgatgatggtattggtggtgatcattgcattgttggtggtgttggtgataatgatggtggtggtgatattggtggtgatcacaacattgccggtagcgttgttggtcatgatggtgttggcattcctgttggtggttgtggtagtagtgacgggtatgaaggtggtagtggcaatggtattgttggtgaggatgatactgttggtggtgttagtgatggtgatggtggtgattttgctgttaatagttgtgacgatagttatgacggttttggtggtgatggtgttgttggggatgatgacactctaggtagtgttggtggttatgatggtattggcattgctgtgtgtggtggtggtgatggtggttaggatggtggtggtggcaatggtattgagattggtgttgatgatactgttggtggtgttggtggtaatgatggtgatttggctgttggtagttgtggtggtgatggtactgttgatgatgatactcttggtagtagtgttggtggtaatgatgctgttggcattgctgtgtgtggtggtggtggtgacatttgtggtggtgctggtattt

SEQ ID NO: 5136 - DNA, 1553 bp, Artificial sequence
  DNA replication origin
acgcccccgctgtctcctgtcttctcttggctgccctagatgtctttccctagacgaacctgaccgtgtcactgaccagtttgagggcctgagcatgctccttgccacctaaaggcaaaggcccttaaaagcccccaagttgcaccactgcagtgggtttcgtgtgagtggttgcctggtcaggatctggccttgcccacctcccacctcacctgagccacactccctgctgggtgcttggcatccggccagcacacccatcaggcccaggaggctgcccctatcctccttgtacatttgctgttcctatgcctggagtgtccagagccccacctttcatctggggagcacccactcattctttgagactctgcccagcttgctgatcccatatgggctgaccttgctcccaagtgcccccccaacacacagggcatatatgcgcctgtgtgtgtggttgcaggcatgtgtgtggggcatgtgcatgggagtggcagggcatgtgtgtgggaggattgtaggagtatgtgtatgtttatgtgtgtatggttgtaggagtgtgtgtgtttatgtatgtggttgtaggagtgtatgtgcatgtgcgcatggttgtaggtgtgtgtgtgtttgtgtggttgtaggtgcctgtgtgtacatgcgtgcatagttgtgggggcatgttgtgcatgtgtgcatggttggagtgtgtgcctctgtgtatgtcattgtaggtgtgtgtggtgttaggagtgtgtgtgtctgtgtgtgtggttgtaggtgcatgtgtgtgtgtgtgtgcacgcatagttgtaggggcatatgtgtgcatgtatgcatggttgtaggagtgtgtgtgtgtgtgctcgtatgtgccttgtgtggatgcgtgcatggctgtaggggcatgtgtgtgtatgtgtgcctggttgtaggagtgtgtgtctgtgtggttgtaggagtgtgtgtgtggttgtaggtgcctgtgtgtgcatgcgtacatggttgtaggggcatgtgtgtgcatgtgtgcatggttgtaggtgtatgtgtgtttgtgtgtgtgtttgtaggtgtgtgtgtgtctatgtgtgtggttgtaggtgcctgtgtgtatgcgtgcacggctataggggcatgtgtgtgtatgcgtgcctggtcgtaggagtgtgtgtgtctgtgtgtggttgtaggagtgtatgtgtctatgtgtgtgtggttgtaggagtgcgtgtatctgtgtgtgtggttgtaggagtgtgtgtgtctgtgtgtgtggttgtaggagtgtgtgtgtctgtgtgtggttggaggagtgtgtgtgtctgtgtgtgtgtggttggaggagtgtgtgtgtctgtgtgtgtggttggaggagtgtgtgtgtctgtgtgtgtgtggttggaggagtgcgtgtgtctgtgtgtgtgtggttggaggagtgcgtgtgtctatgtgtgtggttggaggagtgtgtgtgtctgtgtgtgtgtggttggaggggcatgcgtgcatgtttggggagtttgtaggagtatgtgttgcatgtgtgtggc

SEQ ID NO: 5137 - DNA, 697 bp, Artificial sequence
  DNA replication origin
cactgggcaaagcatcgggtccatagctgcccaggccagaaaggggacagaggagtgggaggatggaggacaacagcaaagccggaggagaaggagggagggcaggggacctgctaccaagacatcactcctacctgagatggggacttggggagggtggccccgggcgtggccccgccggccggctctggctcgtggttgactctgatctcgggggtggcggcaggggagccatctggaggcgaagggctcttgttcccttttgcaggcgcgttgtcactgtgggggaggacaagaaagggagcccagtgttggggggccaaggcacaggagacggaggggcaaatgtattgacgtctgtgtgaagaggtgtgtgcatatggaggtgtgaaactgtgtgtgtgtgtgtgtgtgtgtatgtgagagagagcaggagggtggggggagccaagggacctgggcttggggggctggaagtgggaagcctgcctcagaaacaggaacagcacaaggtgggactccaggctggaggtctatggtccccaggagtgcaggcaggtcccttggaaccatctgtcgcagagaccagaccaaccaccccacaggctccatggggtccaccagggcccatgctgacagcccaagatccacagcaggagaaagccagacatcctagaggcacagtgagtctcccaca

SEQ ID NO: 5138 - DNA, 637 bp, Artificial sequence
  DNA replication origin
ccggccacgtgggcctctctttggcaacggctgctcagccctccctttcccagatgtcctcagggtcctggagggctgcagggggaggtcgccagcatgggtgtccacatccagttcagcctctgtcttgcccggagccctggtcccagcgcactggccaagaggggtgggcaggaggtgggaggactggccatggggctgggctggctgggacgcccaacagaggggaatgacccgtgctgccccccaggccgaggaggagctcatcaaagcccagaaggtgtttgaggagatgaatgtggatctgcaggaggagctgccgtccctgtggaacaggtgaggcccagcacggtgcccagcctgcgtggggcagtgtccagtctgcgtgctgcggtgcccagtctgcgtgctgtggtgcccagcctgcgtgctgcggtgtccagtctgcgtgctgcggtgcccagcctgtgtgctgcagtgtccagcctgagtgctgcggtgcctgggccctctctggtttgtgcctctgatgagcgtgtgtggtcgctcgtgggtgggtatttctgagttgctgtcctgacctgcctgttcacctggcccccatccttccgcccttctgtagccgcgtaggtttcta

SEQ ID NO: 5139 - DNA, 798 bp, Artificial sequence
  DNA replication origin
tttgagaccagcctggccaatatggtgaaaccccgcctctactaaaaatacaaaaattagccaggcgtggtggtgtgtgcctgtagtcctagctactcgggaggctggggcagaagaatctcttgaacctgggaggcagaggttgcggtgggccgagatcatgccactggactccagcctgggctacagagcaagactccggtctcaaaacaaacaaacaaacaaaaaacaggctgagctttggcagagtgagggaagcacagttgggagctgagactctgtgtggcctggccccagggctgaaaccacagtgttgctgtctccactgtccctcagagtcatcctctctgggtctctgactctgggcaaacagtcactcactgctccttggacagaggggttgggcagagagtccagggctaaagatagccagtgctgcgggctgccaggtggctgctgggctgtgggtgtggagcagtcctgagctgggcctctgtctgcccccgggctcaggtttggtggggtggctggcttttcaggggccagggctggtagttggggtggtggttttaaggtcttgttcaaggctggggctaaggcagccagttctggatttgattggtgtgtggggatggcagggtgtggggaccaggaaggaatggggtgaaggtcactgttgttgggggagtgaattcaggaggctgcagtgggcttgggggccctgggaaaggagagagagaatggggcgtgggaagcctggaggtggagctttttcttgcctctgattctgtgagcccc

SEQ ID NO: 5140 - DNA, 2095 bp, Artificial sequence
  DNA replication origin
gctaggagggtgcccgatccttcttgccatctttgaagcctccctcctcctggctgtggtcactacgtcaagcctgtcctaagctccatttttggcctattgtcgagccctgggtagagggtggggaggcctgaaaacctgatggacccagccatgccctgggattgcagccctgggtgggcaccctgggctgggtgatgttggctagagacttcccagcccctggtctgtgctgttggtgactgagcactcttggtttgaccactctcctttccaaggtaacactctccccttctctcttggcttcggcaggttctccagaagctggggaaggcagatgagaccaaggatgagcagtttgagcagtgcgtccagaatttcaacaagcagctggtgagtgtgggtggcccttggccttagggagtttgtgaaaattcggctgccaggtgaaaaatggcacgagctgaatttgtggagtacgagagcttggaggagggtaatcagtgtgggctgacaagatcatgtaagacttcctagaggagggagcactggcaatgcatgctgggaaggaagagggatggggtatgtatgctttaggttcttggtaggagacatagaaacggtagttgggggagggggagggggagggtgggataggagcaggcaatagattgtggccagacttggggaaactttgcatgtcaggggcaagtgggagctatagaagcttcttgccaggagagtggcatctgcagcggttagcatgggggcggagcaggctgggtttgatttgggcatctgctgagcatggtgtgtgcctggctgtgtggcaggctcaaggctgggctgtggggaggcatccgcagccatctccaattggcctgggagcatttgagagagggctgagggcagctgggagggctggggagcagctgggagggcctgggagtagctgggagaggactgggagcagctgcgagggccgggagtagctgggagagggccgggagcatttgggagagggctggggagcagctgggagagctgggagcattctgggacaggaccaggagcaactgggagggctgggagcattctgggagagggcggttgggggcagctgggagggctgggagcattctgggagagggccagggaacaactgggagcattctgggagagggccggggagcattctgggagagggcggtggggggggcagctgggagggccgggagcattctgggagagggtggtggggggcagctgggagggctgggagcattctgggagagggccggggagcattctgggagagggctgggagcagctgggagggctgggagcattctgggagagggctgggagcagaggggagaggccccagggccaagttggccttggcttgccagaggggctcagcctgacaggcttccctggacagggattggggagcccccttagctgattgtcctttaggccagttatgggaggagtttcaaggcccaggtagaccctgtggcagggatatctactgcctctgtggctctgggcaattccttcccagagcttcttgggcctcagtttcctcacctgcagaatagaggcttgaacaagaaacctggtcttaggttctgattccatctctgggaagccccagggcatgtccctactcagctggcttcatcaggctgtgggttgctctgaaggacctttagggagttgctgtggccatgggccagagctgctgtgtttgacagagatctatgcaatccttgagatggggctgatattctcattttgcagatgaggcacttgaggctcagagaagttaagcacatcttccaaggctatgtagctggtgtgggtgttggggattgaaatccaggctctgtggcctttggttcactatcgagtttcctctctggagctgatcccttgtcctgagggcagctggctaggctggggagacaggttaggggtggaggtggtgggggccccttagaacaggctgagctggccgggcactgtagctcacgcctgtaatcccagcactttggggggccaaggcaggcagatcatgaggtcaggagtt

SEQ ID NO: 5141 - DNA, 1715 bp, Artificial sequence
  DNA replication origin
ttctgccagggtggccccccagtgccccgcggccaggcctgccccctctcccacccgctgcgcggccgccgggtggaggcgcagggacaggccggccttcccctgccaggcctggtggctgtttataaacaatgacttttgcttctgagacccgcgggctccctaaggatgcaaccacgtgattgctgggggatgggggagaggggggcgcctagagcttccccatacctccctcagagtcctactgctcatccctgtgtttcctggctaaggaggtgggtgggtgtgcattgaaggaagggccctcagccaagtccaggtttgcccagacccagctccccaaccccccaccccagggaaggaggaggaggaggaggaggaggaggaggaggagggattaaagccccaggaatagctggctgggggctgggaagacttcaggttgtggggtgggggggtggcagcacagatgcagccacccctgctccgggctgccatgactgggtaatccatctgtgtgcctggagcaggcagccctgggccagagcctgcttccttccctaaagggccagggagatgaatgggaagggaggttagctgagctgtgttccctgcccccttcccactggtgtcccaccccttcctggctccccaaggctcttggtgtgtctcctttgccctggttgtcttttctctgcagcagcatctttgatgtcattctcggggcagtaggcaagggctgtgtcccctccaaggaggtggtgatgtatcactgagctcctgagacaccatccctctctcttgagcccctgttctgtggccacgggcagttggctgacagttggtcagctaggcatgctggtcttggccaacagctgaccttgcccatgccgggcttcctgggactggagttgtttagtgttccagctgctctctgcctgccggagactagttagggaccctccccccatcagaaaccaaggcagcatgaccatcatgacaggcatccaggccaggtctctgaaagtagccttcccctccctttgggttgcaggccctgctcgcaggaagccccatgcctcaacccacagcagcctctgctgtgtgccttcctgtagagtctgtgccatcattggagggtcatcctcagtgtcttctgttggtgatcagtgccgcctctaactcccactgtcaatgaaactggaatcctagtctcttacaggcagccccaccactatacctaccttgccttggtgaaatcagtgggtaatagggcaattccagtttccctgtggctacaggaaggcgtttcctgagcaaggatggcaggagctgtgctgggaggctgggagagtcctggcgtcctggcgtaggaagaagggcccgtatcttgcatccacccttcacccccggccttcccacatccacttccagcccaaacaaacatccagactgtgagggtgacagtgtggtcaagggcagcctgcactcttgtagggtccccaagccagctcttttttgactgttgttacctgttgacccttctgcctccaccactggtctggctgatccctgagggcacggcagggcacatccaggtgtgtgcattgaggatgttacctggccccagtcggtgcttagtgaatgtttttgaacaagggatttgggcctgacgcaggctgatggtggattgatttgtgttgtttgttctctgc

SEQ ID NO: 5142 - DNA, 790 bp, Artificial sequence
  DNA replication origin
gctttgcaccttcgtggctcggctgcacagcagtggccggccctgctccaggctcttctcaggcgcgcgctccaggctaccccgctttggaggccaagggccgggaggctgggaggccaggtggtgaccctcagctctccaggcccatgcaggcaacctaggctgggccggcgctcggggcgagagggagtatgtccctctgcccctggggacactattcccccggactcccaaggctgcttctcgaaccggcacccacagttccttccttcccactgcttctccactttcgttctccgtgggccgaaggagggattgggtttcctttcccgagaggtgcctgcggcctggaagctcccgcccagcccggccccaccgggagcccagggctacgcaccccgcaaggaggtgccctcgccccagcaggggcttagcgtttccggcggccggggagcgggtggcggcactggctttgggagcccacggccgggtggggagctggcctggaggaggcgcgtggaaggcgccacaggaaacccgacccctcctcgcggagagctggaatgggggatggagccggggcctcccagggtgcccagagcgtgcaggaaatgcagagattgaggggcgggggtctgcacccggtcagttgtctatcccaagccacctctggtttattgaattggatcacgccagctgctgacgccacttcccctgacgactccaactctgaaatctgagattgcagaatctgtgtttctgccagggtggccccccagtgccccgcggc

SEQ ID NO: 5143 - DNA, 1058 bp, Artificial sequence
  DNA replication origin
ggggccaccctggcagaaacacagattctgcaatctcagatttcagagttggagtcgtcaggggaagtggcgtcagcagctggcgtgatccaattcaataaaccagaggtggcttgggatagacaactgaccgggtgcagacccccgcccctcaatctctgcatttcctgcacgctctgggcaccctgggaggccccggctccatcccccattccagctctccgcgaggaggggtcgggtttcctgtggcgccttccacgcgcctcctccaggccagctccccacccggccgtgggctcccaaagccagtgccgccacccgctccccggccgccggaaacgctaagcccctgctggggcgagggcacctccttgcggggtgcgtagccctgggctcccggtggggccgggctgggcgggagcttccaggccgcaggcacctctcgggaaaggaaacccaatccctccttcggcccacggagaacgaaagtggagaagcagtgggaaggaaggaactgtgggtgccggttcgagaagcagccttgggagtccgggggaatagtgtccccaggggcagagggacatactccctctcgccccgagcgccggcccagcctaggttgcctgcatgggcctggagagctgagggtcaccacctggcctcccagcctcccggcccttggcctccaaagcggggtagcctggagcgcgcgcctgagaagagcctggagcagggccggccactgctgtgcagccgagccacgaaggtgcaaagcggggccctgtcctgccccggccgggtgtggggagacagaggacgcaaacctaagagggcacccagagcgccggggaacgcagcctggggacctcgaagcccctcgaaagcgctcctctagaggtgacagcaccagatcctggcgaaggaccaggccccggggtcggaggatagggggacaggtggccggggctccgcggcggctgggactccgcggctgctggggctccggctcgctcaccttctcctgcgcgcgggtgagcttcttctgcacgttgctggcg

SEQ ID NO: 5144 - DNA, 1160 bp, Artificial sequence
  DNA replication origin
caggggccgctctcgcgcggggagatcttgcgcgccgcgctcccagcccccagccccggccgcgcgtccagaccggctgccgctccacgccgcgcacccgacagcggagccaactgacggaggcggagcgtgcgccggacgggcgagcgagccagcgagctagccagcgagcgacgcggggacagagggagggagaggggaggggccgggcctcaggccgcggtcggcgccccccgcccgccccctccggacaataagctgccttttaaagggccactccgggcgccggcaccgccaggtccgcgaggagggaggggcgcgcgcggcgctggggctgcggcgagcgggactcccctgacgctccagctgcaccgccccggggcggggactaatccgccggcctggcgtcttggtcttccccgcaagcagtaatctcctgcaacccaggaaaggagactaggtggaggagaggagtgctttcgaaatcaaagagaaagtgcggcgaagggggcgcggccctgaacagaggagccgcggctgctgggagaacgcgcccggagccccctccttttccaggggctcacctcccgcccggtgcccggtgcccggtgcccgacgctccgcctcctcccagccttcggccctcgggttttcgcccggataccctaggcgcctccgggacatctccacatctttgcctacggcgcctagcccagtaccaaccggtgcttggtcttcccgttcgctaaaaatttattataataacaacaacctagcattactgagtgcttactgtgtactaagtgacttgacaggcattatttcattcggtctccgtggccctagaggtaggtgctattactgttcctactttacaaccaacgcgccgggatcgaggaacgagatctctgcctctgtctcccaggtgctccaccaccatacgccgggttgtctcctacccccagcaggaaggaatgattagtgatcattattcctggagaagataaggttattgctaaccagctttgccaatagaccaatgacacttcttttaagttaataaatacgtattgagtctgctgatacccacccccattcagccctaaaacatgtcaggggctacagcactttgctgcccctggaaatttctaaagaactgt

SEQ ID NO: 5145 - DNA, 853 bp, Artificial sequence
  DNA replication origin
gggaggtgggggggtcagccccccgcctggccagccgccccatccgggagggaggtgggggggtcagccctccgcccggccagccgccccgtctgggaggtgaggggcgcctctgcccagccgcccctactgggaagtgaggagcccctctgcccggccagccgccccatccgggagggaggttgggggtcagccccccgcccggccagccgccctgtccgggagggaggtgggggggtcagccctccgtacggccagccgccccgtctgggaggtgaggggcgcctctgcccgggcgcccctactgggaagtgaggagcccctctgcccggccagccgccccgtccgggagggaggtgggggggggtcagcccccccgcccggccagccgccccgtccgggaggtgaggggcgcctctgcccggccgcccctactgggaagtgaggagcccctctgcccggccaccaccccgtctgggaggtgtgcccaacagctcattgagaacgggccaggatgacaatggcggctttgtggaatagaaaggcgggaaaggtggggaaaagattgagaaatcggatggttgctgtgtctgtgtagaaagtagaagacatgggagacttttcattttgttctgcactaagaaaaattcctctgccttgggatcctgttgatctgtgaccttacccccaaccctgtgctctctgaaacatgtgctgtgtccactcagggttaaatggattaagggtggtgcaagatgtgctttgttaaacagatgcttgaaggcagcatgctcgttaagagtcatcaccaatccctaatctcaagtaatcagggacacaaacactgcggaag

SEQ ID NO: 5146 - DNA, 1631 bp, Artificial sequence
  DNA replication origin
tggccgggcgggggggctgacccccccccacctccctcccggacggggcggctggccgggcagaggggctcctcacttcccagtaggggcgcccgggcagaggcgcccctcacctcccagacggggcggctggccgtacggagggctgacccccccacctccctcccggacagggcggctggccgggcggggggctgacccccaacctccctcccggatggggcggctggccgggcagaggggctcctcacttcccagtaggggcggctgggcagaggcgcccctcacctcccagacggggcggctggccgggcggagggctgacccccccacctccctcccggatggggcggctggccaggcggggggctgacccccccacctccctcccggacggcacggctggccaggcggggggctgacccccccccccacctccctcccggacggggtggctgccgggcggagacgctcctcacttcccagatggggtggctgccgggcggagaggctcctcacttctcagacggggcagctgccgggcggaggggctcctcacttctcagacggggtggttgccaggcagagggtctcctcacttctcagacggggcggccaggcagagacgctcctcacctcccagacggggtctcggccgggcagaggcgctcctcacatcccagatggggcggcggggcagaggcgctccccacatctcagacgatgggcggccgggcagagacgctcctcacttcctagatgtgatggcggctgggaagaggcgctcctcacttcctagatgggatggcggccgggcggagacgctcctcactttccagactgggcagccaggcagaggggctcctcacatcccagacgatgggcggccaggcagagacactcctcacttcccagacggggtggtggccgggcagaggctgcaatctcggcactttgggaggccaaagcaggcggctgctccttgccctcgggccccgcggggcccgtccgctcctccagccgctgcctcccgggcggcgctcgccggcgcctcaagtccttctttcaccctaggtcacttctgccccctgcccccattcttagaaagcgctggtcctcctgtctgtcccccagccgatactccatgcatggcgtgttggggtgctccttccctcctcggccctccctcaagctcaagtgtcacctatacagctgcaccccaggtctgtttcagggtatggggaaacagtctacatcctgcaggccttaggatgctcaactctggtgggtgtctcaggtaggtggcagacagacataaagagtcattttgcttctccttcccgtttgcggttggggacaacactttgaggcttcctgaagcctactgcccagactggggcagatgtttctcctgccttctgttctgtaggactgctgggggcagctccaggcaaggtcttctctgctctcagattctcctaatcctagctgggatttctgtcgccctctccccacccctggggattggtcctgggtctagggtctctcctgggaacctagaaacatccaagtttccttcacttcctctctgattcttaaagatcctgccctcaggatgctgttctggtcag

SEQ ID NO: 5147 - DNA, 1134 bp, Artificial sequence
  DNA replication origin
gtgagcaggggtttgtgactctgccactaagctatatggcttcatggatggatggatgaggggagggaaagacagaaggatgggaagggctggggagatttcagctgcctgctcaggaagtacctatggacaatgcccagcatcctacagccagctcaccaacccctaactgtgctgcaggactgcaggatgcctgtcctgacaagttggcctgctcatcctcttcccccgaaacccaggccctgagagtccccagcagcatgaaggcctcacccttcgtgcagcgatccatcggtcaccacctagggcagagcaggcccacctttgatgcagaagaaatgagatgaggcgggcaagtgcctgccagtgcccagtacaaggtgggaagtcagggaatcgtgagcatcagagaggccacgtgagcagttgccatgctggcccctgatgctggggtgggaggggcccaggcatccaggagcagagaagggtgtggggtgggagacgggggaagacggagagaggaggcatcctggggtgggatgcgcgtacaggaggacggggtggggaggaatgaggaaggaagagccaaggcctgaaaggggccatgcgggaagctggagtctgctgaccccatctccatgcccaagatggaacagacagggctggggtgaccaagggacttacaggaaggtctagtgtccatttccacccataggggaaggaagatttggaagtctgcccaaagattaatgctggaaccacatcttagccacagaacaggagctccaggggtgcaggaggggtgttagcccccatggggacggaagagaagcagggcaggaaggacattgctaggtcagtgtgggtggggtgtgggagctgagggatctcacctttgacctgactaactcccaggatgaccctgggagacactggagaagtcctggtctgaaagccagggcagcatcatgggcagcctctgagagcctcagacctgcctgtccctggtgcctaggtcaccagcgaggcctaatttgcagtggaggctggtcatggggcttgtggcaactttcccttcagcctttgaagtccctgacatactaataatctcctgcagaactgggctgcagctgc

SEQ ID NO: 5148 - DNA, 1809 bp, Artificial sequence
  DNA replication origin
acgccccggcggcaggagtacggagaagcactgctctgacaagttaagacgcaggaaacagcaacccaaagagcagcccccgaaacaaagttgctcagacaaacaagccgatgcagacgagcgccatggccctgctggcgcggatcctgagagccgggctgcggccggcgcccgagcggggtgggctcctgggcggcggggccccgcggcggcctcaacccgcgggcgcacggctcccggcgggggcgcgggccgaggacaaaggcgccgggcggccggggtcgccgccgggagggggccgagccgagggtccccggagcctcgccgccatgccggggccgaggaccctcgccaacctggcggagttcttctgcagggacggcttcagccgcatccacgagatccaggtagcgcgcgccgccccgggagggagccagcccgggctgctgcccagaaggctgacggcgcgggcgggagggcgccagggaggggcgcggggttggggagtcccagggaggggcggcgggcagggatccccgggcactgggcgccgcggtgggttgggggagctggactggggttgtccggttaaggttcgcaggaaggggcgctggggagaggacgccggaaaggcgatccggggtggaggaggcaggaaccgggagcggggcgggggcgttggggaggggtcttcgggaagcggaccccggagaggggcagcaggcagagggagctgaggaacggggccagaaaggaacggctgggaagaggcgggggaaatgggtgtctcgggaggtggcggcagggaggggtcccctggaggggccccagccgggacccctggggaggaggtagcggggaggggagtcagggatggagtttcggagagtggtagcccgagagaggcggcgggcagggtctccagggactggtcccggggagggacccaggcagggattgcctggttggggaacctggggagggggcgccgcgaagggaaaccaggaatgggactgcggggagggcaccagggctgaggtcccggaggaggagacttggggaggggcagcgggcgcctggtggacgccgccggggcctgggagtggagagctggcgggacccgcggagttggggctgaggggggctgctgcctggggccggcccgaggggagcgctaggttccctagctcctctaggctctgcggagctcggtgtccttaggtggccgagaccgtgtgtattcatttctagtcctttttgtattttgtaatggcgggggaagaggggacggaggctcggaggctcggggtgccgtaggctctaagccggagttgggggcgacacctggagttcgcgccgggactggaggcagggacgtgggaggaacccaggggtcccagccacccgctagggcgttggggccggcgaattccgcacgcttcccacttggagcctgagtgctgtccttcccacgcccacctccgttgcgcccttcgtggcaggggcactgcacccgagccgcggcggcgccctccgatgccttcgcccatcgtccgcctccccgggtgcccggcccagcacgcactgttatttctggtatgggggcttttggtgtcttccgagaacgcccccttctcctcccacccaggcctgtccttctgcccagagttccggtctttcgagacccttctccatcgaagcctcttctaactacccacctgggcttcagtcattcattcgttccatcagccattcagtcaatgaacgtgagggagaagccccaaccctcattaatggaaaaacgggcgt

SEQ ID NO: 5149 - DNA, 884 bp, Artificial sequence
  DNA replication origin
cacgccactgcactccagcctgggcaccattgagcactgagtgaacgagactccatctgcaatcccggcaccttgggaggccgaggctggcggatcacttgaggttaggagctggagaccagcccagccaacacagcgaaaccgcgtctccaccaaaaaaatacgaaaaccagtcaggcatggcggcgcgcacctgcaatcgcaggcactcggcaggctgaggcaggagaatcaggcagggaggttgcagtgagccgagatggcagcagtacagtccagcttcggctcggcatcagagggagaccgtggaaagagagggagagggagggagggggaggaggagggagagggagagggaagcatgcactcttttttaacttactgctttgccatcctaagcatgtggccaaggattaaaatatctaacaactagttttatataatttggaatttgaagcttagctctgtctagattggagatacagatttgagggttagtttataggtgatgtttcttcaagagactcaatagaatgaaaagagtagtagtgcaagaatgaaacttcaaatgacactggcatttaatagccaaacaaggaagaagagattctgaagcagactcaggtgagatgtgggaagtggggtgaagaatggagactcgtgagagtgcattgccatggaagctgtaatggatatttatgtttttagcctaccggtatttaaacaaccttctcttttcttttctttttttgcagtggtggggatgggatcatccattgtgttagtcttggcggaagtagcagtgttctgtatctaacctttactgtagtagaatataacaccaaaagtagggaagttggccaggcatggtggctcacggctgt

SEQ ID NO: 5150 - DNA, 918 bp, Artificial sequence
  DNA replication origin
atgagctgttgggtacacctcccagacggggtggtggccgggcagaggggctcctcacttcccagtaggggcggccgggcagaggcgcccctcacctcccggacggggtggctggccgggccggggtttgaccccccccacctccctcccggacggggcggctggccaggcggggggctgaccccccccacctccctcccggacggggcagctgctggacggagacactcctcacttcccagacggggcggctgccgggcggaggggctcctcacttctcagacaggacggctgctgggcggaggggctcctcacttctcagacggggcggctgccgggcggagggtctcctcacttctcagatggggcggccgggcggagatgctcctcacctcgcagacggggtcacggccgggcggaggcgctcctcacatcccagacggggcggcggggcagaggccctccccacatctcagacgatgggcggccgggcagagacgctcgtcacttcctagatgggatggcggcaggacagagacgctcctcactttccagactgggcagccaggcagaggggctcctcacatcccagacgatgggcggccaggcagagacgctcctcacttcccagacggggtggcggctgggcagaggctgcaatctcggcactttgggaggccaaggcaggcggctgggaggtggaggttgtagccagccgagatcacgccactgcactccagcctgggcaccattgagcactgagtgaacgagactccatctgcaatcccggcaccttgggaggccgaggctggcggatcacttgaggttaggagctggagaccagcccagccaacacagcgaaaccgcgtctccaccaaaaaaatacgaaaaccagtcaggcatggcggcgcgcacctg

SEQ ID NO: 5151 - DNA, 897 bp, Artificial sequence
  DNA replication origin
ccgcccatcgtctgagatgtggggagggcctctgccccgccgccccgtctgggatgtgaggagcgcctccgcccggccgtgaccccgtctgcgaggtgaggagcatctccgcccggccgccccatctgagaagtgaggagaccctccgcccggcagccgccccgtctgagaagtgaggagcccctccgcccagcagccgtcctgtctgagaagtgaggagcccctccgcccggcagccgccccgtctgggaagtgaggagtgtctccgtccagcagctgccccgtccgggagggaggtggggggggtcagccccccgcctggccagccgccccgtccgggagggaggtggggggggtcaaaccccggcccggccagccaccccgtccgggaggtgaggggcgcctctgcccggccgcccctactgggaagtgaggagcccctctgcccggccaccaccccgtctgggaggtgtacccaacagctcattgagaacgggccatgatgacaatggcagttttgtggaatagaaaagggggaaaggtggggaaaagattgagaaatcggatggttgctgtgtctgtgtagaaagaagtagacatgggagacttttcattttgttctgtactaagaaaaattcttctgccttgggatcctgttgatctatgaccttacccccaaccctgtgctctctgaaacatgtgctgtgtccactcagggttaaatggattaagggcggtacaagatgtgctttgttaaacagatgcttgaaggcaacaggctcgttaagagtcatcaccactccctaatctcaagtacccagggacacaaacactgtggaaggccgcagggtcctctgcctaggaaaaccagagacctttgttcacttgtttatctgc

SEQ ID NO: 5152 - DNA, 948 bp, Artificial sequence
  DNA replication origin
ctgtccgcagagtcgccactcccgcctcttctccggtctctagcgacgcgggcccgcggcttcctcctttcctgcccagttcccgcgggcctcggggttgcagcggctagaagtgccgaggagcgccaggaggacccggccggctgcgaggattcacgcgcccgccaccccgcccggcccgggcttcatgtgaaagagggacgggcctggccccaaggcccgcgcccgactcctcgcgcgcccctccggtccccgggggccctgcggcagcccccgacctggggccgcggtgacaggccgcgctggggcggaggggcgggctcggcgggggcggcccctccttgggcctgcggctctctacgtccctgcggagcagccggtacgtgcgtgtgtgcgtgcgcgcgcgcttgtgtgtgtgtgtgtgtgtgtgtgcgcgcgtgtgtgtcgggggccgcgggctgggcgccgggaggggggctggcggcggcctaagcgccgctccaggggcggagatttcgctgggtgattgcctagctgcgggagggcggaccttgggccccctgcatccagtcctaaagcccaggtcagcgcgaagtaggctgctgggctgtgttagctgtcagacacgtaccctgcagagattttagaagaaaggttgcatctggtcttgggatgaagcagaaatggtacatgcagtaagcgaaaaagtgcttgtctttgcactgtcacagtgtggtaatcttttgatgtaaggttgtttcccccttttctctttacggaatatttaggtagcacttagggtgctcttagtctgcgcccggcagttgtcatgcattatctctcttcatcttcccagctcaatgaggtgggtaaattgccccattttgcaggtgaaaacttgaggctcagagagattaaggcatttgtccaaggtcatgaaggtagtaa

SEQ ID NO: 5153 - DNA, 1128 bp, Artificial sequence
  DNA replication origin
ttacttagtaaacaaacacgtttttattgaatgcctgctatgtggtgacccagtaactgtggagaacaatatagatatttaagatttaaatactatcctccggcgttctgagaccctcctttctgtggcatacaggtcttagaatgttagattcaagaaggtcttagatttatgcataagtcccccattttttaaacaaatagaagcaaactgattttccactgacctctgtgtttctgaggtgcacatccttgttcctgtgactttgacacctctgttaatgggtctgtaataaaaattcctggaagaaacccagagatattttgacattacacaacagtttctccctcagtctctgccccacaagtgccagctcccttgaccctcagagcccaagttgggtagctccttacctctggttcgggtgagtcccattcccatctctctcatttcaactgctccagtggaaatgtggtctggaatatgcatgaaaggggtggatccagaatgtacgaagaaaccaagaagaagctgaacagggaagaatggtacaggaagttgtaaggggtatttaaggaaaggagaagagatggggcggaaaggtgctttctggatcaaagtagggtgaaaacgtcgggatgcaggttagtcacaccacggagggcctcaccactagtctgattaatttgcattttatcctgtgggagatgaggagcgaaagaaagggttttagactctagctttgggggtggggtgtcaactcatgtctctgggcttaagtttccacatctgttaagctggagaagtaatacttgctgggctaaccaatgtacacaaccagtcataaccaagtatcgatggtgataagaactaaacagaaaacacaaataacacttagccagtctccaagggggtggtttaaggttaggtggcaagcctgaagtaatttctaaagtccctcaggaaaaaaattctgaaacttgagccacaaattaagaggcagacggcttttctccttgcaaatgacctgccacacagtccgtcactgcctctgctagctctgctacccttgggccctgtccacagcccacgtgggagaccttttcacgggatctactcggatgtctg

SEQ ID NO: 5154 - DNA, 1046 bp, Artificial sequence
  DNA replication origin
tcctgtcccctgctcccggcagacccgcgtttccagggccctgtcctttacccggggcggccgtcctcccatgcccagcctctgcgaggccaccgctccccgcagcgccggtgtcacggccccacggagggccaggagcctccagggcgccccagcggcggggtggacgctgccaggcggtaccacggcagggcccgcgccgcccatcccgcgccacgcccccacctccgccggcaccgttgccagcagcccggctgcgagcccgccggcgcccggccacccgcccgctgcgtcgcctggcagcgcgcctgcagctgagtcagcctgtgagtcagcgccccctgaccgcgccgcgtctgggcccgggagggacgcagacggcgcgggcggggaggggggagacgaggagggggaaggcgggaaggacgcggagaggggcagggggaagaggagggggcggggcaggcaactcggagacggggagaggtggtgggggaggaggaggaggaggcagcaactcggggaggggatgaggagagacaggagcagaaggagggagggagggcaagcggggagaggtagaggggaggctacccaggaaccagctcatgctcagagtgtctcgaagtcaggcctgcacaaggttgcctgaggctcccaggagtgtggcctgcagcctggggcacactgtcttggtgatccaggttttggcctatggaaagtctacactgtggcttaaggtggtcctgttcaaactttatttcaaaaacctcaaccctgtatttatcttaagaagtacactttacatcgcaacaaggttccacaaaaccatatttctccctatacaggaatgcagggatgcactctttacactatctgttctgggtctttttgttgttggtggtggtttttgatgatgatgatgaaacactaaactgattttatgatctattaataggttgcaacctgctgtatgaagaacacctttgaaggtatcagacgtatctgtcttttctcttaaatacaatgcacagcagcaggaaagg

SEQ ID NO: 5155 - DNA, 1205 bp, Artificial sequence
  DNA replication origin
ctcctcttccccctgcccctctccgcgtccttcccgccttccccctcctcgtctcccccctccccgcccgcgccgtctgcgtccctcccgggcccagacgcggcgcggtcagggggcgctgactcacaggctgactcagctgcaggcgcgctgccaggcgacgcagcgggcgggtggccgggcgccggcgggctcgcagccgggctgctggcaacggtgccggcggaggtgggggcgtggcgcgggatgggcggcgcgggccctgccgtggtaccgcctggcagcgtccaccccgccgctggggcgccctggaggctcctggccctccgtggggccgtgacaccggcgctgcggggagcggtggcctcgcagaggctgggcatgggaggacggccgccccgggtaaaggacagggccctggaaacgcgggtctgccgggagcaggggacaggaaggagaccgcggctctcccagtcctgctgccccgggcctccagacggccagactctccccacaccggcctggagggggacgcgccgaccccagctgggaggggtggctggctgcgtagatccgtttgggccgcctgcctggaaaggcccaggtccgggcctcgtcctcctcttcacactctcccccgatctccaaccaccttcaccctcgcccccaccaccaccacccccagctcctcctggccgcctgcggtccagctgaggcccgcctcctccaggaagtcttcctggagagcctgtcctgggttaggcccgcccagagccacctggggcgacttatttcatggcaccttcgaccttgctctctgtctgttttgtgtctggcttcatcaccaaactgagcctcttgggggcagtgaccgggtcttaggtcttagttggcccttaggcgctagggctgagaagacttaggcggacaggagatgagactgtgtattcgacgacacactttagagatccagcccggaacacagccataccagattttaaaaaaagccaacataatatagcatgttaaaaattattgtaggccgggagcggtggcccacgcctgtaatcccagcaattcaggaggctgaggccggaggatcacttgagctcaggagtttgagaccagcctaggcaaccaacatagtgagactccgtctgtacaaaaatgaaaaaaaattagccgagcgtggtggcctgcaccta

SEQ ID NO: 5156 - DNA, 2033 bp, Artificial sequence
  DNA replication origin
gggcctgcccaccctgcacccagcgtgattcctgggcgatgtattgggggcttctcacctgcggggtgacactgcaggaggtcgtcccccagcttgtagccaggcgcacagctacagcgccgccagcccacctcctctaggcagtaatgcgtgcagccgccgttgtccagcgagcaattgaggaagctcacctctgcgggcaggggagggcgcgggcagctggtgctggtgccgcgcccccaacccggccccagccccgccccgccgcccgccagcatccacctctccccctcaccgcgctggcagaagcggccctcccagccgctgcggcagtcgcagctgaagctgccgatgccgtcgatgcacgtgccgtgcccgcagcacaggctggcgcacgggtgctccaagggcaagaccaagcactggtcaccgtctgcgacacaaggcggggtagggggtcagcggccagagatcccgaggggcgcgggcgccggtagtccagccggggatctagaacgcactcaccgacgtgcttggaccagaaggccagctgcggagagagcgggcagcgtcaggctcctgcagccggtgtgcggagggggcgcgcccgggtggggcagggcagcgggtgagcgggcaggggaggggagggcttccagacaaacagggatcgacgcccgatggtcgttggctgctaggagctggtgctccctgcccctcccccgccctccagcgccacccgcccgcgcccagcctccatcccacgtccctggagcaacaccctctccccatgcagctgcagtgctgctctcgcgactgtctgctcccacagcagcctctggcatgcaagggacccgaatccctcaccaagtcactcggcctccttccagtcccatcactccctctgcctgcgggctttgggggacccctgagcatcgcgcctttccctaagccagtgtttttcagagttgggaggatgggggcagagggtctgcgttcctaaccaggtaccagggttgctgctgcggcggctgctgctggtccaggaccacccagcccacgttgagacccacggcctgtgcctgatgcctgctccatcagagaggccagccaaggcctgctggggctgagagaccatgggtgaggtgggagcacggtggggacttgatgtgatcagatatgtgcctgcagaaagtcactgtggcgtctgccagggaggccactggggaaagaggtggtggggatggaggtccagatgggggtccagtcaaggaggtggaggctgagggcaagagagggtgcaggccagagggtctcctgccctgaaagcctccactggaaagcatccctggatgccttggaagggggcccaggccgtgcacaattttcaggtcctagtggctgaagcgatccccagggacagagcgggtctgagccttgtctcaggaagccagccccgttaccaagctcaccctactacctagggccacgtccacaggactctgggggctccaaaggactctgacccttagacaaataggacacagaccctgtcttccgaccccctgaacaatcagattttctccctttgatgtgaggcacagagtgagcgattttatgtggacagaagtgagtttcggtcacacacacaccctgatcagcagaggcatgggtggaagcagggtggtctttaggtcccctctttgtgaggtgggacggggaggcagtggtgctcagcagtggctggagggtggactgaaccacctacactgtggctggtgggagtccccacctagggtcaccccacactctttcctggagcttcttcctgaattctgtttcttgcagtcacatgtgcctggccgacatcatagggccagcatcctaatcgctccactcagccacccccacaactcctaagagggcctcagcattgagtccccacctgctcctcgaggcccctgctggttaccagctcgcccctgagcctcatcctctggacccatggtggccttactgtgtcatccacattt

SEQ ID NO: 5157 - DNA, 1077 bp, Artificial sequence
  DNA replication origin
gggcagacgccattttggccccagcggtgcttctaggaagtagaacgccggctcgcatgcctgcccgcccgccagcctgccgggtacggccttttccgccggggcttccaggtcaaagaattcgcctttgccgctaccgctttcttaccctccgcacccgttaagttctccggtcgggcggcagtctctgaacacttagccgcgccatccggggtcacaccgcctggaaggaggtgacgggggcggcgcggggcgcggacactccccgctgagagtccgcctgccatggactcggaatattacagcggcgaccagtcaggtggggcagggacctgggggaccgggctgggaggcggagcagttactcggcggggcttggcctggcaccccgcgggtgggggcaaggaggccccccgaaaccttccctcccgcgacccggcccgaggagggcaagagccctctgaccagctgcaagcgtcgaagctagaacgttggagaggggattctggtgggaaagctttcttctgaatcggcgaaggtttttgctgaaattgggaagtcactttcatatgttaagctcctattgtgtgcagggaaggagaggtgtcttctgttaagagagttttcagtagttgagtagttggagaatccaaggggcgttggggcgggggatccttcctagacttttcactgctagttaggagtggtttaatcttgcttgcaacaccggacgtaagtgcaggacccatgtttcagttgcatgcatagagtaaggaatgcgcttctggcacttactggtggtttttgtgcctttcctccaccttgagatcgttcctcttcctcctcaccgaagtttggtctcctttctttactgtttgtttattctgtaagctgttactggggcccactctgctggcacggtgcttggcacctgagattaaggataagtgaggcagaacctggtgtgggaaacacgtcgcatttgctttccctttgtgtgctagtcctgttggggcgttctgttacaaaagttcttaaatacaccataaataaatacaccctctatgtacccacaaa

SEQ ID NO: 5158 - DNA, 1099 bp, Artificial sequence
  DNA replication origin
gagaagtgactttgtgctgggtagatggtgggggccacgcctgggtagaggggtggagagcatggccttagtggggccatgggtggatgggtgagtgggtggatgggtggtgagtaggtggatggatgggtgagtgggtggatgggtggtgcgtgggtggatggatgagtgggtgcatgggtgaatggatgggtgaatgggtgggtggatgggtgggtgggtggatgggtgagagggtggatggatagatggatgggcgggtggctatgtgggttggtgagtggatggaaggatggatgggtgggtgggtgggtgaatggatggacgcatgggtgggtgggtggatgggtgctgggtaggtggaaggatgggtgagtgggtggatgggtggtgggcgggtggatgggtgggtgggtggatggataggtgtgtgagtggatgggtgaaggggtgggtggatgggtgagtgggtggatggatacatggatgggtgggtgggtggattcttgaataggtagatgcaccaccccacctgtggggccttggccgcaacccttgctggcctacagggtcagctgtcccaggacatggctcctgagacccacttgtgctctgtgcttccattcacagtctgcagactcaaataaacggccctccaccttaggaagccagttcaaacagtctctggaccagctgatgaaaatcctgaccaactgccagccttacttcatccgctgcatcaaacctaatgagtacaagaagccgctggtaatgacaggaggctggggcacagcaaaggagggaggaggaggaggctgatggcctctagggttgtggtcactccctctgccagggcctggctagcgttagagctgttactgcccctaccttacagataagtacactggggtaaggtgaccagactaggtcatgtgaaggtcagtgacctgcagagctttgggttgctgagacctcagttcccttagctccgccatgcatcttctgtgcgttcttggcctggctctttgctgctgtgagcctcagttttcccttctgttaagtcagacttgctcctgcctgcaggaatgcactgagggtt

SEQ ID NO: 5159 - DNA, 2014 bp, Artificial sequence
  DNA replication origin
gtaagcaaagacagcccccaccccaagcttcttcagcccttagtatttattgggtagaataagcagggaggaggaggtaacgattggtcagctgcttaactgatcacaggttcatattattactaacaggcttcaggtgtgccctgtagataatcacaagaaacacttgtgcctgggtcgtgactgccctcagcattccttctgggcggcagacgcagtttgtcagtttgccaacattctgcttttatgagaacagtttgctgtttgctcatatagcctccagtggtatactgagctgatcacgaccctcactctttcggcctgcatcagtcacccttgagacagcccacagggtctggaatttatgagtggtttgccattgttggggcatggagcttggattccatcctaagggaagtggggaaagttttaagcaagagaggatcttgatcatatttgacttccagaaagacctccctggcgatgtggcaggatggagcctggggctgggaggccaggcagggctgctacagagatccagagagagctgatgaggaattgcccaaggaacaggagccaagaggaggggacagaggaaacatgcaggagacagatggtagcatgtgggcactggttggatcgtgggggctggttggattgtggtggctggttgggttgtgggggctggctgaatggtgggcgctggttggattgtgggggctggttgggttgtgggggctggttgggttgtgggggctggttggatggtagaggctggttggattgtggtggccagctggattgtgggggccggttgggttgtggtggctggttgggttgtggtggccagctggatggtggtggctggctgggtggtggggggtggttgggttgtgggggctggttgggttgtggccagttggatggtggtggctggctgggtggtggggggtggttgggttgtgggggctggttgggttgtgggggctggatggtgggggccggctgggtggtgggcgccagctgagtagtgggtgccggctgggtggtgggggctggatggatggtgggggctggttggattggaggaatgaagggatgggagggctccaggatgacccccagatttccagtttgggtgaatggctgatggcgatgcctgtagaccacagaaagaggagggatgcaggaactcagagagccagccatgcacattgcttcccatctctgttcggtgatgtcgtgtcgcagttgacattggctttggtgggaacatgtacaccacagaaataagcaaatgctgtgaattgggcttttcttcttgggggagctggttgataaacatttaccagcacaccactgagtattaggggaaagatgctggcctctggagatgtggcatttgaggtgttaatgggccacttttataacatgatagaggcttgagtccatggggaaggacgcaggagagaaccgcccccaacacacccccaccaggagtggggaggctccacagaccgtgggagtaggaatggtcaggagatggggttgagtggctcccatgaagtcctcacttttctctctgctgtggaggggaggggctgcattcagggagggaggtggggcctcaaggcagagagagaaatgactgtaatcaccgtgagactggggatcccgcacatctgggagcagatgggctgtgcaaagggcgcggctgctgaggacagggctgtggctggagaacctgctgcttcctgaagccgagccccaccctaaaggaccgagagcacaggccatgggagaggaatcgagtagggatgcagagcctggtggcactgtcctgagagaggaggaggctgggcagggccccggcgctggagaggtgccctgcatatgggacctctcagaggtgcacaagagctgtgtgcccaggtacccctgtctcctctcctcctccagcccccagcctactctcctaatggtctgtgtctttcagggatgagatttactgcca

SEQ ID NO: 5160 - DNA, 881 bp, Artificial sequence
  DNA replication origin
tgcctgtaatcccagcactttgggaggccaaggagcactttgggaggccaaggagagaggatcacttgagcccaggagtttgagaccagcctgggcaacatggcaaaaccgtctctaccaaaaaatacaaaaattagccgggtgtggtggtgtgcgcctgtagtcccagctattcaggaggttgaggtgggaggatcacttgagccctggaggttgaggctgcagtgagctgattgcaccactgcactccagcctgggtgacagagggagaccttgaaaaagagaaagaaaaaaagaaaaaagagagggaggggaggggaggggagggggggaggggagggaggggaggggagggaggggaggggaggaaggggagggagggaggaaagaaagaaaaagaaagaaagagaaaagaagaaaggaaggaaggaaggaaaaagaaaagaaaaaaagaaaaaagaaaagaaaaaaggaaaataaagaaaagcaagcaaacaagcaaagcgaagtgagagagagaggaaggtaggaaggaaggaaggaaggaaggaaggaaggaaggaaggaaggaagggcagggagaaatgtgcagagtgaatttgctgcaggcaggaccccggctgttcggtgcagagccaggctcgcccaggatgaggaccctgccagggctgtggcccgtgcctcctcccctcctgctgccacaatgggcacaggcaggatgccagcttctcttatgcaaacctctctccagcctctgcttcagcctggctgtgcagggtggggatggtggatactgggaagccaggtgcccagaggagccccagaagctgtgccatcatcagcacccacctggccgaagcccgctggtgaccccaattcaa

SEQ ID NO: 5161 - DNA, 1834 bp, Artificial sequence
  DNA replication origin
ctcagctttcaggagctgcccccgcggcgcgaacaatatcctttctatttggagttgactctgctgccctttggagatcccagcgcgtaacgtgagctcgcgaccagcgcgggggaggcgcccacacgcccgtcccgtcttggtgtctggccccaggcggccgcgcctcccctccgaggtggtcccatagcccctgcaccaggcggcccgcgcccgcgacctcaaggcggctgccccgcgccatggcggcccggctgggtgcgctggccgcgtcggggctgtaccggcggcgccagcaccggcagagcccgccgccagccacggggtaggtggccaggggcggggcgggtggcggggacaatggccggaaagctgcggcggcagggcaggccttccctcggaaacccgaccggggccctccgacgccgtgggctctgccccggcgtcggatgggccctgggttggcgacagggtgggcgcgtgcgactttatctaacagggttggatgtcacctgtgatcagctctcctggcagggtgcgcccagggacctatgttagagacgagggagcctgtgtagcccccagcactgctttcagacgggggtgatcatgctgcactttatagatgagcagacaggttctgagcagagcagacacctgctggactcacccaccccaaacatggctatgctgtgatttgaacccaggttagactgactccagcagtggggttcaggatggtcctcagggcatctcagagaatgagttggctctggatggggaggttgggaggggcacggggatggtggtggagccacctcccctcactcttggggtcaggggcatgaggaggagctcctgaaaatgttgcctttgcagtgccgaggggccagcggggaagagagagcaatagggctgtgaccttggggtccttggcatcaaggtgacagatagggaccctggggaggaggccaaggctgggcagaagggctggggcgggggggcagggagggagccaggaacataagtcgcagaggtaggggagggcctggaggacccaggagcagaggaaggccagtgccacccagggcaagcatagcccactctcagctccttgtgtgtggtcagggaaggctcccagagtggcaattagaggactgagccatcaaagatatcttttgctgagaacagaagaggaaggagggcaccgagtggagggcgggaactgcaggccggcagcacggccatctgtggagtccctgctgcatgctgggctcccgcttgtgctggcatggcaggtctggggcagcctgctgttcaggtggggacccccagactcaggaggccaagtcactcacctgagtgtggcagagctggagcaggcaccctccctggtcaacctctggacagccctggatgcgtgtggcataactgtggtaccaggctgcgagtggccagggcactgatggccccaaggctgttctggagtgattttcacagtactgataccacagctgagatgcaggcaggacaggcacgatgatgacaggcctggggcagccctgagcatgcatgcgcatgtgactattcacactgtttttctttgaacttctggttcatgtcctttgtcagttctttgttgttagtgtaacatgtttcagttgtacctgcttaaaagaaaagccactagagcaaagagatatggcaagggcttcaaaaaagctctaatttcagacaggtttcatactgatttggagtctgtttctgatggtgtcaatgcatcttgtgtatagcagcccaggcagcatgttaattttttcttttttattttatt

SEQ ID NO: 5162 - DNA, 1229 bp, Artificial sequence
  DNA replication origin
gtctgctcatctataaagtgcagcatgatcacccccgtctgaaagcagtgctgggggctacacaggctccctcgtctctaacataggtccctgggcgcaccctgccaggagagctgatcacaggtgacatccaaccctgttagataaagtcgcacgcgcccaccctgtcgccaacccagggcccatccgacgccggggcagagcccacggcgtcggagggccccggtcgggtttccgagggaaggcctgccctgccgccgcagctttccggccattgtccccgccacccgccccgcccctggccacctaccccgtggctggcggcgggctctgccggtgctggcgccgccggtacagccccgacgcggccagcgcacccagccgggccgccatggcgcggggcagccgccttgaggtcgcgggcgcgggccgcctggtgcaggggctatgggaccacctcggaggggaggcgcggccgcctggggccagacaccaagacgggacgggcgtgtgggcgcctcccccgcgctggtcgcgagctcacgttacgcgctgggatctccaaagggcagcagagtcaactccaaatagaaaggatattgttcgcgccgcgggggcagctcctgaaagctgaggctggcgggggttgggtcccgctgggaggggactggtctgggaaggccccagacagcactgaggtgaggtccacagtggcggcaggacacccaggaggtctccggctgccacctgccaggaggaaagcctgtgcccgtggacacactgaggagggcagagtcagctgaggaggacagggaggacctggcgcctttaggatccctgccaacagttaggaaaccgaggaccggagccacacaggcccacattctgctttgctcccttctctgagaccctctgccacaaacatcaccgtggggcacccagaccagggcagagccgatcctctggatctggccaacaaatggtcaggcaccccaaaagaggtccttattttagagaaaaggcaatcctccagcttccaggggagcagacgcagagggacctggtggcaaccaccaggaaggcaccatgtaccccgcatttttacccagagagactggcaaagttacttgtgattcataaacacccgcggtaggcatccaaactgtgaccaaggtaagcctggtcagcagtacaataaagatccagagcactcatggaaatctttagca

SEQ ID NO: 5163 - DNA, 1384 bp, Artificial sequence
  DNA replication origin
aacacccccaccaccctcagccttgacctccccatcccaccccgccccgcgggccccaccctgccacccccgcccacccctctcgcgggcggagcggctcttggccttttttgggcgtctccctgctccgcggcccgggctggcgggcgggcgctcggctggcggctgcagcagcagagggagacccgcggcaaccccggcaacccagggctcggcgtcgctgccaccatgacgggaaggtaacggcccccacccacgcccccgggccggggaggcgggactgcgggacccctggccgaggcgcagctcgccctcgtacagccccgcggcgccacgatccccgctccgccctggcgcgtcggattctcgcagctgccggggcggcagcgcccgtcggggcaggggtcccccagcccccgcgcctcttcctctgggcgagcgcctgcagcggaaggtggagctcctgcccacccgcccgctgcaagatgggacagccgtctgctcacaaccgacgcccagggctgcgggagggggtcttgtccaaggtcagacaccaaccacgggcaaaaggttcaaaggttgcgtgcctcccccaacttccccgagcccgcgctgtgcgatccccgatcccggtgagtgtcatctctggagccttccgtttcctcctctgtaaacctggggtggtaaaaatgttaaaaatgttgaagggtatgttggaacttggccagagctgcgcccaagcaccagctgtgcaggggttggttggggacagggcgctcccctgggcctggcccaccctctgctctcaggcccctcgttgccatttcacagatgaggtcaccagaggccacagaggctgagccactcaggaggccagtcacaggtccaccagtgtccggccagtgtttgtccctgcagccctttctggaacctagctgggtacaagtgcatgactcaggactgggtgggagggggctgtccctgaggccctggtctcccccagccaagtcctggcagggggatgctgttcttcaggatcccatgacctggggctcttggggagccccagcccggagagtgacctgtggctttgctggggaaaggggcttggagggtacagggcagtgtccaggattgcagtctcaaatccgaggcccacaggggagctgcctctgtgatcgccattaaggctgtggcctggggtctcagggcagcccaggaaccaaaaatagcctgtaacttgtcactttgtaagtcctgccctccagacacacttccctttcttctccccaagcctctcttcccagttagctcccctgacttggagtcacctctaagccttggcccaggcccctctgcagtgagatggagggactcatccccc

SEQ ID NO: 5164 - DNA, 985 bp, Artificial sequence
  DNA replication origin
tggcgccgcggggctgtacgagggcgagctgcgcctcggccaggggtcccgcagtcccgcctccccggcccgggggcgtgggtgggggccgttaccttcccgtcatggtggcagcgacgccgagccctgggttgccggggttgccgcgggtctccctctgctgctgcagccgccagccgagcgcccgcccgccagcccgggccgcggagcagggagacgcccaaaaaaggccaagagccgctccgcccgcgagaggggtgggcgggggtggcagggtggggcccgcggggcggggtgggatggggaggtcaaggctgagggtggtgggggtgttggggaggtgacggtgggaggttgcgggagtataggtgggggtgggggtggcaggtgggggtggcggcgggtagggttggaggggtgggggttaaaggtggggctgacggtggggttggaggggtgagagtgaggcgggggtgggagtgggggtaaaagtaggggtaaaggtagagggtgggccccgctcccgcacagccccagctccagggacacggagcgcggccagcggcgggcgcgggtcaagtccttcccaacccgggctctgctcgccacctcctggattccgggcatagctttccttttaaagggagtaaagttataataaacgcgaacaagcacccccacccccacagccccgccgggacgccccgcccggcgccccctctgcagtccctgggccgccccaaccgcaaacgcgtgcaggagatggtaggcgtgggggcgatgctgagaccacctccctcccgggctttcctagcccggagttcccaccgcggatctgggcactgactccctcccgaggcacccgggaccgccgagtccacgcagtcccgcccccagggaggctaaagccgagaggcgtccctcttcagtcgcaaagctgctttccccgggaaattccgatttcatcccccgttgcgggccatcg

SEQ ID NO: 5165 - DNA, 936 bp, Artificial sequence
  DNA replication origin
ctgctcgccacctcctggattccgggcatagctttccttttaaagggagtaaagttataataaacgcgaacaagcacccccacccccacagccccgccgggacgccccgcccggcgccccctctgcagtccctgggccgccccaaccgcaaacgcgtgcaggagatggtaggcgtgggggcgatgctgagaccacctccctcccgggctttcctagcccggagttcccaccgcggatctgggcactgactccctcccgaggcacccgggaccgccgagtccacgcagtcccgcccccagggaggctaaagccgagaggcgtccctcttcagtcgcaaagctgctttccccgggaaattccgatttcatcccccgttgcgggccatcgccctaacttggcgaaagatatttcttaaacgacaaaaccaaatgcccagctcccaggtttccaggggaaccaggcacgcctctgtataatgaagcgctgagaagctaccattagaggcgttaagatggaggggtaatataaactatttagggaatctcttcggaggaaattttcaaacaaacaaaacaaaaaacccccgccctgcctaaaggcagatatttccagctggacagtggcgtgcagctcatctttggaagcagcccagatgtcacactgaggtttgggagctgggcggcctgatgtgtaaatgtggtgctactccggtcttggcagcagagaaagatgatctagaaatgacggtgtgaattagcaacccacaaataaactggtgccgttcagaaagatgagttgatagtatcctgcagttccacctgcagaaataagctgggaaaagacacctgttcctaagtggctggtattgtggagtgcctttgcagttgttactttttttttttttttttttttgagacggagtttcgctcttattgc

SEQ ID NO: 5166 - DNA, 1117 bp, Artificial sequence
  DNA replication origin
ttcctcaggtcaaggtgaaagacctcggcagaagaaaaggctggctgtggccccttccccttggggaggtgggagctgggacctgcctgaccttatgctaaagtccaacaatactggaagggaggacgcgggcatctgaagagcccctgcccaggatgtgcagatgcggtggctgcgagagctgaggccaggccctgcctggtgctgacacggtgaaatctaaagctcctgaaaagccaggcttctccccgtggggacaaggccatcgagtaccacagagaaatagggtttcagaacaagaaattaaaaaaaaaatcctttcagggccctgctgcatgtgtgtgagtctgggtcctttgcatctccatccacatcaacgtccactgtgaatggagcccagaaggaaggacaggctcaaaatgaaggatcgggagggagggagggctcagaaaggcatttgcctgttcttagaccacccaggaaacgagtgtgctaccgtccattatgcttgtgagtggaaagggtggagggtgatgggagctgctgcttcggggaagtcagggaaagacattttgaaaagtgacattgaagtagagacctgaaggaatgagggagggcgctgtgaagatatttggggtgaggaggaatgctctaggccgagaacagcaaggacaaaggcaccgaagtgggaacatgtttgacagatccagaaacaacccaaaggccaccagtcatagactggcatggagtggggagaaagcaggggagtagaggcagacaggtcccggccattccacagggcagcgtgggcgaggtgaggaagttgcttctgtgagtgtgaggtggggagcactgggggagtgacatcatctgactcagtggacaaaggtccctcaggccgatgtgtgaacaaccgtgaggaaagcatggaccaaaacaggggctccgtggtggggtgcaggggggcgcccagatgtggggttagtggtggaggagagaatcggctggtactggatctgtttccaaggtagagctggtgggacttgctgatggggtgcgatttcttgaggtgcggaaggaggggttagctacaggttttgggggatgaggaggggaa

SEQ ID NO: 5167 - DNA, 1016 bp, Artificial sequence
  DNA replication origin
ttcggcctagccgcgctctacgcaccggtgttgctgctgcgcgcgcgcaagttcgcgctgctctggtcactgggctcggcgctggcgttggcgggaagcgcgctgctgcggggcggcgcggcgtgcggacgcctgctgcgctgcgaagaagcgccgtcccggcccgcgctgctctacatggcagcgctgggcgccacgctgttcgccgcgctgggccttcgcagcacgctgctcacggtgctgggcgcgggcgcgcaggtggccgcgctgctggccgcgctggttgggctgctgccctggggcggcggcaccgcgctgcgcctcgcactgggtcgcctgggccgcggcgccggcctcgccaaggtgctgcccgtgtgaggacctcgcgccctcgccgctggggaagtacgcggagccagcgccgtcggagaccgcgccggccgagctgaggactgcacgccgctgtgcggaagcccgtggcgaaggccctgccctaacagcctgcgagtctaatccgggagcggctgctgccagcggaggcgacagcagcgttgggagctcctcgatgtcagctttttgtgctggacttggcacacgctctgaaaactgagattttgtcattgaactggtgacaggatgtgagacggttattagaagttgctttcgaagtaactgtggtcttaggttcggctgagtaaagaaaaaggatttttcttcgagttagctgctcttgtgatttttctcaggctgttttgtcattttaaaatccagtggtagatgtagcttagcgacggtagttttttgttttggctatactaagacttggaaattattctctccagtgtcagcgaatccagaagggtatcagattaaacaccgaattcagccactggacttttaaaagtacttaagatggtttatctcgggttttttcttcagttaacaaaatcataaatatggtgccttataacatgaaaggaaaattagttgtgtatttcacgacgaaagcgacggac

SEQ ID NO: 5168 - DNA, 965 bp, Artificial sequence
  DNA replication origin
cggccagccgccccgtccgggagggaggtgggggggggtcagcccccccgcccggccagccgccccgtccgggaggtgaggggcgcctctgcccggccgcccctactgggaagtgaggagcccctctgcccggccagccgccccgtccgggagggaggtgggggtgtcagccccccgcccggccagccgccccgtccgggagggaggtgggggggtcagccctccgcccggccagccgccccgtccgggaggtgaggggcgcctctgcccggccgcccctactgggaagtgaggagcccctctgcccggccagccgccccgtccgggagggaggtgggggtgtcagccccccgaccggccagccgccccgtccgggagggaggtggggggggtcagccccccgcccggccagctgccccgtccgggaggtgaggggcgcctctgcccggccacccctactgggaagtgaggagcccctctgcccggccaccaccccgtctgggaggtgtgcccaacagctcattgagaacgggccaggatgacagtggcggctttgtggaatagaaaggcaggaaaggtggggaaaagattgagaaatcggatggttgccgtgtctgtgtagaaagaagtagacatgggagacttttcattttgttctgcactaagaaaaattcctctgccttgggatcctgttgatctgtgaccttacccccaaccctgtgctctctgaaacatgtgctgtgtccactcagggttaaatggattaagggcggtgcaagatgtgctttgttaaacagatgcttgaaggcagcatgctcgttaagagtcatcaccaatccctaatctcaagtaatcagggacacaaacactgcggaaggccgcagggtcctctgcctaggaaaaccagagacctttgttcacttgtttatctgctgaccttccctccactattgtcccatgaccct

SEQ ID NO: 5169 - DNA, 1429 bp, Artificial sequence
  DNA replication origin
ggggcggccgggcagaggcgctcctcacctcccggacggggcggctggccgggcggagggctgaccccccccacctccctcccggacggggcggctggccgggcggggggctgacacccccacctccctcccggacggggcggctggccgggtgggggggctgacccccccatctccctcccggacggggtggctggccgggctgaggggctcctcacttcccagtaggggcggccgggcagaggcacccctcacctcccggacggggcggctggccgggcggggggctgacccccccacctccctcccggacggcacggctggccaggtggggggctgacccccccacctccctcccggatggcacggctggccggtcgggggggctgaccccccacctccctcccagatggggcggctggccgggcggggggttgacccccccccacctccctcccggacggggtggctgccgggcggagatgctcctcacttcccagatggggtggctgccgggcggagaggctcctcacttctcagacggggcagctgccgggcggaggggctcctcacttctcagacggggtggttgccaggcagagggtctcctcacttctcagacggggcggccgggcagagacgctcctcacctcccagacggggtctcggccgggcagaggcactcctcacatcccagatggggcggcggggcagaggcgctccccacatctcagacgatgggcggccgggcagagacgctcctcacttcctagatgtgatggcggctgggaagaggcgctcctcacttcctagatgggatggcggccgggcggagacgctcctcactttccagactgggcagccaggcagaggggctcctcacatcccagacgatgggcggccaggcagagacgctcctcacttcccagacggggtggcggccgggcagaggctgcaatctcggcactttgggaggccaaggcaggcggctgggaggtgtaggttgtagtgagccgagatcacgccactgcactccagcctgggcaccattgagcactgagtgaacgagactccgtctgcaatcccggcacctcgggaggctgaggttggcgggatcactcgcggttaggggctggagaccggcccggccaacacagcgaaaccccgtctccaccaaaaccagtcaggcgtggcggcgcgtgcctgcaatggcaggcactcggcaggctgaggcaggagaatcaggcagggaggttgcagtgagccgagatggcagcagtacagtccagcttcggctccgcatcttcctttctgttctaaaagccttttcatttctttttcttgccttattgtactgttccaaactttagggaggaggcatttctcctttactattaagtatgacataactacagattttttgtagatg

SEQ ID NO: 5170 - DNA, 812 bp, Artificial sequence
  DNA replication origin
tcctactcgctccggaacaaaggaagcgctctgcagggtctcgcggctcggcacctcacctaggcacatgcgcagatcgaacctcacagaggcccgcggtccaggcgcgcgtgacgtagcgccgtcccgccagtgcgtgatgaccccagagcgtgcgttcggtggcccataggggaagatggcggctgctcctttggaggagcgggattgagaggatcggggtggggagaccaaacaagagagacatttctggctctgaaggcgaacgcttcgctggccatttaggagctctgctcaaagccagacggtgagtgcggcggcgacacgggactgctcgcctgcagcaggcagcggcactctccgccattttcgggctcggccgttgcgtgctttgggggcctggacgggcgcctgggcacaggttggaggaactgggagaatcgacctcggggcggctgttcgaggcaggttcgagacttatgggagggggctggaggctggaggccaaccgggaaaagcggccatggttagaactaaggccctgactgggagcggtggcgacgagaagacgtaagtcaggccacagttaagacgtgaagtttggagggaaatgcattttaactgaggtttggggcgggagtggaaagaagtgggccgagttgaagtagttggttgaaagggtcaagggaagttaacgtgaaatctgcaaaacagctgaagacttagccgtgatgttatcgtggcttgaaatcggtgcttattataaggatgaggctacagcttgacaggcaaagccctgcttttttggaata

SEQ ID NO: 5171 - DNA, 1029 bp, Artificial sequence
  DNA replication origin
acctgagtgtccggctttgtttatctttgacacaggtccccggaacttcgcagtttatcacataaaataacccagttgcccaggcggtccctcccaaggccatggtccctcccaaggccatgttccctccccagccccacgccgcgctggggcttgcccaagccgccgctgaggcagggccttgggcgaagcgcgcataacgccaggcctgcggcgaccacgcgaagtggcgcgggggagtctggcagccccgagcccaacctttaggaaagatgagctgtgaggcgtcctcctctacgtcgccagcccgcggatcgctgccacccgccgccatcgccgcgccgcgccgcgcgccaccaccagcgccgccggaagcagaagcgcggagcaacggccgcggaaggggcgtggtctcgggaggggccccgaggggtgggcggggccgggagtgcgagccggacggggcgcagcgaggggaccggttggtgaggtcctggaggctccccgccaccgaggggcgccctgcactccctctcttctcccatgctcctcgccgcgcagacgtcctggggcaggtccctacgcctttctggacggaggaggtcagatgagatgcaggaacgcctgctgatggagagcagggcagccggctccgaaagtaccgggtccaatttccttcaccgacttaaacttctaaaattttattgatttgtggtggattatctgatacttctgagtacgcggacaatgatattcagaggcttttaccacacgtctgttggaacatttgggtgatgcgtagaaaattaagcaaatgacggccgggcgcagtggctcacgcctgtaatcccagcactttgggaggccgaggcgaggggatcacctgaggtcaggagtttgaaaccagcctgggcaacatagtgaaaccctatctctactaaaaatacaaaaattagccgggcatggtggtgggcgcttgtgatcccagctactggggaggctgaggcaggagaatcgcttgaacccggg

SEQ ID NO: 5172 - DNA, 1499 bp, Artificial sequence
  DNA replication origin
agaaactcatttgggaagggtgaggagccagaccttacaaactagaaatataaaggaaagatcatgccacgccaccacctagctcactctaatgggagtatgaaaaacaaacttgcctttgcatatttaaattattttaaaagggaacaagcggaaaaacttcatcaacattaggaccccctcatggaagtagaaaaatacaaatgaaaacacacctacatcccaaaatcctagcacatgcctaaaatcaaaaactacaacgatgctctactctaaatatgcccaagataatactcactgaaagcagaaagtttgtattgccagaggaacagctacaacagaggaggggagctattttgtctctggaatgaattttcttccttccgattccattccttcttcctgtacctaagacggaaatgcaggtgcagtgaacaaacacccaggtagtgcagaggtaagatagatacggtttctgaaaaatcacaactcgacagagcaatttcgggggggtggggggcacagcaaatagctagagaacaggctctccttatttcaaaaccttgcaaactctaaatctgaggcagccgtgaagtcccatgccctgaatcatctcatccttagcgtcatcagcaagaagggaggacactgagaatcaaaggttttatttattgaactcgagcatgagacgcacattaaaacttccccaccacagatgcagagcaaaagttgctctcaggccagaagagaccatttaaaagctctccgccggtttcagaacacaaataaatttcccaatcctctgcaaagacagaactgaagaattactggacagcacgccagaggcagggacctgagggcaggccatcttgctatgccgggaggagacggtcactgttgctaagggtcatccatccttagtctcgaagaaatctcttcctgatctcttcaccaactctccccactactagagaattgagctactcccaaagatgtaagtaaacaggagactgtttacatctcctgtgggtgggagaggccccacccactctatcctaggagagggcagtgaaagaggataaggcccagagggataagggtgagggagcatggcaaggagaggagttcagatcaggacagggaatgtaggagggcaaggagtgaagggcacaacccacagcctgggaaagagaggcatgaaacccagcgtgtcaggtggacggatcatggaatggggggccagcggaggttaaggaaggagggcccaagagtaggggtgcgaaaaagagaagaggaggaggagaaagtgcgcgtgtgaagagtgttaagaaaacgacaggacagagcggggaggggaaaagcgggccgagggacagggtgaaaggtgagaaacgagggtatgaggaaagagggtccggggcgctggggagttggggagacgatggagcgacgggtagagcagcttgggccgagccgcgggggtggaatccagacgccgg

SEQ ID NO: 5173 - DNA, 2218 bp, Artificial sequence
  DNA replication origin
gaaaatcaaaagacaacttccacagtctgcagctatcacatctataatacttacggtggcagtaccccatgtcctgcctctgtctgttcctctagacaagctctatgggctcctctccaacatgccctgtctcctcctctcttgtctattcaagaatgatgctctagttcttctccccctctctcctacggcctcagctttttcttgttagtagatcattcacataaacagtataaacatgccgtcatttcttctgtatgaaatatccttctgttgagctcactttgctctactatctaccaccctaaattttttttttttgctcttctttgtaaaaagaaattgtctgtgtttgctgtgtccagttcttctgtccgtctttttttcatcattttcatggaagtatatagaaaatgtcacagacgcatgtatagtctcaaaataaacagtgtccaaccactgtataggtcaagaaacaatgttactgtaaggtcagccaagagaaaggatgaggagacccaaagtcaggcaagcaagctttattgagctgcttggctgctccaccacagttagaggaggcagccccccttacagactatagcagggttttgtagggccagaactgggtcggggtcggggagctgagtcgggtgcaagaggactgggtcggggtgggagagctgagtcgagggtgcaggaggactgggtcggggtaggggagctgagtcggggtgcaggaggactgcgtcggggtgagggagctgtcgggggtgcaggaggactgggtcggggtgggggagctgagtcgggggtgcaggaggactgggtcggggtgggggagctgagtcgggggtgcaggaggactgggtcagggtgagggagctgagtcgggggtgcaggaggactgggtcggggtgggggagctgagtcaggggtgcaggaggactgagtcggggtgggggaactgagtcaggggtgcaagaggactgggtcggggtgagggagctgagtcgggggtgcaggaggactaggttggggtgagggagctgagtcgggtgcaggaggactaggtcggagtgcgggagctgagtcgggggtgcaggaggactgggtcggggtgagggagctgagtcgagggtacaggaggactgggttggggtgggggagctgaattgggggtgcaggaggactgggtcagggtgggagtgctgagtcgggtacaggtgtctttacccgcatcctggagatgttttttgccagctttgttgtgcgaggtgaacagacatgttaaccgcatcctgtaactggacagttactggaggggtcagtgaagggtggggtgggggtttgtcttttgccctcgggtagctgtgaggagagtgcaagggactgtattgtaaggcctgtgggaggggaaggaaatggtctggtcgtggtgaccttaacagttaccaacatcttttcccaaaggtaactaaccaatggatagatagaatcatatgatgtgcatttttttgtgtgagtctgactttcatcactcggttttatgtaattcatctgcattattgcctatgaatttgttgttgttgttgttgagatgggggtctcactctgtctcccaggttggactgtggtggcgcgatcacagcttactgcagcatttacctccccaggctcaggtgatcctcccacctcagtttttgtatttttagtagagatgggatttcaccatgttgccccggctggtctcgaactcccgggctgaagcattccacctggttcagcctcccaaagtgctaggattacatgcgtgagcacctggccttgattgtaattttttaattgtataaaataccatgtataacagtaccgtgttttatccatggttatttgggttgcttccatgttttcctgtaatgataccctgaacatttttgtgcatgacttttgattcatgcatgagtacgtttctgttaaatactgagggatttgctatgtcatagggtgtgcttgttttaaactttcatggagcatggttttctgcgtggttttacccatttacactctcaccaggagtaatcattgtttcatcctcaccaacacttgttctgggcagtctttgtgagtttggtcattctgtcggtttatagtgatgtttcgcattaggttcttttttttaaatttgtttttggtttggttagtttttggccagtgttgg

SEQ ID NO: 5174 - DNA, 1177 bp, Artificial sequence
  DNA replication origin
cccagggagtttggctcctggagcagtttaaagtgactctccacatccgggccctgcgcccgccgctttcagaccctggctgaggcggggcctccccgctccccgcccccttcgccgggggcgcctgtcttcctctgccattggctcagcctcgaggggtttgggctgccccggccaggctcgcgcctgattggctggcagtcggcgggagggtggggcgggctctgaacgtgcaggtcgctgtggattggtcctgggcctccactgacgcgtcgggcgtggggccaatgggcgggcgggggaggcaggggcaggttcgggggaagaggactgcgagcacagcggcggccgggtggcgggggtgagtggggccagcggggctggacagcagcgggccccgggcgccgccgccgcgatccctccccgcgcccgccgagcacatcgccgccgccgagatgggccctccgcggcacccccaggccggcgagatagaagcgggcggtgcgggcggcgggcggcggctacaggtaaagaggcacagtgctcgtcttgtggtcgggtccccagatcgcccgtccgcacccccaccccggagacgggggtctcacactccgaggtgtctggaaaccggcgtcctccggtctcagcgggggcttcgcggtggggtggggttgcgggcgaatcgggagatcgcttggctcctgagggaaaagtggggggcgattttagggaagatggagaaggtgtagggtcctctggctctgtgaggggatctgtggaagagaaggaaaaggaaatccgtaaatggaggcctttgccgaaaagcattggagaattccttttgcatcgggtctggatgtaagatatcggatcttttcttagggctggatatcttcctccgaatgttcctatgacatactaatcacagttctgttcaccttggtgtgagatttgagtgtttcaaagagacatgccattttccataaaactttacacagagaaatacacatgcattgtggtaatacctgtcatgtgactcttgtacaggattcaatggtgatttttttagcatagcaatccacaagtatttatggagggtcatagtacccgccagctccgtataaacaatatttgtagaaaacttaggtagtttagataatgtctgcatttatattga

SEQ ID NO: 5175 - DNA, 942 bp, Artificial sequence
  DNA replication origin
ctggtactgtaatgaaaataaggtctgctcaacacagtaaacgtttcctctcttctttaaaactgcgcagtcatttggcctttgtgtttaggaagggcagattgatagagcacaaagtccaaccccttcatctagcagaagctgcaaacccagacagaggaacgagggctttacctgagtcttgtctgctgctggggctggcttcgggttgcatccagttctttggattctgaggatccaaagcacccaggtctcctccaggtcctcaacctctgggagctgccccaggcagaacttggcaggcaggcataacaggtggggtgggagggggaacctcaaggcaagaaggtgtcatgagacccctgggccggcagagttccttaggagggtggcatggactttgcattttgccagttctctgagctcctactccggggtggatatgcattgaggatgtagtctctgtgtgatgatggggagggcggggaggggcacctggtgcctgtgaaggcgcaagagagggccctaaggtgcaggaccaggactaagctgctacaaggaggtggtgcttaggttgaagcctgaggactaagtaggggcgaggggtgggcagaggggaggagcttgagctagtgtttttgagggagctgcatggaagcctgcacgtggccaggagagggggaatgggtttgatcctgggggcacaagaaggcccttcaggggtttaaactgggtgctggcactaaatgggttttttcttgtaataaactttgtgttgaggtctgtagcacatactgaaaagtacataaacacacaccttgatagtttttcacaaagtgaaagcactagcatatccatcatccagataaagaaaaggaagttggagtttattttaacacttaaacatctgattacagtctggcatccaggaagggcagagca

SEQ ID NO: 5176 - DNA, 1489 bp, Artificial sequence
  DNA replication origin
ccgagatccgagccccagggaccccatggcactcccgagaccgtccccggaaaggtcgcgcggccgtcgccgccgggagagcgaagggcagggcgggcagggaacctggccctgtgtgcgagtggggacatcgtctattggtcttctttttctgcacctttcccatcttctaaacggggcggccctcccgagaacggcctcctaaggcagtggggcttccagcgtcccgctgtgctccccgggagggttggaggctgcagaggctgacgcggggcagggcggcccctcagggaacccaatgctggcgaggaagcgggcgctcgggccgcgccgccgggctcggccttcctcgtccccaagctcgcctggaagggaagagcagggaggtagagcgcaaggtgactccgccacagccgccgccgcgctcccgcctcggcccgcggtggtcgcgcgggtgaccgggcgcagccccttgggcctcctctcccctgcacaaccaagccggccccccagcctcacgcgggaggagagaggcgcacttgtggggtgcaagactccccaggcagcaacatgagagtgcgccccagaaacttccaccagcaccagggagagtccggacggccgcagctaggagttcttaaacgaggcgaagagaccagaagccaaaggaaaagactgatttttagccgggcgcggtggcccacgcctgtaatcccagcactttgggaggcgctgtggcaggaggatcacttgtgcccaggaggtcgaggctgcagtgagctgtgagagcgcccaggctggtctccaactcctgggctcgagcactcctcctgccccggtctcccaaagtgctgagattacaaccgtgagccaccacacctagccccaagttctgttgtttaaaaagacaccacagggctgggtgcggtggcacacacctgtaatcccagcactttgggaggcggaggccggtggatcatgaggtcaggagttcgagaccagcctggccaatatggtgaaagccggtctctactaaaaatacaagaattagccgggcatggtggtgcgcgcctgtagtcccagctactcgggaggctaaggcagaatagcttgaacccgggaggcggaggttgcagtgagccgagatcgcgccactgcactccaggctgggtgacaaagtgagactccatctcaaaaaaaaagataccacagggccgggcgccgtggcgaacatctgtaatcccagcactttgggaggccgaggcggacggatcacgaggtcaggaggttcaagaccagcctggccaatatggtgaaatctggtctctgctaaaaatacaagaattagccgggtttggtggcgcgagcctgtagtcccagctactcgggaggctgaggcagaagaatagtttgaacctgggaggcggaggtggcagtgagccgagattgtgccactgcactccagcctggcaacagaacaagactctgt

SEQ ID NO: 5177 - DNA, 991 bp, Artificial sequence
  DNA replication origin
ccactaaatccccttggcactcacttccttagtgtgatgcatccacccagggaggtggccctgcgcggcgctggcacgctgtccaccctgccctgttgaccatcctgtccttggaccccaaagtaaaatggggccagtgtaggagacctgagggtggggcccttatgccagacctccaggggtagcgacctcacctgaccccagcttcggcttcctgtgctgcagaaggcgcttgctcccaagcccgtggtgacccacgtctccaccccatggtgtggcaactgtggtggctgagtggaagctggggcaggagagaggacccccaccaaccccagccaggtggcctgcagagcccactgccctacctctgagtcagcctgcggcctgagcacaccaatctactctctgggggatccagggtgcctgtgtgggccctcctagagacaccagcttggcctcctagggcataaggaatggggacagggcacagggcacgtgcttacaacggatatgcaacatggcttttggtagggccattgcagccagtggggaaacctgcgcggctgctgggaacagagcatggccagccttttgccagggggtggggagcatggggaaatgcaaggagagccagggtggggagggctgagtgtctgttgtcagggaggccacctacagctgttttgccaaggctagttgagaatctgaaagctcgagtcccagttcctggccatacagagccactgtggtccgagggtacggctcctgggcaggggctatggtcccatgctccagccgatggaagcctgatgaacttaatccgtacgctggtgggagcagtggtatttgagctcttgagtatgtgtttcggtgatggggctggggcagcctgctagcaaatcccagtgggtcagaaaggagaacagaggcaggggagccctcggtccccagcccttccagtctgagccaggcctgcctggatggtcacctc

SEQ ID NO: 5178 - DNA, 1135 bp, Artificial sequence
  DNA replication origin
cgctacaggagttcatggactgcccgtacaacctggccaacaaccgccaggtgcgcatgctggccgacctgagcctggtgggctgctacaacctgtccttcatccccgagggcaagcgggcccagctgctgctcgagagcgccaagaagaacctgcggggcatggccttcttcggcctgaccgagttccagcgcaagacgcagtacctgttcgagcggacgttcaacctcaagttcatccggcccttcatgcagtacaatagcacgcgggcgggcggcgtggaggtggatgaagacaccatccggcgcatcgaggagctcaacgacctggacatgcagctgtacgactacgccaaggacctcttccagcagcgctaccagtacaagcggcagctggagcgcagggagcagcgcctgaggagccgcgaggagcgtctgctgcaccgggccaaggaggcactgccgcgggaggatgccgacgagccgggccgcgtgcccaccgaggactacatgagccacatcattgagaagtggtagtggcggtggtggccacggggaggcctcttggggggtgtgggggataaaacaggacagacgacaggtccacccaagactgtcaagggatgagcatcccaaacctgctccacagaggtagctgcgtcctgaaaaaaaacagagcagggatgtagtggggctgggcagggatgggggcttgagaaatcaacaggtgcagcccagtgggtcagaggaaagcgtgctcgaaggatgccatggtcagggcagggcctccagagcaggtgttgtgcctggagctgctctcctggcctccttggatttatcgcaaaaactgaaggtttgcgcaagagacgaggacagcggaaagtggacctgccaggccgggagtgtgtccctcaccaactatgcacacagcactcgctcttagctcctctgtccgggctactaggagtgagaccagcttctggcaactgccccagctccaggccatcccatagcccctcctcttctggctgcccccaatgccccgaggcctggggagcccccagctcacccatctgtagctccctcaaagtcagggcccaccccatctgaggcagagaagactcgagtccagcccc

SEQ ID NO: 5179 - DNA, 1202 bp, Artificial sequence
  DNA replication origin
cagcatttaggcccaaaccaccaggtggggggtgggggtctgcagccgtggggtccctctccgtttctggctctggccctgggaaagtcacaacctctcaggggctcagtcagccccgttaagagggacgatggggctgggcacagtggctcacgcctgtaatcccagcactttgggaggctgaggcaggtggatcacctgaagtcaggagttcaagaccagcttggccaacatggcaaaaccccatctctactaaaaatacaaaaattagctgggtatcatggagccttagcctcggaaggctgaagcaggagaattgcttgagcccaggaggcaaaggttgcagtgaccaagatcacgccactgcattccagcctgggcgacaaagcaagactccgtctcaaaaaaaaaaaaaaagagggacgatgtcacctccacagtatggtaggcgttgctgtgtgcacagcacctgggacaaagggatgagtagctggggcacaggctggtgtgtgcccatgggtgtaatgtgggagggatggcagagacttggggccttgtgtgactggggacaggtggcaacaggtgggagggaggcaagagaaggcccctagggtggggggccgcctgtggatgaggggaccaggtgcctgtgttggcaacctgggcacgggccatcggagggtggagccgagatgcctaagctgggtgcccctgccctgtctgagcacctagttgcagagttggctgtgggagcctgagagcagggtccagccaggaagcctacatccttgcaggaaagcccccgggaacagggccggcaggagggtggctgtggggccctggaagtggggtgagggtggggggctgccccgtgggtctgactcagcccccctgctccagctccgtccaggcctgtgtccctcggcaggtgaaagggccacccagcctccatttcttgacctggaatgtgggatttacagttgtggggtccatttttgccatttttgtatccaaatctccacagtcccaggagtcagttgcattttaacccaggcttgcagtgggagagatgtttcggcaggagtggcgatagctctagaactcaggaagcccccaagagctccctgcatcttcctcaggagggagctgaggacttcctgccagcaggcacctcacccacaggggtagacccacactccagc

SEQ ID NO: 5180 - DNA, 1922 bp, Artificial sequence
  DNA replication origin
agcccctcccaaccctggcgcatgctgctgagctagcaatttccaggctggcagcccacctccgccagaggcatctgcgttttccattcttgctccacacatgctccctgggcagggggagccgggccttcctggtgtagcacctggggccccatcggccccacctggtcctcccactctcatggacaaactccagagaaaggaggccaaggctcttcaccctggggacccacaggcgtgcggggctgcaggaagagcatcctggttgcaatctagggctgaggtggcctctgctgagcaggcttgtttcaaaagctccggcttcttggcggcccgaagcttccacgcaatcctcttaggctgccgagctaagtccctctggcaaagggggtgacccccatccttgcaccccccacaggtagggaggcgtctgttggtattggtcagtgaccaactctgggagcctactgctctgactggtggaagggtgggtgggggcatggctgtggtcccaggcacagctgagcctagcacagagaagctggaccagggttaggggggccctgcagcaggaacgtgcatctgtgcagagcagactaagtgctgggccggaagcaatccttcaggggccctagacaggcagctctgtgaccgccaagtgtagaatgtggctgtaagaggctcagaacatcacctcccaggctgggagctgcagtgtgtgtgtgtgtgtgggtgtgtgtgtgtacagttgggggaggggggagaaagaaaagtgggaagatgcccctccaactctaggaccccaatttcctgacagcctgagaaagaccacagagcaaggattgaggtctgtgcaggggagcagtgtctcggactctgctcagctccaggctggctggaccttccaggctccccaggcacacctgagagcctacagcctctggacccaagagtgccagccaacacgcctacaaccgcccagcctcctaccaccagcctgtctgcaaattcagtcctaaggcaaatttggaagagaaacaaaaggcagacaagaagccctgctcctggcccttcccagcccagactttggggagaaaggccccgcagggcatccctgcaggacgaatgggcaccaacaggaacaggaggaaaataaccccaactttaactgctggaaacccagcagcaccccaggttcccctacaaacggcttcccagaagagctgccccggcacccctcccatgctctgtgtcctcacgcagctcagctctgacatggggctgggggaccccagagaaggggtgtggcagcacaggttccctggaccagctcaactacccccaacctggctggtagcttcctggggaaggtggtcccccatcgggtggcttttgttcctctctccaggcaagcctgtgcctggaagaattcggctggcaggccccactgggaggacaggcggtactgcctcctccccgcccccagccccaggtcaacagggcctttgttctacctgcacacaccggcaggcaggcgggcagagccagcccccttccctggcagctcccccaccctctgaaggcaggcactccaggcacaggggcggcacctcactactctcacttccacttttgggaccacagcaccgaagcggcacggggaagccaacactccaggtaggccacgcacacacccagaagcccgcgtccccaagtccggcgggccagacctcacggcgcacagcaggtaaggtggcccgagggcagcgggcggggaccctggagaaaacccgggcgctgcgcagtcaagccggcagtagggcagcacaaggcaaggaagagagtgagagcgaggtcagaaagcgcggtgacagccggctcacccagaggagctgggagcctcgggcgctcggcaggtcggg

SEQ ID NO: 5181 - DNA, 1969 bp, Artificial sequence
  DNA replication origin
ctgggaagacctgccgcgtctgcgggctgcctgggagcccaggcgccccgcggtgctgggggaggagcccggcacggggccgctgggcggcaaaggggccgcgggctccctggaggaggcggctgcggacggggcctggcgacctcggagaaggtggcgtccacggcgcgcagcccggcgccccaagcctgccgccgggtcggggtcggggccggggccgggccccgcgggtccgcgcgagccggagtcccctctaaaagtttgtccccaaacgaaacccctctctctgccccgcgtgggcagcggggccagccccacgggaggctctgaggacagacacgactgccctcctccaccccttggcaaacaacaatgggcggccgccggacgaacgacgagggaagcgagtgtggaaaatcccccaattttttgcaaagtcaaccgcgggcgctcgggggccgggccgcgtgctgcccccgcgcggccgtccgcgggactgtgcgccgggagggggcgccgctgttgatctcgtggttctcagactctgagaccgcacggtgggccgggaatgaggcttcattcctgaagccgaatgttaatgcctcttctgggatcatcacagcctgccactaagccgtgttcttttacttttctttgccattaagtcagagatcacgcattaaagaattggtgaagtggatcttcaggggacaaagccactgagcagaagagctgccagtgcttttccttggaccccacaagcagtcagggccagaagctgcccctagcaaacacttagctcatatgcactctcggggctggggcaaaccttggccacgcaggagatcacccagggaagaaaggaaacagcgcgcagagcgcgcctcctgagaccctggctgtgtccgctgacctcctggaaccccacgccagccccagactgtgcgtttctatccattttccaagacatgacactgaggactcatcgcggggagtagcgggaagtggtggggagtagcgtgatgcaagctgccccgccaacgagggctcgagctgccttccactcggctcaagtgtccactgattgatgggtggctcatctgacttgactttcagagcccagaaactcacctacagccttagggtctcaggtgcctgtgcagggcttcaatcaaagtggaagactgagcaaagtcctgtagccagccaggcagatttccctcctcttaaaagaattctagaaagaaagggcttcctggctaatgtgagtgcttcccatcagccagtgtggcaggtatgaagttggattaaatagcttgttctgggagatgttgctccatgggtcaggctgctctggctcccattcaagggtgggaccttatcacaggcacttcgtccctgcctgggcctcagtttcccccttgggacagtgagatcatcacagggtggagccatggcccaagtaccgatggcttcgttggccttcggagctgctccagctttcccttgaacactctgggcccacgttcccccttggtggcagtgacggtcaccaggctctcaggagtggcccctgtagacgctctcatccctggcctagggagctggggcaagtgcagaggtggggaaggggagggttctggggctcacagcaggaatcaggatcccagctctgctgactctcatggggtgagagtggttgaccttggaaccagggtcttaacccctttgaacctcagttttctcttctgtaaatggatatcacagcctacccccgcagatttgctgatggaattggaaatgacacctctacaatgcctggcacccagcaggtctccaaaagagcagccttaattatgatgtagcacgaggatccttatctgggtaaggacatctggggggtggacccggggcagctgtgctcccctaggccacacaggaaggctccccagggctcaggcacagactg

SEQ ID NO: 5182 - DNA, 2231 bp, Artificial sequence
  DNA replication origin
cttccctcgtcgttcgtccggcggccgcccattgttgtttgccaaggggtggaggagggcagtcgtgtctgtcctcagagcctcccgtggggctggccccgctgcccacgcggggcagagagaggggtttcgtttggggacaaacttttagaggggactccggctcgcgcggacccgcggggcccggccccggccccgaccccgacccggcggcaggcttggggcgccgggctgcgcgccgtggacgccaccttctccgaggtcgccaggccccgtccgcagccgcctcctccagggagcccgcggcccctttgccgcccagcggccccgtgccgggctcctcccccagcaccgcggggcgcctgggctcccaggcagcccgcagacgcggcaggtcttcccaggacccgagggacgcgctccggccgctgcccggggacagcaggggtcctgcggttcggttcgaggaccgcgctggaagaggcccggggcttcggaagggccattcccctccctccacgcccgcccagggcctcgctgttctttgtgccctttctctaggccctccaggcccgcttcagtccttaggggaagagggtaggataaacagaagaggagaacctgagcaattcgtaggggcagcgtggtcctgggcttccccggcccttgcccgccccccccgccctgctggctcggtgacctccccctggctggccccctgccctcgcgtgtgacgtggggttgttggcaagtggggggcttggactgctgcctggccgggattcggagtctgtccagtggagcccaccctcctccccgggcagcgggactgtgggcaggcctggcgggttctgccagcttgggaggcaggacagggacctggtaacgttgccccaagggcatcgtcctggttcttctgcttgaaacttcccaagggacatgtctttagacgactagggtggaggcgggatcacagcctggatggggtggggggtgactgctcgcagcttccggtggccagtgggtctcctcccagatggctgtcattcactgcccagaggggttccgactcggccgggtcgggggagccaccagagagggcactgagcagcttgacaagctccactgttggggatgttccctgggggtggggtggggtggatggcggctcttttgagggtgaaatgttctagtccgagaaaagtcactcaaccatggggtgcttgctgctcccaccccagctgcctaagccaccaggggccggggcacaggtggaagaaggtggcctcagtcctgggccctgatgcctagaagggcatggtcagtgccctccaggcagccttgcctgatcgttggggctcgggaccagctcccactctgctccactctctgctggctggactggccacccctctgtctgtggaattcacttggtgccagtgcccttcctggaggatgatggccggcccccatgctcctcgtcaccaggtcctgctctttttacctccattcatcgccactgctattaaagagtcgccctcttgctagattacagttggcttgacaagtcagttgactgttctgatggaagcttcttcttgggcagggccccagggccttggtgggacccgggccctgggtgggggcacagaggtgggacacaatgatggctttatggagcaggccctgcccgcccctgtggcactgtggggagggggctcacctgtccctaggccagggctcagcacggcagcggtaaacctggctggccttgacacttcctggaatctctcagtgaccacgtttctttttgcaccaaatagctatggttcttgctgttcgtttctctccctgccctcctttaagaaggagagttcgtgggaattagacactcagggttgggggagggtaaccttggctcctggtgggaggagtctgcgtccttctctgggcccagggcctatggggcagcaacagcatctcctctattctcagagcatccagggacagggtcacaccatgggtgtgtggtacaccaggtcgtccacctggctgaaggcctgggctggtgacaagtgctgtggtgctgttcaggccagcagaaaagagggaggcacatttctgtcagcagacgggatggggtatggctcacacctgctgggctggaggctgtgctccacccagggcctcaggctgtgtctttgacaacaataatcaccctatgggcaagg

SEQ ID NO: 5183 - DNA, 967 bp, Artificial sequence
  DNA replication origin
gggagggaggtgggggggtcagccctccgcccggccagccgccccgtccgggagggaggtggggggggtcagccccccgcacggccagccgtcccgtccgggagggaggtggggggatcagccccctgcctggccagccgcccagtccgggaggtgaggggcgcctctgcccggccgcccctactgggaagtgaggagcccctctgcccggccagccgccccgtccgggagggaggcggggggggcgtcggccagccgccctgtccgggagggaggtgggggggtcagccccccgcccggccggccgccccgtccgggaggtgaggggcgcctctgcccggccgcccctactgggaagtgaggacccctctgcctggccagccgccccgtccgggagggtggggggggggggtcagccccccgcccggccagccgccccatccaggaggtgaggggcgcttctgcccggccgcccctactgggaagtgaggagcccctctgcccggccacgaccccgtctgggaggtgtgcccagcggctcattggggatgggccatgatgacaatggcggttttgtggaatagaaaggcgggaagagtggggaaaaaattgagaaatcggatggttgccgggtctgtgtggatagaagtagacatgggagacttttcattttgttctgtactaagaaaaattcttctgccttgggatcctgttgatctgtgaccttatccccaaccctgtgctctctgaaacatgtgctgtgtccactcagggttaaatggattaagggcggtgcaagatgtgctttgttaaacagatgcttgaaggcagcatgctcgttaaagagtcatcaccactccctaatcttaagtacccagggacacaaacactgcggaaggccgcagggtcctctgcctaggaaaaccagagacctttgttcacttgtttatctactgaccttccctcc

SEQ ID NO: 5184 - DNA, 964 bp, Artificial sequence
  DNA replication origin
gggagccagccccatagctttatggcaggagcaggtgggaagcaggacccacagtattatggtgggggcaggtgtggggcaggaccccacagcgttacaatgggggcaggaaggggggcgggactcacagtggtatggcgggaacaggtggggagcaggacccacagtattatggtgggggcaggtgttggggggcgggacccacagcattatggttggggtaggtgggggggcaggacccactgcgttacagtgggggcaggtggggggcgggacccacagcattatggtgggggcaggtggggaagtgggacccacagagctatggtgggggcaggtgggtggtgggacccacagcgttacagtgggggcaggtggggggcgggacccacagcattatggtgggggcaggtggggggcgggacccacagcgttacagtgggggcaggtggtgggcgggacccacagcattatggtgggggcaggtggggggcgggacccacagcgtttcggtgggggcaggtggacacacacaggctttggagccacgcagactaggatcaaatcatacactgtgggtgacctttagaaagccatcgaagatctctgggcctcagtttcctgaacagcaaaacagggctaactcttgtcagatggctgtggggctccagggatatggtggctatgaaggacctggcaggtattaggcccccaccagggccccaggagctcagcccaggtgctcttcgtttacctggacacttcaggcaggctgcgccacagggccttggcacgtgctgcctcctccctgtcaccccagcactgccccctgccctgccgtatcctctcgccacagtgctcagtgatgtcccacggagatgggtgtcttttctttccctcgccagaatgtgagcatcgccagggctggggtttcgatttgctttgttcccccagtctcttccat

SEQ ID NO: 5185 - DNA, 932 bp, Artificial sequence
  DNA replication origin
gggattcactcactgtggtgtgtgggaggaggctgggatccgctcactgtggcgggaggaggctgggatccgctcactgtggcgggaggaggctgggatccgctcactgtggcgggtgggaggaggctgggatccgctcactgtggcgggcgggaggaggctgggatccgctcactgtggcgggcgggaggaggctgggatccgctcactgtggcgggaggaggctgggatccgctcactgtggcgtgtgggaggaggctgggatccgctcactgtggcgtgtgggaggaggctgggatccactcactgtggtgtgtgggaggaggctgggatccactcactgtggcaggaggaggctgggatccgctcactgtggcgggtgggaggaggctgggatccgctcactgtggtgtgtgggaagaggctgggattcactcactgtggcgtgtgggaggaggctgggatccccgctcactgtggcgggaggaggctgggatccgctcactgtggcgggaggaggctgggatccgctcactgtggcaggaggaggctgggatctgctcactgtggtgggcgggaggaggctgggatccgctcactgtggcgggcgggaggaggctgggatccgctcactgtggcgggtgggaggaggctgggattcactcactgcggtgggtgggaggaggctgggatcctgggctgggggcaggagctaaattgctgggtgagaggagcagatgaaggtgggactggatgaatgaaggctcttggacatgtgaaagtcatgaccatattgtgtgtgaaggtcagaaagtggtaagcttggtggagcaaacagcttgcttagagaagtaagggaggggcaggggagggaccctcttccttggaacactctttgcccattttttttgtttgacaaacacttcaaggct

SEQ ID NO: 5186 - DNA, 1440 bp, Artificial sequence
  DNA replication origin
acagggtcctaacactcaaatcttgccatggcacttcctgcttaactcctcagtggctgtccttttccacaatccgcttcactccagaaacctcccactaaaatgcactctctgactctttcttttgtttttcccactcaaatgcatgaataggctatgagctctttaaaagcaggggttgtgtctaattcatgtgccagctctccagcacctagtacagtgcctgggatgctggacaggaggatggtggaacaggcgagtgagtgggtgaatggatggatgggtgggtgagtggatggatgagtgggtgggtgggtaaatggatgggtggatgaataaatggataatgtgtgaattatggatgaatgtatggatgcatggatggatggatggatagataatgggtggatgaatgggtgtatagataggtgggtggatggatggatagatgtgtggatggatggatggatggatgggtgggtgggtggctgggtggataatgggtgaatggatgaatgggtggataataaatgaatgaacgggtgcatagaaaggtgaatggatggatggatagatggagaatggatggatggatagatgggtggatgggtggataataggtgaatggatgaataggtacacagataggtggacggatggacgggtggctggatggatggagaatggatggatggatggatggatgggcggataggtggataataggtgaatggatgaatgggtggataatgggttgatgggtggatggaaggatggatgcatggatggataatgggtacatgaatgggtgaatagataggtgggtggatggatggatagaggggtggatggatggatggatgggtgagtgggtggataatgggtgaatgaatgaatgggtggataatggatgaatgaatgggtgcatagataggtggatggatggatggatggagaatggacagatggatgtatgggtggataataggtgaatggatgaatgggtgcacagataggtggatggatggacgggtggctggatggatggagaatggacagatgggtggatgggtggataataggtgaatggatgaatgggtgaataatggatagatgggtggatggaaggatggatgcatggatggataatgggtagattaatgggtaggtaaatggatggctgggtgaatggatgggtgggtggattggcagatagatagttgatggatgggtggtgggtggatgagtgggtggattgatggggtagatgggtaaatggcagtggggacatggaagagtgggctggtaggaaagtgagtgaggaatgactgtgaaagaaaaaagattcattctgggctttttggattaacttctctgaggccttgagaagtctgtctgtagtctaagtaccataaacctctgggaaagcttacatttcac

SEQ ID NO: 5187 - DNA, 1042 bp, Artificial sequence
  DNA replication origin
aaacagcaggtggcttcagcctagaggagcggcagccatctcgtgattgtgagacagcatgcctgaaatcagaggccacatgcagagggcaaagggaggggacaagaggggaggagagatgaggggaggggaggagagaagaggggaggggagggggatggggaagggagaggaggggaggggaggagagaggaggggaggggaggagagaagaggggaggggaggggatgggaagggagaggaggggaggggaggggacgggaggggaggggagaggagaggggtggccctcccctgatcaggtgctccttgttggagatgaacggcccacctgcccacagcagtgatccactttttgcccagcataatctggttgagttggtttgatgtttaaaataaaattaaatttaaaagttggttttttaaataaaaaagctttaacttgaacccctcaaatacatgactggccccaaaactcctgggcagcaaagcgagggagaatagaagatgccatgggttttcctgctggttggaatcctcatgataggtgaggatttcctgctttctcaacaggcccggatcggagactgtcattctgaggactggcactaaaacccctctctcaaaggccacctggaactctaactgtggggcccacacctactctcagctcacatcttccggggcaggcacttcttttctaaaacaaaaacatttctttttaaagatatcagcgtgcccgaccaaaaatactaacacagcctctcgggatggtgctgtatcagttagccagtaagaggcaggcagaagtcctgggggcaggcagtcttcctcaattaaacagcaacagtgcaacaagagcaaaaccttcctaggagaagccctttaccccttctgcctgcctgctcttccttcctggaactaagaggcacaagctggaggagcagcagccatctcgtgaccatgagaaagcatgcctgagatcagaggccacgtgcagagggcaccaacagcaaaagcgaggggagcacctgtctcccc

SEQ ID NO: 5188 - DNA, 1505 bp, Artificial sequence
  DNA replication origin
acgcgggattctggagtccccagcccctggccgaatcggcttctggtgcggccgcgtttggggccgcggctccaccccctctggctggccagtagccttcatcatgggggacgtgagcagaccgagtgagagctgccatttttctgggtgtgggcggacagttgtgcaggcccatgttatagacagagagactgagggcgagaggcgccgcccgcccggggagccgactgcgaagtgcagagccgtggtcccccgaggtgtccgcgcggccgcctccgggcgggggtccccgggcgccttcaggccgggtctgctgcgatgcggcgccatccgcgtccggctcctggggcctgcagaccttccgggccactcctggaaccgcgccgagacccaggccagggtgctgagagccgcatgtcgcggccaccaggggtgttcctgaggactccaccgggctcagacgaggcgtcaggcggggacggtgcggatgagcgcctgttgaggccggggctggccaggcagggacagggagcacagggaggacacacaaagccgacagcgtcaggacggatctggggagcaacgttgctgtcgccgtgtggacaggacaccgacattagcgtggcattgctgggatgcggtgtctcctggtgaagggaggagagtccgcggtggacagagcacccagcccaggagagccttggacaccgctgggaggctcagcctgagggtagcgtggagtggccagagggtttccgccgggagcaggggatacctgggcttctatttcaatactgtgctaacctgaagccctgaatcctcccgggccgtccctggaaaccccggtccatgcccacacctccctttctgactcctcatttgtctgtgccaggcacgcaggaccctagtcacagttgtatttgtccctgcactttctctgcagaaataaggtaggctcctggaagtagggagtcaaatgtgtcctgtgcctctcttaggcttctgggaacccaggcttccacatacagtaggcctttagttgttgaccgaaacagatgctagatgctgtttgaatctgccatgatggcgcacagttttccaaaactcgtcccttagggctgcaaagccctgaaatgcagcagaggagaatcagagagcttaactggcgcagctcccatcttgagcactgcctttgtaattaaatgtcaattatgattcattcagaggaaaatcaattgtgctactttcataaacttttatttggttattgaaaggcaagatttctctaatcagtttttcattaagtcagagcttgatttgcaactggaagcttccaaagccctcccgtcccactgctgtccctctttggcctgaagaatgtgaccgtttggggtgtgaccctaggttcatattgcatccgtgggttcccacacaaccctgtagagcatccagacccactgctgcctctttcagagccagtgtagacaaggtcatcttcagagcac

SEQ ID NO: 5189 - DNA, 1400 bp, Artificial sequence
  DNA replication origin
cacacagacacgtgcacacacatgcacacacccgcacacacatcagacacacatgcacacacacatgcacacacccgcacacacatcagacacacatgcacacacacatgcacacacatatgcacacacatagatgtatctatataagcaagtgttttcttatgcaaataaagctctagaagtttttgtaagcagctgggatattgagggagaggaaaaggaaaagctttcttatttttgtgcatatatttgtgttgtttgtatttttataagcaggtatatgacacacatattttcaaaaggaaaatataaaggcaaagtatgaatttcaaatcgtgtgagcagtgtggatgccgacaacagtgctcgcgaccctgcaggtgtccctgctgccgttctccacagtgcgggtggagatctctccacagttcccactgggatctgctccctactttgtgggggactactgctaggagtctgggggcggaggggtgggggaaggtggaccagcctgtggggcctggctatcgctgatatcttctgaagcatctggaccgtacgagcttattccagctaatggggtggcgtgtgggggagccacccgcaaagcccctcctgtggttggggttccatcctcccgacccactggctcagcccagtggggagaagggtgagccgtgctccaggctgaaggtgtggagcagcaggtaggtttaggggtgccagagtttcgcacggtgggggatggctggtcggtgacggagggtgggagagttaggctggagtgtgttggaggctgcgacggagtgctaacctcctcctgaggcggggtgtctagaaggcactgagggtgtctagaaggcactaattctgacagattggcagtttaggaagatcctccaggctcctgaggaagaccattgcagaagtctttagccagattcagcactggggaaatctagaaagagtgggttatgggtaaagtcgtgacacggtgatgggagtgggaaagagggtggctttaaggaggcaggcctggtgatggacgggaagtggggagaggctgaaggggtgccagagtgggtggactacagggtgcaggtggtgccaggggtgcactggctggcacaggaggtgcagcaggcgcagggccgtcccagcaaggatgccctgaggacagccagggactcctctgccctgtgctccctgagcctcagtgcctcatctgccaaatggggacactgtgtgaatacgctggcacagcggggcccattcactcagcaggattgccccaaggacagccaggaaatcgaggcttgcagagacaccgctccttagcagtgccaccatcaacaccagacagtccatggaatggaggtgccctgctcttctaaagcctg

SEQ ID NO: 5190 - DNA, 1301 bp, Artificial sequence
  DNA replication origin
ggggctttatggtggcttccccacacttcaccccaccagttggggatagactcatggcatctggccagctccaaagaggccagcaatggcccagtcccacgtggcctgtcctccttctcccactcccccccatccccagaaggagtctctcaccaaggggagagcagatcccaggggagaacgacagtggggtcacctgtaaggtcatgaaccttgcactgttgtctgaatccacactatttgaaattcctactttgcctttgtattttcttttaaaaaatataaatgtaatctctacttattaaaaatacaaataatacaaaagtccatacaaaaagagaaaagctttttctttaaccctttcccttccccaatatcccagctaactgctaaaacatatagacctttctatgaacacgcaaatgtttgtttacatagatacacctgcatgtgtgcatatgtgaggttctgtatgtgcatgtgcctgtgtgtggcactgtgtgtgcgtgtatgttatgtgagatgctgtgtgtgcatgtgtgtggtactgtgtgtgcatgtgtctgtgtatgtgaggcgctgtgtatgcatgtgtgtgtgtatgtgagactttgtggatgtatgtgtatatgtgagacactgtgtgaatgtgtgtgtgaggtgtgcgtgtgtgagagacactgtgtgcgtgtgtgtgagacactgtgtacgtgtgtgtgagacactgtgtggatgtatgtgaggtgttgtgtgtgagacactgtggatgtatgtgaggtgttgtgtgtgcatgtgtgtgagacactgtgtgtgcatgtgtgtgagatatgtgtgacactgtgcatgtgtgtgagatgtgtgaggtgttgtgtgcgtgtgtgagagacactgtgtggatgtgtgtgtgtgagaggtgtttctgtgtaagacactgtgtggatgtgtgtgtgagacactgtggatgtgtgagggttgtgtgtgcatgtgtgtgtgacaccatgtgtgcgtgtgtgtgagagatgtgtgtgagacactgtgtggatgtgtgtgtgagacactgtgtggatgtgtgagggttgtgtgtgcatgtgtgtgacactgtgtgtgcgtgtgtgtgagaggtgtgtgtgagagacactgtgtgtgcatgtgtgtgtgacactgtgtgtgagtgtgtgagatgtgtgtgacactgtgcatgtgtgtgaggtgtgtgtgtgagagacactgtgtgtggatgtgtgtgtgtgagaggtctttgtgtgagacactgtgcgtggatgtgtgtgtgagacactgtg

SEQ ID NO: 5191 - DNA, 1029 bp, Artificial sequence
  DNA replication origin
cttatttattcatttgcctgtgaatgcccacctgctgcagcaccattccttgaaaggactatccttctgtttttcacatctttgttgaaaattggtcattttatgtattgaaacattgctatgtaccccatgaatatgtacaattattacttgtcaattaaaaatttaaaaagaaataaaatattagaatatgtatgtgaggtagtggtaagtcattctggatgtaataaaccaggtgcaatgggtctgcctggggggcggggggaagtgtattgtatgaagaatggccagggaaggcagcactatgaatgtgacaagccaacagacatggcagcattcaatagggcacttagtggatgttcagaagggaaccagatgtgtgtccacagggttgtgctccctgcagtggggccagtgagtgaaaggccctgaggcaggcggtgcctggcacgtctgggctgccccagaagggaggagggcagccacagccgggtcaggaagacagggagacaaaagcattggacataaccggggctggggtttgtgaaatgagtgtgatgcagggagaggggcaggacacgggaatgagtgagagggagcaaattgtgactgcactcagctgggtaggaagaggtgccgccatggggagggtgcggtcatagaaaggcagtggatgaatgggttgctggtatcaggtggggtgctgacattgctggagtcaggagccaaggggaatgggcaggggagagggtgatgagctggggcaaggtgtggggacctgcagtctctggctgggatgggaacagggcttgggtggcacctctctgagtggctggagcagagagaggcctagtcactgaggagactgagaagcttggttggggtcacccagctggagatgtaaatccccaggaactctgacaggtggtaggcagagagacaggcagaaggtgggtcatgggcaggaggtaggttgggggctggggcgctgacaggggtgggaggaggtagggcaaacgcagtggggaa

SEQ ID NO: 5192 - DNA, 1217 bp, Artificial sequence
  DNA replication origin
gggtgggtgagtgggtgtctaggtgatgagtgagtgggtgtctatgtgatgagtgtgtgggcgtccaggtgggtgagtggatgtcaagatgcgtgagtgagtaggtgtttaggtgggtgggtgagtgggtgtctagagggacgagtgagtgggtgtctaggtggatgagtgactgggtgtctaggtgggtgagtgagtgggtatctaagtgaataaatgactgggtatctaggtgggtgggtgagtgagtgggtatctaaatgaataaatgactgggtatctaggtgggtgggtgagtggatgggtatcttggtgggtgggtaggtgagtgggtgtctaggtgggtgaattgttgggtgtctaggtgggtgagtgggtgtctaggtgggtggatgagtgggtgtctatatgggtgagtgggtgtctaggtgaatgagtgagtgtctgggtggatgagtgtgtgggtggtctagatgggtgggtgagtggatgtttaagtgggtgggtgagtgaatgggtgtcttgctgggtgggtgagtgggtgtctaggtgggtggatgagtgggtatctagatgggtgagtgggtgtctgggtgagtgagtgggtgtatacatgggtgggtgagtggatgtttaggtgggtgggtgagtgaatgggtgtcttgctgggtgggtgagtgggtgtctaggtgggtggatgagtgggtatctagatgggtgagtgggtgtctgggtgagtgagtgggtgtatacatgggtgggtgagtggatgtttaggtgggtgggtgagtgaatacgtgtcttgccgggtgggtgagttagtgtctaggtggatgagtgggtgtctaggtggagggttgagtgggcggatgggtgggtgctaaaagagagcctagtagccaagtacccaggtgggtggatgactgaggtgggtggataatatgtgagtttgtctgtgagtggtgacaatgtttggtgggggtaggaagaggttgggtaggagagtaggtggttggagcaggtaagtagctgagtagtgggtgtgtgggcacatgggtaagtgagtgggtgactgaagcattaatggaatggagcaggagcagcatgataagcccgaagtcctacagagcccaggcaggcacctcacgttcctgacaggtgctatctacacacctggtgctgtccccgccccccctctgagtccctgcttctgtcac

SEQ ID NO: 5193 - DNA, 1409 bp, Artificial sequence
  DNA replication origin
cagaggtgtgaagtttgctttttgcctaaaattaaataccaaaatataccacatattctagtaacactatggttgttaggctaaaactagctcaagaaatttaaaggttttatataaactgtatatttccatgtaaatatcaattaggttcacctaatacaattcatcaaactttcttaattgcccactgattgccagaaactcatgatataatggtaaatgacatgggttctgtgtactcaagacacagtactgtgggaagagaattaggcatacaacacagacacgtggatgaggtacaaaaatgcatagagagacattatcagcttcctgagaaggggcaggggaggctttagtaaagcaggcctatctgggctgcatcattaagaatgacttagaaatgtcctctgtgaacacggaggggaaccgaattttaggagaaatggatgtcatttggaaattcacaaaagtatgaagcagcatatcagtgatgatgacagtgacagtgatagtagtggcagtggtggtggcagtgataatggtagaggacagtgagggtcactagtgatggtggcgtggtggcggtactggttttggtggcaatgttgtgggtggttgatggtggcggtagttggtgaaggcaagattgtgggttgtggcaacattggtggtattggtggtggtgaaggtaacgctggtgttagcgatattgtcgtggtagtggcagagtcagtgatagtatcagtggtgattgcagtggtgattgtggtggtggtggtggcagtggtgaaaatgaggaggatggaagtagcgacagggatggccgtgatcttggcagtagcagtggtggtggttgcaacagcagtgttgtacttggtagcagtggtggtggccatgttggtggggttggtggtagtgacagttttgttggaggtgttgataatggtgttggagataacagaaaagcgttgctgtgattgctatttgtggtggtgttagtaggattcatggtgatattggtgtttgttaatagtatggttggttctggcagtggtggtgacaatgttgatagtagtggtggtgatggtggttgtagcaatgttgttgctggttctggtgccggtggtagtagtggcaatgttgatgttgttgctggtggtggtggcaatgttgatgttgtggtggtgttgtcagtggcaatgttgttagtaatggtggtagtgggcagcaatattggtcgtggtggtggcaatgttgatgttgtggtagtggtggtagcaatgttgacgtggttgttgttggtggtggcaatcttgatgttaacggtggtgatgatggtggcaatgttgttgctgttggtagttggtggtggcagtgttgttagtgatggtgaaaatggtggtggtggt

SEQ ID NO: 5194 - DNA, 803 bp, Artificial sequence
  DNA replication origin
ccaaagtgccgagattgcagcctgtgcctggccgccaccccgtctgggatgtgaggagcccctctgccctgccgcccagtctaggaagtgaggagcgcctcttcccagccgccatcccatctaggaagtgaggagcatctctgcctggccgcccatcatctgagatgtggggagcgcctctgccccattgccccatctgggatgtgaggagcgactccgcccagcagccgcccagtccaggaggtggggggcagcccccacccggccagccgccccgtctgggagggaggtgggggacgcctccgccctgccgccaccccgtccaggaggtggggggtgcctctgccctgccgccccgtctgggaagtgaggagcccctctgcccggccaccaccccgtctgggaggtgtacccaacagctcattgagaacaggccatgatgacaatgggggttttgtcgaatagaaaagggggaaatgtggggaaaagaaagagagatcagattgttactgtgtctgtgtagaaagaagtagacataggagactccattttgttctgtactaagaaaaattcttctgccttgggatgctgttaatctataaccttacccccaacccggtgctctctgaaacatgtgctgtgtccactcagggttaaatggattaagggcggtgcaagatgtgctttgttaaacagatgcttgaaggcatcatgctcgttaagagtcatcaccactccctaatctcaagtacccagggacacaaacactgcggaaggccgcagggtcctctgcctaggaaaac

SEQ ID NO: 5195 - DNA, 949 bp, Artificial sequence
  DNA replication origin
gctacctcccggtactgtcgccgcaggccttgggacccgttcccgccgcgaggctcccgaggtagccccggcctccggttcttctcagatagccccgtcgtccagccccagaagcgggcactaatgccttccctgaacgctgaaagttgttgaatggatatggacaatgattagaatcatgtagaaaacattaagtgatggtcagtatgttctgtttgggaaatactgaaatgtgcaacacaagctagaaataacaacatgcagaacagcacaactttgtaagacccgcgctgaaggaggcagcatttgtgtgagagcgcccggcgctgcccagaagagctggaacgcccaaggaaggccgctgctcagcgcaggacccctgggctcccggaaacgggatagcgttgcttatctttaaggtaggcttgggaaataccttgtttctccgtagttttgtgggtgtatatacagatactccttgacttaccatgggggttacatcccagtaaacccatcgtaagttgaaaataccatagtcaaagatgcatttaatacacttgacctaccaaacatcatagcttagtgtagcctgcttttaacgtgctcagagttaggcaaaatcctactttatagttaagtgttgaatatctcatgtcatttattgaatactgtactgagagtgaaaaagagaatggttgtgtgggtactcaaagtagagtttatattgagtgtgtatcactatcacaccagtaagaagtcaaaacatcatacgtcgaaccatcctaaattggaaatttgtgtgtgtgtctgtgtgtgtgtgtgtgtgtgtgtgtgtgtggtttttaaccgataggcaagagacacttcctaatggcctgtttaatgactccaaattaccttgcgtctcttcattgagaaggtgatttagttttccctaggtggtgaggca

SEQ ID NO: 5196 - DNA, 1798 bp, Artificial sequence
  DNA replication origin
agacaggcccccatgccatggccgatcactggatgctgtggtgggcacagcagtgcatgaggtcattgtcttgtgagccctgtactttatggatgaggatatggaggctcaggcggttgggaactcagccacatcacacagcttgcaaatggcacaggtgatatcaagcccagctctgtctggcaccaaagctcctaaacccagctgctctggtccccaccaatctctccttccacagtttcaatatttgatagtctgtgccatctttggatatgtactcagttttattcattctttaaaatcatttgcagaggtcctgttctttcccatgcaccatactcagaactgagaacagtaaaatgctgactgccctgggatggctcattggcacactcaagcccctcttggcacaggattccagcaaggctcagaggaggggtcagccctgccaggggttagggggctcagaggagaggttagtcctgtcctggtttagggagctcagaggaagggtcagccctgtcctggttcaggggcttacaggaggggctaggccttcccggggtcagggggctcagaggaggggtcaatcctgccaggggtaagggtctcagaggagggttggctctgtttggggtcagggtgcccaggggagggtcagctgtgtttggggtcaggatgcccaggggagggtcggctgtgtttgggatgagggtgctgagggagggtcggctgtgtttggggtgagggtgctgagggagggtcggctgtgcttggggtgagggtgctgagggagggtcggctgtgcttggggtgagggtgctgagggagggtcggctgtgcttggggtgagggtgctgagggagggtcggctgtgttggggtgagggtggtgagggagggttggctgtgtttggggtcagggtcagggagggtgggctgtttggggtgagggtagtgagggagggacggctgtgtttgtggtgagggtgctgagggagggtcggctgttttcaatgtggcatggctctgcagaggagtttttgtcatgcttgtgccaggaagggcgtgatggcagatggcggcggcgggccagggtgtggtatatctgctctttgtgtctagttttgtcttttcaagtgctttgaaagctccctgatatcagggtctgttttcattttcctctgaaattttaggtgcccacaaactagcatgcacaaggcattgagaaaacgcccacagaagagagtgcaaaccactgtggtctgagttatccatttcccagctgccccaggcatgaaaaatagaaacgatataatcatggggagcagtcacaccagttagaatttaatgaaagccattctgccattctggcaagtgtgaaaggagacacatggtgattagggtggtcactgggacaatcttgctggaaagtgcttttctgacttggttcacatctatatagttttgatgttgtaattctgattttaggaatcggttctaagaagcagtaagaaagccaaacaaagccacagcagaagcacctggcactgtttagaatgctgcacatctgagactatcagtggttgcagagagggggctaagggtcgggcttgatgacggtgtgtgaccactcatgggacagagtggtctttaactggagggaaaatgctcgtgccttgatgtgaagtgggaaaagaccaatacaaagacatggtggtatcactgcaagcaaaagactgcttacagacaagaggaaagactggaaggaaacacccagaatggccagtggtcagctt

SEQ ID NO: 5197 - DNA, 895 bp, Artificial sequence
  DNA replication origin
tgtgccatggctgagagtgatgctgaggaagacacttctctctagtctcagtctgcctgcctgtgaaatgggcttataacaaactcctgatcccaggctcagtcgccttgagcccatgacctcacccaacccctctccttcctcccgtgcccccaggaggcgcggggactcgggggggggggcggccccctttcctccggaggctcccgggtggcacgtcagtgcctcaggtcccgggggtttctgggttctgcgctgcccatggggtgcgcaggagcctctggagggggcgggttctctccagccagaaagcccggagtcgcccaggaagtttggctcggactgagagcatttccttctgggccggccgggcgcgatccgggaagggcggctgcggtcgcaagccgcgctgctttcagccaggctggcaccatgcggcccctgctttgcgcgctggccgggctggccctgctctgtgccgtgggcgctttggccggtgagtggggcgcggggcatggcaggggacacggagccggggagatccgcagatggtgaggaaggaatgagcaagagacagagctggacacagcagcgagatggagagagaggcagatacagggagggagggatggagagagagatggtgagaggaaacagactcagaaaaaggcagagaagtagagcaacggagagataaaggagagagggaagaataaacagtgaacaggaaaaaaggagaggccgagacagaaagaggctttccctgaacagatatgaaccaagatagaaataaaaaagagtttgagagacaaaagagaagaaggaaagagaaagagtgactaaaatggcaaggggtggagggagagaggataagaaaagagaaagatttgagaga

SEQ ID NO: 5198 - DNA, 1281 bp, Artificial sequence
  DNA replication origin
ctaactctccgtcatctcgaggggtgcctggaggattgctaatactatttacgttgttaggagaattttttggaagccatctatgtcgcctgaccctaacaatccgttcatgtggtgtggctccatgccgcccatgctgcccatccgaccgtccgagccgggacccatcgggaagttggaccggctgcctccaggcggcaccggattaatcattgtgtagatgtcgctggaatttgttgaatctgagggactgggcatagtgggtgttcctggagggccgccaccaccagggggtcccacataggtaccaggtgatgaggaggagtatggaattgagttagcactgttaggattgggccagggtctgccggctcccgggcccatgttaatcccgggcatggggggccgagggaattgcgtggtggtctcatgccgctgccgtaattctgtgggctgggacccgtgggccccatgcctcggggagggttcattctctgcattgatcctcccatgtggggatggccttgttgtcgtgcgggatccatggaattgggcagcaatggctgtgtcccaggaactcctcccggaggctggtttcccattctgatcggggggcctggggccgcctgcgtatcgcggtgacatgaaaggctgactgtggggtcccatcatgctgctaggattgtgaggtggaggctgtgcgtgcggcgagggctgtgaccccggaggaccctggcgggactcggcctccccgcatcctattgttggggggaatgttgccaagcacggggctcagggcagctgctgcactagaatcaggaaaggcttttgcttcacttgaatgttcacaagtgtctctccttttagtagctgcacagtaaaggtcccaaaatacacaccaccacgagtgcaaaaacccaggcggttctcccaacgcgatgtttttttcccagcgaatctccgataagaaggtctgtgcagatttctgtgctcctacctgcagtaaatattcgtagacgtataaagctaacttttccccagcctgcccgtccgagggcaccaaggagcctttgcctttggcaaacatggtttgcagggaagagggcgcccagcctccccacagccgccaccgctcccgctctcccgagctgcccctcgcccccggccccctcccaggcgctccctccctctctcgctggctggcgctctcctagcagcgctcccctccctcccgagcaggcgctggctccgcgctctttccagctgtcaaagcatcaggcc

SEQ ID NO: 5199 - DNA, 1510 bp, Artificial sequence
  DNA replication origin
gaccagggacagaataatatgatttggctctgtgtccctaccaaagctcgtggaattgtaatgggcaaagttaaaggtggggactggtggaaggtgatttaatcatggtggagagtggagtttggaaggtgggggtggttgggagcattgtgggggattgtgttggggttgtggggaaaggcagagatggggggcagattcttcacaaatggttaaacaccatctttgtaatgctgtccttctgacagtgagtttgcttcatggtttaggagctttgagatttgaatactggcctgctgggttttggatgtgcattgggcctgtggtcccatttgtgttatttttctgggaaatttcttccctttggagtgagaaagcttacccaatgcctgtaccatcatcgtaccttaaaagaactccattttaagttcagggactcattggcagaagagaccgtagccttgtatcagataagactttgaacttcttacatttgagttaatgctggaatgagttaaggcttttgtaaacatttgaaaaggcatgactgtattttactctgcgagaatgacatgagattcggcggagggggtcaaggtcagaataatatggtttggctgtgtttccctagaaaaactcatgtggaattgcagtcccgaatgttggaggtggagcctggtgggaggtgatttaatcatggatgggaggtgggtggggttggagggaaaaagaggtgggtagcgtggtgaggagtaagctcgctgtagggtggtgggagggtgggggtagtaggaaggaggagtagcctgctgcagaggcagaggctcgtggaaaacctctgctaggactgtgcacctgtggctttgcagggtgtagcccccgtggctgctctcatgggctgggctggtgttgagtgccggtagcttttccatactgaaggtgcgagctgttgatgggtctatgaatctgggctctggaggatggtggcctcctgcataggggctccaagcccatatttttttctgcactgccatagtacaggttttccaagaggctcaggctctgcctcaggcttctgtccggaaacaggagggggtggaggtgggttggggacggatccttcactaatgattaagcaccatcttcttgatgctgacctcgtgatagtgagttctcatgaacttcctcatagtgttaagccactggttgtatggagcatgagcctaggggcttgggaggctctttatagattttggaggatgtatggaaatgtctgggtgtccaggcgaaagccttcctaaaaggcagaacctcataagaaacctctactagggcagtacagaaggaaaatatggggttggagcccccacactggaggccaccatcatgaagactgcagattaatagaccccgcaacagcttgtaccgtcagtgggtaaaagctacaggtgctcaacaccagcccagcccatgaagacagccgtggggcataaaccctgcaaagccacag

SEQ ID NO: 5200 - DNA, 1337 bp, Artificial sequence
  DNA replication origin
gccacctgagataagcacgccgcacgcgcacgcgcacgccgcgcgcacacgcccggcagcagcttggctggcttgtaacggcttgcacgcgcacgccgcacgcgcataacggtttggccggcctgtaacggcttgcacgcgcacgccgcacgcgcgtaacggcttggctggcctgtaatggcttgcacgcgcatgctgcacgcgctttaacggcttggctggcctgtagcggcttggcttggctttgcgttcttggcttggcttggcgttggtagcttggattgacgtttcctgcttggattgacgttttctctctcgtgttcctttgctgggcttgaccttttctctgctgggtttggcattcccttgggtgggctgggtgttttcttgggggcgggggttggccctttctggggtgggcgtggggtcgcccagggggggcgtgggctttcctcgggtgggtgtgggttttccctgggtggggtgggctgggctggaatcccctgctggggttggcaggttttggctgggattgacttttctcttcaaacagattggaaacccggagttacctgctagttggtgaaactggttggtagacgcgatctgttggctactactggcttctcctggctgttaaaagcagatggtggttgaggttgattccatgccggctgcctcttctgtgaagaagccatttggtctcaggagcaagatgggcaagtggtgctgccgttgcttcccctgctgcagggagagcggcaagagcaacgtgggcacttctggagaccacgacgactctgctatgaagacactcaggagcaagatgggcaagtggtgccgccactgcttcccctgctgcagggggagtggcaagagcaacgtgggcgcttctggagaccacgacgactctgctatgaagacactcaggaacaagatgggcaagtggtgctgccactgcttcccctgctgcagggggagcagcaagagcaaggtgggcgcttggggagactacgatgacagtgccttcatggagcccaggtaccacgtccgtggagaagatctggacaagctccacagagctgcctggtggggtaaagtccccagaaaggatctcatcgtcatgctcagggacactgacgtgaacaagcaggacaagcaaaagaggtaaccaggcctgggctgggaggaggtgggacgtggggggatgatggggacataccctcctggcgggggaggagggggacctggctttctcgcctccgcaggcctcacaccaccctggatgtggaaacctcagagaggtcagggtacagggccctttatgaacagcaaca

SEQ ID NO: 5201 - DNA, 1796 bp, Artificial sequence
  DNA replication origin
tttaccccctccatctatcccaaaactcttttcctcctcttaccgcttccgccgcactgccgtctcggtcgcggttaccaccagtcgcagcgaggcgagccacggtgtagcggctccagcctccagcgtacggctggtgattacccattcctggtcctctaagccgggcactgagcagctccacaggaaaatacgggaacgtggaagagcctgacttcccttcagcagcagtcatataccgagattatatacaggaggattcctgactgcatgttctgattggatgagaaaaaccctccagggttacttggattggactttattatcatgttctgattggatgagagccagtcttaagacaaccaatcacagcatgaaaataaagtccaatcagagtaggcctagaggtttttctctcatccaatcagaacatgtagtctgggaaccacatgtgcgtaacctcagtaggtaaagcatgcggaggtggcgtcaggtcatttcaggctcttaagtgtgggcgtttggtatccggcatggctgctacctgtttctggctggagcctcggacactggctcactgcagttggtggtgtcgacagtggtaggagggcaaccagtagcgggagcttctcctgccaggcaggaagacgagtagaagggagcggcatgctggaggctggagcctgagcccctggggctcgccttgctgtgtttggtggtgacgtgggacactgcagctcggccagagtggtagaaatgtcctggtgtaggtgagttatccggggatgtactgcccgcctgtgggggcaggggttgggtgtcctattggggctcactacccgaggctgcactgcctgtgtcagggggctggttgggggcactctccgaggttgcattgctggcggtggaggggggcggttttggctggctgtccggggctacactgcccgtggtggcgggggtgatgggggggaggcaggttgtgtgcactaacgtgtactgccggtggcgggggaggggttaggggcactattttctgctgcactgcccggggcagggagtggttttggtggttatttggagctacaatgctggcagcggggggtggtttaggagtgttgtcgggtgctgcactgcccttactcagggtgcgctatcaggagctgcgctacctgtggtggggtgggggcggcgattttgaggcattgtcttgtgcagcaacacctgtggctgggtcaggttgtgggcactatcgggtgctacactgcctgtggagggggtggttggggggggtattggggttacactgcctgcaactggcacagggtgtggtgggtgtgctgtccgggggctacactgccggcggcaggggtcaggttagggttgctatgggggctatactgccagtggtgttggtcggctgcagaggtggtggggacagcaacagccatggtctccttgctccttcgggtgactcttctcttttccagactccagagttcctcctggtgcaatcttgagcagggcagggcccccacacccactgcggttctccggcctgcacctcccgcccacaccccatgctctgtgttggggagaccacctgggactaccgggtggggattagtgggcatcgcgggggactgtgggaacagggcactgtgggtggaggtgtcaggaatgggaaccagcagttgagtggggagggctggctgggtctgagtttctcctactcctgctccccaaggagtgcagccctggtgggcccagcaatttctggccagttgcacctggat

SEQ ID NO: 5202 - DNA, 2284 bp, Artificial sequence
  DNA replication origin
cccagactacatgttctgattggatgagagaaaaacctctaggcctactctgattggactttattttcatgctgtgattggttgtcttaagactggctctcatccaatcagaacatgataataaagtccaatccaagtaaccctggagggtttttctcatccaatcagaacatgcagtcaggaatcctcctgtatataatctcggtatatgactgctgctgaagggaagtcaggctcttccacgttcccgtattttcctgtggagctgctcagtgcccggcttagaggaccaggaatgggtaatcaccagccgtacgctggaggctggagccgctacaccgtggctcgcctcgctgcgactggtggtaaccgcgaccgagacggcagtgcggcggaagcggtaagaggaggaaaagagttttgggatagatggagggggtaaagagggtggttagtgccaaagggaaaagaggatagtgagcaggagagcgcgttgcaaaaaggcggtggggaaaagatagtgggaaaaaaagtttttgggtagatggagggagaaaaacggggtggggagcgggagggagggaaggttttgcagaaagatggtgggtaaaatgtttatgggtagatggaggaggaaaagagggtggcaagggaggaggaaagagagggtggtgggggggagaaacagcgttgagcagtagggagagaaggttttgtgaaaagacagtggggagaaaaggttttgggtagatagagggggaaaagagggtaacaggtgggggaagggaaaagggtagccagcgggaggaagacaaggttttgcaaaaagatagtgggcaggaaagaaagacggtggagaaagaaaagacagtgggtaaaaagtgtttgggtagatggtggggggaaagagggtaacgaggaggaggaaagagggtgacgagagggagcagggaaagagagttgggaaaaaaatgggaaaatagtttggggtagatggaaggcaaaaaagagagtggcaagcaggatagggcaaagaagaggacgagtgggaaggggggaagactgtgaaaagacagtagggaatattctggggggtggatggagggggaaaaggggaggtgagcaggagtggggagaaggctttgcgaaaagactatggtgaaatgtttttgggtagagaagggaaagagggtggcaaggaggagcgggggaaaagacgatgaggaaaacagttttcgggtagatgaagggcgaaaaagtggtgagcagcaggagtgaggagaagggtttgggaaaagacgggagaaaatgtttttgcttagatgaaggagcaaaagagggtgatgagagtgggatgggggaaaagaaggtggccagggagaaagggaaaagacggtgggaaaaacagtggggaaagtgggtaagtggatggggaaaagggtggtgagtgagagagcagagaaggctttgcgaaatgacggtggggaaaaatggtggggaaaaagttttggggtagatggaggaagaaaacaggtggcgagggggaggaggccaaaggcggtcgggaaaagaaggtgggaaaataatggtgggagacaaagatttggggtagatttttttttaatcagattatttgtatttttgcttttgagtagttatttatatattttgtgtattagccccttggctgatgcatagtttgcaaatactttcttccattctctgggttgtttcttcgttctactgatttcttcctgtgctttgcagaagcttttaagttttatgtaattacatctttgcttttgttgcttgtgcttttgacaagtttaatgtaattacatctttgcttttgttgcttgtgcttttgatgtctatttgaaaattccttgtcctaaccagtttcatgaaggatttatcctatgttttcttctctagtagttttatagtttcaggtcctacatttaaatctttattttgagtagatttttgtatatggtaagataacggcctagatgtattcctgtacatgtgggtgttgagttatcctagcagtttattgaagagattgtccttcccgaatgtgtgttcttggtgcctttgttaaaaatgagtacgccataaatgggtgaatttatttctgatttctctattctgtttcacttgtctatgtctgtcattccttcgtttctgtttctcccccgcccctttttttgatagtattatgctgttttggtattaccatgcttactacagatttgtagtatgttttgaagtcaggtgtgat

SEQ ID NO: 5203 - DNA, 866 bp, Artificial sequence
  DNA replication origin
gagcccacctggcatatcagcctcatccatctgagatgactggagggcgtccacactgccaggcagaacctgggctttaggggtacagaggtgaactctggaatccctggctatggcggtgtcatgatcccgtgggcatcagggactggggggaggctcaagaagatatgaggaacggggcgtcctgaggctcaagaagacatggggaagcggggtcctgacaaaacagacgcctggtgatgggatactcggcactcaggtaaggcagcagcagggaacggggcgggagaggaggccgcgggcactggtgcccttgctggagccctcctgaagcaagagcgaggagcggagccacatcccacatcctggcgggccctcctcctgctcggggcaggaggggtgggggaggagggagggagaaaggggggcgtgggggtgaggagcagctaagggtgcagttgggaaggccccgccggaggacagcatgggcacaggcgaagcggggacggggtggggggcgggggaatgcctgctcctgatccgatgtgtttagctggaagaaattcactgagctgcgcactcgcacttgggcacgtttccctgcataaagtttttgtttgtttgtttttgttttttttgagacggagtctcgctctgtcaccgaggctggagtgcagtggcaagatctcggctcactgcaagctccgcctcccgggttcacgccattctcctgcctcagcctcccgagtagctgggactacagacgcccaccaccacacccagctaactttttgtatttttagtagagacggggtttcaccgtgttagccaggatggtctcgatctcctgacctcgcgatccgccc

SEQ ID NO: 5204 - DNA, 1085 bp, Artificial sequence
  DNA replication origin
gcacgcggattccttgctggggagaaagtaccttggggcgccggaggccgccacaacgcaggcgcattcagctaaggaccactccctcccccgcactcctgcctcgccatttctcttccccgcccggccggccttcgctttgcgcacgcgccttttgaggtaacggcccaaagaggtggaagcgcttttcccgcccggccgcggggcgtggctctgcgcgcagcttgatgacgactttcggcgccgtggcggaatggcggcttccatctctgaggcgagcgacgctatggatcccacaggtgagtggcgcgggatgcgcgcctgagacggtccggcgccctgggggcttccccgagcccctgcggaggccatctccgttcctccgcgagccccaggactcgggccggccagccggctctgcccaggcagggcaggctggggagtggagggccccggttgagtcttctgccacccctctgggccatgcctttgtgccaccttcccgcgcggctcgtacactctgtcccggtccggtaggtgttcgctgaaggttaaccttcgttgaaggaattgagggaaggagagctttgtgttgaagttgagccttgggctcaacaggcggtgtgggtgtaagagccgggtgtgggtcccagctcgacccttcccctgtgtgctccacatctccgagccttggttttggaggctcccgaagcccaattggcaggagagttgggaacaagtgggcgcgtgctgttaagggaggtcttggcatgacagaatttgcttggaatgattagcgttgcccaagggctgtcgctgtcagaaaaacaaaacaaaacaaaaaacaaacggggtccgaagcagctcctggagaaaataggtgttggagagtcgccatgaagtggactctaggtgcatggcacgcagagacctgtgacgggggagggtggccatggcagagtcagataacaggggtgtgggagacacctcttgggaattctcgggtttgaatttcctttcttggaaatttcctagaaattcctctgggcctcattctttcagtcgctgcccatgaaagcttcttc

SEQ ID NO: 5205 - DNA, 1577 bp, Artificial sequence
  DNA replication origin
agtgaggtgggcaagggggctgagtgctggagtgtggccacggggccagcatatggcatctgtgtggcactgcccaggagactctgggaaggtgggagtctctgtttcagcctccagacttcctgtccagataagggacaacttctaagaggccgaggtgtttgtcacgcctggggctgtgctctccagcacagcacaccgcactctggccggctgtcttcccttggagaggggctctttacactcaccacagttcgcctctggggtgtgggggtgttggtcctgtccccagatgccagcccgactgtggggtctagagactgccacactatgtctctaataaaccgagtcagaaatcgtgccctgtggctaagcggcagggcagcgatggcctgcatggtcctgcccttggagctcaaagctgcttgggcctcctggggccaggcagtttccatggaaacaagggagagcaccaacccccagagataagccaataaacgcaacctgcaaaaggagagaacaggcagcaagagaggcggagggaacccggggggcctggagagagaggcgagtgtgtggcagccgggctgtggagcagaaccggagaggccgcaggctgcgggctggaggaaaaggagggccttgcaggggggctactgttcctggcagagagaaaggaggcctctggaggtcagagagagacacaaagagagcagacagagcgaaggtcagtgaagaggccagcacgcaggtgcccgggccctcttgggtcagcgggtgtgggtgcccaggccctggcactccccccatgaaggcagcctgctctccacgccttctcaggatgcctgtgcgggtctcctcgtgcttccaggcagggagccagctctgggccttcttccattggcctaggaggttgtgctgcatttcagagagagccatcgggagcagaagcaacatgcggagaggatgagcagggacagaggctccaccatgacactctcagtcccagaatctcctcagcccagtcaccacactggagagggaggaggcccttcagaccccgcaggcctctgcaccctgggagttccgcgtctgactctcttcctgcagtcatcagagggaaagctgaccaggactggccaagcccctgcgcaggaactgggcccaggtggggtaaaggcaggaagacctctgcctgccctggtccctgggcacttccctggatgctgtataccacaggacagagatcgagactgtcttttgaaaaacatttagagacaggatctcaccctgtcacccagagtggtctaaaactcatggcctcaaacgatcctcccgccctggggtcccaaagattataggcgtgagccagggcgcccagccccaaactgtcttgattcccgacgttgtaggatgaaggcctgagtgaagaggtggaggggagctaagcggaggagccctacccagcctggaccaccctggggtacgcactctgcgtccacctgacctggacgtgcctcctaaggctggcagcgaagcccaggagcagagcccacggatgggccctgcaggtgctg

SEQ ID NO: 5206 - DNA, 1197 bp, Artificial sequence
  DNA replication origin
gcctgtaatcccagcactttgggaggccgaggcgggcggatctcgaggtcaggagattgagaccatcccggctaacacggtgaaaccccgtctctactaaaaatacaaaaaaaattagctgggcgtggtggcaggtgcctgtagtcccagctactcgggaggctgaggcagaagaatggcgtgaacttgggaggtggagcttacagtgagccgagatcacaccactgcactccagcctgggggacagagcgagactccgtctcaaaaaaaaaaaaaaactagccaggtgggcatggtggtggcgcccatctgtagtcccagctacttgggaggctgaggtgggaggatcgcctgagcctgagggggatgttgccgtgagccaagagcttgtgactggactccagcctgggcaacagagcaagaccctgtctcaaaaaaaaaaaaaaaagaaaaaccgctagcaatggagatgggaggaggcttcagagcccagagagcagcaagggttacacaggggggtaacaagggttacagcaggaggggggtcggcagagccccacacgtgtgagctggggcagtgggagggcgtgggtgaggcagagcgctgtccaggtgctggtaggccgggggcgggaggaggcaggtgggggggcacggtcaagatgtatgtgagggttgtggcactggaaatgcaggcatagaggggccaggaggattagggggtgctgtgtgagcgaatgggggctccgagagaatttacccaaggacaggagtggcctggagtgctgggaccctcagggtcatttgttccttgagggctctgtcctggaagcatagcccaggtcctgtaggctgggtggcagaaagccaggacatgagggcaccgaggccctgtggagatagagtggaacctgaggaggaggtggaggggaatggggcagatgtggggccacaccaggagtgtgctgctgagtgagaagcagaggccacagatggaatgctgagagctctctgaggcccacatgttacagcatctgaccacacagagctccggctgccctggtaatggcagaatctggggtggaggacataaggggggttgttggagtgatccggctggggggcatggaggccataggtttcccacaggactcgggtgtggagttctccaggctgtgggccaggccctctcaagct

SEQ ID NO: 5207 - DNA, 1069 bp, Artificial sequence
  DNA replication origin
taaaaatacaaaattagctggacgtggcggcgcatgcctgcaatcccagctacttgggaggctgaggcaggagaatcacttgaatccaggaggcggaggttgcggtgagccgagattgtgccattgcactccagcctggacaacaagagcgaaactccacaaaaaaaaaaaaaaaaaaagatgcttatgatccggcggatcctctcctggggagaccaggccggggagagggcgcgggcgcccagtggcgggggcagcgggcaggcgcagcgaccggggccggggcggggatcctggcggcgaccgccgcggcggcagcgccccgggcccgccgccccctcccctccggcgaggggagccgctggatggggccggtcggggggcggcctgcggcgcagagcggcggcgacggcggcggactccccaggcgggctggggctgagcccggggaccggggcgggggctccggggggaccatgcccggaggccggcgggcagcagcgtggctcacgggcctggcgcgctgatgctcaagtgcgtggtggtcggcgacggggcggtgggcaagacgtgcccactcatgagctatgccaacgaagccttcccggaggagtacgtgcccaccgtcttcgaccactaagcagtcagcgtcactgtggggggcaagtagtacctcctaggactctatgacacggccggacaggaagactatgactgtctgaggcctttatcttacccagtgaccgacgtcttccttatatgcttctcggtggtaaatccagcctcatttcaaaatgtgaaagaggagtgggtaccggaacttaaggaatacgcaccaaatgtaccctttttattaataagaactcagattgatctccgagatgaccccaaaactttagcaagactgaatgatatgaaagaaaaacctatatgtgtggaacaaggacagaaactagcaaaagagataggagcatgctgctatgtggaatgttcagctttaacccagaagggattgaagactgtttttgatgaggctatcatagccattttaactccaaagaaacacact

SEQ ID NO: 5208 - DNA, 1964 bp, Artificial sequence
  DNA replication origin
gggaaccgcactgatgttgccagctcgacagaagacgggcgacccgagagccaggctggcttcgcctctgatccgcagagaccaggccagcgccacgaacaccacgcagggcgctccccgtccatggccctttgggtgccgacggcgcctcttctgcggcctttcccggggacgccgcatggggcgaatgcggtggggaggccagcgccttccttcctgctaccagcctgacacccgggcccccgggcctggacagccagaccccgcgacagggtcgccccggggcgcaggcgcggatcccccagacctggcgctgaagggggcgcgtgagccggacgcggccagagtgccctcagggtcccattcggcctcttggtgcaccggggccccgtggcttcccagaggagagcaagttagggggtcgggggagcggggatggcttctgggggaggaggagggcgaggcctaggggtttctcggaggaggaggagggcgaggcttagggggcttcccgggagaggaggagggcgaggcctggggggcttctcggaggaggaggagggcgaggcctgggggggcttcctggaggaggaggaaggcgaggcctaggtggggcttctcagaggacgagggcaaggcctggggggcttcccggaggaggaaggcgaggcttaggggggcttcccggaggaggaggagggctaggcctgaggggggaggttcccagaggaggaggagggctaggcctgggggcggggcttcccggaggaggaggatgcagacccggggcgcagcgctggaaggatccgcgtccaaggtctagtccccaaagcctctcgggaggccgggcgggcggcgccgagcgaatgtgaacaactcttgcagtcacttttcttggaaatgggaagcttaaaattgggtagtagctgagaaagatacaggttcaagagagggcttttttaagatggaggtatgtgttataaatgagggattaagtaccccttgtggagtccttaaggaacattccaataggctgtggagatgactttgggaaggcatatgaataaaggatttactgtactcacaggttccaaagagggaggcacgacataccttgtggggatcacctgggcagagcaccaacaaagcgggctcagccaagcaggtggggagccaagggcaaacaggttcctgtggacagttacccttattgggcatcagggtggggttcaccagcaaaggcaggaggggatatcatgggtgtgcttaaatgtcactaggccatggtcaggggagagtaagaagggggacttgtgacagggaccagccttgtcacattggtgtacctggtcatctgggaaaggtgcccacagcttgtttgtagagatactgaggaatcaggaaaatgggaagtttttagaagttgcaattcaagatgttacggtacatcatttttcttggcaatgactcattaaaaaagaagaaaaaactaatgaggcaggaatggaaataattccaggagcaaagtcctttaggaggagtggggaacaggatccagtacaaagtggggggttggccctagaagccagggaaagccgagtgcatggagacagatgtctgtgcctgctgcattttgtagaatgatccattctgatttctcctgtatcaaaattgaagccttcaggtgagagtgagaagcagagaggaaatgttgaggtttgaataagagaagaatacggaacggtcgtctaggaggatgggcaagcaaggagaccagaactggcaggcagcgcaagggctgctgaacagcccgagcagtgaagtggctgaaataggaacatcaggtgtctctggtgattatttcttttttgtagttttctgattttccagatgttccctaataggcattatcttacttccacagttatccttttttagactgttacagaggggtgaaaaataga

SEQ ID NO: 5209 - DNA, 1669 bp, Artificial sequence
  DNA replication origin
gccgtcgcagcctggcgttctcgcaggcgcatgccctcggaacgccgggtgggctgcgggcgcgacgggactcctggtctctcttccccaggacggacaccggcgtcgccgcgtcctacgaagccgggcgccgagcgggaggcgcatctgggccccaccggggctgcccgcaccgagcacgcgaacgcgccctcccgcccggaggccgcgggcgctgcggtcggagaaccgtagagccactcggctgggcgtggcgcggcggggcgggtaacggggcgggacctgggcgacggaagtgcgtagccgcgcggcattctggggccggaagtggggcgccagctgcgggctggtgtcatggcaggtgggcggcgccgcaggaggcgcctggcggagctgacggtggacgagttcctagcttcgggctttgactctaagtccgaatactctccagaagcggagacgcgggaggcacgcgaggctgcccggagtccggatgagccgggcgggagcccctcggccagccggcgtaaaggccgtgcctctgagcacaaagatcagctctctcggctgaaggacagagacgccgagttctacaagttcctgcaggagaatgaccagagccagctaaacttcagcgactcggacagctctgaggaggaagaggagccgttccactccctgccatatgtgctggaggaagccagtgaggatgaggatggagcagaggagggggaagatggggacagagtccccagagggctgaaggggaagaagaattgtgttcctgtgaccctcgccatggttgagagatggaagcaggcagcaaagcaacgcctcactccaaagctgttccatgaagtggtacaggcgttccgagcagctgtggccaccacccaaggggaccaggaaagtgctgaggccaacaaattccaggtcacggacagtgctgtgttcaatgctctggtcgtgttcaatgctctggtcaccttctgcatcagagaccttactggctgtctccagaagctgctgattggaaaggtggcaaaggacagcagcaggatgctgcagccgtccagcagcctgctctgggggaagctccgtgtggacatcaaggcgtacctgggctcggtcatacagctggtgtcctgtgtggcagagacagtggtgttggcggccgtgctatggcacatcagcgtgctggtgccctgcttcctgaccttccccaagcagtgctcaagagaatggtggtcgtatggagcacagggaaggagtccctgcgggtgctggctttcctggtcctcagcagagtctgccggcacaagaaggacactttccttggccccatcctcaagcaaatgtacatcatgtatgtgaggaactgcaagttcacctcgcctggtgccctccccttcatcagttccatgcagcggaccctgacggagctgctggccttggagccgggtgtggcctaccagcacgccttcctctacatccgccagctcgccatacacctgcacaacgccatgaccacccgcaagaaggaaacgtctgtgtacaactggcagtacatgcactgcctcttcctgtggtgccgggtcctgagcactgtgggccccagcgaagccctccagcccttggtctactcccttgcccaggtcatcattggctg

SEQ ID NO: 5210 - DNA, 990 bp, Artificial sequence
  DNA replication origin
gtggctgccagaaggtgcccgaccgccaggcccgaggcaccctggagggatccgcggggagggacccgcagaccgaggaaggcatgcagctgccccacaggtggcccggcctcttcctggccccctcacgtacatgtgcagagaccgttccttgtcttcggaaggtgaacttggaacaattcccacgggacactgcgaatgacggcggctgggcttgggctcccctctccgtcctcagagcatggccaggcccatggctgctgctctttgcccgagagcatgggagattgccccagggggcgcgcccggcagggccctgctgtgctacctggaaccaagaggcctggccgcagtctctgaccccactcccgcaggggactgcgcaggacacagatgccgaggccggcgtggtggctacgcctgtggtcccagctgctcgggtgaggcgagaggagcgcaggagcctgggaggccgaggctgcagtgagccgagagggccactgagccccagcctcagcgacacagctagaccctgtcaaggaaaggggaaggaaggaaagggaaagcaaagaaaagaaaacaaaaaagcagaagcaaacgggcaagaggccagcgtgtggtcccgggctggcctcagtagtaaagatgctcggaggattgattgatttgccggattctgcgcggtttcccagcctgtgcctggttgcagtgccctccctgtggtcgctggctgcccggacccatacccagccccacgcctgccctgccctcttcccagccagagtcacgtgaaaagacccgtggaggtacaggagggcggccctgtatctgtctcatcccccaaataccttgtcactaggaccacgttgcctgagatgcccattccatctctgtccttaaaggcgtcactttttttttttttttttgagacggagtcttgctctgtctccaggctgcagtgcagtggcgccatctcggctcactgcaacc

SEQ ID NO: 5211 - DNA, 1809 bp, Artificial sequence
  DNA replication origin
ctgattggatgagagcaagtcttaaaacaagcaatcacagcatgaaagtaaagtccaattagagtaggccttcgggttttctctcatccaatcagaacatgtagtccaggaaccgcaggtgcgtaacctcagtatataaagcatgcagaggcagtgtcaggtcattttaggctcttctgtgttagcgctgtgtacgtggcttagagaactaggagaagaggccactgcctgccactggctggagcccggggcactggctagctgtggttggtggtggcgacggagcagtaggagggcgacgggcagtgggagtttttcctgccaggctggaggacaaggagaagggagaggcattgccgcatgttggaggctgaagcctgcgccaccgaggctcccctcgctggggttggtggtgacgtcggacactacagctcagctagagtggtagaaatgttgtggggtaggtgagttttccagggctgcactgcctgcctctgggggcaggggttgggtgtcccattgggtctcaccaccagaggctgcactgcctgtggcaggagactggttgggggcactctctggggttgaattgctggcagtggggcaggttggctggctatggggggctacattgcctgcagtggtgggggtggtgtggggaggcaggttgtgtgcactaacgtgtactgccagtggagggggatgggttggggtgctatcttctgtgcactaccggtggcagggggtgggttgggtggagttctttggggctacaatgctggcagtagggggtggtttaggggcattgtcgggtgctgcactgtccgtgactgggggtgcgctatcaggagctgcactgctcgaggtggggttgggggggcaggtttcgggtgctatctagtgcagcaacacccatggctgggtcaggttgtgggcactattgggtgctacactgcctgctctgggggagggagggtgctttgggggggatattggggttacacaccctgcagctggtgcggggtttgtttggtgtgctatccaggggctacactgttggtggcaggcagcaggcggcaggttaggggtgctatcaggggctacactgctagtggcgttggcaggctgcggaggtggcagtgacagcagtggcctccttcctccttcaggtggtctccaaggaagggaccgttctcctcttccccaattccagactctagagagtgatctcctcctccttgcacaatcttgagtatgacagggcccccacacccaccgtggttctctggcccatgctctcatgctctgtgttgcagagacaacctgggactactgggcagggagtagtgggcaccactgtggtgggggtggggggatagggcactgtgggtggaggcatcaggaacgggaaccagaacttgggtgggcagggctggctgggcctgagtttctcctactcctgctccctgaggagtgcagccctggtggacccagcaatttctgtccagcaggacctgacctagggctggtttcagcaaaggcacacacactcaccctgggccccagttcctggccagcttttgccagaaggagaggctggactttggagggtgggtgtgagtgcctttgctgaaactggtccctgccacccagtggccagcgtgacaaggtgaggctctaatgctaccactccctgcatcccgttttaggcttttctagctttgcccatctagctgctccaagccaggctggaggaggaggaagaggaggagtcatctatggtacattggagcctgcagatggcatggc

SEQ ID NO: 5212 - DNA, 1082 bp, Artificial sequence
  DNA replication origin
ggtgactgagtccccgcccttgcctcggcagccaatggaagcgcgcagcggcgggcagggcgccccagccaccgtgttctgagcccgcgtagccccaccccgggcgctcgggccgctgtggccggagccctaggtcctcgcgggctgccctgagcagagtccagcgccggcgcttcccctttttttcggctgccgcgcccactggtgggggggtggcacggtcccaggttcgctccctgccgcttgggacccgccctcagatcgggatccgcgcccaggggccgacctccgggtgccggctctgggtggacggccgagcggtctcgccgggccctcccgcccgtcccctgggagccaggccgcgcggagtccgagctggggcgggcagcagccttgggtggagacggtcgccgagatcaggctgcccctcgtgccagaggaccccgggtcgggggcgtcccgcgctgtgcgctccagccgggcccaagggaggccggggaggggcagccacgccgtgggaaaggccaagtggcagcgggatcttctctgtgtatttcccgaggaatttgtggttcctttttcccggatgcgctggggcaccagggtcagtcctgtgtgagcatctcgacctgcacaagcctgctgggaaacagaactgaggcactggaagtgggttctggggaacgaagagcttctcttttttgcctgccctgacactcccatcttcagaaagtgtgcagaggtcagaggagagccgccgttccagcttccgggatcaccgaggggaggctggagagaatggactggcacctgggtctcttcaaggacaggcctaggttagcccccttctcgccgaggtcggaagaattaagaggggtgtcactggaaggggcgtcagtggacaccagtttgaggtcgttgaggggttgaaaggtagcattggggcctggatgtgtgcctgagtctctgaagggtcaacaggggcatgatgtcaggtggtcaatttaattcactaggggctatcagagtatttaagggcacactttcttaaaggtcccggtaggaagtggttttggctttgc

SEQ ID NO: 5213 - DNA, 1163 bp, Artificial sequence
  DNA replication origin
gccgggctggaccttgctggcccgcggcgccatgagccgcagcctggactcggcgcggagcttcctggagcggctggaagcgcggggcggccgggagggggcagtcctcgccggcgagttcagcgtgagtggcacacggggtccgcgagcggcgcgccccggccctggccctgcgtacgcctgtcctccgcgcacggcgggctctgcctttctgtctcggtgtccccggtgtctccccgcctcggggggtctctccgtgtttctctccccagcacttctctgtcgctcttgctgtctccgtcttcactctctgccccccggccccggagcgcgacgtccacggccaggccgggacggaccgtgcacaccctcgttcccggtgtcctcgtcgcgctcccggaacaacctggctgcgggcgggacaggtggggcgggcgccgcaggggagggcgggcggccctgctgcgctggacagccccggccccgccgcttctggcgacctgactgtcccctgtgaccacaggaaggaaggggctgcagcagggcgaagaggaacacggaggctgtggcgtggtgagggtgtgaacgccgggctcgaatccgcgtccgggcccgaatccgcttcccgtcccgaatccgcgtcccggccatccgcgtgtggtccaggcggtctacctggcccctctgacctcggcttctcccttggtgaaatggggacatgaatgaccaaactggtctaaggattaaatgatgtgggtgaaaagcacttagtacatattgggcgcacacttcgtaggggcgttcgtcactgcctataaagattctaaacgtgggccaggtgcggtggctcacacctgtaatcccagcactttgggaggccgaggtgggaggatcgcttgagctcaggagttcgagaccagcctgggcaacacagcgaaaccccgtctctactaaaaatacaaaaatcaactgggcatgggcgcatgcctgtaatcccagctactagggagcagagacaggggactcgcttgaacctgggaggcagaggttgcagtgagctgagatggttccactgcacagctgagatggtgccactgcactccagcctgggccacagagtgagatcccatctcaaacaaaacaaaaccaaacaaaaaatctaa

SEQ ID NO: 5214 - DNA, 1381 bp, Artificial sequence
  DNA replication origin
caagggccttaagtctccgctgcgaaggcggctcaatcccatgtccgcagcacccaacgtgcggcctgacaagaaggcggcgtctagaattatttgctgaattttttttgttgtttttttgagacaggatctcgctctgtcgcccaggctggactgccgtggtgcgatctcggcttactgcaacctccacctcccgggctcaagcgactctcctgcctcagcctccggagtagctgggattacaggctctcaccagcacgcctggctaatttttgtatttttagtagagacagggtttcaccatgttaaccaggctggtctccagctgggctcaagtgatccgccctccttggcctcccgaagtgctgggattacaggggtgagccacctgaattaaggtttgattagaggatccaggaaaggcctaactcagaaggcagggcaagccttagaggcagaggcaaggggtaaatgaatcatcttgggataattgaatcatcttggggtgggttcccagagctcaattcgaagaaagggccagcgaacacttggcgaagtgaacaaggaacggactggtgttccaaggatgaagaaggggttagcctgagaaattgggcagggaagaatccggggatggagccgggtacctgaggacccctcctggtgggcggggtatggcgagaagtgcctggggagtccggaggaagagggcatcgtcgtagagtggggcacaattctgaagaaaaacaggaggggaggctcctgagggaggaagctggccaggcctctcaaggggctctgggagaaagcttaagatgggagagcctgataaggatgcctggaggagggcacaggtggatgtcatagtcagtgcctgctcccagtagtcccgggggctggaccctgctcggggtcctggtctctgagggtgctgatggtggacaggagagtgggaaaggagcctctgtacctctttgatgttctggtagtgggggctggcattctggagtgtggagcagaacatctgagccaccgtgtggtacaggaacctgtactgctcctgttggggtgagggaccatcaagaagggaaggcaggggcaaatgacagcagtgggccactgtccctgaagattaggagacccagggttcacctctgtctgcacggccgcaggccgctgcttcctcatcttaaggaccacatcaaagagactgaagtcaggtgggatcatctggggcagacagacaaggcacttgagcaggacacgtggtcatgggcagcacactgcacacacaggatgcctgtatcgtacctgggtcaggagcagctgcctcacataatccacggtgcacaggacgcctgttcgcccacaacccgcactg

SEQ ID NO: 5215 - DNA, 1073 bp, Artificial sequence
  DNA replication origin
gaccgcgactgcgaccgccagggggcgcttccggggcgtggccagggacgcctggacatcagcgtcggggcgtggccaggctagcggctggggtccccgcggccgccagggcctgacggaccactgcaggatggttccgccctgcggatcacagcaggatgatgccctgagaaggagcaagcctcgactcaccgcggccaggcagcgtccccctcgcgtcctccgcgtgcgccccgggtcgctgggcgcgcggcgtcaccttgctgtagagcggcgcctcctccgcgctgcgcgcccccgtccccgtccccgtccccgtctgcgtcccactcccggcgcccgctggagccccgcgcttctgcaccaccgcgtaggtgtcagccatggcgtggcccggggacccgggcacagagatgctcctgcaggcagggagggccgggaggaagtgaaacggcggcgctgggcagggcgggagtggggaggctgctcagcgcgcaaaccacgggcttccttcccgccgaggcggtgcgctagatgggagggagggctccttgggttggaggcctcgcttctgtgtccctagcgccctgcaagttagggggatgaaggaggaacggggtcagcctggagggtaatttggggcagagtgttggtttgaggggtggtcatttctgtgtcaacgtctactgaacaaaagaatgcggaagtggcatagaagacaggaagggatggccgcaaggacaagggccttaagtctccgctgcgaaggcggctcaatcccatgtccgcagcacccaacgtgcggcctgacaagaaggcggcgtctagaattatttgctgaattttttttgttgtttttttgagacaggatctcgctctgtcgcccaggctggactgccgtggtgcgatctcggcttactgcaacctccacctcccgggctcaagcgactctcctgcctcagcctccggagtagctgggattacaggctctcaccagcacgcctggctaatttttgtatttttagtagagacagggtttcaccatgttaaccaggctggtctccagctgggct

SEQ ID NO: 5216 - DNA, 1631 bp, Artificial sequence
  DNA replication origin
ggggctgagcctggtggctcacacctgtaatctcagcactttgggaggctgaggcaggaggattgcttgaggttgggagttcaagaccagtctgggcaacatggcaaaaactcatttcttaaaaaaaaaaaaaattagacctgtagtcccagctactcggcaggctgtgtgaatagtaaggggtcagtctggttgggagtctgtctggcgggggtctggctggggtctgcctagataggtcctgatttgctgggggtccatctgtctgaatagctggagatgtgtactcatttgggggacttgtctgtcaatctggaggatcatgtctgactagctggggtccatccatcaagacatcaagatgagagtctggccggctggctgggatgtcaggattccatgtggctgatgtctgcctgtctggcagtccatctggttggttaggagtctgtctggccagaaggtctgtcagccagccagcccacctgagggtgggggtggggtctgagaactctgtgtatctgttcagcaggggatctgtttatatctgtctagtaatctaacttagggggtccacctggctgtccagctagcagagatgtctgtcttttgggggctctgtttggtggtctctctggctgcactggtctatcaagctgttggctggtctctctctctctggctggggatccctttgtccacctgtggactgtatctctgaagctttggctgtctgtccaggttggtggtccatctgtctgtctgcctatctggaggtctttttatcggtctgcctggggttaatctgcttggctgtggttatgcctggcttagttctgcctggatggcgaagtgtccatccacttctctgtgtggtcccctgagtgtccaagtgagggaggctcaggtgctgaggatggactagtgctgtgtggtgaggagagcagtctccggaagctcatctgtcccttctccccttcataactcaggggtcatgccccttcctgatcttctttcttgaatctgctctgtgcagcctcaccagccactataccctagctacctcctccagcctcaagccttgaatgctacagtcattggggcaaagcccccacatttcccaccctgagaaactttaactttgatccaggcccactgtttccattctgcgcacggcgctcagcagcaccggggcatcagcagtccgagctcacaagaggcaacaggcaggaactggcgttagacttacacccgggtccactcagcaggcgggtcccggggacccttcggcctcccaatgcgcaggttgaaacctgggagaagaagggtgccgtgggtctcatggagaagctgaggtgtgtggaagctggcagacatgaagaaggccatccccccgcctccaggtcctcctggttcactgcagccacatccacaggactaagctccatgccccatcaaccccagactcctgggttcactcaaagcagcaaagtcccagcaacccaggctctacctgacttacctagcccaccggtctgagctccacccgccacgtcctcgtaggcgccagatccggcaggactttggtcagcaggaactgagggcagcagaccccccacgggtcagctccg

SEQ ID NO: 5217 - DNA, 1272 bp, Artificial sequence
  DNA replication origin
ttcatggtttaggagctttgagatttgaatactggcctgctgggttttggacgtgcattgggcctgtggtcccatttgtgttatttttctgggaaatttcttccctttggagtgagaaagcttacccaatgcctgtaccatcatcgtaccttaaaagaactccattttaagttcagggactccttggcagaagagaccgtagccttgtatcaggtaagactttgaacttcttacatttgagttaatgctggaatgagttaaggcttttgtaaacatttgaaaaggcatgactgtattttactctgtgagaatgacatgagattcgggggagggggtcaaggtcagaataatatggtttggctgtgtttccctagaaaaactcatgtggaattgcaatcccgaatgttggaggtggagcctggtgggaggtgatttaatcatggatgggaggtgggtggggttggagggaaaaagaggtgggtagcgtggtgaggagtaagctcgctgtagggtggtgggagggtgggggtagtaggaaggaggagtagcctgctgcagaggcagaggctcgtggaaaacctctgctaggactgtgcacctgtggctttgcagggtgtagcccccgtggctgctctcatgggctgggctggtgttgagtgccggtagcttttccatactgaaggtgcgagctgttgatgggtctatgaatctgggctctggaggatggtggcctcctgcataggggctccaagcccaaatttttcttctgcactgccatagtacaggttttccaagaggctcaggctctgcctcaggcttctgtccggaaacaggagggggtggaggtgggttggggacggatccttcactaatgattaagcaccatcttcttgatgctgacctcgtgatagtgagttctcatgaacttcctcatagtgttaagccactggttggatggagcatgagcctaggggcttgggaggctctgtatagattttggaggatgtatggaaatgtctgggtgtctaggcaaaagccttcctaaaaggcagaacctcataagaaacctctactagggcagtgcagaaggaaaatatggggttggagcccccacactggaggccaccatcatgaagaccgcagattaatacaccccgcaacagcttgtaccgtcagtgggtaaaagctacaggcgctcaacaccagcccagcccatgaagacagccgtggggtataaaccctgcaaagccacaggtgcagagctgcccaagg

SEQ ID NO: 5218 - DNA, 1259 bp, Artificial sequence
  DNA replication origin
tctttgttagcaggaagctgagggcccgttgcagggcagcagagtgataggtaaatagggggagcatattcattcattctctcaacaattaaatattaaatacgtctgtgctaccagggatacaaaggtaaacaaagcaggaaaaaaagttctgcctttatggccagtacattctggtaggagaagaaagaaaataaacaacataagtaaatagtatattagaggaagaaaaatgctatggagagtaaaaaaatgagggcataaagggacatttggagtgtttcacagagaaagtgacactctggcaagacctcctctgctgagggagccaggatgcctgcaaagagtgcgctgggcccaggaaggagcagggagtgctggcccctgctgtaggcctcgcaggcctgctctctggtggagccagggaggcgcgatctgacttttgagcctgtgtggagcatgaaccgcagggcgcagggtggaggcggctgcgaggggacccggagcctaggtcagggcggtggaggctggaagcttgcaagagtcgcagggattaatgctgggttggatctgggtgtgagagaaagagcacacggggaggactcggggttttccgtcctgaggagccatgaactgaaacggagactgttttgtttggagctgactgtgaaggaagggcgagaggtggtgtctatgagcatcaagtggaaaaacggaggagacgctcctagcgagggagaggcctgggcggggcgcgatgagcaggcaggtggcatttggagctgcgggaataaatgcaaccccagggagcaggtgtggacagaaaacagaagagcggccttgggcagccaggagtcccgaaatgtgcgcggaggaggggccttggagcgggagaggagtggtccaggaagccacgtgcagggggtgctgaggagcagcagggagggaggccccctgtcttacagctgggggctgcacttctccataggccattgctgccggcaggagcaggttcagggtagtgcagaggtggagagctgaactggagtagctcacatagcgagagggaggaggggtgttcaaggtaagacgagaccacgctttggagccattttgctctacaggggaacagagaaatgggatgcagctggagagcgaagcatgaagaggatgttttaaagatgggccaggaaaaagcacgtttgtccaactgactagagaggaagaagtgggtgattcaggagtgaggtggaaggcag

SEQ ID NO: 5219 - DNA, 1509 bp, Artificial sequence
  DNA replication origin
tgccttgaagcaggatgaatgggtaaaagaacacaaaggtgttactgccctctctgcacctgacagatgactctgaaggatgactgcactattttgtctagctttgatgaacagaggccacattttcagagccattatcattgtccttggcaaatagcagtcccagcactggatgtttccaagaatgtaaaatcatgaccagatatcctggaagtcatgacagctagtcccttccccacattcctgctggggcggcctaatggcaggtgggaactgacttcatctgtgaggaccacacaagcaccccctgtgattctgatgcctgtccatgaaatctgtgtcctcctgtctctagggcatagaggagcagctggtgacttcagaggcagaggcccagcaaaaggagcacacatagaagagggggtgctttgggaaaatgtggtctgcacggcagggggggagtgctcttccctgctggcaccatgcagagctagctgaggagaagggagcagggtgggaagtggggttgggggctgtgcctctattaagagtgtcccttgactgctggtcctaccagggagagaagagaggacaggaaggtgaaggagagctaagcatgcattgtgtactcctccattgtgggcctccaagagcaagagggaggctgggggagccgggttgaagatctttgggccactggtgctgccctccatgcagccctagcaggacggcctgagagcgacaggtgggaagtggggttgcggggctgtgctctttgacagatggaggtgcccagggctgactgaagtggagggagggggcaggagagtggatcaggggccttggcttcatcaggtgtgcctctggacactgcaccaccagcccacccaggcctgggagagggcagagctcgggctggggccaagaggctgggccttcactagctgtgccctccattgctagccccagccagtgatcaccaaagaggagaggagagaaggcacaggattccagagggaaatgcggctcctgcctgtgtccctgctggtcccacagctgagcagatggtgctggcctagtgcagggaaaccacctgagatttacgcagctaacttgtctcccagcttcctctccgattaccagctggtcatctcctgaaattctgctcactgaaacggacatgtgaggacatggtttggaaatcatttttaaactcagcaatctggatatgagaacttcaaaacaaaatttaattcactatatgattcccaatgaatgcgactttcttcaatgatgaatcgatctactttgctaaatgctatgtggcctggcactggaagatgcactgtggatcggtatggagggtgagccgcaatgaaggcgcaaccgcgtgcgggggtgagctggggaccgaatcacagggcctcttaccacagcggtcaggcgtctggagggggaggcagtgcagggccccgaagatgcacctgcagaggtggcaggcgcggaggg

SEQ ID NO: 5220 - DNA, 2105 bp, Artificial sequence
  DNA replication origin
ctttcatgaaaatatttattacccaataaaaatattcacccagtgcttcagcttacggtaaactaaacacatctattatttacaacatagaaaattaaaggcgatgcccaagtcccggccttccgcaggggcgccgctcccgctggaggacggaagggaccagggaccgagggtgcgcgggcgcatccgggcgcaggaggcggtgcaggagtgcgcagggcagcaagagtagcaggctgggcgcgcccccggcgctcggcccgtgagcgtgggaggccaggaagtctttcgggtctggaaaaacagagaaaccggagatgtatgaaataaagtgttccggctcggtttgagagagtgcaatagaaacgcctgctccctgccttctgcaggcccttttctcctgcgccctcactaggctctgtccctgggacgcgctgcagggtgaggtgtgcggaggccagtcccggccggctgcacagagggaagcctctaaatgtttgtagaactcggagagctgaaggagaattacagtactgtgtttaaagggggaacgaacaacagcccttccgtctttttcatttggcccgtgacctttcagggagtcccgctccaggtcattgagcgatggggcacatagacccgatttaaaacagtgctatagtatataaatcagctcgcttccatctgctgcaacaaaggttccacttttccccaaatgagtgctcgaaatatttctttgacgagggacagctgatagagcaggagggtgcagccatccaaagtctggctgctgttctgaggaggcctagccctgtgagtggcgccgcgccccatgggactcacctgccggccccctcgcccacaccgctggtcataggaggccatgcctgaacgcctagtccctgtgtcccctccccacccctcacagcaggcttcattcatgctgaaccctgagggtccctgagccttggtctttgtgtagctgggaccccagcccagaacagcggaatgggaatctctggagtggtggggctgggcagggtcttggctaatgccctgggtggtggttgccatgtgaagcggacaaccttgcaggcatggcaaccagcaccactagaacattctcacaagcgagtccaggcctgtcttggagtggggtcaggctggtagaagagcatgcccaactacagggatcctctccccggggccactgagcaaaggccagccacctccctgccccctgaccaggcctgccctgccctctgctatacctccaggagatgtcctctggacttgggaacctggcatgagcatgaaactggaaattaacaaggaatgatgcagatgaacacctgcagcaagaaccactctacacctgtccacaggtaagctgtggtagcattggccaggtcaggctcactccaggcttgggtgccacctccccatagcaccccaccttgggagagaggattgttccaggggtgccagaatccccaaacaggaatgctaacgtctaggctcagacgaggctccagagaagctggtgctaagacaggcgctcacagcatgtgaagctattcaggtgagaaaggggtcagcagtactgggtccgtgctggccttcccctgagggaaggaaacaggagggctggacacagggtgtatgcttacaggctcagagtcagctggtgccaggacctgtgagagccattccaatggcatcccagaggtctgtagactgggtctggcccacggatgtttgtttgcttgttggttggttggtgggtttttgccagaatggcatgtttaaaaatgagtttgcagcagtgaggtgagtcttcaccgggccccatctcacttccgtgttacctgcccatctctgaagacacctgagttggctacatcactgtgtcattccacagactctgaattttagagtagtaaactgtctcttgatgcttgtgaaaactgatacttgatgctttagggccacagtagaaagaaccacccccttagactaacaaggagatcctggctagctcaggactgcgcaaaagtccctgctacatggaagcttttcattcttggacccgcagagcatcagtc

SEQ ID NO: 5221 - DNA, 1845 bp, Artificial sequence
  DNA replication origin
ctgggcttgggccatagttgccttcatgtctcccctgcacagtggacttcctggagggaggggccctgtgatgctctgggggtttccagcgacccctgcctcctaccgacctgggctccccgcacccgccgcgcgagatccagtcccagcatcctgatggacgcaggcgttttcctggagccccgcggttggccacgccccgcgctctccgccccgtcggggacgcccaggccaccggcctgatgagggaagcaggggcagagcgctcaggccagggccggcgggggcactgcgcactggccgcctccctcctctggccaatcctcctgccgctgcgcgtctagtccacctcgtccctctctgcaggtgagcgggcaggggtggcccagacagagcgaggagcagaggtcgcctgcctctcgtggccgtccccctccgcccgatgaggacacccgccaggagggcccagccaggccaggtctggctctccgggccctgggaggaaggcgcctttggaaggaggggagagggcggggcgctcccccgctggctctgccgggttggatctcaggcctctacagtccagcgccccacacaccctcatttccaggatggggaaatgctactgcagacgggattgtgcgcggactgtctctcgttcgcttcagtctgggagaacactgggccgggaagggagggcactgccgcttaggggccgcgcagtggagcagtacatcccttctgtagcaggcagcttctgcgccatcacaaacggcattgaggcctgggaaaagtcgggcccagtgctcaccccgtagccccacgggccgtcgcccctgacagggggccatgggctgtgtgctcccgggtcatccaggtggtgctgtcacatgggccacgtggcttcaacctgagccttggacttgtccctcctgtgaagtgagaggaggggcctggtggccccgagtcctgttgatcctgatatttgggggcacccggggctggctggcgtccttcgtgcaggcacctcattgctgggctgtctccacagtgtgtgagaaggccagattcagcggcaattcctccgggaggcccaccgggaagatctttggaggccagagggctgagccttagcggtggccatggcaggccagtctcctctacctaggcgggcacatctgtggagctgccctcatcgacagcaactgggtggcctctgctgctcactgcttccaaagatgcatcttccctccacgggccccgctgtgggagtgcatgcaagagggaagcccaaagtgagggcgcagtcttttctttgtacgctttgttctgggacagtttgctgccccaggtgtcctgcctttgacccagcagtgccctgtgcctggaatgctgtccctgctcgtcactctgctccagtctcctgaccaactgtgtggcatctcccaagcagaggctcctacctcatctctcactctggggttgggcattccccaaccccaccccaccccacaccacattggtcagcctgctaagatggtgtggttgcctcattacattgcacattactttgaaatagctaaatggagccgggtgtgatggctcacacctgtaatcctagtacttgggaggctaaggtgggaggattgtatgagtccaggaattccagaccagcctgggcaacatagtgacacctcatctctacaaaaagtacaaaaattagccgggcctggtggtgtgcgcctgtagtcccagctacttgggaggatcacttgagcctgggaggtcaaggctgcaagtgactgtgatcacaccattgcactccaccctgggtgacagaatgag

SEQ ID NO: 5222 - DNA, 1041 bp, Artificial sequence
  DNA replication origin
ttccccatcctggaaatgagggtgtgtggggcgctggactgtagaggcctgagatccaacccggcagagccagcgggggagcgccccgccctctcccctccttccaaaggcgccttcctcccagggcccggagagccagacctggcctggctgggccctcctggcgggtgtcctcatcgggcggagggggacggccacgagaggcaggcgacctctgctcctcgctctgtctgggccacccctgcccgctcacctgcagagagggacgaggtggactagacgcgcagcggcaggaggattggccagaggagggaggcggccagtgcgcagtgcccccgccggccctggcctgagcgctctgcccctgcttccctcatcaggccggtggcctgggcgtccccgacggggcggagagcgcggggcgtggccaaccgcggggctccaggaaaacgcctgcgtccatcaggatgctgggactggatctcgcgcggcgggtgcggggagcccaggtcggtaggaggcaggggtcgctggaaacccccagagcatcacagggcccctccctccaggaagtccactgtgcaggggagacatgaaggcaactatggcccaagcccagaaatatacagtaatgatgagagggcaagtgcttacatcacgtcatcaagcatttccagcttgctttccgagttcaacccactcctccataaggacgccggctcaagggattaggtcaggcccactagggacaatacaatatccttttcttaaactccagcatacaacagtcacgagagggctgtgccatctcagtcacaggtccctccacactcaacaggagggtcatagacaacagctgagtggcagcgagtcatcttagaattctacctaacacagcccaacctccggcctccagtgacgcatgtccctcccaatccccaaaatgcattcagcatacctcaaggttaccaagagcctcatcctgttactggaaaggggccgattcagacatcaagacaggattcttggatcttgcagaag

SEQ ID NO: 5223 - DNA, 1079 bp, Artificial sequence
  DNA replication origin
cacaatcccgtctgcagtagcatttccccatcctggaaatgagggtgtgtggggcgctggactgtagaggcctgagatccaacccggcagagccagcgggggagcgccccgccctctcccctccttccaaaggcgccttcctcccagggcccggagagccagacctggcctggctgggccctcctggcgggtgtcctcatcgggcggagggggacggccacgagaggcaggcgacctctgctcctcgctctgtctgggccacccctgcccgctcacctgcagagagggacgaggtggactagacgcgcagcggcaggaggattggccagaggagggaggcggccagtgcgcagtgcccccgccggccctggcctgagcgctctgcccctgcttccctcatcaggccggtggcctgggcgtccccgacggggcggagagcgcggggcgtggccaaccgcggggctccaggaaaacgcctgcgtccatcaggatgctgggactggatctcgcgcggcgggtgcggggagcccaggtcggtaggaggcaggggtcgctggaaacccccagagcatcacagggcccctccctccaggaagtccactgtgcaggggagacatgaaggcaactatggcccaagcccagaaatatacagtaatgatgagagggcaagtgcttacatcacgtcatcaagcatttccagcttgctttccgagttcaacccactcctccataaggacgccggctcaagggattaggtcaggcccactagggacaatacaatatccttttcttaaactccagcatacaacagtcacgagagggctgtgccatctcagtcacaggtccctccacactcaacaggagggtcatagacaacagctgagtggcagcgagtcatcttagaattctacctaacacagcccaacctccggcctccagtgacgcatgtccctcccaatccccaaaatgcattcagcatacctcaaggttaccaagagcctcatcctgttactggaaaggggccgattcagacatcaagacaggattcttggatcttgcagaagaaagagttcgggcgg

SEQ ID NO: 5224 - DNA, 1791 bp, Artificial sequence
  DNA replication origin
ggcttgggccatagttgccttcatgtctcccctgcacagtggacttcctggagggaggggccctgtgatgctctgggggtttccagcgacccctgcctcctaccgacctgggctccccgcacccgccgcgcgagatccagtcccagcatcctgatggacgcaggcgttttcctggagccccgcggttggccacgccccgcgctctccgccccgtcggggacgcccaggccaccggcctgatgagggaagcaggggcagagcgctcaggccagggccggcgggggcactgcgcactggccgcctccctcctctggccaatcctcctgccgctgcgcgtctagtccacctcgtccctctctgcaggtgagcgggcaggggtggcccagacagagcgaggagcagaggtcgcctgcctctcgtggccgtccccctccgcccgatgaggacacccgccaggagggcccagccaggccaggtctggctctccgggccctgggaggaaggcgcctttggaaggaggggagagggcggggcgctcccccgctggctctgccgggttggatctcaggcctctacagtccagcgccccacacaccctcatttccaggatggggaaatgctactgcagacgggattgtgcgcggactgtctctcgttcgcttcagtctgggagaacactgggccgggaagggagggcactgccgcttaggggccgcgcagtggagcagtacatcccttctgtagcaggcagcttctgcgccatcacaaacggcattgaggcctgggaaaagtcgggcccagtgctcaccccgtagccccacgggccgtcgcccctgacagggggccatgggctgtgtgctcccgggtcatccaggtggtgctgtcacatgggccacgtggcttcaacctgagccttggacttgtccctcctgtgaagtgagaggaggggcctggtggccccgagtcctgttgatcctgatatttgggggcacccggggctggctggcgtccttcgtgcaggcacctcattgctgggctgtctccacagtgtgtgagaaggccagattcagcggcaattcctccgggaggcccaccgggaagatctttggaggccagagggctgagccttagcggtggccatggcaggccagtctcctctacctaggcgggcacatctgtggagctgccctcatcgacagcaactgggtggcctctgctgctcactgcttccaaagatgcatcttccctccacgggccccgctgtgggagtgcatgcaagagggaagcccaaagtgagggcgcagtcttttctttgtacgctttgttctgggacagtttgctgccccaggtgtcctgcctttgacccagcagtgccctgtgcctggaatgctgtccctgctcgtcactctgctccagtctcctgaccaactgtgtggcatctcccaagcagaggctcctacctcatctctcactctggggttgggcattccccaaccccaccccaccccacaccacattggtcagcctgctaagatggtgtggttgcctcattacattgcacattactttgaaatagctaaatggagccgggtgtgatggctcacacctgtaatcctagtacttgggaggctaaggtgggaggattgtatgagtccaggaattccagaccagcctgggcaacatagtgacacctcatctctacaaaaagtacaaaaattagccgggcctggtggtgtgcgcctgtagtcccagctacttgggaggatcacttgagcctgggaggtcaaggct

SEQ ID NO: 5225 - DNA, 2393 bp, Artificial sequence
  DNA replication origin
tgcgttgccttgcggtgggttccacagcagacgcttcccccttaagggagatgttgtgaaaggaaggtgctaactgtcaggggaaggtggcggtgccaggctttctggctccagctttggctccttctcgctgttgttctgctgtctctacctaccggtcacagtggtgctggggacacacgtgtccctctcccaaggatctggagccaaaggcgctttcatgaaaatatttattacccaataaaaatattcacccagtgcttcagcttacggtaaactaaacacatctattatttacaacatagaaaattaaaggcgatgcccaagtcccggccttccgcaggggcgccgctcccgctggaggacggaagggaccagggaccgagggtgcgcgggcgcatccgggcgcaggaggcggtgcaggagtgcgcagggcagcaagagtagcaggctgggcgcgcccccggcgctcggcccgtgagcgtgggaggccaggaagtctttcgggtctggaaaaacagagaaaccggagatgtatgaaataaagtgttccggctcggtttgagagagtgcaatagaaacgcctgctccctgccttctgcaggcccttttctcctgcgccctcactaggctctgtccctgggacgcgctgcagggtgaggtgtgcggaggccagtcccggccggctgcacagagggaagcctctaaatgtttgtagaactcggagagctgaaggagaattacagtactgtgtttaaagggggaacgaagaacagcccttccgtctttttcatttggcccgtgacctttcagggagtcccgctccaggtcattgagcgatggggcacatagacccgatttaaaacagtgctatagtatataaatcagctcgcttccgtctgctgcaacaaaggttccacttttccccaaatgagtgctcgaaatatttctttgacgagggacagctgatagagcaggagggtgcagccatccaaagtctggctgctgttctgaggaggcctagccctgtgagtggcgccgcgccccatgggactcacctgccggccccctcgcccacaccgctggtcataggaggccatgcctgaacgcctagtccctgtgtcccctccccacccctcacagcaggcttcattcatgctgaaccctgagggtccctgagccttggtctttgtgtagctgggaccccagcccagaacagcggaatgggaatctctggagtggtggggctgggcagggtcttggctaatgccctgggtggtggttgccatgtgaagcggacaaccttgcaggcatggcaaccagcaccactagaacattctcacaagcgagtccaggcctgtcttggagtggggtcaggctggtagaagagcatgcccaactacagggatcctctccccggggccactgagcaaaggccagccacctccctgccccctgaccaggcctgccctgccctctgctatacctccaggagatgtcctctggacttgggaacctggcatgagcatgaaactggaaattaacaaggaatgatgcagatgaacacctgcagcaagaaccactctacacctgtccacaggtaggctgtggtagcattggccaggtcaggctcactccaggcttgggtgccacctccccatagcaccccccaccttgggagagaggattgttccaggggtgccagaatccccaaacaggaatgctaacgtctaggctcagacgaggctccagagaagctggtgctaagacaggcgctcacagcatgtgaagctattcaggtgagaaaggggtcagcagtactgggtccgtgctggccttcccctgagggaaggaaacaggagggctggacacagggtgtatgcttacaggctcagagtcagctggtgccaggacctgtgagagccattccaatggcatcccagaggtctgtagactgggtctggcccacggatgtttgtttgcttgttggttggttggtgggtttttgccagaatggcatgtttaaaaatgagtttgcagcagtgaggtgagtcttcaccgggccccatctcacttccgtgttacctgcccatctctgaagacacctgagttggctacatcactgtgtcattccacagactctgaattttagagtagtaaactgtctcttgatgcttgtgaaaactgatacttgatgctttagggccacagtagaaagaaccacccccttagactaacaaggagatcctggctagctcaggactgcgcaaaagtccctgctacatggaagcttttcattcttggacctgcagagcatcagtcagagcaaggagggctcttggtgatccccagacagagagtccctgcagcagccatgcttttgtagcaacata

SEQ ID NO: 5226 - DNA, 1646 bp, Artificial sequence
  DNA replication origin
agaagagcttgccctattgcaatggcacctgccacggaggatgttccatctatcatcactgttgtcaaacttcaagtcatcataaccaccatcagcacagccatcaccagcatcactgtaacttgccttgaagcaggatgaatgggtaaaagaacacaaaggtgttactgccctctctgcacctgacagatgactctgaaggatgactgcactattttgtctagctttgatgaacagaggccacattttcagagccattatcattgtccttggcaaatagcagtcccagcactggatgtttccaagaatgtaaaatcatgaccagatatcctggaagtcatgacagctagtcccttccccacattcctgctggggcggcctaatggcaggtgggaactgacttcatctgtgaggaccacacaagcaccccctgtgattctgatgcctgtccatgaaatctgtgtcctcctgtctctagggcatagaggagcagctggtgacttcagaggcagaggcccagcaaaaggagcacacatagaagagggggtgctttgggaaaatgtggtctgcacggcaggcggggagtgctcttccctgctggcaccatgcagagctagctgaggagaagggagcagggtgggaagtggggttgggggctgtgcctctattaagagtgtcccttgactgctggtcctaccagggagagaagagaggacaggaaggtgaaggagagctaagcatgcattgtgtactcctccattgtgggcctccaagagcaagagggaggctgggggagccgggttgaagatctttgggccactggtgctgccctccatgcagccctagcaggacggcctgagagcgacaggtgggaagtggggttgcggggctgtgctctttgacagatggaggtgcccagggctgactgaagtggagggagggggcaggagagtggatcaggggccttggcttcatcaggtgtgcctctggacactgcaccaccagcccacccgggcctgggagagggcagagctcgggctggggccaagaggctgggccttcactagctgtgccctccattgctagccccagccagtgatcaccaaagaggagaggagagaaggcacaggattccagagggaaatgcggctcctgcctgtgtccctgctggtcccacagctgagcagatggtgctggcctagtgcagggaaaccacctgagatttacgcagctaacttgtctcccagcttcctctccgattaccagctggtcatctcctgaaattctgctcactgaaacggacatgtgaggacatggtttggaaatcatttttaaactcagcaatctggatatgagaacttcaaaacaaaatttaattcactatatgattcccaatgaatgcgactttcttcaatgatgaatcgatctactttgctaaatgctatgtggcctggcactggaagatgcactgtggatcggtatggagggtgagccgcaatgaaggcgcaaccgcgtgcgggggtgagctggggaccgaatcacagggcctcttaccacagcggtcaggcgtctggagggggaggcagtgcagggccccgaagatgcacctgcagaggtggcaggcgcggagggtccaggctccgtgc

SEQ ID NO: 5227 - DNA, 1063 bp, Artificial sequence
  DNA replication origin
cagggcagcagagtgataggtaaatagggggagcatattcattcattctctcaacaattaaatattaaatacgtctgtgctaccagggatacaaaggtaaacaaagcaggaaaaaaagttctgcctttatggccagtacattctggtaggagaagaaagaaaataaacaacataagtaaatagtatattagaggaagaaaaatgctatggagagtaaaaaaatgagggcataaagggacatttggagtgtttcacagagaaagtgacactctggcaagacctcctctgctgagggagccaggatgcctgcaaagagtgcgctgggcccaggaaggagcagggagtgctggcccctgctgtaggcctcgcaggcctgctctctggtggagccagggaggcgcgatctgacttttgagcctgtgtggagcatgaaccgcagggcgcagggtggaggcggctgcgaggggacccggagcctaggtcagggcggtggaggctggaagcttgcaagagtcgcagggattaatgctgggttggatctgggtgtgagagaaagagcacacggggaggactcggggttttccgtcctgaggagccatgaactgaaacggagactgttttgtttggagctgactgtgaaggaagggcgagaggtggtgtctatgagcatcaagtggaaaaacggaggagacgctcctagcgagggagaggcctgggcggggcgcgatgagcaggcaggtggcatttggagctgcgggaataaatgcaaccccagggagcaggtgtggacagaaaacagaagagcggccttgggcagccaggagtcccgaaatgtgcgcggaggaggggccttggagcgggagaggagtggtccaggaagccacgtgcagggggtgctgaggagcagcagggagggaggccccctgtcttacagctgggggctgcacttctccataggccattgctgccggcaggagcaggttcagggtagtgcagaggtggagagctgaactggagtagctcacatagcgagagggaggaggggtgttcaaggtaagacgag

SEQ ID NO: 5228 - DNA, 1215 bp, Artificial sequence
  DNA replication origin
gctgcacgccgcacgcgcacgccgcacgcgcacgccgcacgcgcacgcggcagcggcttggctggcttgtaatggcttgcacgcgcacgccacacgcgcatagcggtttggctggcctgtaacggcttgcacgcgcacgccgcacgcgcgtaatggcttggctggcctgtaacggcttgcacgcgcatgctgcacgcgggtaactgcttggctggcctgtagcggcttggcttggctttgcgttctttgcttggcttggtgttggtcgcttggcctggtgttcctccttggattgacgtttcctccttggattggcgtttcctctctcgcgttcccttgctaggcttgaccttttctctgctgggtttggcattcccttgggtgggctgggtgttttcttgggggggggggggttggcccttcctcgggtgggcgtgggctttccccgggtgggtgtgggttttccctgggtggggtgggttgggcttacctgctggggttggcaggttttggctgggattgacttttctcttcaaacagattggaaacccggagttacctgctagttggtgaaactggttggtagacgtgatctgctcgctactaccggcctccccaggctgttaaaagcagatggtagctgaggttgattcaatgccggctgcctcttctgtgaagaagccatttgttctcaggagcaagatgggcaagtggtgccgccactgcttcccctgctgcagggggagcggcaagagcaacgtgggcacttctggagaccaggacgactccactatgaagacactcaggagcaagatgggcaagtggtgctgccactgcttcccctgctgcagggggagcggcaagagcaacgtgggtgcttggggagactacgacgacagcgccttcgtggagccgagataccacgtccgtcgagaagatctggacaagctccacagagctgcctggtggggtaaagtcgccagaaaggatctgatcgtcatgctcagggacactgacgtgaacaagcaggacaagcaaaagaggtaaccaggcctgggctgggaggaggtgggaggtcgggggatgatggggacataccctcctggcgggggaggagggggacctggctttctcacctccgcaggcctcacaccaccctggttgtggaaacctcagagaggtcagggcacaggcccctttatgaacagcaacaca

SEQ ID NO: 5229 - DNA, 1816 bp, Artificial sequence
  DNA replication origin
tgttttgtttttctttctggcattttttttctactggctgggaatgcttacccattgcctgtacaatcattgtgccttggaattagttaacttgctttataattcagaaactcaggggcagatcggactgtagccttgtctcagacgagactttgggctttggacatttgagtaaatgctggaattatttaagatttgggggactgtagggaaggtatcattgtattctgcaatgtaagaaacaggagatttgggggaccagggacagaataatatgatttggctctgtgtccctaccaaagctcatgtggaattgtaatgggcaaagttaaaggtggggactggtggaaggtgatttaatcatggtggagagtggagtttggaaggtgggggtggttgggagcattgggggtgattgtgttggggttgcagggaaaggcagaggtggggggcagattcttcacaaatggttaaacaccatctttgtaatgctgtccttctgatagtgagtttgcttcatggtttaggagctttgagatttgaatactggcctgctgggttttggatgtgcattgggcctgtggtcccatttgtgttatttttctgggaaatttcttccctttggagtgagaaagcttacccaatgcctgtaccatcatcgtaccttaaaagaactccattttaagttcagggactccttggcagaagagaccgtagccttgtatcagataagactttgaacttcttacatttgagttaatgctggaatgagttaaggcttttgtaaacatttgaaaaggcatgactgtattttactctgtgagaatgacatgagattcgggggagggggtcaaggtcagaataatatggtttggctgtgtttccctagaaaaactcatgtggaattgcaatcccgaatgttggaggtggagcctggtgggaggtgatttaatcatggatgggaggtgggtggggttggagggaaaaagaggtgggtagcgtggtgaggagtaagctcgctgtagggtggtgggagggtgggggtagtaggaaggaggagtagcctgctgcagaggcagaggctcgtagaaaacctctgctaggactgtgcacctgtggctttgcagggtgtagcccccgtggctgctctcatgggctgggctggtgttgagtgccggtagcttttccatactgaaggtgcgagctgttgatgggtctatgaatctgggctctggaggatggtgacctcctgcataggggctccaagcccaaatttttcttctgcactgccatagtacaggttttccaagaggctcaggctctgcctcaggcttctgtccggaaacaggagggggtggaggtgggttggggacggatccttcactaatgattaagcaccatcttcttgatgctgacctcgtgatagtgagttctcatgaacttcctcatagtgttaagccactggttggatggagcatgagcctaggggcttgggaggctctgtatagattttggaggatgtatggaaatgtctgggtgtctaggcaaaagccttcctaaaaggcagaacctcataagaaacctctactagggcagtgcagaaggaaaatatggggttggagcccccacactggaggccaccatcatgaagaccgcagattaatagaccccgcaacagcttgtaccgtcagtgggtaaaagctacaggcgctcaacaccagcccagcccatgaagacagccgtggggtataaaccctgcaaagccacaggtgcagagctgcccaaggccttgggagcccagcccttacatccctgt

SEQ ID NO: 5230 - DNA, 1259 bp, Artificial sequence
  DNA replication origin
gccgccagaggccagcgggaggggcgggccggcgctggcgcgcaggggtggcgagggggcgcgccggccgcggtgggggctgctccgccaggctgccgcctccctgcgccgccgctcgggccgcgctcgagccggctttgtctgttcgtatcgccccgtctctgtttctgggtgtctctgcctcccacccggttgcggctgcgcctccctcaggtgcagtcgtctcccctcgcccccgtgcgcacggcgcccccgccgctgtcccctcttccgggagcgcacaggtgtgggagcccctccccctcagcccagagagccagcccagccctgccgaccgcagcactctcggaagggctcggccacccggagcctcgtcacgagtcttacccagggttcggagcgggcctgcaagaaggggcaggccaggctggggctgcaaggcagggtcttcccttggagaagggacctgactctattattaagagaacgaaagaggcacttgccctacaggtactcactgtgtggggtctactggtgctgtgctctgccgcagtcttgagggaggagcagaaatgctgtggggactctgtctccgcagaactgaggacgaggggtctgcacgcgtggttcagtgcctggggctggggtggattaagtaactccaggaaggctcaggcagcagtgccagtagtgtggggcggggttgtggggaggaggggggagcgggagcgcacagtcggtgctggggagaggctgatgccaacaggaggctctcggccgtggtgtgcccaggcggggcaggacgggaggatgcaggagtcccgggtccacgctgaggctaaggctgaagggaaggcagagctcaggtggatgacggaggccaggcctttccctgagcttggtgggctccctcccggtcaccttgtctgagaacccaggacacagagtccccttgctttggactggtttggtttgtcattccccttgacatcgcctcgccccagagacaagaggccccttcatcctccagccaagaccttccccacccttgggtgacctaccctcttgcattttttagatttgagccctctttctatgcagcgactaactcaacgtgaccccagaggccccctcgcccatgttgctggtagtcttgaccttttttggcagatcctggctgtgggagttccctgtctttctcttaggtaggacagaaggcagtttctgcctcgttgccacatacaccccaagtcaggggt

SEQ ID NO: 5231 - DNA, 1050 bp, Artificial sequence
  DNA replication origin
cgcacgggggcgaggggagacgactgcacctgagggaggcgcagccgcaaccgggtgggaggcagagacacccagaaacagagacggggcgatacgaacagacaaagccggctcgagcgcggcccgagcggcggcgcagggaggcggcagcctggcggagcagcccccaccgcggccggcgcgccccctcgccacccctgcgcgccagcgccggcccgcccctcccgctggcctctggcggcttaaccctcgcctgcccgaccccgcggggcccctggagccgcggtgggtgggtgcgggcgccgggcctccccctcccggccgcggcgcgcggcgccgggagctgaccgtggtgctgagcgcggctcgcgctccgacgcggtgcccgagcctgtcgcggccgcgccctgctgcactgcgggcccccagcggtaagtcgccaaggccccgagaggctgcgttggtcctgccccgcggatgtggacccccggggagggcaaggattggggaatttggtgcattctctggcgcgatggacgggctgagggcaggaagcagggtcgacaccctccacccagcggttcccggcgcagtcaggggcctgggagcggtgacccttttaggtctgggctagggaagcggagaaaccctccgccggcggatgcaggagctgagggagagccaatatcgctgtgaggcccatctccttgcccctgggcaggccaggaccgcccagaggcgccctccaaggaggtgggccaggaccttccctccccagagggccctttgtctccccagtgtgggggttgggtggcttggtggtgctctcaccgcagattctatttctgttttattccccattcccacccccaccccagagcacggtcgctttccctccgcacagtggccctcactccagccctcccatgacaaggcagcctactactgagaacgctattgccccatagctctaccgccagcccagtttccagaggtccctgggcctgcgcttttttatcaccatacactcctttgtatcacactgctgtg

SEQ ID NO: 5232 - DNA, 1060 bp, Artificial sequence
  DNA replication origin
actgcggggcgtgcccgggggcgctgcagtgtgtgcggactcgcagtgggtgctcactgtcggccagagccaaggcgttcggccgcctcggcctgaggaatgaaggcgccttgtgtcgctttagcaggcagcagtgacccgtggcgcgtccccggggacccgactgcggggccagtggtgcgaagccagtcctgtgcccgggcctggtcctcccagcctctaggaaagcggatctcgctctcggtgagatgaaacggcccaggagagaggccccgtccctggcaggcgggtgtccgcggcagcgcgagccattcgcgcggtcagccggggcgtcttccggatgcgaggcccgcggagctcgtgggaggtgctggcgccctgtgtggcccgccctgcgctcccggctgcgggttccgagactgagccgccgggagcctccggagagacagctccgcgcgccccctgctggcaggagggagtcgctctatgctgggccggagagcagggtcctccacgcggcagggggactgcgctaagaagtcaggccccgccccgtggctgggtttcagggccacaggcagcaagagacccacttctatccaccctgcccggcttatgtagcacgaagagggctctgaagaagcagcctcttactgacattctacacacccttatgaaaagcccccaaagaggccccgcgcggtggctcaagcccgtaatccaagcactttgggaggctgaggcaggcagatcacctgaggtcaggagttcgagaccagcctggccaacatggtgaaaccccgtctctactaaaaatacgaaaatttgctgggtgtggtggcgtgcgcctgtaatcccagctactccggaggctgagacaggagaatcgcgtgaactcgggaggcggaggttgcagtgagccgagatcgagccactgcactccagcctgggcgacaagagcaaaactctgtctggaaaaaggaaaaagaaagaaaaagcccccagagtcgggtctagccagggtccccagcagacagttaatcaatgaaaatgggccaag

SEQ ID NO: 5233 - DNA, 1143 bp, Artificial sequence
  DNA replication origin
ctgtggctacagagggtcatccctcatggtggccctgacagggcgtgggggagagaggctagggcatctgtggtcttcttttgggagatatggggctcaccctctgcactttgcctaagctgcatcccacactttctgggcaacctcctatgtctcaactcctggccctgctgtgcccccagaaggctcctcttgacaggccaccctcttaggcagggtccttttgggatgactcacacctgataccttgaggaccagcatcacttgcaaccttgtctgtccacacggtgcacctgaagcgtctccactgccagccctcttcccagcttttccagcaacggatgtccatagcctgccctcctacccaggagtggtgtccatctctgtctcagggatgctactggtctgtttgctcacagcagggatgggcctgcgagtgccggcgctgagcaggcagcctgcagccctgagccggctcccacttcagggccatagagggcggggaagggggcagggcctggcagaggctggagatgcttggatgggggccaacagcagggggatgggggaaggcagcgcctagcagctatccttgaaatgagtgttttcgcagccaaagctcaggtgtaggcccactcccccatgccacggccttttgaacatgtggaaccaggactcggaacgtcctgttttaaagtgggaggtgggctgtcactggcaggcgagagctgccgccgcgcctctgcgaggctccccattcctgcgaccctatcacatgtggaaggtgggtgggagggtggtggcgcggttgatctgatctctgtcccaaataaggctcttgaggaggacgcagggcacttccagggcgagggtgccgctgggctctgacaagccctttggggactcgtggagtcgtgggaatgccagctgactcagcgagggcggccttggccacagcaaggtacccttccctactttctgtctttcgtggtgaggcgattttaaaaacgcagtctgagcagcccttgccattgtcctgctgtgtacccagcacttagtgtgtcagctggtccgtgtggacggcccagtccctccagtggcatccctaccggtgacccctcctgcctgcaccatcgttccaag

SEQ ID NO: 5234 - DNA, 1131 bp, Artificial sequence
  DNA replication origin
gccctccgatgggcgtgataatggcaggaggatttattaaaaccgggggttgggggtgcttcctgcctcctgtcgctgcagtgaggctcagaaagtgagcaggtgaggcgaggaacatgcggctcgcatcactgcgacatcagcgtcatttcgcacagttctgtgtctgcgctggccctaagttatcagctacccctgccaagcgggttcctccagggagagtgacatgtcatccatgctggtgcatcctgcacctgcgccacgcaggttgtgacacaaagccagggtgatggcgagtgtggagcggtcctgggggcttccagggtgcggcagcaacagaagtggagcctgacccgtggggcagggcccccgaggagagaccgagagcacctcagactcccggctcacgggagaggaccctaaagggggacacgggggcagcaggccagcctgggagccagggccaggctggggcggggagaggatggctgggccggaaggcgccagtctccagggtgacgctggtctcaaagcaagaggccagaatgggcttttgtgtgcagcagatggggggagtgtgttcccaggggagaaaggggtggaggcaggagcgggcagcaggaaagaaaggaccataaaacatggcagggatgcccgccttgcaccctcactaggcaacaaatggcttttaccccaggcctaggccaggggctgcacgctctgaataggggactgactgggggctctggggcctgagagaagcaccccattggggtggaacaggtttgcaggcctgcagccttgttcccacggcaggaccttctccctcctgggtgagaggcaggagacggccaggtgtagtcgaaggaagagtgattcagagccagaagcccagttctctgagctgcagactcaccctgcactgtgggcctgcccaggctgtggattctgtgaattctgtgtcccatctcaggggcaggcctggctctgaaggggagcattggttctcggggggtggccctgcctgaccctggccccacctgtctgtgtttcaaggtgaggccactcggggtgggcgagggctcctttgatgggcagacagcatgagggagggcgtcttttgagggggac

SEQ ID NO: 5235 - DNA, 1140 bp, Artificial sequence
  DNA replication origin
gtggttctgactcaggtctgagaacccaggtccagggctgtccactggtcagaggagtccagacaacaatggaacctgtggccaggggttgtgtattttcactggacctcccccctcgccaggggattagcactttaagccttcagagaagagcgaattaacttttgctaagcacctgtgaggtttaatttctcacgtactctccatggcaaccccaccaggcggtcattcctctcgaatgttaaagatacgtgtttagagcagatgatcatgattacacaactggtgtgcagcacagccaggtgcccagatccgaatcccacaccctcctcccaccaccatgggcctcagggacatgcttctagcacagtcatggaccctgagtgacataaaggctgtgacaggggacgcaggatcttcagatggccccacagtgcctcctctgagtatctatctcccaagcttctcgcctggcctggttgctgtgagggcctggggagaggcagagacaggttgggtgtacggaaaatgcacactctgccaggcacccctgacacgcactgctgaccaggcatagcgttcagtggggctaggacttggacgagggtgcaggcttgagcaggggtgcaaaaagccagtctgggcagatgctctccctctgtggggcgccgatctcagaaatggtggacagagcagggctgcagtatggtgcacatgggccttggggtcttagctttcgtgggcctcttcctgcataaaataaaatagttaaaattagagtttacaactgcattcatataaagatgaatatactccaggctagattcattattattttattatactcagtttttttcttctgatttaaaatagtgcggtcctagggctggttagagtgtttcctggcaggccctgtctccttaaacccctgcaaagaaagcagcgaggacttccctttgccccttagcagaaagctgcgctccttaatggttacgggtgtgaccattcacttacatcctatctgcaggacatacctggaaaggtaagtgggaggcaagagggagctggaggccaagacttcggtcccagatatcctagtccacatttgtccccaccaggtgtgtgagtgccggcgcgctg

SEQ ID NO: 5236 - DNA, 1127 bp, Artificial sequence
  DNA replication origin
cggtagggacggcggcccggggcgagcccctgagagggcaagggcgagcgcctgagccggcctccccgcacctggaccgtcctgggcgcgcggggcactcggagccgctgcctggaccggcctgggcgcgcagggcactcggagcctctgccgcttggcgcagtaccagctgttttgggaaggagggctggtgccggcccggtgggtacgggagaagtggttgctgttgttattccccaggctgagagtacgcgagggcgcagcagcggcaaggggctggaactggggtcggggctgttgggctcctgctcggggtgccccctctctggcccgatttccgggcccgctcaccatccgggacccactcagttgggacgcctccacctcgctgcccccacaggaaccccaagatgggccgggggctccggggcactgtcaggggtggccggccacaggttgccaagcccgacctccccaggtgagccagcgggagggcggttgcgacgctgggtggtgctgagctccgatgggctcctactccgggagcaactgcatgaaaggagaggcggggaagagccaccagctgtcagctgcaggtccagggggaggcagacctgtgtggggctgtcggggcgggagggcgggagggcgccctacttggctgtgcagccatcttctcccggagttgaagacgggaggttgaggtcggagttctgtggccctgagagctctagtgaaaggggcaggaagccaggtgacccagggcagacctgcaggagccctgccctcagcctatccgctggcctggcatcagctcccacccccagcgataacgaagtgatcgctggcatcaagagtggagagggccggacagccgggaaggcagcctttcaggaacctgtgctggtgagtgtaggagatggcttggaagagctcagacccccttcaaatgccgactctgtcattgaggaggtgtacaatcttgggacaatcacataaccacctgggtctttgttttgaaaaatgtgggtgatgtttccatgccctccacacctttcagggttagtgtgaaggtcttattagaaaatgtgagtgtggcccggcgcggtggctcatgcctgtaatct

SEQ ID NO: 5237 - DNA, 741 bp, Artificial sequence
  DNA replication origin
cagcaccgccttcgggggcctcctccgggccacgctcccctgacccggagctccggctctccccacgcagtctctctcccgggggctcctctgtgctcggcgtctcttccgaagcagcttgggggaccagcactctcccaagctctgcggcctgggccacccgctgaagagccccatcgccagctccctgtatgggggctgctggcaactcacactcattaccggctggtgttttccccctagtgggagactcacagggggtctcgccagtgctcaagggagattctggtctttccttaggaaagtcacggggcagtgtttctggaacaggccccgcattgctcctgctggcctgaagacctttctgctccacagctacaatgatgagggcgcccctgcccctcgaggcctcgccgcctgctttgggctccagctgccggcccccggcacccccaggcccctgttcaccctcctcagccccggggccgcagtgagacaccgtggctgccttgaattctgaaagaccttgcaaagcctgttccctgtagttggggtctagaaccatggcttcttcggctgcctttgaagtgtctattgcgcttgatttctgggtggtctcaggggcatctgaactgtcactcacttccaagcagcccatcaagtctccactccacacctgggtcccctcactgctaggctgccgtgggaacttggccctggtaggtgacttgctttcctcgc

SEQ ID NO: 5238 - DNA, 1207 bp, Artificial sequence
  DNA replication origin
cagagcgcagcgcgtcagctcgctgcccactaccggccgcccggcgggcgctgagcctcaacggcgaccccagtgcgggtcgcgggcccggtcggcacgcgctcacgcacgcgcgcacgcaggcctggagcggctgcggcggcgggcgcgggcgcggggctccgggtcgtcctcggtgccgcagggccgcgccgccgccacctgtgtccgcacgcgtgtgttaggacagggccatccttaggaggcgacgcccaggctcgtcgcagccgcggtggtgaggagggctggtgggcgcccactttttcaccgcaaggattccagctcagacggttggcggcgcctcccacgccatccagggcgaggacgcaagcaggtggccccgctcggcccagggcagagacccggcgggcaggcgtgcgcgccggcggggggagcgcgctcagacgggacacgaccctcatctgcgctcagccaggcgcacggtgagcgtggaccaccgggcgcctgcgaccctcctgacagcccgggcaggacacaccctgtggtgattaaggggccgaggaaagtccatgccaaacgattttagaaagcgtgtggaagagttcagtgaccgggttttacagtgcaagagttcacacacgaagattggggccacgaggcccactgcaaggagccaggagttttatttttttcggagtgtgtgtgcgaggtagggggtggataaggaagggcattactatttcatctgcccctcccagacacacacaggttcttctaggttcttagagtccacccagaagctccacacaaggtgacaagtcaggatatgaaatgcaaatgcaaattccaggaggtgaaaaactgtgggagacttggtctccctttggaggttgaggggcagtcgtgatagcggctaatcagggctgctgatggccttccccttactgcccccctccccgccccgaccccatgtacacagcattatcattcccccaaagcccttgggggctgcttctagtgtaagcagcagaagtattgagagggagaggatgaaatgagaggtgcatgccttgctccagcacaccagctagtatagggtgggtgctagaaaactgggcatttggtgccctgccctccactggggtccatttcctgtggcccatctccatccggaagctatatgtgctccaagctctgtaccataaga

SEQ ID NO: 5239 - DNA, 1720 bp, Artificial sequence
  DNA replication origin
ccgggagggcgcctggcctcgctccgagccgcgcgcgccccgcgcctgccaagggtcccagctgccgcggccacagagcccgagcggggggtcggctgagagcctccttaacggagccccatgatgtcagccggcccgcacgcccctcgccctccgactgcgaccccggcccgggctcgcgcgccccgtcccccggcagccccgcggccgccgcaccgccgcccccggcccagccttccccgagcctgtggctggagctcgggcccgcctgcgtgcgggcgcagcaatgccccagcgagtcaagcgggcagacgagtggcgatctcggcactagcagcagcagcagcgccgggctgtccccgggctccgactcggacagcagcggcgtggtgtgtggcggccgcggaggcaacgggggcatgcgcggcgccgtgtcccgctcctggagcctggagagcctgcgctcggccaccgccggtaaggacgccgccatccccgcgccgcacgcgccctccgcgcccgggtctgtgctcttgggaccccccgcccccctcctgcctttccttctcctccctcactttctgcctgtcgtttccatctcctggtcccttccttcccattgcttcgccctgctattccttttctttttctggtttccttctgattcccactgcctgtctctctgatccacgtctaccggtgggccacctgttacagccgggaccttgttggcccccataccagagcgcgctgtcaactgggaaactgattaaggtgagactagaatttggtgcccgatgcgctgtgttcctttccccaaactgttcttgaccagttgcacctgtctggctttacctaccgcagctgcttagcctctgtaaagccaggaggatggaagggggccgctggccgagggtggaacggattgcgccacctggctgtgagtgcgcttggtcctgaccgcaggactgcagctcccagcggaggcagctggtcctggacccctctgaacaagactgcgctttaccgacctggcattgctctggtgtttcctgggaccgtgtgatccctgtagtgctcccgaatctacctggagggcctaatttgggttactggttgagaggaagattttgtccctaaatattaatggagcaaggaagtcaagagtggttttatgaatggtgatcaccttacccttggttatttgctgacagaattatttatatttcacttcttgcaaacattctcaaatattgtagcttctgcagtggggtttgtcaagggcaacagttgctgcctggaaatgagagagttatacacccactatgcttctgcatggggctggaggtgcagcctgtgaaagctgcagggcctcacgtaggtgtggaatgagactcagagcatcaaagccagaggagcagagggccatagggatggcagaatgtggagcacaggccttgttgggcagatatagagcaaggtcggctctggctgggttgagagcacctggaatgacagattcagagtttggactttgcagtcagcgagtttgggagagagaagtgaaggacatgcagacctctgcattgagcactccatgactcatctgcccgttcccaaaacacacgcatgaaattcagaaaagttgaataatccagctgttgatgtttccttcaacggagagttttccattgttctgcagctctgattccatcacatc

SEQ ID NO: 5240 - DNA, 1493 bp, Artificial sequence
  DNA replication origin
cggcggagaccaccacgcgctgggcgccggggggcaggttgcagcgcagcagggcgcgcagggcgttcccgggcgccgcggggccgcgccggggctgcggggccctcgccatggcgcccggcctcccgctccgtgcggccccgagatcccgccgcacagggccgagccggtggcccgcagcgcccggggagaggcggggcgcctgcgctcgcgggcctggggctcctcccgcgaagccggcgccgtgcgcgcggcgcctcccaggccccaagccctggcaaccctggcaaccaagccggctgtgcgggcgggggcggcggcggcggcgggctggagaggctcagagggaccgcggcggctcgggcgtgcgctgcgctgcgcccttggcacctccttggaaagggtcgggaatctccacgccggcacagcagtcctggccctgggctggccagtggcacagatggccacgggggcgctcggggatgccccgggacctcctcgtttcagagatacagaggccaaaacgcctggcaccggcgctttggggagggatgggccagggactctgattccttacaaggactggccgcaggcccccacttcacagatgagtaaacgtggctctgaaaggttagggattctgctcagtcataaaatcgcgcaggaatgcagggatggcggaggcaggatttaaactccggtgggagcgatccaccctgaggggcccctcttcactgaccgcagcgtccgagcagcattgtgttcctttggaaaagccaggcgtccagggcttcctctgcctccactcgacacagcctgcaaccttaaccctgtaggtttcaaagctcttgtgcaagagctctcattctatccttaagaatgacagcccaggtacagtcagtgtgtccttctgagagataagaagactgcaggggagagggctaaacactccgctcaggcatgggcagagatttctgggcaacaagctcagtgctttgaatcctggagcaagaagagttcctggagggcagggaggggcgcacagagggaatgtgtgcagactgggtgttcccatgggagtgactttgtatgctctgatctctctgtgtgtggccagctcttggccaccccttgcaaagataggtgagtgtaccctgaatgtcaccatcctgttgactgtaaagcagagtggatgccacatgtgtgtgcatgtgtgtacacaaggggtacctgtgtgtgcatgggcataggcacctctgtgtaaggggatacctctgtgtgtatatacatatgggtacctgtgtgtatgtgggtggggtttccatgcatgtgcctatgtacaacatgtgggtgcccgtgtgtgtgtgcagagaagtgtcagggatgtgtccagagaggctgtgtgcctccctcacatctgaaggttcagcctgggcccatccgcctggtgtactgctcatgcccagttctttagaaaacgctggtctgcaggt

SEQ ID NO: 5241 - DNA, 1038 bp, Artificial sequence
  DNA replication origin
tgcgggccaccggctcggccctgtgcggcgggatctcggggccgcacggagcgggaggccgggcgccatggcgagggccccgcagccccggcgcggccccgcggcgcccgggaacgccctgcgcgccctgctgcgctgcaacctgccccccggcgcccagcgcgtggtggtctccgccgtgctggcgctcctggttctcatcaacgtcgtactgatcttcctgctggccttccgctgagcggccgcgcagggcgccgcgccggggtgagtggcgcgggcgacggcactccagccgttgccacccgcggcctccgcactggtcgcggagggaaggcctccttccaccccatgtgctcactaccagggcctggtccgggggtgtcgccgagcgggtgcctgaggggcgtggtggcacgtgtgtcacagggtccttctgtcctctgtgccctgtggggagtgggggctgcgggggcgaggggggaggccaaaatggcgcgtctctgcgagtaaccgaggatgcggattcagctggggctccccggctgcttgtctggaaacggagtgcatgtgaccgctgggtgagcgacccgcgcttgcatctgtgtaggttgagtcaggtgtgtggaagacccccgggcaccgctgcgcatgttacctgcagttgtttttcccgttttaggccttaaaatacgtggtgtcagtcttcccacgggcagagcccctctgccccccttgcacgtgggccctctgaagcccccacccctgctgcacaaactgcgggtgttcacagctgcccccaccctgcacgtctggtaggtgggcagggtggggagggcagtggcggtcacagggagtagctggaggcagagcctggcagcgttgcccttctggaggctgtcagaacctcagaggcacaggaggggatcccgctccctgccctgggctatttgagtctcaaatgtgcacctccattgggaccttctcccacaatagaacagccagtttcacagccctgctgtgtctcaagagtcagtctcc

SEQ ID NO: 5242 - DNA, 1259 bp, Artificial sequence
  DNA replication origin
tgggtactccctaagcactgtgtgaatcctcacctcaacatggaaaccaagagtggggccagtcctgtgttccagctaagaggcctctgcctgaatgggcagggtgagggctggggctggccactggagcactgaagctccagagcctgcttgggatggtgctttcctccaggggtcctgagcaagcaagttcagggaaggacaaaccttctctttcctgggggtaaaacctgctccagtcctgatggacgctctcctcagagtgacacatgagcctgtgagcccaggaaccctcacagcgcggcagccacgcgggggctgcagacctccagaggcctccacggggtcccaggcacagagccctgggttattcctgggggcagcaggcttccacagggggccactgctctcattcccagccacaaagaccttctgcaggtggcctccagatcatgagctgctgctgccactcagatgagatgagacaggagggctcaggcgaccatatggtaggagcccaccagccacagtggggagctggctcaccccgctgaggccctgaagaatgaggctccagggaaagaaggaagcagacatggcggtctggggacaccagtgagagcgtgagctgtaggtgacatggccctgacctggggtctgtgacacaggctgtcaggaggtgacccgacacactcaacatggctcattttcccactgcttcccttctcaggaggttcctgcctgatattaaccaggtgaggtgtcaccctctgtctctaggttcccttaaatgagccctgagcagaagcctggtgcccccattcccctttcctttatgctgcctgtccctgcaggtgggactgggtccggcataggtggccccccacatagctgccagggaaggtcaccaggtgtcgggcaagaggagggcttcacagagaggccagcttccaggcaccattagggacaagccccacacttgtcctgcccagtcagctggaagaccttggggaggaggggaggaggtgttaattgcctttgtcgcaccctggcagagggacacgtgccgtgagcaagctctcctcctgtgtctcccaccaatgtaaggatgtcagccccttctgcacagcctcccactcgggaggtactctaatttagagttaggagaaatgtgaactgtttgtgttgtcaccaagacaaaatgtggctctgtgaggtcagagacagtttcgtaggacatcagagtcatgctccacctc

SEQ ID NO: 5243 - DNA, 1362 bp, Artificial sequence
  DNA replication origin
aggaggaaggctgtgacactgcgccccgacacccaccacccagtgctctgcacctaggatgccagagctgttttgggcttggatttctctgcagaaccaggtagctttttatgggcccaacttgggagaagctggggcttggaaccatacccgaacgaagctggctggaaaccagccctcgccatcggcgacccggccccaccaccactctctgttggtggcatccatcacttcgatgacgtccccagctttgaagcccagctcctggtcgtccatggtgacatggtcccagagtgcttcagcgcagaccacactgccatcgctgatgagctgccgagagagccacgggcaggcgggtcagtgggggaggctgcctgggcctccctgctctctgtctccactccctcagcagccctgggaagaggggatcctgacttctttacagaggagctgacaaggctgcctctgacaggagcagggctttcctggggcaggggctatgttctgggcatgtctagattatcaaggctcagtgatggagccggaagtgaactgaccacagaatctgatcctgtcactgggactgccaactgctccctgttagcattcccaatccagaattcctgggggctgcaaggctgcaggagggaggggctgggcactgcaaggctgcaggagggaggggctgagggctgcaaggctgcaggagggagaggctgggctgcaaggctgcaggagggagaggctgggcgctgcaaggctgcaggagggagaggctgagggctgcaaggctgcaggagggagaggctgggctgcaaggctgcaggagggagggcctgggggctgcaaggctgcaggagggaggggctgggcgctgcaaggctgcaggaaggagaggctgagggctgcaaggctgcaggagggagaggctgggctgcaaggctgcaggagggaggggctgggggctggtgccctcctgtgggcttcttgtggatgagcattgcctgtaaggtcagccaccaaccacaatgccccttcatccaggtagacagtgccctgccattggagtgattggagcttgtttactgtgtgtttttcaacacttgcagaaccaacctcatggcacccctgctcccatcccaagccccagagatgccagcaccagctgagcaatgccccttcttagagctctaggtcccaagccctgtgatcctaagtttgagttagtccaacctcttctcttcatttcccaagttctaggagaagcagaaacgttttgcagctgctacctctgtgacaggcacttcaggactgctcttatgcagtgttacccagtcaaccacattatacctagccgaccat

SEQ ID NO: 5244 - DNA, 1275 bp, Artificial sequence
  DNA replication origin
atgtctgcgcgcttgcggcactgccggacgtagccctgcgggcggacgtggttaggcctcccccgaccgggtccccagtcaccgcccgccggccgggcctcacctcgcagatgtcgcgcaggtgcttgatgtagtcccgctcagtgctgaggatctcgttgatgacgttggtccgcatctggtccttgctgctctgcgcctccgccccgccgtcctccgctccgctgttcccggccagaggggcgtcgtcatccgcgggctcgtcctgattcaccctcagctgcaggccatgcgtggccggtcagtgccccgcatccctcggagcaacgccccgcgccctgcgccgcagcggcgggaaccgggcctcggaggccccgcagggtgtacggggcgcagggctgaggactggccggccagctccccccaccacgccacccacgcaagtcctggaccgaggaatgacgactccgacgcccgcagccgccgtcagtgtgatccgaataccgatttggcctccttcctagaccctgcttgtgcccggcacagaggctggagcgcttgctgcagttcctgaaccagtgcctgctcctgccagccccagcgggcagaagcagggggatgggtggcgcgcccgctggctaacatgcaacttggggaaaggcttagggtgcggagtggacagtttcccaggggatctggggcaggaggagcatctgaacaccagggcctgggacctccccgccggacggccctcagcttggacgccctgagccaggccttttggagactgcacctggattccttccttgaagactggagacccccttagatggaatccaggtcccctctctgctatctccagggctaataacttgaccgtgcctcaacttcttcaggtgtaagtcatggttcccactcccggggctgtgtgtgaggtgagcagtcccctatcagtgctcttcagggcttgggaaatgtctagcgcctggagttgcgggggtatcgcagaggggtgcctagtgtctgcacacactcatttctcgactgctctcctctctggcccccgagggctcaccagaagaggaatgggagcaggagtagtggctctccaggaggaggaaggctgtgacactgcgccccgacacccaccacccagtgctctgcacctaggatgccagagctgttttgggcttggatttctctgcagaaccaggtagctttttatgggcccaacttgggagaagctggggcttggaaccatacccgaacgaagct

SEQ ID NO: 5245 - DNA, 1321 bp, Artificial sequence
  DNA replication origin
tttctgtgcccccaggccctcacctcccagtcctctatggagctctgccactgagcaatcttgtcgatgttctcaagtctccgcttccgctcgttgatgagctgggccacgttcttcatggcatgcaaggcggcttcaacatccttgaagtccctggggcagaacagagatggaaggctgctgcaggctggagacagagaaagggtgaggatcccctgcagcccccacgtgtggagctgctttcctctggggctgtgccctttgaccacatcctcactatcagatgcacagcccctctcttctccataaatggcaagcacagagcagagcttaatatcctgttggcatcctcttcccccattgcaaggagctcatcaggacagggctagttttctgtgtgttgccccagggctgcagcagtgcccagcacactgctaatgctcaaactggctgactggaggcatgcagaggcgtgggctgcctccctgcctcagtgccctcctacctgtgctgggggtgcgtgtatttgagcagctcggccagctgcagagggtacttgcagatcttctgcaccggagtcagcaggaagccatccagggagatgtcaatcatcttctgcagcagccggcaggcctcgaagaagtacacgtacttgctgagcttggtgagccgggagagctccacgcaggcgttggggtggttattgcagtactccgagtagatctggaagtcggcttgctaaggggcacagctggaggttagcagagctctctgctgctcccacaggcaatccagctgcatgtgtgggaagggcaagagcctctacatttccttcaggagctgggctgggggctaggggagacccaggctgtgtgtacctatttccctggggcataagctacatggagtcacacacaggggtgggaatggtgagaatatgagcaggtgtcccggctgcacgctagccttctgggtgaaatccatgataacaaggacgggataacaatgccaaaagcggcggtggtagggggttgggtgggacaggcatcctctgctcaccctcgctcgactgcccaagagggccaaaacaaggcccttctctaccaggtgaggctaggaggtgtccacttagagcggcccagtgaaccttggtaaatgccagccggcatctgccgcctaagcaggctgtaaattctccctgtgtgagaaaccccagagctcactctgaacagcccctgcggcgctcggcaggcctctgccctcctatctgtcaaagcaagtccttcctgggggacgccccagccctctgctcccaggagcg

SEQ ID NO: 5246 - DNA, 953 bp, Artificial sequence
  DNA replication origin
cccaggcctctgaactgacctccggacattcccactcggatgttcagcagaaatctcgcccttcacaaccacactcctaagtctctgccccacagcatcacctacgagcacccccgcacaaggcccaggagctctgccagaaatcacttccccccacccgatagccgccctgcagccagccatctcaagggctcccgcggtgtggccacacagctgccatccccaaatcgctttccaaagttctctgccctcgcagcccacggcccatagccactcccgcctgagcccgcctgcgggcctcgcacagcagctcctcgcctggaatccagcgcacgcccttccgcgacccgggcagtcctcccgatgctctgcccagccccgctgggaggatagcggctgggttggtgtggctgcaggcagagaccttgcctgccctactcagcctcctccaccggcgcccgggagggtgtccagtgcgtccgggggtgtgggctggccttgaactcaggggagctggagtgggcaagctgggaggggactgtgggcaaagcctgctgggctgtgttcagtaggaggcttttggtccaccaagcctgtggtggcggttagggacgtgtagttacagggccgggcagggcctggaccaatagcccaaagtcggcctcagcattggcacagcaggacaggccttcggaggccccaccgtgacgacgggactgggtggagggtcagaggccgtggccaggagtcacaatggggacagagcagggtggttggagaagcctcctagggcagaataagacagtgaggactcggcagtagtagaggaggagttgggcgtgccccgcaaatctcacaacatcccactaggtgctgtggggctgtccctgtccccaccacacaggacgctgacatatctgccaccttcgggcccagatgactcaccctgagca

SEQ ID NO: 5247 - DNA, 934 bp, Artificial sequence
  DNA replication origin
ccccattgtgactcctggccacggcctctgaccctccacccagtcccgtcgtcacggtggggcctccgaaggcctgtcctgctgtgccaatgctgaggccgactttgggctattggtccaggccctgcccggccctgtaactacacgtccctaaccgccaccacaggcttggtggaccaaaagcctcctactgaacacagcccagcaggctttgcccacagtcccctcccagcttgcccactccagctcccctgagttcaaggccagcccacacccccggacgcactggacaccctcccgggcgccggtggaggaggctgagtagggcaggcaaggtctctgcctgcagccacaccaacccagccgctatcctcccagcggggctgggcagagcatcgggaggactgcccgggtcgcggaagggcgtgcgctggattccaggcgaggagctgctgtgcgaggcccgcaggcgggctcaggcgggagtggctatgggccgtgggctgcgagggcagagaactttggaaagcgatttggggatggcagctgtgtggccacaccgcgggagcccttgagatggctggctgcagggcggctatcgggtggggggaagtgatttctggcagagctcctgggccttgtgcgggggtgctcgtaggtgatgctgtggggcagagacttaggagtgtggttgtgaagggcgagatttctgctgaacatccgagtgggaatgtccggaggtcagttcagaggcctgggcacagtagcaacagagggcgcgggggcaaggcgggttgggcacgtggagggcatcggtgtccctgccacgtttcagtggaaagccgagtgaactggagttggggatgggggaggccgtgagtccagttccctgcaccttctggagcctccctccccagacccctcctgacagggg

SEQ ID NO: 5248 - DNA, 1520 bp, Artificial sequence
  DNA replication origin
cctctcccagaggcaggtcccaacggaccttggtgccagcttggacgctacgctcagcagttgtggagttgattaataacattctgtcccacattcgcggattggaaagtaatgcctgattaagaccctaagcatgtcacttgtggcaaacactcaggctatcttcgagggggcagcattgacttcagggctgaagtcttggctggttttcctgggacacaccttgaaggcagcagaagccctgctaccatgaaacaggaaaggccaaggagtttgtgctggtcctcaggccctcagcccctaggaggctggaggtggagactggcccttaggcggtggcaccatgcctgagcatgaggggacacctggggcaccctgtgaggtgggggcagaagggtggaaggctgcggggaggtgggggtggaccggctgcagacagaagagctacactttcagtttctgtttcctccaaattactgatcaaaccccctggggtgctgtggccgcaccatgctccaagccctgtcctggagggtttccttcagtgggcctgggccatgggtttcagcagaatgtgaggatgagctgagctaggagtgggtgtgggcaccaggctggccttgttctgccatgtgcaccggccgttctctctcagcagccccaggccacacagcagggacggcaggagcggggttttctgaggccggtgtaactccagagcctgccctcctcacctcatgcagccggtggacatgaggccagccctctgctggccaggcccgggcctgctggatgggcacagcacccctggggaggttgggggtggggacattcattcactttagccatggaagggagacctgccttagcggtccttgtgttgtgtggaggctgtgaccaaaagtaaagtgagggcctctttgtgcagggtcttagggcattctgcattcattcattcccttagtccctcatcaaacatgccctgagcaactaactgctccacacctggtcctgggctgggcatggccaggctctaggagcttgtctggtagctgtgcatgagtcagaaaatggagccccttcctctagtgaatctccttgtgccgggtgatgggctggaagcagagtgcacctggactgaccccatccccgctggacctctgccaggcatttttgctccctaaacaacgccacagccacatgaggcaccgcgggcagtcgggcctcctatagccaggcccttggctgtggcctgtcatctaggggctgtcccatcccctagtaggatccacacttagggactctgctccatcgtgctcaggagctcccaccaccacgtggcccagccgcccacacctccacctgtgctccattctttccacctcctttatcaaccccctgcccacctattgcttgtggttaagccctgccctcttcctggccacatgatgtgcctgctcttggccaccccatgggctccttggtgactgtgccagttcagtgcccctcctggatctcct

SEQ ID NO: 5249 - DNA, 2340 bp, Artificial sequence
  DNA replication origin
taagagcctgaaatgacctgacgccacctccgcatgctttacgtactgaggttacgcacatgtggttcccagactacatgttctgattggatgagagaaaaacctctaggcctactctgattggactttattttcatgctgtgattggttgtcttaagactggctctcatccaatcagaacatgataataaagtccaatccaagtaaccctggagggtttttctcatccaatcagaacatgcagtcaggaatcctcctgtatataaccgcggtatacgcctgctgctgaagggaagtcaggctcttccacgttcccgtattttcctgtggagctgctcagtgcccggcttagaggaccaggaatgggtaatcaccagccgtacgctggaggctggagccgctacaccgtggctcgcctcgctgcgactggtggtaaccgcgaccgagacggcagtgcggcggaagcggtaagaggaggaaaagagttttgggatagatggagggggtaaagagggtggttagtgccaaagggaagagaggatagtgagcaggagagcgcgttgcaaaaaggcggtggggaaaagatagtgggaaaaaaagtttttgggtagatggagggagaaaaacggggtggggagcggcagggagggaaggttttgcagaaagatggtgggtaaaatgtttatgggtagatggaggaggaaaagagggtggcaagggaggaggaaagagagggtggtgggggggagaaacagcgttgagcagtagagagagaaggttttgtgaaaagacagtggggagaaaaggttttgggtagatagagggggaaaagagggtaacaggtgggggaagggaaaagggtagccagcgggaggaagacaaggttttgcaaaaagatagtgggcaggaaagaaagacggtggagaaagaaaagacagtgggtaaaaagtgtttgggtagatggtggggggaaagagggtaacgaggaggaggaaagagggtgacgagagggagcagggaaagagagttggggaaaaaatgggaaaatagtttggggtagatggaaggcaaaaaagagagtggcaagcaggatagggcaaagaagaggacgagtgggaaggggggaagactgtgaaaagacagtagggaatattctggggggtggatggagggggaaaaggggaggtgagcaggagtggggagaaggctttgcgaaaagactatggggaaatgtttttgggtagagaagggaaagagggtggcaaggaggagcgggggaaaagacgatgaggaaaacagttttcgggtagatgaagggcgaaaaagtggtgagcagcaggagtgaggagaagggtttgggaaaagacgggagaaaatgtttttgcttagatgaaggagcaaaagagggtgatgagagtgggatgggggaaaagaaggtggccagggagaaagggaaaagacggtgggaaaaaacagtggggaaagtgggtaagtggatggggaaaagggtggtgagtgagagagcagagaaggctttgcgaaatgacggtagggaaaaatggtggggaaaaagttttggggtagatggaggaagaaaacgggtggcgagggggaggaggccaaaggcggtcgggaaaagaaggtgggaaaataatggtgggagacaaagatttggggtagatttttttttaatcaaattatttgtatttttgcttttgagtagttatttatatattttgtgtattagccccttggctgatgcatagtttgcaaatactttcttccattctctgggttgtttcttcgttctactgatttcttcctgtgctttgcagaagcttttaagttttatgtaattacatctttgcttttgttgcttgtgcttttgacaagtttaatgtaattacatctttgcttttgttgcttgtgcttttgatgtctatttgaaaattccttgtcctaaccagtttcatgaagcatttatcctatgttttcttctctagtagttttatagtttcaggtcctacatttaaatctttattttgagcagatttttgtatatggtaagataacggcctagatgtattcctgcacatgtgggtgttgagttatcctagcagtttattgaagagattgtccttcccgaatgtgtgttcttggtgcctttgttaaaaatgagtacgccataaatgtgtgaatttatttctgatttctctattctgtttcacttgtctatgtctgtcattccttcgtttctgtttctcccccgcccctttttttgatagtattatgctgttttggtattaccatgcttactacagatttgtagtatgttttgaa

SEQ ID NO: 5250 - DNA, 1837 bp, Artificial sequence
  DNA replication origin
ctgctcactatcctctcttccctttggcactaaccaccctctttaccccctccatctatcccaaaactcttttcctcctcttaccgcttccgccgcactgccgtctcggtcgcggttaccaccagtcgcagcgaggcgagccacggtgtagcggctccagcctccagcgtacggctggtgattacccattcctggtcctctaagccgggcactgagcagctccacaggaaaatacgggaacgtggaagagcctgacttcccttcagcagcaggcgtataccgcggttatatacaggaggattcctgactgcatgttctgattggatgagaaaaaccctccagggttacttggattggactttattatcatgttctgattggatgagagccagtcttaagacaaccaatcacagcatgaaaataaagtccaatcagagtaggcctagaggtttttctctcatccaatcagaacatgtagtctgggaaccacatgtgcgtaacctcagtacgtaaagcatgcggaggtggcgtcaggtcatttcaggctcttaagtgtgggcgtttggtaaccggcatggctgctacctgtttctggctggagcctcggacactggctcactgcagttggtggtgtccacagagcggtaggagggcaactagtagcgggagcttctcctgccaggcaggaagacgagtagaagggagcagcaccgacgcatgctggaggctggagcctgagcccctggggctcgccttgctgtgtttggtggtgacgtgggacactgcagctcggccagagtggtagaaatgtcctggtgtaggtgagttatccggggatgtactgcccgcctgtgggggcaggggttgggtgtcctattggggctcactgcccgaggctgcactgcctgtgtcagggggctggttgggggcactctccgaggttgcattgctggcggtggaggggggcggttttggctggctgtccggggctacactgcccgtggtggcgggggtggtgggggggaggcaggttgtgtgcactaacgtgtactgccggtggcgggggaggggttaggggcactattttctgctgcactgcccggggcagggagtggtttgggtggttatttggagctacaatgctggcagcggggggtggtttaggagtgttgtcgggtgctgcactgcccttactcagggtgcgctatcaggagctgcgctacctgtggtggggtgggggcggcgattttggggcactgtcttgtgcagcaacacctgtggctgggtcaggttgtgggcactatcgggtgctacactgcctgtggaaggggtggttgggggggggtattggggttacactgcctgcaactggcacagggtgtgttgggtgtgctgtccgggggctacactgccggcggcaggggtcaggttagggttgctatgggggctatactgccagtggtgttggtcggctgcagaggtggtggggacagcaacagccatggtctccttgctccttcgggtaactcttctcttttccagactccagagttcctgctcgtgcaatcttgagcagggcagggcccccacacccactgcggttctccggcctgcacctcccgcccacaccccatgctctgtgttggggagaccacctgggactaccgggtggggattagtgggcatcgcgggggactgtgggaacagggcactgtgggtggaggtgtcaggaacgggaaccagcagttgagtggggagggctggctgggtctgagtttctcctactcctgctccccaaggagtgcagccctggtgggcccagcaatttctggccagt

SEQ ID NO: 5251 - DNA, 771 bp, Artificial sequence
  DNA replication origin
cgcacgcgcacgccgcacgcgcacgcgcacgcccggcagcagcttgctggcttgtaacggcttgcacgcgcacgccgcacgcgcataacggtttggccggcctgtaacggcttgcacgcgcacgccgcacgcgcgtaacggcttggctggcctgtaatggcttgcacgcgcatgctgcacgcgctttaacggcttggctggcctgtagcggcttggcttggctttgcgttcttggcttggcttggcgttggtagcttggattgacgtttcctgcttggattgacgttttctctctcgtgttcctttgctgggcttgaccttttctctgctgggtttggcattcccttgggtgggctgggtgttttcttgggggcgggggttggccctttctggggttggccctttctggggtgggcgtggggtcgcccagggggggcgtgggctttcctcgggtgggtgtgggttttccctgggtggggtgggctgggctggaatcccctgctggggttggcaggttttggctgggattgacatttctcttcaaacagattggaaacccggagttacctgctagttggtgaaactggttggtagacgcgatctgttggctactactggcttctcctggctgttaaaagcagatggtggttgaggttgattccatgccggctgcctcttctgtgaagaagccatttggtctcaggagcaagatgggcaagtggtgctgccgttgcttcccctgctacagggagagcggcaagagcaacgtgg

SEQ ID NO: 5252 - DNA, 853 bp, Artificial sequence
  DNA replication origin
tttccctgggtggggtgggctgggctggaatcccctgctggggttggcaggttttggctgggattgacatttctcttcaaacagattggaaacccggagttacctgctagttggtgaaactggttggtagacgcgatctgttggctactactggcttctcctggctgttaaaagcagatggtggttgaggttgattccatgccggctgcctcttctgtgaagaagccatttggtctcaggagcaagatgggcaagtggtgctgccgttgcttcccctgctacagggagagcggcaagagcaacgtgggcacttctggagaccacgacgactctgctatgaagacactcaggagcaagatgggcaagtggtgccaccactgcttcccctgctgcagggggagtggcaagagcaacgtgggcgcttctggagaccacgacgactctgctatgaagacactcaggaacaagatggggaagtggtgctgccactgcttcccctgctgcagggggagcggcaagagcaaggtgggcgcttggggagactacgatgacagcgccttcatggagcccaggtaccacgtccgtggagaagatctggacaagctccacagagctgcctggtggggtaaagtccccagaaaggatctcatcgtcatgctcagggacactgacgtgaacaagaaggacaagcaaaagaggtaaccaggcctgggctgggaggaggtgggacgtggggggatgatggggacataccctcctggcgggggaggagggggacctggctttctcgcctccgcaggcctcacaccaccctggatgtggaaacctcagagaggtcagggtacagggccct

SEQ ID NO: 5253 - DNA, 1777 bp, Artificial sequence
  DNA replication origin
catctgtgttttgtttttctttctggcattttttttctactggctgggaatgcttacccattgcatgtacaattattgtaccttggaattagttaacttgctttataattcagaaactcaggggcagatcggactgtagccttgtctcagacgagactttgggctttggacatttgagtaaatgctggaattatttaagatttgggggcctgtggggaaggtatcattgtattctgcaatgtaagaagcaggagatttgggggaccagggacagaataatataatttggctctgtgtccctaccaaagctcgtggaattgtaatgggcaaagttaaaggtggggactggtggaaggtgatttaatcatggtggagagtggagtttggaaggtgggggtggttgggagcattgggggggattgtgttggggttgtggggaaaggcagaggtggggggcagattcttcacaaatggttaaacaccatctttgtaatgctgtccttctgacagtgagtttgcttcatggtttaggagctttgagatttgaatactggcctgctgggttttggatgtgcattgggcctgtggtcccatttgtgttatttttctgggaaatttcttccctttggagtgagaaagcttacccaatgcctgtaccatcatcgtaccttaaaagaactccattttaagttcagggactcattggcagaagagaccgtagccttgtatcagataagactttgaacttcttacatttgggttaacgctggaatgagttaaggcttttgtaaacatttgaaaaggcatgactgtattttactctgtgagaatgacatgagattcgggggagggggtcaaggtcagaataatatggtttggctgtgtttccctagaaaaactcatgtggaattgcagtcccgaatgttggaggtggagcctggtgggaggtgatttaatcatggatggggggtgggtggggttggagggaaaaagaggtgggtagcgtggtgaggagtaagctcgctgtagggtggtgggagggtgggggtagtaggaaggaggagtagcctgctgcagaggcagaggctggtggaaaacctctgctaggactgtgcacctgtggctttgcagggtgtagcccccgtggctgctctcatgggctgggctggtgttgagtgccggtagcttttccatactgaaggtgcgagctgttgatgggtctatgaatctggggtctggaggatggtggcctcctgcataggggctccaagcccatatttttcttctgcactgccatagtacaggttttccaagaggctcaggctctgcctcaggcttctgtccagaaacagtagggggtggaggtgggttgggggcggatccttcactaatgattaagcaccatcttcttgatgctgacctcgtgatagtgagttctcatgaacttcctcatagtgttaagccactggttggatggagcatgagcctaggggcttgggaggctctgtatagattttggaggatgtatggaaatgtctgggtgtccaggcaaaagccttcctaaagggcagaacctcataagaaacctctactagggcagtacagaaggaaaatatggggttggagaccccacactggaggccaccatcatgaagactgcagattaatagaccccgcaacagcttgtaccgtcagtgggtaaaagctacaggcgctcaacaccagcccagcccatgaagacagccgtggggcataaaccctgcaaagccacaggtgc

SEQ ID NO: 5254 - DNA, 1029 bp, Artificial sequence
  DNA replication origin
ccggtggatgagttctcgctgccaggggcacggcgtagggggcctcggcaggcggcggcggcggcggcggctcggggagcgaggcgggccgaggcgcgggcgtctgagcgtctgagcgaggccgggcgcggcggcttctctcacgcgccccccgagccagcgcccgcctcccgcgcccgcctcccgcgcccgcctcccgcgcccgcctcccgcgcccgcctcccgcgcccgcctcccgcgcccgcctcccgcgcccgcctcccgcgcccgcctcccgcgcccgcctcccgcgcccgcttcgcttctcccgtcgacccagaccatccgcttccaccgcgcccccggcccacctggtggccccggccctggccgccgcccccgcggcggttcccggagctcgtcccggacgcgcgcccaggcggcgggggctcggcagccaccgctgcctcgggggagcgatggcgggaaggcgtgtgtgcgcgatgtgagcagggggtgccggcggggctgcagcggaggcactctggaagaatgactctggagtccatcatggcgtgctgcctgagcgaggaggccaaggaagcccggcggatcaacgacgagatcgagcggcagctccgcagggacaagcgggatgcccgccgggagctcaagctgctgctgctccggacaggagagagtggcaagagtacctttatcaagcagctgagaatcatccatgggtcaggatactctgatgaagataaaaggggcttcaccaagctggtgtatcggaacatcttcacggccatgcaggccatgatcagagccatagactcactcaagatcccatacaagtatgagcacatacaagtatgagctcatgcacaattagttcgagaagttgatgtggagaaggggtctgcttttgagaatccatatgtagatgcaataaagagtttatggaatgatcctggaatccaggaatgctatgatagacgacgagaatatcaattatctgactctaccaaatactatcttaatgacttg

SEQ ID NO: 5255 - DNA, 1085 bp, Artificial sequence
  DNA replication origin
gaagcgggcgcgggaggcgggcgcgggaggcgggcgcgggaggcgggcgcgggaggcgggcgcgggaggcgggcgcgggaggcgggcgcgggaggcgggcgcgggaggcgggcgcgggaggcgggcgcgggaggcgggcgctggctcggggggcgcgtgagagaagccgccgcgcccggcctcgctcagacgctcagacgcccgcgcctcggcccgcctcgctccccgagccgccgccgccgccgccgcctgccgaggccccctacgccgtgcccctggcagcgagaactcatccaccggggtgtccccgcagcgagcggccgctgaaggctccccgcgcccgctcctcgccgccgcctgacacggctcccgggcgccctcggccctgtccgcgcccaccgcccggctggcgcgcagacccggttccccgcccgcccggcaaccctgtgatgaagttttcacatacgttcatttcattgaaacaaaagtcttgtaggcaccattggcaggggcaagaaacaagcacacaggttatttgcagaagaccacagaactggcaaatgacagcgccaggattcaattataaaatgggggattctttttcaagaaaaattaaaatgtctaaaaactaaattgaaaacctttgatgaggagaaaaccaagtaagataaaagctgtttctaaaacacttctgtgatcacattagttgacgggcatgtacgggaagcagttgcaatgtggtctctttttagaagagcccttggcttttgcagaactttctgattctgaagtgttaggtgaccttttctcagtagctgtggcatctctgagggcttggggataataaagtgaagatgtagactggtctgtcttgaatgatcttaggacattttaataaccttaaagtggacattagaataatgggagtaggcaaagtgtgacatctcaagcccagcataagcgtatgcttttggctggcgcagtggctcatgctgtaatcccagcactttgggaggccaagacaggtggatcacctgaggtcagcaattcaagaccggcctgaccaacatagcaaaaccccacct

SEQ ID NO: 5256 - DNA, 1731 bp, Artificial sequence
  DNA replication origin
taggggccccgccatcgcagcctggcatcctcgcaggcgcttgccctcggaacgccgggtgggctgcgggcgcggcgggactcctggtttctcttccccaggacggacaccggcgtcgccgcgtcctacgaagccaggcgccgagcgggaggcgcatctgggccccaccggggctgcccgcaccgagcacgcgaacgcgccatcccgcccggaggccacgggcgctgcggtgggagaaccgtaaagctactcggctgggcatggcgcggcggggcggggaacggggcggggcctgggcgacggaagtgtgcagccgcgcggcattctggggccggaagtgggccgcaagctgcaggctggtatcatggcaggagcgcggcgccgcaggaggcgcctggcggagctgacggtggacgagttcctagcttcgggctttgactctaagtccgaatactctccagaagcggagacgcgggaggcacgcgaggctgcccggagtccggatgagccgggcgggagctccttggccagccggcgtaaaggctgtgcctctgagcacaaagatcagctctctcggctgaaggacagagaccccgagttctacaagttcctgcaggagaatgaccagagccagctaaacttcagtgactcagctctgaggaggaagaggagccgttcaactccctgccagatgtgctggaggaagccagtgaggatgaggatggagcggaggagggggaagatggggacagagtccccagagggctgaaggggaagaattgtgttcctgtgaccctcgccatggttgagagatggaagcaggcagcaaagcaacacctcactccaaagctgttccatgaagtggtacaggcattcggagcagctgtggccaccacccaaggggaccaggaaagtgctgaggccaacaaattccaggtcagggacagtgctgtgttcaatgctctggtcaccttctgcatcagagaccttattggctgtctccagaagctgctgtttggaaaggcggcaaaggacagcagcaggatgctgcagccgtccagcagccggctctgggggaagctccatgtggacatcaaggcgtacctgggctcggtcatacagctagtgtcctgtgtggcagagacgatggtgttggcggccgtgctgtggcacatcagcgtgctagtgccctgcttcctgaccttccccaagcagtgccgtatgctgcttaagagaatggtggtcgtatggagcacaggggaggagtccctgcgggtgctggctttcctggtcctcagcagagtctgccggcacaagaaggacactttccttggccccgtcctcaagcaaatgtacatcatgtatgtgaggaactgcaagttcacctcgcctggtgccctccccttcatcagtttcatgcagcggaccctgagggagctgctggccttggagccgggtgtggcctaccagcacgccttcctctacatccgccagctcgccatacacctgcacaatgccatgaccacccgcaagaaggaaacgtctgtgtacaactggcagtacgtgcactgcctcttcctgtggtgccgggtcctgagcactgtgggccccagcgaagccctccaacccttgttctactcccttgcccatgtcatcattggctgtatcaagcttatccccactgcccgcttctacccactgcgaatgcactgcatccgtgccctgacgctg

SEQ ID NO: 5257 - DNA, 2010 bp, Artificial sequence
  DNA replication origin
gggaaccgcactgatgttgccagctcgacagaagacgggcgacccgagagccaggctggctttgcctccgatccgcagagaccaggccagcgccacgaacaccacgcagggcgctccccgtccatggccctctgggtgcggacggcggctcttccgcggcccttcccggggacgccgcatggggcgaatgcggtggggaggccagcgccttccttcctgctaccagcctgacacccgggcccccgggcctggacagccagaccccgcgacagggtcgccccggggcgcaggcgtggatcccccagacctggcgctgaaggggcacgtgaggcggacgcaggcagagtggcctcagggtcccattcggcctcttggtgctgcggtgccccgtggctccccagaggagagcaagttagggggtcgggggagcggggatggcttccgggggaggaggagggcgaggcctagggggcttctcggaggaggaggagggcgaggcttagggggcttcccgggggaggaggagggcgaggcctggggggcttctcggaggaggaggagggcgaggcctgggggggcttcctggaggaggaggaaggcgaggcctaggtggggcttctcagaggagaacggcaaaggcctggggggcttcccggaggagaaggcgaggcctaggggggcttcccggaggaggaggagggctaggcctgaggggggagcttcccggaggaggaggagggctaggcctgggggcggggcttcccagaggaagaggatggcggggccaggggggcttctcggaggaggaggcagacccggggcgcagcgctggaaggatccgcgtccaaggtctagtccccgaagcctgtcgggaggccgggcgggcggtgccgagccaatgtgaacaactcttgcagtcacttttcttggaaatgggaagcttaaaattgggtaggagctgagaaagatacaggttcaagagagggcttttttaagatggaggtatgtgttataaatgagggattaagtaccccttgtggagtccttaaggaaccttccaataggctgtggagatgacactgggaaggcatatgaataaaggatttactgtactcacagattccaaagagggaggcacgacataccttgtggggatcacctgggcagagcaccaacaaagcgggctcagccaagcaggtggggagccaagggcaaacaggttcctgtggacagttgcccttattgggcatcagggtggggttcaccagcaaaggcaggaggggatatcatgggtgtgcttaaatgtcactaggccatggtcgggagagtaagaagggggacttgtgacagggaccagccttgtcacattggtgtacctggtcatctgggaaaggtgcccacagcttgtttgtggagatactgaggaatcaggaaaatgggaagtttttagaggttgcaattcaagatgttatggtacatcatttttcttggcaatgactcattaaaaaagaagaaaaaactaatgaggcaggaatggaaataattccaggagcaaagtcctttaggaggagtggggaacaggatccagtgcaaagtggggggttggccctaggagccagggaaagccgagtgcatggagacagatgtctgtgcctgctgcattttgtagaatgatccattctgatttctcctgtatcaaaattgaagccttcagctgagagtgagaagcagagaggaaatgttgaggtttgaagaagagaagaatacggaacggtcatctaggaggatgggcaagcaaggagaccagaactggcaggcagcgcaagggctgctgaacagcccgagcagtgaagtggctgaaataggaacatcaggtgtctctggtgattatttcttttttgtagttttctgattttccagatgttccctaataggcatatcttacttccacagttatccttttttagactgttacagaggggtgaaaaatagaacatataatgtaggaga

SEQ ID NO: 5258 - DNA, 1125 bp, Artificial sequence
  DNA replication origin
tactaaaaataccaaattagctggacgtggtggcgcatgcctgcaatcccagctacttgggaggctgaggcaggagaatcgcttgaatccaggaggcggaggttgcggtgagccgagattgtgccattgcactccagcctggacaacaagagcgaaactccacaaaaaaaaaaaaaaaaaaaaaaagatgcttatgatccggcggatcctcctgggttggccaggccggggagagggcgcgggcgccgagtggcgggggcagcgggcgggcgcggcgaccggggccggggcggggatcctggcggcgaccgcggaggcggcagcgccccgggcccgcggccccctcccctccggcgaggggagccgctggatggggccggtcggggggcggccctgcggcgcagagcggcggcgacggcggcggaccccccaggcgggccggggctgagcccggggccggggcgggggctccggggggaccatgcccggaggccggcgggcagcagcatggctcacgggcctggcgcgctgatgctcaagtgcgtggtggtcggcgacggagcggtgggcaagacgtgcccactcatgagctatgccaacgaagccttcccggaggagtacctgcccaccgtcttcgaccactacgtagtcagcgtcaccgtggggggcaagcagtacctcctaggactctatgacacggccggacaggaagactatgactgtctgaggcctttatcttacccagtgaccgacgtcttccttatatgcttctcggtggtaaatccagcctcatttcaaaatgtgaaagaggagtgggtaccggaacttaaggaatacgcaccaaatgtaccctttttattaataggaactcagattgatctccgagatgaccccaaaactttagcaagactgaaggatatgaaagaaaaacctatatgtgtggaacaaggacagaaactagcaaaagagataggagcatgctgctatgtggaatgttcagctttaacccagaagggattgaagactgtttttgatgaggctatcatagccattttaactccaaagaaacacactgtaaaaaaaaagaataggatcaagatgtataaactgttgtttaattacgtg

SEQ ID NO: 5259 - DNA, 1061 bp, Artificial sequence
  DNA replication origin
aggcagggcccggcgcggtggctcacgcctgtaatcccagcactttgggaggctgaggcgggcggatctcgagctcaggagatcgagaccatcctggctaacacggtgaaaccccatctctactaaaaatacaaaaaaaaaattagccaggcatggtggcaggtgcctttagtcccagctacttgggaggctgaggcaggagaatggcgtgaacctgggaggtggagcttacagtgagccaagattgcgccactgcactccagcctgggtgacagagcgagactccatctcaaaaaaaaaaaaaactagccaggtgggcgtggtggtggcgcccatctgtattcccagctacttgggaggctgaggtgggaggattgcctgagcctgagggggatgttgcagtgagccaagagcttgtgactggactccagcctgggcaacagagcaagaccctgtctcaaaaaaaaaaaaagaaaagaaaggaaaagaaaaaccactagcaatggagttgggaggaggcttcagagcccagagagcagcaagggttacacagggtggagcaggaagggtcagcagagccccacacgtgtgagctggggcagtgggagggcatgggagaggcagagcgctgtccaggtgctggtaggcccagggcaggaggaggcaggtgggggggcacagtcaagatgtatgtgggggttgtggcactggaaatgcaggcatagaggggccaggaggattagggggtgccatgtgagcgaatgggggctccaagagaatttacccgaggacaggagtggcctggagtgctgggcccctcagggtcatttgtttctcgagggctgtgtcctggaagcatagcccaggtcctgtaggctgggtggcagaaagccacgacatgagggcaccgaggccccatggggatagagtggaacctgaggaggaggtggaggggaatggggcagacgtgtgctgctgagtgagaggcagaggccacagatggaatgctgagagctctctgaggcccacatattacagcttctgaccacacagagctccag

SEQ ID NO: 5260 - DNA, 1718 bp, Artificial sequence
  DNA replication origin
caggccctctccaccctctcttgggcctgagctctgggtggcagtgaggtggccgctgtcaggaggctcatgcaggaggcgcgaccaaagacccctgggctctcacaggcccctgatcacacctggtgacacctggaaagtgtcccaactcaggagtgaggcgggcaagggggctgagtgctggagtgtggccatgggaccagcacatggcatctgtgtggcactgcctggcagactctgggaaggtgggagtctctgtttcagcctccagacttcctgtccaggtaggggacaacttctaagaggccgaggcgtttgtcacgcctggggctgtgctctccagcagagcacactgcacccggctggctgtcttcccctggagaggggctctttacactcaccactagttcgcctctggggtgtggggatgttggtcctgtccccggatgccagcccgactgtggggtctagagactgccacaccatgtctctaataaaccgagtcagaaatagtgccctgtggctaagcggcagggcagcggtggcctgcatgatcctgcccttgcagctcaaagctgcttgggcctcttggggccatgcagtttccatgaaaacaaggaagagcaccaacccccagagataagccaataaacgcaacctgcaaaaggagagaacaggcagcaagagaggcggagggaacccggggggcctggagagagaggtgagtgtgtggcagctgggctgtggagcataaccagagaggccgcaggctgcgggctggaggaaaacgagggccttgcaggggggctactgttcctggcagagagaaaggaggcctctggaggtcagagagagacacaaagagagcagacagagcgagggtcagtgaagaggccagcacgcaggtgcccgggccctcttgggtcagcgggcgtgggtgcccaggccctggcacttcccccatgaaggcagcctgctttccacgccttctcatgatgcctgtgagggtctcctcctgcttccaggcagggagccagctctgggcctccttccattggcctgggaggttgtgctgcatttcagagagagccatcgggagcagaagcaacatgcggagaggatgagcagggacggaggctccaccatgacactctcagtcccagcatctcctcagcccagtcaccacactggagagggaggaggcccttcagaccccgcaggcctctgcaccctgggagttccgcgtctaactctcttcctgcaatcatcagaggcaggaactgggcccaggtggggtaaaggcaggaagacgtctgcctgccctgctccctgggcacttccctggatgctgtataccacaggacagagatcgagactgtcttttgaaaaacatttagagacaggatctcaccctgtcacccagactggtctcaaactcatggcctcaaaggatcctcccgccgtggggtcccaaagattataggcgtgagccacggcgcccagccccaaaccgtcttgattcccgactttgtaggatgaaggcctgagtgaagaggtggggaggagctaagcggaggagccctacccagcctggaccaccctggggcacgcactctgcgtccacctgacctggacgtgcctcctaaggctggcagcgaagcccaggagcagagcccacggatgggccctgcaggtgctgggcctagaccgaccgacag

SEQ ID NO: 5261 - DNA, 1103 bp, Artificial sequence
  DNA replication origin
tgcttacgcgcacgcgcattccttgctagggagaaagtgcgtgagccctaccttggggcgccagaggccgccacaacgcaggcgcattcagctaaggaccactccctccccccgcactcctgcctcgccatttcccctccctggccggccggccggccttcttcgctttgcgcacgtaccttttgaggtaacggcccaaagaggtagaagcgcttttcccgcccggccgcggggcgtggctctgcgcgcagcttgatgacgacgttttggcgcggtggcggaatggcggcttccacctctgaagcgggcgacgctatgggtcccacaggtgagtggcgcgggacgcgcgcgtgagacggtccgacgccctgggggcttccgcgagcccctgcggaggccatctccgttcctccgcgagccccaggactcgggcggcccggcggctctgcccaggccgggcaggctggggagtggagggccccggctgagtcttcctgccactcctctgggccatgcctttgtgccaccttcccgcgccgctcgtacactctgttctggtccggtaggtgttcgttgaaggttacccgtcgttgaaggaattgagggaaggagagctttgtgttgaaattgagccttgggctcaacaggcggtgtgggaggaagagccgggtgtgggtcccagctcgacccttcccctgtgcgctccacatctccgagccttggtttcggaggctcccgaagcccaattcgcaggagagttggaaacaagtgggcgcgtgctgttaagggaggtcttggcatgacagaatttgcttggaatgattagcgttgcccaagggctgtcgctgtcagaaaaacaaaacaaaacgaaacaaaaaaaacaaacgggtccgaagcagctcctggagaaaataggtgttggagagtcgcgacgaagtggactctaggtgcatggcacgcagagacctgtgacgggggagggtggccatggcagggtcagagaacaggggtgtgggagacacctcttgggagttctcgggtttgaatttcctctcttggaaagttcctagaaattcctctgggcctcattctttcagtcgctg

SEQ ID NO: 5262 - DNA, 830 bp, Artificial sequence
  DNA replication origin
gcccaccgggcatatcggcctcatccatctgagatgactggagggcatccacactgcccaggcagggcctgggctttaggggtacagaggtgaactccggaacccctggctatggcagtgtcatgatcccgtggggatcagggactgcgggggaggctcaagaagacattaggaactgggcgtcctgaggctcaagaagacatggggaagcggggtcctgacaaaacagacgcctggtgatgggatactcggcactcaggtaaggcagcaccagggaacggggcgggagaggaggccgcgggcactggtgcccttgctggagccctcctgaagcaagatcgaggagcggagccacatcccacatcctggcgggccctccttctgctcggggcaggaggggtgggggaggagggagggagaaaggggggcgtgggggtgaggagcagctaagggtgcagttgggaaggccccgccggaggacagcatgggcacaggcgaagcggggacggggtggggggcgggggaatgcctgctcctgatccgatgtgtttagctggaagaaattcattgagctgcgcactcgcacttgggcacgtttccctgtataaagtttttgtttttgtttttttgagacggagtctcgctctgtcaccgaggctggagtgcagtcgcaagatctcggctcactgcaagctccgcctcccgggttcacgccattctcctgcttcagcctcccgagtagctgggactacagacgcccaccaccacgcctagctaattgttttgtatttttagtagagacgagatttcaccgtgttagccaggatggt

SEQ ID NO: 5263 - DNA, 1808 bp, Artificial sequence
  DNA replication origin
gtgagccagtgtccgaggctccagccagaaacaggtggcagccatgccggataccaaacgcgaaactgaagagcctaaaatgacctgacaccgcctcagcatgctttacgtactgaggtcgcgcacatgcagttcctggactacatgttctgattggatgagagaaaaaacctctaggcctactctgattggactttattttcatgctgtgattggttgtctcaagacttgctctcatccaatcagaacatgataataaagtccaatcagagtaaccctggagggtttttctcatccaatcagaacatgcagtccaggaaccctcatatatatatataacctcagtatatgaatgctcccgaagggaaggcaggcccttccaggttcccgtactttcttatggagctgctcagtgaccggcttagaggaccgggaatgggtaattggaggctggagccgctccactgtggttcgcctcgctgcaactggtggtgaccgcgaccgagatggcagtgcggcgggagcggtaagaagaggaaaatagttttgggatagatggagggggtaaagagggtggttagtcccaaagggaaaagaagttagcgagcaggagaacgcgttgcaaaaagacggtggggaaaagatggtgggaaaaaaagtttttgggtagatggtgggggaaaaacagggtggggagcgcgaaggagggaaggtgttgcagaaagatggtgggtaaaaagtttatgggtagatggaggaggaaaagagggtgtcaaggggaggaggaaagagaggatggtcggggggagaaacagcgttgagcagtagggagagaaggttttgtgaaaagacagtggggagaaaaggttttgggaagatagagggggaaaagagggtaacaggtgggggaagggaaaagggtagccagcgggagaaagacaaggttttgcaaaaagatagtgggcaggaaagaaagacggtggagaaaaaaaagacagtgggtaaaaagtgtttgggtagatggaggggggaaagagggtaacgaggaggaggaaagagggtgatgagagggagcagggaaagagagttgggaaaaaatgggaaagtagtttggggtagatggaaggtaaaaaagagagtggcaagcaggatagggcaaagaagaggatgaatgggaaggggggaagactgaaaagacggtggggaatattctgggggatagatggagagagaaaagagggaggtgagcaggagtggggagaaggctttgcgaaaagactatggggaaatgttttcgggtagatggagaagtggcaaggaggaacggggggaaaagacgatgaggaaaacagtttttgggtagatgaagggcgaaaagacagtgttgagcggcaggagtgaggagaaggctttgggaaaagacgggagaaaacgttgttgcttagatgaaggagcaaaagagggtgatgagagtgggatggggaaaaagaacgtggccagggagaaggggaaaagacggtgggaaaaaccagtggggaaagtgtttgggtaaatggatggggaaaagggtggtgagtgagagagcagagaaggctttgcaaaatgatggtggggaaaaagttttggggtagatggaggaagaaaacgggtggcgagggggaggaggccaaaggcggtcgggaaaagaaggtgggaaaataatggtgggagacaaagatttggggtagatttttttaaatcagattatttgtatttttgcttttgagtagttatttatatattttgtgtattaaccccttggctgatgg

SEQ ID NO: 5264 - DNA, 1564 bp, Artificial sequence
  DNA replication origin
ttcctggactgcatgttctgattggatgagaaaaaccctccagggttactctgattggactttattatcatgttctgattggatgagagcaagtcttgagacaaccaatcacagcatgaaaataaagtccaatcagagtaggcctagaggttttttctctcatccaatcagaacatgtagtccaggaactgcatgtgcgcgacctcagtacgtaaagcatgctgaggcggtgtcaggtcattttaggctcttcagtttcgcgtttggtatccggcatggctgccacctgtttctggctggagcctcggacactggctcactgcagttggtggtgtcgacagagcggtaggagggcggcgggcagcaggagcttctcctgctgggcaggaagacgagtagaagggagcggcaccgaggcatgctggaggctggagcctgagccaccccggctcgcctcgctgcggttggtggtgacctcggacactgcagctcggccagagtggtagaaatgtcctggtgtaggtgagtcagctggggatgcactgcccgcatgtgggggcaggggttgggtgtcctattggggctcactccccgaggctgcactgcctgtgtcagggggctggttgggggcactctccgaggttgcattgctggcggtgggggtgcggtgttggctggctatctggggctacactgcccacggtggcgggggtggtgggcgggggaggcaggttgtgtgcactaacgtgtactgctggtggcgggggatgggttaggggcgctattttctgctgcactgcccagggcaaggagtgggttgggtggttattcggagctacgatgctggtagtggggggtggtttaggagtgttgtcaggtgttgcactgcccttgctcagggtgcactatcaggagctcccctacccgtggcggggtgggggcggcgattttggggcactgtcttgtgcagcaacacctgtggctgggtcaggttgtgggcactatcgggtgctacactgcctgtggagggggtggttgggggggtattggggttacactgcctgcagctggcacagggtgtgttgggtgtgctgtccgagggctacactgccggcggcaggggtcaggttagggttgctatgggggctatactgccagtggtgttggtcggctgcagaggtggtggggacagcaacagccatggtctccttgctccttcgggtgactcttctcctttccgtactccagactctagagggtgatctcttcctgctcgtgcaatcttgagcatggcaggacccccacacccactgcggttctccggcctgcacctcccgcccacaccccatgctctgtgttggggagaccacctgggactaccgggtggggattagtgggcatcgcgggggactgtgggaacagggcactgtgggtggaggtgtcaggaacgggaaccagcagttgagtggggagggctggctgggtctgagtttctcctactcctgctccccaaggagtgcagccctggtgggcccagcaatttctggccagttgcacctggatg

SEQ ID NO: 5265 - DNA, 1222 bp, Artificial sequence
  DNA replication origin
agtccagagcgcgacagggcgggattcctgccttgctatatccaggttgcagcggggcgggggttctcttctgcaggagtccaggacgtggcagaacgggagtcctccatgtaggagtcctccggtgctggagtccagagcgcagtaaggctggatcctcccgtgccataatgtagggcatggtgggacagggatcctgccttgtgatagtctagtgcctgagtccgcagtaaggcaatggtcctccaatgctggagttcacggcgtgttgggggtcacggtccttcagtgacttaggccaggggtaccagggcggggatccacagttgccatagtgaggacctctgaggagtctggttcctgccttgctgcagtccggggagcagcgggcaggggtcctctcttgtcagagtctctggcgcgaggtgggggtggggtgggggttttcctatgcgatagcccacggggcggtgaggccaggtcctcgcgtgcctttgtccagggcgcaggggggcgagggtcttcggtggtggagtccgcggagcggcaggacaggggtcctccagtgccatattccagagcacggcggagtgggggacctgtcctgcagtggtccagggcatgcgggagtggtgggcctcctgtgccatagtccaacgcgcggcggggcgggggtcacctcgtcctgcagtcaccatgcacgagaccccggtcctgctgtgcctcagtccagtgcgcggtgggacggctgttctgctatgctgtagtgcaggacgcggtggggcagcagtaacccagagagcgccgtggcagggggtcctccagtgctggaatccagtgcatggcgggtcaggggtcttaccgtgccgaagtcagtggcaagggtcctcccatgccatagtctagggggcgaccgggcagggttctctagtgcaggtgtccagggtgcggcggggcaggagtcctctggtgcagaagtccaggacgtaatggagtgcgagtcctccagtggcggagtccagggctctgcggggcagggttctcccatgccagagtgtagggcgcgttcaggcgagggtcttggcgtgcagtagtccagggtgcggtggggcaaggacagtccagacctccatggcaggggctcctctgtgcaggagcccagtgcccggcagatcggggtccctccgtgctgtagtccagggcacggcaaggtgtggatcct

SEQ ID NO: 5266 - DNA, 772 bp, Artificial sequence
  DNA replication origin
ggtcctcgggagccaggatccagggtgtggagaggcgggggttctgcagtggcacagcccaggacacagcgggatggggcggggcggggattctctggtgccttagtccagggtggagccgggtgagaggtccttcagtagcatagtctagtgcatggtgttgcaggggtcctccagtgcctgaggccagggagggtcgcgggtcccaccgtactctggttcagggcggagcaggtctgaggtcttctcctgcttcagtctagggcgctggagagcgggggtcctctggtgccagagtcagtggagccatgggtcggggtcctcccatgtcttagcccaggacggggagaggcagagatcctcctttgccctagtccaagggatcgtgaggccccgctcctgcacagaggcggtctgtgcctctaccgccacaggggaaaactgcaccatctctggcaagcctaacagagcagctgtccttaaaagactcccagttgagtgtggtttggagcaggcctgagaagtgtgcccttagatggcttcaagggctctgagctttgtttaaggaatcctgctgacttcagttactccaagcccttttccactcagcagaacttctggccacggggtcacctatctgcggggcccttctatcatcccagatccccacaggactccctctcatcctcacagtctcagctcaccgctttattcatcaccgcattcctggcaccaggcctggcccataagaaatgggtcagattaagagcta

SEQ ID NO: 5267 - DNA, 1182 bp, Artificial sequence
  DNA replication origin
gaccccgacgcccagccggaccctgccctccagcggggctgcggctccacggcctgcgacagcagccccaccccgcattcggcgcgctcccgggggcagaggtcgcggtgtcctcaggctgtggcgccggcctgcaacccccacgccgggctcgggccccccggcggaggagggcgatgctccctgggtagggcgacctgtcacctgggctgggagggcggcttaggggcggaagcggcggtccagggccgcctggtgcagcagcctgtctcagccgcggtccctccagtccctccctggcggctgcggagccgtccgaggacaggggccataaactctccagagcgggaagccgcacgctggtggcccggccccgcgcacagacctggcggcagctggcacctgacccgctgcatgggtctccagggagctcgctgcccacccggcgctgcagcctcggctccctcgtacgcgctctggtaggtgctagggacgaccctatgggccagcttgccatgccaagtccccaggccgcacccaccgtggctccgtgggctaggggactggctcctcctgtgggtcgtggggctgggaggcagggactttaggggagagggagggaccgagggcagcccctgctgtgtgcgcagcgaggtcgtgcacaggcctctgttgcagagcgtgcagcttcagctggcactggattgcaggtggagatgactgtgtgtgcgcacacctgggggtgaagaggacgcagcctgtctacctgacccatgaaatggaggagactgtaccccagaagcagcgggttcactgctccattgattaagcaagtctgggacacacatgtagctaagctgtgacttctgtgccagcggtcccaacacccacgccttcaggaagacacatgtgtgaggggttgcatgtttgtcaggcctgagagtggagagcaggggccagagacactaggtagggggaacccaccctagggctctgagggacgacgatgtgggaagctggtggcagagactgagctggcccaatgttgcagggtggggacagaatagaggtccaccacaccctaggtggacagctgaacctgagtagacatcaggccccagatcgacatctggccccaggtagattcctaggcccaaggtgaatactcagtctccagcccta

SEQ ID NO: 5268 - DNA, 1081 bp, Artificial sequence
  DNA replication origin
tcggacggctccgcagccgccagggagggactggagggaccgcggctgagacaggctgctgcaccaggcggccctggaccgccgcttccgcccctaagccgccctcccagcccaggtgacaggtcgccctacccagggagcatcgccctcctccgccggggggcccgagcccggcgtgggggttgcaggccggcgccacagcctgaggacaccgcgacctctgcccccgggagcgcgccgaatgcggggtggggctgctgtcgcaggccgtggagccgcagccccgctggagggcagggtccggctgggcgtcggggtcctggcagagacagcggtgagagcaggagcaggtgcactggcagctgcagacgcgccgccaggctcccggacaccgcgggcgcgccccctggtggcagccggctccggagccgcgggagggcggtgcccagtccccagccggcggcagcgcgaagcgccttccccgcttgggggagcgggcgtggacctgcagctggagtgccttactagtgaaaaagctggggttggagctgccacggggggaggtgtgggggcctagggggctctgcctggaccttctgggtgtcctcctgcgacctcaggttcctcacctgtctcagaggactgatgggctgctgtggcagggttgtttggaggattaagccagatagtcccagtaaagccccattagcgccccctggcctctggattattattttttattatttttctggctttcttaggaaactttccggaatgtgtccaggtgttgaagcgggaaggctggacaccctcccgtggcgttgccgttccttccagacgccccctcttcttaggctgttttcaagggcacgcccggcaacatgtgctctacccaagagcgcttcacagatcttcctgtgggtctaaaaccagaacgctttcttccccgacccctgctcccatatcaccccaacctcaagtcttttggcacagccggctacagactcgagtgtcagtttaatgcttgttccctaaggtctccccagggctgttaggacggcgttagggttaggattcgggt

SEQ ID NO: 5269 - DNA, 1174 bp, Artificial sequence
  DNA replication origin
aggcgcgctgcgtgtacggccgcgtgggcagcgtgtgccgctacatgctgcagttttgccttgacagtgtcccagtgcaccgcgccttctcgcccatggctggtgtgggtttcctgtcgcgcaggcgcagcgtgctcttcctgggcttcccaagtccaggctcagccgaaaacttcctgcgctttggcctggaggggctgctgctatcccccacccaactatcgctgcgtgagctggcgacacacgcagcgcccctgggcagctacatacgcgagctggcaagccgctgggcgcctctacgagccggcagagcttcctgctcagcgtgtccgtggccgtgggacccagcaccgcgcccctggggacatccgccctgcccgcgcccacgccacccagccatgggccaacagtgcgcaagttagccaaggtagcgctggcggccggcagcccctggtggccgcccctggtgcggagcagcgaccccgacatgaagacgctgatcctgacgccaccgccgggcacccacgttttccagtatctttatacagtatcctatgtctggtaccaatttattgtattagttcattttcacactgctatccagaaatgcctgagactcggtaatttataaagaagagggatttaattgactgagttgggcatggctggagactcctcaggaaacttacaatcatggcagaaggagaagcaggcacgtcttacatggcagcaagcgagagagagagaggagcaagccggggaaatgccagatggttataaaactatgagatcccatgagaactcattcagtatgatgagaacagcatggggaaactgcccccgtgatccaatcacctcccaccaggtcctttcctcaacatatggggattaaggggattgcaattcaggatgagatttgggtggggacacagccaaaccatatcagcatacctaggttactagctcatatctggagccagcaatggggtttgtcccaccagaatcactcaagcgtagagtgatgtggttccccaaaggaaaactaaggtgtcgtttctagacaaagaggattcaatgctgggaaggcaaaagcagtgtatctattccatagtaggatgtgagtcatcagtacacaggagatagtaagaaggctaggagcagtggttgacacctg

SEQ ID NO: 5270 - DNA, 1153 bp, Artificial sequence
  DNA replication origin
cggcggcgtggctcggcctcgcgggtccgggcgcgcggcacagcgggctccgggggcggtggctccggcagggtctccgtggtcggccggtccagcgcctccaggaagtcgaagctggggcagtggcgcttgttgaaaggcgcgggctcagcaggccgggccacggatcgctcacatggcgagcgcttggaagcgggtcccggggtcgccaccttgatgtcctggtacacggtcgacaccagcaggtccggagcgtccgtacgggtcatcttaaaagaggtcctcaggctggcggctccagctcacactgccttgcggggcttttgccctggggggagatgcgggtcagggcggccccatccgcagcccaggccccgcttctcccccacgctggcccggcttacctggggcgcagcgggcggagcagccctggctgcgggcctgggccgagaaagcgggcgcttcctccatgccggagtcagaagcacctgcgggaggaacccagctgtccaggcgcccgtcctgcccctcccccatcctctccctgcgatggggcgggcgggccagaaaggcttagtggtggctgtggttcccgcgtgaagctccagggcctcccctccctcgactagtgaccgcggggccggctcgggcggacccctttccgggtggggtaggggagtgggggcgtggtcctggggctgcaccctctggtgtccgcagctggaaggacggaccgcatttgggccttatttataggtgttgccccaggagacgtcagtgactgcgcccccgtcacagggcccactgcagagcgacccctccgatcgtgcacagtcgaaggcgagtccctgggcctcagccttagccggctctgcaccaagtgggtgacaccaactaccccacctgctggccgggccgagcacagagccccgcccccagcactgcaaggacccacgcctaggtgccctcaacttcccgtgagccccaggccagaaaaatgcccccagagagcatacctgggccctaaatctccctttcctttgccgacaccttttctgaccccaagtatttttgggtggttgaaacaaggccccagctttgtgtaaatgcacaggacacccccctagggtttgcacggcagtcccaaaccatc

SEQ ID NO: 5271 - DNA, 1702 bp, Artificial sequence
  DNA replication origin
gtgggggttgtgtttcccacagtggcctcagctgtgcccccgctcaggtgagcccacaggcaggatctgggaggcactcctcccaaacactccactcagaccataaagcactcctgtttcactctgcgtgtccgttcttctccctgcacctctgctcccgcttccccggcccaggctgccatgggttggcagggaagtcctctgaggcaggaggctgcccagcagtggtgtgaggacgtcccaccaagtctggccacaccctgggtacatcccagcccacctatgccagggctcagcagctgcacccagcacacttggggacctcagccccaggaggtggaagtcaactctgcaaggctcccaggcagctgcctgcagccctgcccccccaaccccgccttcaggcccctgccccctccagctgtcagcagcacccagcctccacccccacagctactgttgccatgagaaccctgcagggcgggcaggaagagcgtgccagtgaaggggaggaggtggccaagctggaggctcctgtgcctgggagctttgtggccccagggtgtggggcaatcactgcagtccctgagcaggtgctgtggcccacagcaagcttaggagcctggccccttagcccacagcccatgaggtcagggccaggttcaggggttctcctggtgtggggatgggtcaacagtacgtgaacttgccaggatcgcaccatggatggctatgttggggtttcagtgggccctgctttgagcagcgcagaatggggtaggtcctgcccttcagagccaagggcattggctccccacccctctgccaagctagaatgttcccaggcccaatgcctttgggaggggctggcagagtgggacgatgacattaccaggcaggtatgataggtcacgtgcaggccttcccaggctggcagggacactggatgcaggagtggcctcacccagagaggatggcatcctggggacacaagagactgcaagggccatctggccccaggtacccgccaagattttggcattggcagccttgaagccgataggggctggggagaggccagtggggcagagagtagcccacctgctcctgcctcgcccgacaggagatgcgaattccaagatgcccctgaccaatctctgcagcccaggccagggcttgggcccctcctctcaggcaagtgtgttggggtgacactggcgggactggcaggctgctccgggccacaggactcctgcttagacactgaggtctgtgtcttgggggtgctgcagggaccctgtgctctgcacatccccaaattggagccagcgcagctcacgatccccagctccaccatgcagcccccactgggtgtggcccctttaagtacagccccttcagctgccatcgggggcagcactgagcagccaggtcaggacccgcgctgctgcctggaaacttctgctggtgccggggagacgcagcagtgccagggacaaggaggagtcgacctgggggtagcacagcccaccggggcacagctggagcagcacccaggtaaggggctaggggccgagttgctgagtgtgtcactgtcatgggcaggggaggctgccttagggaggccggaaggatgaggattccccgtccccaggcaacaccagctgtatcccttgaagggccgctcccagccagggcaagg

SEQ ID NO: 5272 - DNA, 859 bp, Artificial sequence
  DNA replication origin
ccgcggcgacggggggaaaaaaccgcggcggcaaaaagcctcagcggcaggagcaaaaagccgccgcagtggggataaaaagctgcggtggaaaaaacccgtggcggcaggggcaaaaagccgtggcttcgggggcaaaaagccacagcagcaaaaaccctcagcggcgggggcaaaaagctgtaaaaagccgcggcggcgggggcaaaaaaccgcggcgccaagggcaaaaagccgcggtgacggggcaaaatgccgcggtggcgggggcaaaaagccgcggcgggaaaaaaccgcagcggcgggggcaaaaagctgccgcagcggtgacgaaaagccacaggggcgggggcaaaaagccgcaaaaagccccgacggcgggtcaaagagccgcaaaaagccccagcgtcgggggcaaaaagccgcggctgccggggcaaaaagcagcggaggcaaaaacccgcggcggtggctgcaaaaagcagcggcggcaaaaagccggggcggcgggggcaaaatagtggaaatggggtagaaggccagcacagcttggcattcctggactgtgatgtggaaggaaaagtgcagcgcaagacaaagatgtaagtaggcttgactcagtgcagctaagaactcagatgttatcttgatgttaactatcagctgattttttgtattttagtagagaaggggttttaccacattggccaggattgtctggatctcctgagctcatgatccacacacctcagcctcccaaagtgatgggattagaggcatgagccacaaagtgctcaaaaaatctattaattaaaaaagtgtatgtagccgtcttcaatctaccatgtccattagcaga

SEQ ID NO: 5273 - DNA, 980 bp, Artificial sequence
  DNA replication origin
cgggagcgggggcaaaaaaccacagaaagccgaggcggcgaggggaaagagccgcggcggcagggggcaaaaagctgcaaaaagcagcggcggcaaaaagccgcggcggcgggggcaaaaaaaccgcggcggcgggaggcaaaaagccgcggcggcggcgggggcaaaaagctgcaaaaagccgcggcggcggggacaaaaagctagggcggcaaaaagccgcgctaacgggggtaaaaagccgcggcgacaaaaagccgctgagagggggcaaaaagcagcgggagcgggggcaaaacacaaaaagccacggcggcgggggcaaaaagctgcaaaaagccgcggcggcgggggcaaagagcctcggcggcaaaaaccagcggcggcggcgggcgcgaaaaggcgcaaaaagccgcggcggcgggggcgaaaagccgcaaaaagcagcggcggcggaggcaaaaagccgcggcggccggggcggaaagccgcaaaaagccgcggcggggcaggggcaaaataggagaaatgaggtaggaggccagcacaacttggcattgctggagtgtgatgtgataggaaaagtgcagccaaagacaaagaaagatgtaagttggcttgactcagtgcagctaagaacccagatgttatcttgagggtattaactaataagcagtttaaatcagaatggcacattctgatttgttttttatattcacatttggcaggcatagatactgtttgaagagagtaaagtcagtagatagaggtaacaaacttaaatatgtgccaagtctagaaacaagagactagggggataaggacctttcaaaagaaaatgcaagatttgaaaactgattggctgggggatgaggaaaaggcacgtctttaaggtcaatccctgttttgctttaagttgttagggggtggttttatcacatattgtagaatatgtcatttcagttttgaacatcttgagt

SEQ ID NO: 5274 - DNA, 1287 bp, Artificial sequence
  DNA replication origin
ggggctgaaccccccacctccctcccggactgggcggctggccgggcggggggctgatccccccacctccctcccagactgggcggctggccgggcggggggctgacccccccacctccctcccggacggggtggctggccaggcagaggggctcctcacttcccagtaggggcggccaggcagaggcgcccctcacctcccggacggggtggctggccaggcggggggctgatccccccacctccctcccggacggggcggctggccgggcagggggctgaccccccctcccccctcccggactgggcggctggccgggcggggggctgacccccccacctccctcctggacggggcgactggccgggcagaggggctcctcacttcccagtaggggcggccgggcagaggagcccctcacctcccggacggggcggctggccgggcggggggctgacccccccccacctccctcgcggatggggtggctgccgggcggagatgctcctcacttcccagacggggtggctgctggacggaggggctcctcacttctcagacggggcggttgccaggcagagggtttcctcacttctcagacggggcggccgggcagaggcgctcctcacatcccagacagggcggcggggcagaggtgctccccacctctcagacgatgggcggccgggcagagacgctcctcacttcctagatgggatggcggccgggaagaggagctcctcgcttcctagatgggatggcggccgggcagaggctcctgactttccagactgggcagccaggcagaggagctcctcatatcccagacgatgggcggccaggcagagacgctcctcacttcccagacggggtggcggccgggcagaggctgcaatctcggctctttgggaggtcaaggcaggcggctgggaggtggaggttgtagcgagccgagatcacgccactgcactccagccttggccccattgagcactgagtgaacgagactccgtctgcaatcccggcacctcgggaggccgaggctggcggatcactcgcggttaggagctggagaccggcctggccaacacagcgaaaccccgtctccaccaaaaaaaaacgaaaaccagtcaggcgtggcgacgcgcgcctgcaatcacaggcactcggcaggctgaggcaggagaatcaggcagggaggttgcagtgagccgagatcgcagcagtacagtccagctttggctcggcatcagagggagaccgtggaaggagaccgtggggagagg

SEQ ID NO: 5275 - DNA, 924 bp, Artificial sequence
  DNA replication origin
cgggagggaggtgggggggtcagccccccgcccggccagccgccccgtccgggaggggggagggggagtcagccccctgcccagccagccgccccgtctgggagggaggtggggggatcagccccccgcctggccagccgccccgtccgggaggtgaggggcgcctctgcctggccgcccctactgggaagtgaggagcccctctgcccggccagccaccctgtccgggagggaggcgggggggggggtcggccagccgccccgtccgggagggaggtcggggggtcagccccccacccggccagccgccctatctgggaggtgaggggcgcctctgcccggccacccctactgggaagtgaggagcccctctgcctggccagccgccccgtccgggagggtggtgggggggtcagccccccgcccggccagccgccccatccgggaggtgaggggcgcttctgcccggccgcccctactgggaagtgaggagcccctctgcccggccatgaccccgtctgggaggtgtgcccagcggctcactggggatgggccatgatgacaatggcggttttgtggaatagaaaggcgggaaggttggggaaaaaattgagaaatcggatggttgccgggtctgtgtggatagaagtagacatgggagacttttcattttgttctgtactgggaaaaattcttctgccttgggatcctgttgatctgtgaccttacccccaaccctgtgctctctgaaacatgtgctgtgtccactcagtgttaaatggattaagggcggtccaagatgtgctttgttaaacagatgcttgaaggcagcatgctcattaagagtcatcaccactccctaatcttaagtacccagggacacaaacattgcggaaggccgcagggtcctctgcctaggaaaac

SEQ ID NO: 5276 - DNA, 2909 bp, Artificial sequence
  DNA replication origin
ccgtgtccccgggcgtgcgccttcgggaccaggtcggcggcaccccgagtgggcctggtggacacccggagggtttggggtcggccagcagtgtgtgcagggaagagggttcagggggctggccgcgacagtggcggcggtggggaagccgcaggcccgccgaaggccagtcggccgctccaggtgccgcgaggggccgccttcatgccccgaggccactggcggtgagaccccaggcaccgcggtccgcctctccttcgctgcccaaacgtcggggccgccccgcgccctccgcgcatgagtggccgccggtccctcgcggctgccgcacacgggtcgggcggtcggcctcctcgcacatgggcacgaagggtcgggagtggtgagcccgtcggggggttttgtgtcctgtgggtggatgggatgtccggttcgccgccccaccacccccctcccaccaccccaagctgctccctccctcccccacgccccatcgcccgccctgccgcgcccaatctcgcaactgggacgccgggctcatcctcgcgagtcccagaggccgctttctacctacctggttgatcctatcagaaccatatgcttgtctcaaagattaagccatacatgtctaagtacgcagggctggtacagtaaaactgcgaatggctcattaaatcagttatggttcttttggtcgctggctcctctcctacttggaaaactgtggtaattctagagctattacatgctgaagggcactgacccccttcacagggaagatgcgtgcatttatcagatcaaaaccaacccagtcagcccctctccgtccccggccggggggtcgggtgccgccagctttggtgcttctggataacctcgggccaatcgcacgccccccgtggcagcgatgacccattcgaatgtctgccctatcaactttctatggtagtcgctgtgcctatcatggtgaccacgggtgacagggaatcagggttcaattctggagaaggagcctgagaaatggctaccacattcaaggaaggcagcagacactcaaattacccactcctgacacggggaggtagtgacgaaaaataacaatacaggactctttctaggccctgtaattggaatgagtgcactttaaatcttttaatgaggatcaattggagggcaagtctggtgccagcagccgtggtaattccagctccaatagcgtatattaaagttgttgcagttaaaaagctcgtagttgaatcttgggagcgggtgggctagcgagccacagcccgtccctgcttcttgcctctcggtgccccctggatgctcttagctgagtgtcctgtggcccgaagcacttactttgaaaaaattagagtgttcaaagcaggcccaagccgcctggatactgcagcttggaataatggaataggaccacagttctattttgttggttttcggaactgaggccatgattaagagggacggccgggggcattcatattgcaccgctagaggtgaaattcttggactggcagtttagaccagagcgaaagcatttgccaagaatgttttcattaatcaagaacgaaagtcggaggttcgaagacgatcagataccgttgtaattccgaccataaacgatgccaactggcgatgtggcggtgttattcccatgacccgctgggcagcttccaagaaaccagtctttgggtttttgggttccgaggggagtatggttgcaaagctgaaacttaaaggaattgacagaagggcaccaccaggagtggagcctgcagcttaatttgactcaacatgggaaaactcacccagcctggacacggacaggattgacagattgatagctctttctcgattccacgggtggtggtgcatggccttagttgctggagtgatttgtctggctaattccaataacgaacgagactctggcatgccaactagttatgtgaccctggagcggtcggcatcccccaacttcttagagggacaagtggcgttcagccacctgagattgagcaataacaggtctgtgatgcccttaaatgtccagggctgcacgcgcgctacactgactggctcagcgtgtgcctaccctatgtggcagatgtgggtaacctgttgaacctcattggcgatggtgatcagggattgcaatttttccccatgaatgaggaattcccagtaagtgctggtcataagcttgcatgaagtccctgccctttgtacacactgcagtcgctactcctgattggatggtttagtgaggccctcggatcagcccgctgggtcagcccactgccctggcggaacgctgagaagacagtcgaacttgactatctagaggaagtaaaagtcgtaacaaagtttcggtaggtgaacctgcggagggatcattaacagagaagagcgaagccacggagacgccgccatgtccttcctccttggctgaccgtgttcccctgtggcgcatgcatgggcggagtcgtgccctttgttcgttgcatggccccacctgccccgagagccagagaactcgggagggagagagggggtagaaagagacatgcgtgtggggatgaaaccgtgtgtgcgtgtcgtggggcgggctggatggctcgcagcctggtgagcagtggggagcagtcccctgctgtggcccccatgtgtgtgtcggtgggcgcgggggtggttctcggcgtcacggtggggtgggggtctcagtgccctccccactggggctgtcatcgtgccctgtcccactgtcccagccccatcctgcccactccctttggggctggccaggttcccatcgctgccgctgccaccatcgtcacctctgccaaaccatgccactggcccggcccggcccgcttgctctccccagc

SEQ ID NO: 5277 - DNA, 1005 bp, Artificial sequence
  DNA replication origin
tggactagggggcccttcggggattgcgcgcacgcgcagcggccaggccccctgcccagaccgcgaaggctcaaggttgccgcacgcagatttttcctggtaccgcaggccccctcccttccccaggcgtccctgagcgcctctgcgggcccgacgaggggcgactggcgtgtggggagtgtgacccaccctcggtgagaaagccttctctagcgatctgagaggtgtgcctttggggtaccggatcccccggcctgccgcctctctttgcgttatggtagcgctgccgtggcgactggcttgcagaggaccctcctccacttcccccttgatgaggtgagtgggggaaagcaagggttccgccagcctccgcggtggggacccagggaagctcgtcgcctactgtgtggcccgcgccttccccttccgagtcaggggagaatcccgccgggccgggccggcgtcctagcggttgggaggctgcgtgagcggtggctgtgcctggcgttcagtccggcttgtgacccgttccgctgtgagccggctctctgcccgctcccctgcagagcagcgaccggtgccgacgaccgtgtttgcgtggcacggggttgggccgcctggccctgggaagcgtcccaagtggggggcatgccggtctcctggagcttgaccgggttggaggatggatgagaaacgagcaacgtggccctggcgttaggtttgtggctgaggtcacctcggggtcctgatggcgggacctggggctcatgaggcgggtctcggtggtgccgagggccgtccggcatcctaggcgggtcgctgcggtacctccctcctgtctgtggcggtgggatcccgtggccgtgttttcctggtggcccggccgtgcctgaggtttctccccgagccgcccctctgcgggctcccaggtgcccttgccctcgcggtccctggccttgcctgtctgtgccccccaccctgcccgcggatcctctctccccgagc

SEQ ID NO: 5278 - DNA, 923 bp, Artificial sequence
  DNA replication origin
ctcatccatcctccaacccggtcaagctccaggagaccggcatgccccccacttgggacgcttcccagggccaggcggcccaaccccgtgccacgcaaacacggtcgtcggcaccggtcgctgctctgcaggggagcgggcagagagccggctcacagcggaacgggtcacaagccggactgaacgccaggcacagccaccgctcacgcagcctcccaaccgctaggacgccggcccggcccggcgggattctcccctgactcggaaggggaaggcgcgggccacacagtaggcgacgagcttccctgggtccccaccgcggaggctggcggaacccttgctttcccccactcacctcatcaagggggaagtggaggagggtcctctgcaagccagtcgccacggcagcgctaccataacgcaaagagaggcggcaggccgggggatccggtaccccaaaggcacacctctcagatcgctagagaaggctttctcaccgagggtgggtcacactccccacacgccagtcgcccctcgtcgggcccgcagaggcgctcagggacgcctggggaagggagggggcctgcggtaccaggaaaaatctgcgtgcggcaaccttgagccttcgcggtctgggcagggggcctggccgctgcgcgtgcgcgcaatccccgaagggccccctagtccaccagcctcctttctcccaggcaaagcacctccaagtaaacccacacacaacctgtcggaggcagaacggtagcccctcggcggccggccggcgcacgcgtcatctgccccagcccaccgcaatagctcacacggcccgtgcgcagccgccagaggggagcacgggacctgcgctcgccagatcaggcggcacccttccccgcgtgggaggggcgcgtctcactcaaccgcct

SEQ ID NO: 5279 - DNA, 1645 bp, Artificial sequence
  DNA replication origin
aggcacttttgttcacacagaatactgggcagaaacgttctcagcaggtttagacctcctagtcaaaaagccaaagccacttctgggattttttttcaaagagccagtggttccacaatgggccgtgggtagttgtggaaatggagagaagtgtttgcagatacatatttgagacagaacagacagggctcggtcacaggtcatgaaggacacgagcagatgcacattgagaaaaccctcccagcatcctaggtgaacagaggtatgattttttgagacagtcgagggagatgcaaccccagattttagggctggatctttattaatatgtagtatctatgaggtatccaagtccagaaattgactcaccagttctgtacagcgttcggtagggagatcaaatctgggatgtctaaagttaagaattcaggctgtggtaatggattagattagatgcacttgaacttattttgcaaagaaagagagggtgggagacagcgagagccagagagcgagcgagagagagagagacagagacacaaagatacacaaagagagaaagacagaaagagagagacagacagacagataaagacacagagaaagagagagatggacagagacagagagaaacagaaagagagagagagagacagacagagagagacagacagacaggcagacagacaggcagagaaagagagtaagacagatggcagacacacacagagagagacagagacagatggagagacagagagaaagaaagagacagacagagggaaagagacagagaaagagacagacagagggagagagagaaccagacagaaagagagagacagacagagacagagagagaaacagacaaggagagagagagagatagacagacaggcagagaaagacagtaagacagaagacagacaaagagagagagagacaggcagagagagagagagacagagagacagagacagagaaacacacaggcaaagagagagagaaaaaaacagggagagacagacagacagacagggagagagagagagagaggccgacagacagacagacaggcagagaaagagaataagacagaagacagacactgtgagagagacagagagagagatagacagagacagcgagacagagaaagaaagagagatacagacagacagacaaagagacagagaaagacagagacggacagagagaaacaaagagagagagacagagagagaaagagagagacaggcaggcagagaaagacagaagacagacacagtgagacaggcagagagagagagagacacagagagagagagacagagagaaagaaagagacagagagagatggacagagagaaacagagagagggacagcgagaaacagagagagagacagagacagagacagacagaaacagacagacaaacagggagagagagagagagacagacaggcatagagagagagacaggcaggcagagaaagggagtaagacagaagacacacacagtgagaaagacaggcagagagagagagaaataggcagagagagagagacagagagagtgagagagaaaacagagaaagagagagacagagacagacagagagacagagagaggagcaggaagg

SEQ ID NO: 5280 - DNA, 1134 bp, Artificial sequence
  DNA replication origin
ctccgcctcccaggttcaagcgattctccagcctcagcctcccaagtagctggcattacaggcacctgccccaccgctcctgactcagttttgtatttttagtagagacggggtttcgctgtgttggcaaggttggtctcgaactcccaacctcaggtgatccacccgcctcggcgtcccaaagtgctgggatgacagatgtgagccaccacgcccggccttaaccgtttacttttaagttgaggaacttatcagggaaatatgagaagtacagacgccacacgtgacagacagaaaagtctgaaaatgccccttgcatccaagtggggacccggcctcgacctcccgaaatcatacaccgagtggggaagcccagcaaggcccgtctgtctagattcttctcagcctctctaagcacctaagcatgcacttctcactttcgtggaaggggcagagccctccccgtcatgaggtgtctgacagactgacacagaaagagacagacatagaaagacagagacggacagagagagatagagagaaacagacagaaagagagagagatggagagtgagtgagagagagagagacatggagggagagagacagaaaggcagagaaaaagagtaagacagaagacacagtgagagagacaggcagagagagagagagacagagacaaagacaaagaaagagagagaaagagacggacagagagagacagaaacagaaagagagagagagagaaacagaaagggagggagagagacagagacagagagactgacagacagataggcagagaaagagagtaagacagaagacagatacagtgagagagacaggcagagagagacagagggagagacagacagagaaagagacagagagagaaagcagagatggagagagagagacagacagaaacagaaagagagagagacagagacagagagaagcagacagacagggagggagggagacagacagagagagggagacagacagagaatgggagacagacagacaggcagagaaagagagtaagacagaagataggcacagacagagagacaggcacagagagagagacagacagatagagaaaaagaaagagacaagccgggcacgatg

SEQ ID NO: 5281 - DNA, 2070 bp, Artificial sequence
  DNA replication origin
atacagtgagagagacaggcagagagagacagagggagagacagacagagaaagagacagagagagaaagcagagatggagagagagagacagacagaaacagaaagagagagagacagagacagagagaagcagacagacagggagggagggagacagacagagagagggagacagacagagaatgggagacagacagacaggcagagaaagagagtaagacagaagataggcacagacagagagacaggcacagagagagagacagacagatagagaaaaagaaagagacaagccgggcacgatggctcatgcttgtcatcccagcactttgggaggccgaggtgggtggatcacgaggtcaggagatcaagaccatcctggctaacacggtgaaaccccgtctatactaaaaatacaaaaaatatagccaggtgtggtggcgggtgcctgtagtcccagctactcgggaggctgaggcaggagaatggcatgaatctgggaggtggaggttgcagtgagccgagatcgtgccacagaaaaagaaagagagagacagacagacagaggaagacagagacagacagagagagacagagagaaacagagatagagagagacagagagaaacagacagaaattgagagagacagagagagagaaacagaaaggcagggagggagagagagacagataaacaaagaaagagagtaacacagaagagagacacagtgagagagacaggcagagagagagagacagagacagagagaaagacaaagagagagaaagagacggacagagagagacaaagagaaagagagacagagagagaaacagaaagggagggggacagacagacagagagagagagactgacagataggcagagaaagagagtaagacagaagacagacacagtgagagagacagagacagagagacagacagagaaagaaagggagggacagagaaagagacagagagagaaagacagagatggacaaagagagacagacagaaacagaaagagagagagacagacagagagaaacagagagggagggagggagacagacagagaaagagagacagacagacaggcagagaaagagagtaagacagaagataggcacagagagagagagagagacagacagagagacacagaaaaagaaagagagaggcagacagagaaagacacagacagagaaaaacagagatggacagagagagacagagagaaacagacagagagagacagacagatgggcagagaaagagagtaagacagaagacagacacagtgagacaggcagagagagagagaaagacagaagtcagacacagtgagacaggcagagagagagagagagacagacagacaaagagacagagagagacagacagagagagagagaaacaggaaacagagaaacagagagaaacaggaaacagagaaacagagagaaacagaaagggagggagagagagagacagacagatggacaggcagaggagagtaagacagaagacagacatagtgagagagacaggcagagagacagagagacagagacagaaagagacagagaaagacagggatggacagagagagacactgagaaacagaaagagagagagacagagagaaacagacagagagaaagtgagagagagagagagagaaacagaaagggagggagagacagagacaggcagagaaagtaagacagaagataggcacagagagcaagagacagagagagagagacagacagagacacagagaaataaagagagaagcagacagacagagaaagagacagacagagaaaaacagagacagagagagacacagagaaacagacagcgagggagagagagagacagacgggcagagaaagtgagtaaggcagaagacagacacagtgagagaggcagagagagagagagacagagagacagagagacagagacagagagaaagaaagagacagacagacagagaaagagacacagagagaaagacagagacgaacagagagagacagagagaaacagatagaa

SEQ ID NO: 5282 - DNA, 1705 bp, Artificial sequence
  DNA replication origin
tgtaagggctgggtcggttgggctgggtgcgtgccgccgctcgacgaggccccgctgccccccccaagccccaggaatgcctgttgtggccctcccctgccccaacccgtgtgctgctcactccctcccccgccccctctctctctgtcctccccctctatggaggtggtgtgtgggggcggaggggtggcagtggccatacagccccagtggcagggcatgatctcccgtgagggggtgctggtggtggtggtgactctggacacaagctgggcccttcccatggattgccccagttgtggccacccatggggagcccagtgggtgctggtgtgtcctgtctcgctctgcgctgtcatgcgtgtcagcgtgggcagggagtgattgggtcagtgggtggcaggcggggtggttcattcccccacctcccccgcagccccatctgtctcctgtccccccctccgtggaggtggcgggccgcgggctggtccccgccacaggggccacggttccatgcagcacctccgccggtgcttagcagccgacttatagaactgtgtgcaccaggggaatccaactgtttaaacaaagcatcgcgaaggccctcggggggtgttgcaaagtgatttctgcccagtgctctgaatgtcaaaatgaagaaattcaatgaagtatgggtaaatggcggaagtaactatggctctcttaaggtagccaaatgcctcgtcatctaactagtgacgtgcgtgaatggatgaatgagattcccactgtccctacctacttactatccagtgaaaccacagccaagggaatggggttggtggaatcagtggggaaagaagaacctgttgagcttgactgtagtctggcatggtgaagagacatgagaggtgtagaataagtgggaggtccccagtgcccccctatccccgtgagggggtggggtggggtcctgtgggctgcccatggaatactactactctgatcgttttttcactgacctggtgaggcagggggtgagcccctaggggccctcccttctggcgccaagtgcccagctgcacgccggccgggtgttgacccgtcccgaggacagtgccaggtggggagtttgggatagtacacctgtcaaacggtaatgcaggtgtcctaaggagagctcagggaggacagaaacctcttgtggagcagaagggcaaaagctcgcttgatcgtgattttcagtgcgaatacagactgaaagctgggctttgacgatcattctgacgtttttaagcaggaggtatcagaagttaccacaggggataactggttcgttgcggccaagcattcatagggatgttttttgatcctgtaatgttggttcttcctatcattgtgaagtagaattcaccaagcattggattgttcacccactaatagggcatgtgagctggatttagatcgtagtgagacaggttagttttaccctccgtgatgtgtgttgttgcaatggtaatcctgctcagcatgagaggaatggcaagttcagacatgtgcttggttgaggagccaatggggtgaagctacggtctgttggattgtgactgaacgcctctaagtcagaatcctgcccaggcggaaggatacagcagcaccgtggagccttggttggccttggctggccttggctggccttggctagccggttccccacccccgc

SEQ ID NO: 5283 - DNA, 831 bp, Artificial sequence
  DNA replication origin
aagggagttgggttcagatccccgaatccagaatggcggagatgggcaccatgaggcgtccagtgcggtaatgtgactgaccctggagaagcatgtgggagccctggggagggttctctttttctttgtgaagggcagggcgccctggaatgggttcgccccgagagaggggactgtaccttggaaagcatcgtggttctggtggcatctggtgagctctggctggcccttgaaaatccagggtagacggtgtaagtctcacgcagggccatacccatgtctgcagcaggtctccgagatgagcagactctggcatgttggaacaatgtaggtaaaggaagtcctcaagccggatccataacttcgggataagtattggctgtaagggctgggtcggttgggctgggtgcgtgccgccgctcgacgaggccccgctgccccccccaagccccaggaatgcctgttgtggccctcccctgccccaacccgtgtgctgctcactccctcccccgccccctctctctctgtcctccccctctatggaggtggtgtgtgggggcggaggggtggcagtggccatacagccccagtggcagggcatgatctcccgtgagggggtgctggtggtggtggtgactctggacacaagctgggcccttcccatggattgccccagttgtggccacccatggggagcccagtgggtgctggtgtgtcctgtctcgctctgcgctgtcatgcgtgtcagcgtgggcagggagtgattgggtcagtgggtggcaggcggggtggttcattcccccacctcccccgcagccccatctgtctcct

SEQ ID NO: 5284 - DNA, 3022 bp, Artificial sequence
  DNA replication origin
tcggctgctaagcaccggcggaggtgctgcatggaaccgtggcccctgtggcggggaccagcccgcggcccgccacctccacggagggggggacaggagacagatggggctgcgggggaggtgggggaatgaaccaccccgcctgccacccactgacccaatcactccctgcccacgctgacacgcatgacagcgcagagcgagacaggacacaccagcacccactgggctccccatgggtggccacaactggggcaatccatgggaagggcccagcttgtgtccagagtcaccaccaccaccagcaccccctcacgggagatcatgccctgccactggggctgtatggccactgccacccctccgcccccacacaccacctccatagagggggaggacagagagagagggggcgggggagggagtgagcagcacacgggttggggcaggggagggccacaacaggcattcctggggcttggggggggcagcggggcctcgtcgagcggcggcacgcacccagcccaaccgacccagcccttacagccaatacttatcccgaagttatggatccggcttgaggacttcctttacctacattgttccaacatgccagagtctgctcatctcggagacctgctgcagacatgggtatggccctgcgtgagacttacaccgtctaccctggattttcaagggccagccagagctcaccagatgccaccagaaccacgatgctttccaaggtacagtcccctctctcggggcgaacccattccagggcgccctgcccttcacaaagaaaaagagaaccctccccagggctcccacatgcttctccagggtcagtcacattaccgcactggacgcctcatggtgcccatctccgccattctggattcggggatctgaacccaactccctttcaatcagctgagggcaacagaggacatcacccatcccttcggaatggcactcacccatctctcaggaccaaatgaaccatgttcaactgctgttcacctgggacccatgttcaactgctgttcacatggaacccttctccacttcggccttcaaagttctcatttgaaaatttgctactaccaccaagatctgcacctgtggcctatccacctgggcccataccctaggcttcaaagcttaccgcagcggccctcctactcctcccggcgtagactccgtggggctgcaggggaggggggggaggaggggacgggaggacccccactgcactcacacgggtgtactgcccctgccgctcccatccactctcaactgctgtcaacggccgggtatgggcccaacgctccagctccatccattctcaggagtagttgatttggcagctgagttgttacactccttagcggattccaacttccatggccaccatcctgctgtctatatcaaccaacaccttttctgaggtctgatgagcattggcatcgggcatcttaacccggcatttggttcatcccacagtgccagttctgcttaccaaaagtagcctacgaagcactcgcattccacgcctggctccacgtcagccagccaggcttcttacccatttaaagttacagaatagactgagatcgtttcggccccaagacctcttcccgctgaaatgtgggtgtagttggagagtagctgggacagacaggagggtccgtaagtggtgggggtgaagaggtgagagagactggtgagggtctcactgaggtctgtgagtttgtaggtgtttctggggtgtgagagaccgactcccgctgaaatctgggcatagttggagagtagctgggacagacaggagagtcattgatggctgggggtgagctgctggatgatggcagtaagaacatatggtatattattcatgaatgaggtgactgtgaagaatctccagaggaggacacgggagagcacaatgacatgagtgattgtcctgcttggctaggaaagggaaatgtaaagttatgaaattctgttgatgagggatgtgagagtggtgaagccctgcgggatgatgtagagtacttccacatccctggtgaggagctgcctcttgggtctgagtttctgggaggggagagggagaagctgggtgagacaggtatgaatcttgaggagtcagggctgggggactgctcatattctcccgagacttgtgagtctctgggggactcctgggtgcatggggctgactcccgcagaaacctctggatggctggagagtaactgggagacacaggagagtccctgaggcctgggggggaagagatgaaagacataggggaggagcaccacaaggctcgtgagtttgtaggcgattcctgggtgtggggggctgatgccagatgaaatctggggttgtttggagagtagctgggagacacgggagactccccgagagctgggggtgagctgctgggtgatggcagtaagaacatgtggtatattattgatgaacgtggtgactctaaagaatccccagaggaggacactggagaacccaatggcttcactgattgcccatcacggtgaagaaagggaaatgggagcttgtgggattctgctgatgacagaggtgagtgtggtgaagccctaggggatggtgaatggtagctccggatccctggtgaggagcttcctcttaagtctgagtttctgagaggggagagggaaaagctgggtgaagctagcatggctcttggggagtccgggctaggggaccattcataagaagagccagacaagatcctacttttcttaggtgcagacatgattaggaaacctgcagctcccggggacccctacaaattttctaacccgcagaatgaaggagtctgtgtgtatgtgtgtgtatgtgtgtgtgtggtgtgaggtatgtgctccttaagaaaatggaaataaaccaaccaatgagacagacagacagacacagattcacttagccaagtgttctgtcctgtcctctgaatccacttccaagtcacaagat

SEQ ID NO: 5285 - DNA, 1419 bp, Artificial sequence
  DNA replication origin
acgtgggagccatccctgtatagatacaggtcatagggagatagtctcatgaggcctgtgagtgtctagggttctcctgggtgcctggggctgactgcggcagaaatctggggaaggctggagagaagctgggagacacaggagagtccctgaaggctgggggtgaagaggtgaaagaaatgggggaggggtgcagtaaggtccgtgagtttgtaggtgattcctgggtgtgggaagctgaccccaggtgaaatctggagatggttggagagtaggtgagagagacagaagagtccctgagggctgggggtgacaacatgagcgagactggggagtaagtcagtgaaattggtgagtttggtggtgtgccctgggtgcctggaactgactccagctggaatctagagaagttttgagagtagctgaaagagacacaagagtccctgtgggctgagggcaaagaactgagagagaccagggaggatctcagtgaggtctgtgagtctgtaggtgattccggagtgtaggaggctgactccggctgaaatctgggcgtggcgggagagtagctgggacagacaggagagtcccagggggctgggggtgaagacgtgagagagactggggagtaactcagtgaaactggtgagtttgatggtgactccggggtgcctggaactgactcccgctgaaatctgggcatggttggagagtagctgggacagacaggagagtccctgagggatggtgaagacatgacagagactggagagtaattgagtggaattggtgagtttggtggtgatttctgggtgcctggaactgacaccagctgaaatctgggcgtggttggagagtagctgggacagacaggagagtccatgagggctggtgaagacatgagagagactggggagtaacgcagtgaaattggtgagttcggtggtgatttctgggtgcctgcaactgactcccgctgaaacgcgggcgtggttggagagtagctgggacagacaggagagtccctgagggttggggataaaggcgtgctagagactgaggagtaattcagtgaaagtggtgagcttggtggtgatcccttggttcctggaactgactcccgctgaaatgtgggcatgtttggagagtagctgggacagacaggagggtccgtaagggctgggggtgaggacgtgagagagactggccaggatctcactgaggtctgtgagtttgtaggtgtttctggggtgtgggagaccgactcccgctgaaatctgggcgtagttggagagtagctgggacagacaggagagtcattgatggctgggggtgagctgctggatgatggcagtaagaacacatgatatattattgatgaatgaggtgactgtgaagaatctccagaggaggacaagg

SEQ ID NO: 5286 - DNA, 1314 bp, Artificial sequence
  DNA replication origin
caccccgtgtggggctgagcggcgggttctcagttctggctcctgtgcagccgccgccgccgggcagaatgactggcttgatcgcagccactgggatacctggccctggttctgcgatgctgggagcgcgagcgggctcgggggttgccaggcagctgctgcctgcacacagagggcgactgcagcttgggcgcccaggcggcggagcatggtctgggtgtcgtctggaatgcgtgcgcgccaggcttgagggcccccctggtggtgccacctgcctcgctgctgggctccttcctgcccctgcgcctgcgcgggcgctgggcctttgcgaaggctgagctgagttctcctcagcacagacccggagagcatcgcgagggcggagctgagttctcctctgcacagacttcggagatacagcgaaggcggagcagtgttctcagcacagacccgggcgggcgggccgggggcaccgcgagggcggagctgcgttctgctcagcacagaccttgggggcactgcctcgctttggtacaactcggggccgcatcgacggtgaatagaatccttcctgtttgcagccctgaataatcagggtcagagaccagttagaggggttcaatgtggaaaacgggaaaccaaaatcccctctgaatcctgcccaccgaggttctccccagccaaggcgaggcggccgcagtgcgagatccacaccgcagcctcggaagacaaatgcagcattcctaatgcagacatgacacccaaaatatgacacctccattgctcatgtaacaagcacctgtaatgctaatgcactgcctcaatacaaaaatattaatataagatccgcaatcccctcgctgccgtgcagtcctaagacagagatcataataatcaacattgacatagtcaataccaacgtagcaacgaacctagggttaaggttggtgttagggttaggggttaagtttagggttagggtttggagatagcggttggggtcagagttaggggttaggagtcaacgtttagagttaggggttaagagatgttaggggttaggtattaggggttagggttgggttagggtgagggtgagggttgtggttaggggttaggggttagggttaagggttagggttaggggttagggttagggtcaggggttaggggtcaaggttagggttcagggtcaaggtcaggggtcccactctgtgggttgtgtatttactctgctgactgttccctttgccatgcaaaagctctttagtttaattaagtcccagatatttatctttgtttttattgcatttg

SEQ ID NO: 5287 - DNA, 3358 bp, Artificial sequence
  DNA replication origin
agaggtacatgagaaaaatgacctgagaccacctcaaacatcacccaacagaaaacatatatccaaagagcaataatatgattcactttatgcagaaacactgagtgtttaccaggttctttctcttctacgcagcatgtgaatctccttcctagttcctggactccaccatggagtcttggtggtgggagaggcacagctagtcacaacacacagatcttctctcttcctaccttctggcattgagggtgtgcacatatgacttcagcttagccaactgaaggcttctacagggactctaaaccataaatgagtgacagatatacaaaagcacatatcaatgattagcagtgacagccatgcatagcaatggtaactgcactgactgccagggggagattatgatgggggaggggcctcagaagcaatgagtggtacagtgaggggtgtacagaagtacatgagtgatatagatggggatgttcaacagtgatatagatggggcatatagtggggggtactcaagagtaatgaggggtgtgactcacgcctgtaatctcaacactttgggaggccgaggtgggtggatcacagggtgaggagttcgagatcagcctaaccaatatggtgaaatcctgcctctactaaaaatacaaaatttagccaggggtggtggcgtgcacctgtaatcccagctactcaggaggcttaggcaggaaaatcacttgaatccgggaagtgggggttgcggagagctaagatcatgccactgtactccagcctgggcaatagagtgaaactctgtcaccaaaaaaaaaaaaaaaaaaaagtagtgaggggtacagtggggggtgttcaggaatagtgagtgtgttcaagggcagtaaggagtacagtggggtgttcaggagcagggggtacagtgggggtgtctaggagcagcaggaggtatagtggggctgttcaggagtagtgggggatgttcaggagcactagtgggtacagtgggaagtgttcaggagcactacgggtacagagggagtgttcaggagcagtggagtgttcaggagtactggggtgttcaggagcacttaatgatatagtgggtaggtgttcaggagcagaggggatgttcaggagtagtcggggatagagtgaggggtgttcaagagcagcggatggtacagtaggcctgtttaggagtagtgaggcaatattcaggaacaatggtgattacagtgtggggtgttcagaagcagttgggggtagggcgaatggtgttcaggagcagtggggggatatttggggatagtggttacagtgggggatattccggagcactgagaggtacagtgagggtgttcaggagcaatgggggatatagtgtgggggtgttcgtgagcagtagagggtacagttgaggtgttcagaagcagcaggtggtacagttagaggttttcaggaacagtcgggggaagagtagaaatgttgaggagcagtgagtatatagtggggagtgttcagaagcagtgggggtgcagtgaaggggtgaccagaaacagtagggggtacagtgggggtgttcaggaacagtgactgatccagtggggtgctcaggagcagtgagtatacagcgggggtgctcaggagcagtgggggaaatagtaggaggatgttcaggagcagtaaagggtacagtgaggtgtttttaggagtagtcagggtacaatggagagtgttcaagagcagtgcagggtacagtggccgtgttcagaagcagtgagggaggggtgagttcaagagaaatggggggtgttcaggaacagtgggggatatagcaggggtgttcaggagcagtgggaagtacagtggggtgttcaggagcagtgggaagtacagtggggtgttcaggagcagtgggaagtacagtggggtgttcaggagcagtgggaagtacagtggggtgttcaggagcagtgggaagtacagtggggtgttcaggagcagtgggaagtacagtggggtgttcaggagcagtgggaagtacagtggggtgttcaggagcagtgggaagtacagtggggtgttcaggagcagtgggaagtacagtggggtgttcaggagcagtgggaagtacagtggggtgttcaggagcagtgggaagtacagtggggtgttcaggagcagtgggaagtacagtggggtgttcaggagcagtgggaagtacagtggggtgttcaggagcagtgggaagtacagtgggggtgttcaggagcagtgggaagtacagtggggtgttcaggagcagtgggaagtacagtgggttgttcaggagcagtgggaagtacagtgggggtgttcaggagcagtgggaagtacagtggggtgttcaggagcagtgggaagtacagtgggggtgttcaggagcagtgggaagtacagtggggttgttcaggagcagtgggaagtacagtgggggtgttcaggagcagtgggaagtacagtggggtgttcaggagcagtgggaagtacagtggggtgttcaggagcagtgggaagtacagtggggtgttcaggagcagtgggaagtacagtggggtgttcaggagcagtgggaagtacagtggggttgttcaggagcagtgggaagtacagtggggtgttcaggagcagtgggaagtacagtagggtgttcaggagcagtgggaagtacagtggggtgttcaggagcagtgggaagtacagtgggggtgttcaggaggagtaggagatacactgaagtgttttcaggagtagtcagggtacagtggaggtgttcgggagcagtgggggtgttcaggaacagtggtggttatggcagtgggggtgttcagtaatagtatggggttgcagtggagggtgctcaggagaagtgggaagtactctgggggttgtttaggagcagctggaagtacagtgggaggtgatcaggagcatgaggtgggacacagtgggaggtgattggggcagaggtgggacacagtggaaggtgatcaggagcagaggggagcacagtgggatgtgatcaggagcagaggggggacacagtggaaggtgatcaggagccagggatccaatgggggtctctggagcagtggggagtacaatgggattgttcaggagcagtggggtgtaatgggggtattcagaagctataggaggtatggtggtacagtgggggaggttctcaggagcaaggggggaatgcagtaaattctatttgctatagcaagcccattaacagaggccttagacatatctctaatgctttcaatggttctgcacgattttccagcggtgtgctggtaaactgactcct

SEQ ID NO: 5288 - DNA, 1900 bp, Artificial sequence
  DNA replication origin
tttcttgccagctgacattgtgttcttcaccatgacacccacaggaagaaattcattcctgaacttgtggccatttcaattgaattaccttaatttgcatttgcgactcagaaagcattggacttttgatctcctgaggtatgctttccagacaaagcagctggctggggctgtgtgtttcggtgcatgaactctggaccaggctgcctggtcaaacttctggccctgacactttcctgctgtgtgagtttggacaggtcacctaacctatccatgcctccacttttctatttgtataagcattgaaattcagcagtggccacctcatggagcttattgtaaggtttaaataagcaagtgcaagttaagtactcagaagagtgtctgtcatacatgtactatattaattttagctgagtattacctctcttctggggcagatgattggattgtctaataaggagtatgagctgccattgatcactgctgctatgctgagtgcctgacatatgataatgaggtggatactattattttatcagtttcacagagatataggtccatggtcacacagttaataagtagtggggctgagattcaaacccaggtctattttgactccaaatcctagtcctcacctccccactgctgcctccactgtacactttgcctgaagaatggggggtaaagagggtaaagaagcaaggtcaaggtcatgtggaaaggtatttttggccaattaaccagatgaccaggcagttctagagcatccctgccccttgtcatttcacctggacgggaagcatgtgagcacagggagttggggaaaggctcagagctctagtccttgggggatttgcaatttttccctcttgttgtaatcctaccttctatcaatttccccctttattatatcctctactttttttccactccttatctttaaactccaaatacctctgtgtgtgtgtgtgtgtgtgtgtgtgtgtgtgtgtgtgtgtgtgttgtaggagttaaggccttagggcagagtgggaagagctccatttccaggtagtggaaaagaactttgggctgttaaacaggctgttaatctggtcctttctctgctactgaatagaagaataaccctgagaaagtcattgactctttctgggccttatccatgagtttgggattgaggattggaaggtatctgacatcctgtggttctagtcagccttctcctagatctctgacctctaggagtggtcttggtgacagtgatgatggtggtggtgagtactgatggtggaggaggtgatgagataatgacgacaaaggaagttgttggtagaggtgttaatgatggtggtggagatagaggtgaatgcttggtgattgtgacagagacagaggtggaagtcatggtagagatggtggcagtggctgtagcagtgatgttggtagaggtggaggtgatgatgttggtgggggtggtagcggcattggtgttggtattgttggtggtataggtggaggtgataataatggtggtggtgtggtagcagtgttattagtgttggtagaggtggaggcagtggtggaaacagtggagttggtgtagaggtggagatgatgatggtggtggaagcagtgttggtgttggtggtaggggtggaggtgatgatgatggtgggggtggcagtagtagcagtggtgttggtgttcgtggtgatggagggtgatgatgatggtggccatagtaggagcagtggtatggtgatagaggtggaggtaagaaagatggtggtagtggtggtggtactggtagaggtagagatgattctggaggtgagatggtcataattgacagtggtccttttctgacagcagtcactgtggtcagcactatcccttc

SEQ ID NO: 5289 - DNA, 977 bp, Artificial sequence
  DNA replication origin
gcagccgggagcccgagcgcgggcgatgcaggctccgcgagcggcacctgcggctcctctaagctacgaccgtcgtctccgcggcagcagcgcgggccccagcagcctcggcagccacagccgctgcagccggggcagcctccgctgctgtcgcctcctctgatgcgcttgccctctcccggccccgggactccgggagaatgtgggtcctaggcatcgcggcaactttttgcggattgttcttgcttccaggtgagaatacccagaggccagcagccgaggccaggtgcgcacaatccatctacccgccagcccttttgcccccaaggcgcccacctcggggccagccctgcgctggggctgcccagcgggagttggcggccgcgactggtgccccggggcgcgaggctgggaaagtgtccaagtcccgcgctgcaggaggagagcggggagcggcgggtttgcgggactccgggctgcagcttgtccggctgcaccgtcgggagaagctgggcttgagaggagggagggtccgagcggtgctgggttctgggcgagggagagggggcgacatctcccgaaccctgccaagttgtctggcgcctccggcaccccgtgggagtggcgccgccgacaggtgagcgatgcgcgaggcagcctgcggccacgctgaagctgggttgctgcgctcagagtgcgatagatgtggggctgcgggagcgtgggtagttgggtctagacaggagcgcgtacaccgagaacagccaggccgaagcgtccagaggcgcaaaggtctcgcgtcctctctccagttcgcctactggctcccgactaagctctgcagagctggaaccccgaccactgaccctagtcgaacggttgtcctgaaagccggggcctggaagaaagggctgcggggtcggggatccagggtgcgcgcgctcacaaacgccctttcccaccctctgtggccattc

SEQ ID NO: 5290 - DNA, 1242 bp, Artificial sequence
  DNA replication origin
tatttggttaatttgtgcaatttgttttattttatcttaaatgaaaattatgtaaaatgtccttgtctttcagactttaaaaaatctttttgtttcctttctgaataaaagttatatcacatttgcaccctctgaaaacagaaaataacttgctcaaggaccttttggcccagtcagttacttgaatcatgactcacacgtgctcttacaatgggttcccagaaggaataaataaattggcccttttgctccagagatagtaatttagccaattgtaagatcagagtctgcagacaggtgagtaatggtcaaagcatttcagtctccccgaggggttaaccaaatagaaatgaaagaagggggagagggagggagggagggagagaaggagcctgaggcagatatggaacgatctctgcagaggaattacaaagaaagtcatttaagcccctttacagaccagctctgctgggaggatgcagaaataaatgatcagcgtcccggcgtgagagagctgcccccagaagtggccgggggagaaaagggtgaagaggagctaaagcttaggaggcgatttccacggaaatggatgctccctaaggatgtgcggaaaggggatgggaatgtgcggattgggggcgggggcaccaacgcactccggcgggcaagcggtctcccgcaccacctgctgcaaggctcgggaaggaaggcgaagatagcaccggggcatccccgggagtccgcaaggtgggtcacttggactttgcggaaagaagacgaatttgaggggtgtggggagcagccagaggccgagtccgaggctgggatggcctttcaggagaggacgtgggagtatgtgctaataatcggtggctttggggaaagcagaatggagccggctggcgtttgggagacaaggaatggaggagaacaaccctcttcctcaccctgatttgctttctggtaggacctcacggcaggtgtccccgggacggcgttctcctaggctaggcgaccagggcggtgtcaatgcaccctccagcggtgcgcgcaggcgggagaagggagggcggcccgggcaagtgagacagttaaggcagtgtccccaccacacccccacccagattggccacgccgagctggttcttgacagaaggccttcgcggaggaagagggggcacagctgcacaggacaccctacggagcctgcgggcgtggaactttgccaggcgcacgggaacg

SEQ ID NO: 5291 - DNA, 1046 bp, Artificial sequence
  DNA replication origin
ccttcctattccacaaaaccgccattatcatcatggcccgttctcaatgagctgttgggtacacctcccagacggggtggtggccgggcagagaggctcctcacttcccagtaggggcggccgggcagaggcgtccctcacctcccggacggggcagctggccgggtgggggctgacccccccacctccctcccggacagggcggctgaccgggctgggggctgacccccccacctccctcccagatggggcggctggccgggcggggggctgacccccccacctccctcccggacggggtggctggcctggcgggggctgacccccacctccctcccggacggggtggctgccgggtggagatgctcctcacttcccagaaggggtggctgccgggcggagggtctcctcacttctcagacggggcggccgggcagagacggtcctcacctcccagacggggtcgcggccgggcagaggtgctcctcacatcccagatggggcggcggggcagaggcgctccccacatcccagacgatgggcggccgggaagaggtgctcctcacttcccagatgggatggcggctgggcagagacgctccccactttccagactgggcagccaggcagaggggctcctcacatcccagacgatgggcgggcaggcagagacgctcctcacctcccagacggggtggcggccaggcagaggctgcaatcttggcattttgggaggccaaggcaggcggctgggaggtggaggccgtagcgagcagagatcacgccactgcactccagcctgggcaccattgagcactgagtgaacgaggctctgtctgcaatccgggcacctccggaggccgaggctggtggatcactcgcggttaggagctggacacctgcccggccaacacagcgaaaccccgtctcccccaaaaaaacacgaaaaccagtcaggtgtggcggcgtgcgcccgcaatggcaggcactcggcaggctgaggcaggagaatcaggcaggaggttgcagtgagccgagatggcagc

SEQ ID NO: 5292 - DNA, 1007 bp, Artificial sequence
  DNA replication origin
cccagccgccatcccatctgggaagtgaggagcacctcttcccggccgcccatcgtctgggatgtggggagcgcctctgccccgccgccccatctgggatgtgaggagcacctctgcccggccgcgaccccgtctgggaggtgaggaccgtctctgcccggccgccccgtctgagaagtgaggagaccctccgcccggcagccaccccttctgggaagtgaggagcatctccacccggcagccaccccgtccgggagggaggtgggggtcagcccccgccaggccagccaccccgtccgggagggaggtgggggggtcagccccccgcccggccagccgccccatctgggagggaggtgggggggtcagcccccagcccggtcagccgccctgtccgggagggaggtgggggggtcagcccccacccggccagctgccccgtccgggaggtgagggacgcctctgcccggccgcccctactgggaagtgaggagcctctctgcccggccaccaccccgtctgggaggtgtacccaacagctcattgagaacgggccatgatgataatggcggttttgtggaataggaaggggggaaaggtggggaaaagattgagaaatcggatggttgccgtgtctatgtgtagaaagaggtagacatgggagacttttcattttgttctgtactaagaaaaattcttctgtcttgggatcctgttgatctttgaccttacccccagccctgtgctctctgaaacaagtgctgtgtccactcagggttgaatggattaagggcggtgcaagatgtgctttgttaaacagatgcttgaaggcagcatgctcgttaagagtcatcaccactccctaatctcaagtacccagggacacaaacactgtggaaggccccagggtcctctgcctaggaaaaccagagacctttgttcacttgtttatctgctgaccttccctccactattgtcctgtgaccctgccaaatccccctctgatc

SEQ ID NO: 5293 - DNA, 1693 bp, Artificial sequence
  DNA replication origin
atctattatgattagaatctacatgatctgtatccagtacagcaagtcccggccaccagatgtcaccattcttctatttccctcctggtgcttggggagagctaaagatactattttctctcaagggactgagggaaatacgtgcctcagaacattactgggatttcaccaaaaggtcttttcttagtcatcctggccttgcagatttccctgtggtttttgagtatcttgactcgacagtttctaacagctgaggagccaagtggctgataatttggggcttatctggtcaggaagtgctagagccatttcctccagctaaacttgaagacaggattgacataaggtgcccaaagcccagagcttgctcagtgcaggagaggctatggatatgccctattaaaaggtcctggggtcaggagacctcaaccagctatgagctcacttacaaaatgaaggaaagggactgaatcattcctagggtctaaaaattccatgatcctcgtttgtaaatgcctctggtggggagggtgcgtagtagggtgggggcgagctaagtccaagaaataagaccccagagaggacaacgaagtaggggtgaagtcctgcagggcagatgaggggaaactgaacatgaatccttatgaggtctggatgtagtgactggttatggggtctggaaattgctggggttatggtcttgtggattctaccactagctcaatagcccactcttcctccattccagatactacttaacaagaaactataatgcttatcgatgtaaatgtatggcattctctctcctggggcttggttggatttaatctctcatgtcagtcaatgttctttgtggtgccttcagggcacgggatgtgttttatttgtgaatttacaacagtgcagttttcagctagctcgtccagagtgttcctaaaatccgggagtgggagcagggcagagaagaaagaatggatttcatttataagtgccacatatccctaagtatttcacatatatttcatatcatcttcacaataacctcatgaagcagcatttgttatgctcataaagatgaattcaaatggttaagtggcttgcccaaggtcacaaaaaccaaatggcagtatacctactgctttgtgtaatgcgttctacgaaagaggaaactgagcctcagggcgttttgttaaagttgcctgcacctctaagatggttgagaccacagtctccccatcagtgggcttcgctgctggaaggccccttgtcctttggggcttggactgcaccactccggaggatgcatcgtcatatcaatatttgcacactgcccctgaccttgttaggatattatttatggccgcgatcagaaggtcccgctcgctcctttctctccccttgggctgcggaacagagtggctgggagaagtcctcctagacagggttgagagtttgccgacggcccctgagaagctggggcgttccgaattggctgagcgcgcggccgggggcggggagtttgccaaacgtccccggccggaatttctgccttctagagccgcgagcccagaagcggggagaagttggtgaggttggctaggggaaggttgccagaaattgaggacggactcccgccctggtcgactgagctcccacaggagcgcctctgctgcgtctcggggctgagtgtgga

SEQ ID NO: 5294 - DNA, 1174 bp, Artificial sequence
  DNA replication origin
cgctctcgcctgtggctctttcgcgcccctggcccctgcctcgcctcagttgagctacgcgcactgctctccccggctgccctcacagccgggattgggggcgtgggtgttagcccctgctccccgtggcggggtggccagaggcctggagcgcggctctcagcctggtggacccgcgcgcggtgcgcccgcttggtgcccggacctggcgcggcgagcaggcagggtgcaagggggtgtgtgagcccagggacgctcgcgcatacacttgctgtcacacacaaagccgcggttttgtagccgccgcgcggaagagccgaagagggaagggggtggcgcttgcattgtccagaggcgtttggagcgcagagggggtgcttggctcctcagggctgcgggaaccgggcgatgtggatggatttggtatagggcccggccctcctgggaccgactgccaggcctggccccgggcggccgccgctatctgcacctggctctggcggcccagttagggaagatgagtacttctgggtctgtgacgttgggaaggggcaaactcagttgtgtgtggggttcgggtggatggcaacatcgcacttgtaaacatacccagaccaaagtgttagaggtatctcattctaaggagatgcgagtgggaagctgggtcgttgaactgacccccacccccagtttattgtcaggacctgatcaacttggtttttactccaagagactccccagcgttaatctctgtgtcatgcacatcctaagccttacggctgcatcagaactcccttgtctgtaccgagaaaatcactgaacagtttttcatgaagggcaaagcatctgagatttgtggtgaatgaattttcaccctcctccccccgtcctcactgctttcctataaattatttttgttgctattgttcagggctgagatgggcatcctcagatttatctggcagtaaagattagagcaaagctctcctgtctttttttttttaaagatggagttttgctcttgttgcccaggctggagtgcaatggtgcgatctcggctcactgcagcctcagctttccgggttcaagagattctcctgcctcaacctctcaagtagctgggattacaggcgcccgtcaccacacccggctaatttttaatttttagtagaga

SEQ ID NO: 5295 - DNA, 1376 bp, Artificial sequence
  DNA replication origin
cctttaaaaacgggaagatcatgagggcactgccctgatgaagagataatgctgttatccagggaatgggttagttattgagagagttatctagggttcctgatagaaaggatgtgttcagcccacttccctctcggtctcacatgcttttctaccatgttctgacacagcaagaagaccctcaccagatgccaagcaccacactcttagatttctcagcctccagaaccataagccaaataaacttctatttttataaataacctagtctgtggtattgttatagcagaaaaatggactgatatggggggatgtggtggtcacatgtttttgtctgcctccattgatgggcagcaaccttgtctgtcttattagctattatattcctattgcttagcctaatgtaggctcttgggacatttttgttgaatagatagatggatagttggatgggtaagtggatggatagatgggtgggtggatgaatgggtgggtgggtgggtggctggatgggtagatgaatgggtagatggaggaaataaacaaggtcttcggggagcttacagcctaatgaggaaaacagactcacactaatgtcagtgagttgcaggcagggagggggcttagtccaatctagggcatcagaaaaggcttccttgaggtggtggtggctgaactgagccttgaaagatatgcggaatttggaagaatgggatgggaaagacattgccagcaggggccatgtggttcaactccagcattgctggcagcagtcagcattcccagagcctagaggacagagcaggagctgctggggatggggcgaggtcaggaaaagccttcctttggaatgcatttggacttgctcctgagagcagtggagagcacctgaaaggtgcatggcttgggcagatttggttttcagatggtctgttctgcttgcagtgtgaaaaggagggaataggagcaagcctggctcaggaggtggggtggcagggcagggtacctcagtggtccccaagggagagcaggggaacttgaagtggagcgagtgaggagaggtggctgaggagtgcaaggggaggctgacgcttaattctggtcttgcatagttcagggcctcctgaggttactgacgcattgcccaggtgttcccatgtgagtgcaaagctgtgctgagcctgagaggggaaaggtgggccctgtggtttaggtgttgttggcattgatggtggttaaagtcaggagaccagatgataccaccccgaaaagagtgttaacctggaagagccaattcttggaaaatttctgcatttacaggctgagccaaagagaaccaatggccagaaaggcccggccccgcctgagtggagcag

SEQ ID NO: 5296 - DNA, 1681 bp, Artificial sequence
  DNA replication origin
gtgagccgagccaggcaaggcagagtctcctcctagaagaagcagcaaacatgtgcccctgccaccagcctctcagctgtggggtgtcggggaacacctggtggacctgctgtcaggaatagcaagctgggccggccttggtgctggctggcagagcgggtgacttggtggagctgagcagacatctagtggctgtctggggaacctcacgcttttgcctcttttctgagcagcacctggcttgggcttgcttctcctggggtgactgtctgcgggagccaggcaggggtggcgctcaggctgggcccatgcctgcctgcctacttcctccttcgtgtggtcacttgttaatgcagcggtcatttgcacccctgatgaatgccaggccctgtcctgggacttcgaatactgcaaggagagacaaagttcctgtccttaagcttaggtttccagtgagaggaggggggcggttaaaatggcaaagctcgcctgttagctggaggcaggagggagtggtgggtggaggggaggaagtttaggggctgagggctgaggacagggctgggagggaggccctgggtgatggtgacaagcccagtggccctgaggggagggcaggatggctgttgcagggttgtgtggctggatgtgaggggtctggtgggatttgagcccgtgacgggggctttcctgcgggagagtctggctgctgctcaccgacagagggtccctctggctgtggcggggtacagggagggccacaggtggccaggacagagcagggatcagcggggagagtgagaatgaatttgggggggggtaacatctggcaaggggctcgaggggcaggttggtggtgtaagggaagatgggctcctagaatcttggcctctgcagctggtggccccatctacggagcatgcagcggagggcgaggtggcgctcagggctttgtcatggctgtggtcagtctgagatgcttccatgaggagcctgtgcctgaggtcaaaggtcaggacaaaagctgggaattgaggggagcagggctcatggattggcagagggccagctcagaggacagagcctgggacactcaggtggggatgcaggggaggacccagcaaaggggacaggaggagcctggggaggggggtgtggggctagggattgacccccaccaaaagggggcctgtcaccactgcaggtagcaggatgaggatgactttgactttgggaagggctgggggaggagggaacccgggcagaaggggggtgtgagtgtggaggcagcaggcagactcttctgcgggttttgtgaaggccagtagcagatgggggaggcgtggggtggaagaagagttcactggggatgggaaggtgggttaatcccagtaggagcaatccaatccaatctgggaaggagggagggaggaacatcgcaagaaccagcccttgttcctgttacaggaacagttacaggtgggtggtggatgtggtgtggggaatatgaggtatcctcgaccaaacctcggtgtcctgagcacaggggagagaagggcgtgccaccaagtgcgttgtagggtccaggccagtccctggggtgcccttgcaggtccgcggttcatcttccattcctgtgagcggccattgcatccctgccttggatcctgagtagatttgc

SEQ ID NO: 5297 - DNA, 893 bp, Artificial sequence
  DNA replication origin
aggtgtgaggcaccatgccctgcctaaaggctgaataatattctattgtaaatatatgccacattttgtttatccattcatccatcgatggacatttggctattgtgaataatgctgctatgaacatgagtgtgcaaatatctctttgagaccctgcttccaattctttaggataaatgcccagaagtgggattgctggatcctatggcagttctcttttaaaatttttgaggaacctctatactgttttatatagttgttacatcattttataattctaccaactagtttttttaagttccaaatttggttactttcctgtggtaggaaataaaggtatggagaaggtggaccatcaggtttactcatggccaggattttcaacaggtaatatagaaggaggggcaagggaaagttatgtttacaagcaaggggttctaagaagagagaataaagtagccaaggagaggtggaaggataatggcaaagctaatgaataatcaccatggattagcagtcttgattagaagatgagaagccttgataggtcagtaattgttggcgtggggtactaatctgagagtaggctgctaaaaaccaagattccataggcgtttcatttattggcacagatttagggtagagtgagtggctgaggcagggtggggacaaaaggtcagggacatgggtgaggccaggtgttggcagtatgatccatttgagatttaagttaccaggaatgtgtgtagaatttggggaggaggtgaaggccatgaagcaggtcatcatcagtgagtcgtcagtgagtgcagggaaggggccaggaggtgagggggcagtgccaggagggaggtgtggtgggtgctttagtctgatggcaactggcagtgttg

SEQ ID NO: 5298 - DNA, 1131 bp, Artificial sequence
  DNA replication origin
ttgaatgtgggagtccctgctcttagtcttaagtgaaagtctacactctggatggtgcagcctcaaaggttgcttcccctactcagttccagaagagggatagccaggcttattctgcccccaggcaggaaggtggaggattctgctctggagaagttcacacatcatggctgtgctgaaggtggagaaggtggagagccggaagcgctttcaaggcggagcaggtggcataggtggaggcagaaacgtcagcagcttctgaggaactggaagtcctctagttaagtttggaatagatggtctgtgtgggtgagggagagccatgagaaattagacctcagggatgggcaggggcccagtgttggagtttctaggctgtgccagggagcttgagttttattctgtagtgcaatttgggggttgggggagggtgggaaaggattgggggagatgagatgagaggaaaggcaggcagaagtcggctgttgtgagccccatggtggaaggtggtggtgggtgggatttagtctgtgggatttagtctgattagctgtatgtgcagtgcagtgtagaggatatgattttttaaacttcctatgtatttttttctcattactattctgtctgttaatttgcagatgacagtatcagatctcagagggagctgcttactaatttgggtcaagaaacacacatcattaagaaagaggcttctgttgatctgagtggggcatatgcattcagctactttaaaagcagttttcagtcacaaaaataataacagctgcagacgtttggtgagagcttgccacaagccaggtggagcttagatgcagtatcttgtttaatgctcttgagagtgctttgaggctggtggtgttatacctgaatttcagatgcagatgctgaggtccggagaggctgaggaactggcttagctgcaggaccagtaatcagtagaggcagggttggaattcagctctgtagtccctctgctgtgtgctttcccactgtatgagttaaagtgaagggggtggtgggtgtgctgtgtactcacctagtattgcactgttctgaatcatcatcagagtttccaggggaccattcacacagaccctgatcctccaggtg

SEQ ID NO: 5299 - DNA, 945 bp, Artificial sequence
  DNA replication origin
acggtgggcccctgggagctgcggcgctggatgcccgcggccggctccatggcgcggggctgcggatcccggcggcggcgacgacaagcgcggcggggactcgagtcagaagtgcgaggcgccgcggctctggcgggggcaggagcggacggactggccgcgtggacagggagggagggcgggcgggcgccgcggagtggaggtgcacgggcgggggcggggacgagcggagagccgctcggctccgcggccggtggcggaggctggggccgcgttgttgccgccgcgctccgcccctgggggcaggtgcgggcggcagggacccgccccaaggcccgggcgcgggagccggcgcaccgaggcggacgagagggaggaaccagcgtgaggacccacaggcggccctggcagagcttggctagggcgtagcggggacccgccccacctgcgccgcgggatggtgcccagaggggacccctcccactggattcctctggggtccgcgaagcccgcggccgcgcgtgggtagcagacagcgcccctaatttggcatctttctcttctggagctgcacaggcttcagaggctgtacagggtcttcgcctgggcctccattctcactgctcatccagggaaaaagggttcatctgtccccaagcccgtcgctctccgtccttctcggagctttaactcccctcccagtttctccctggagcacccatttagccagggatggggtatctttaggacagcgggcgctatagaagatgcttgaactccgaggcttccccatttcgactcttcctgggcctttgtcccatacagttcgctcccctgctcatctaagtcttgtgtgatcttcagaaatccatggaagcctcccttctacgagaagtctcccctactctgacccctgcagctcttaattcattttgtgcggtgggg

SEQ ID NO: 5300 - DNA, 1049 bp, Artificial sequence
  DNA replication origin
ctagtcttttgctttctttttctgccctcggcctcgctcttgcgcacgggaccacaatgctccgcgccgcttgtcattgggaggcgccgaaggtggagaggtcggctcggaaggaaaaggtcggcgcagcgcatgccgggtctagggttggcggggcgaaggggtggggagggaaggggcggggaggggaggggaggggaaagtgggagagggtggactctggccggtgtgaagagaggcggtcgggcggctgcgctgtgggggcctgggcgtgtacttcggaggcccgtcgggcgcttcctttagacgggaggtctagcggccctttaaaaagagaaaaataaccttcactgtcgcagcctcacgccactacttccattttccttttgggcgggtccgcgcagtctcgtaggcgtgcgactccggcctccgccaccaacagtctccgcctagcgcgcggctctggcgttgagctggcggggaaagagtgcacaggaagtcacgctccatggctgtccgcacctgagtgcttttttcaccctacattatcttgtttaaatcccagaccacttggtttatttttattttttcaaattacttggcaaacgctatccaactagcaacgagaaattgaatttctaaatgaggtgttgaatctagacggggcgtgttttcaggctgcgctgtggtttctgcgagacaaggttggggagaatcagatagtgcaggaggaactgagttaaaattttatctttaggatttgatgtgggaacatcccacatacctgttgattaactcctgtatttcttcctgtaagaaaatgccactgagcttcactcggagtttgtgttgtgaatagggtttctaagtttaaagtcttaactatttggaggccgggcacggtggctcacgcctgtaatctcagcacttggggaggtccagtgggccgatcacttgaggtcaggagttcgagggcaagggcaacatggcgataccccgtctctaccaaaaatacaaaaattagccaggtttggtggcgcgcctgtagt

SEQ ID NO: 5301 - DNA, 840 bp, Artificial sequence
  DNA replication origin
ccatctaggaagtgaggagcgcctcttcccagccgccatcacatctaggaggtgaggagcgtctctgcccggccgcccatcgtctgagatgtggggaccgcctctgccctgccgccccatctgggatgtaaggagcgcctctgcccggccgcgaccccgtctgggaggtgaggagcgtctctgcccggccgccccgtctgagaagtgaggagaccctctgcctggcaaccgccccgtctgagaagtgaggagcccctccgcccggcagccaccccgtctgggaagtgaggagcgtctccgcccggcagccaccccgtccgggagggaggtggggggtcagccccccgcccggccagccaccccatccgggaggtgaggggcgcctctgcccggccgcccctactgggatgtgaggagcccctctgcccggccaccaccccgtctgggaggtgtacccaacagctcattgagaacgggccatgatgacaatggcggttttgtggaatagaaacgggggaaaggtggggaaaagactgagaaatcggatggttgccgtgtctgtgtagaaagaagtatacatgggagacttttcattttgttctgtactaagaaaaattcttctgccttgggatgctgttgatctgtgaccttacccccaaccctgtgctctctgaaacatgtgctgtgtccactcagggttaaatggattaggggcggtgcaagatgtgctttgttgaacagatgcttgaaggcagcatgctcgttgggagtcatcaccattccctaatctcaagtacccagggacacaaacactgcggaaggccgcagggtcctctgcct

SEQ ID NO: 5302 - DNA, 1249 bp, Artificial sequence
  DNA replication origin
atcttgcaccgcccctaatccatttaaccctgagtggacacagcacatgtttcagagagcacagggttgggggtaaggtcacagatcaacagcatcccaaggcagaagaatttttcttagtacagaacaaaatgaaaagtctcccatgtatacttctttctacacagacacggcaaccatccgatttctcagtcttttccccacctttcccccgtttctattccacaaaaccgccattgtcatcatggcccgttctcaatgagctgttgggtacacctcccagacggggtggtggccgggcagaggggctcctcacatcccagtaggggcggccgggcagaggcgcccctcacctcccggatggggtggctggccgggcggggggctgaccccccacctccctcccggacggggtggctgccgggcggagacgctcctcacttcccagacggggtggctgccgggcggaggggctcctcacttctcagacggggcggttgccaggcagagggtctcctcacttctcagacggggcggccgggcagagacgctcctcacctcccagacggggtcgcggccgggcagaggcgctccttacatcccagatggggcggcagggcagaggcggtccccacatctcagacgatgggcggccgggcagagacgctcctcacctcctagatgtgatggcggctgggaagaggcgctcctcacttcctagatgggatggcggctgggcagagacgctcctcactttccagactgggcagccaggcagaggggctcctcacatcccagacgatgggcggccaggcagagacgctcctcacttcccagaaggggtggcggccgggcagaggctgcaatctgggcattttgggaggccaaggcaggctgctgggaggtggaggttgtagcgaaccgggatcacgccgctgcactccagcctgggcaccattgagcactgagtgaacgagactccgtctgcaatcccggcaccttgggaggctgaggctggcggatcactcgcggttaggagctggagaccggcccagccaacacagcgaaaccccgtctccaccaaaaaaaaatacgaaaaccagtcaggtgtggcggcgcgtgcctgtaatcgcaggcactcggcaggctgaggcaggagaatcaggcagggaggttgcagtgagccgagatggcagcagtacagtccagcttcagctcggcatcagagggagaccgtggaaagagaggg

SEQ ID NO: 5303 - DNA, 944 bp, Artificial sequence
  DNA replication origin
gcccctctgcccggccagccgccccgtctgggagggcggtgggggggtcagccccccgcccgccagccgccccgtccgggaggtgaggggcgcctctgcccggctgcccctactgggaagtgaggagcccctctgcccggccagccgccccgtccggggggtggggggcgcctctgcccgaccgcccctactgggaagtgaggatcccctctgcccggccagccgccccgtccgggagggcagtggggggggtcagccccccacccggccagctgccccgtccgggaggtgaggggcgcctctgcccagccgctcctactgggaggtgaggagcccctctgcccggccagccgccctgtctgggagggaggtgggggggtcagccccccgcccggccagccgcctcgtctgggagatgaggggcgcctctgcccggccgcccctactgggatgtgaggagcccctctgcccggccaccaccccgtctgggaggtgtacccaacagctcattgagaacgggccatgatgacaatggcggttttgtggaatagaaaggggggaaaggtggggaaaagattgggaaatcggatggttgccgtgtctgtgtagaaagaagtagacatgggagacttttcattctgttctgtaccaagaaaaattcttctgccttgggatcctgttgatccgtgaccttacccccaaccctgtgctctctgaaacatgtgctgtgtccactcagggttaaatggattaagggcggtgcaagatgtgctttgttaaacagatgcttgaaggcagcatgctcgttaagaatcatcaccactccctaatctcaagtacccagggacacaaacactgcggaaggctgcagggtcctctgcctaggaaaaccagagacctttgttcacttgtttatctgctgaccttccctccactattgtcct

SEQ ID NO: 5304 - DNA, 1290 bp, Artificial sequence
  DNA replication origin
aggggcagccgggcagaggcgcccctcacctcccggacggggcggctggcgggcggggggctgacccccccaccgccctcccagacggggcggctggccgggcagaggggctccccacctcccagcaggggtggctgggcagaggcgccccccaccccccggacgggcggccggccgggggggctaaccccccccacctccctcccggacggggtggctggccgggcagaggggctcctcacttcccagtaggggtggccgggcagaggcgcccctcacctcccggacggggtggctggccgggcgggggggctgacccccccacctccctcccggacggggtggctggcctggcgggggctgacccccacctccctcccggacggggtggctgccgggcggagacgctcctcacttcccagacagggtggctgccgggcgtaggggctcctcacttctcagacggggcggctgccgggcggaggggctcctcacttctcagacggggcagttgccaggcggagggtctcctcacttctcagatggggcggccgggcagagatgctcctcacctcccagacggggtcgcggccggatgctctcacatcccagacggggccgcggggcagaggcgctccccacatctcaggcgatgggcggccgggcagagacgctccttacttcctagatgggatggtggccgggaagaggtgctcctcacttcctagatgggatggcggccgggcagagacgcccctcacttcccagacgggatggcggccgggaagaggcactcctcactttccagactgggcagccaggcagaggggctcctcacgtcccagacgatgggtggccaggcagagatgctcctcacttcccagaaggggtggcggccgggcagaggctgcaatctcggcactttgggaggccaaggcaggcggctgggaggtggaggttgtagcgagccgagatcacgccactgcactccagcctgggcaccattgagcactgagtgaaccagactccgtctgcaatcccggcacctcgggaggccgaggctggcggatcactcgcggttaggagctggagaccagcccggccaacacagcgaaaccccgtctccaccaaaaaagtaagaaaaccagtcaggcgtggtggcgcgctacaggcactcggcaggctgaggcaggagaatcaggcagggaggttgcagtgagccgagatggcagcagtacagtccagcttcggctgggcatcagagggagaccgtggaaagagagggagggg

SEQ ID NO: 5305 - DNA, 940 bp, Artificial sequence
  DNA replication origin
catcccagacgattggcggccaggcagagacgctcctcacttcccagatggggtggcggccgggcagaggctgctatctcagcactttgggaggccaaggcaggcggctgggaggtggaggttgtagcgagccgagatcacgccactgcactccagcctgggcaacattgagcactgagtgaacgagactccgtctgcaatcccggcacctccagaggccgaggctggcagatcactcgcggttaggagctggagaccagcccggccaacagagtgaaaccccgtctccaccaaaaaaatacgaaaaccagtcaggcgtggtggcacgtgcctgcaatcccaggcactcggcaggctgaggcaggagaatcaggcagggaggttgcagtgagccgagatggcggcagtacagtccaggttcggcttggcatcagagggagaccatggagagagggggagggggaaggggggagcgggagggggaagggggagggggagagggaagggggagagggagagggagagggagagctcacatttgtttttctaccactttctttctcttcacctgggagtcccattacatgcatgctttggaacacttgacactgacccacagatctcagaagttctgttttttctccaaacttttttctctgttctttggactggacaatttctgttaatctttcaaatcccccaactctttcttctatcatctcagatctgcttttgagcccatgtgaagaaagttcatttcaattatacttttcaactctggagtttccatttgtttttttgtttgtttgtttgttttgagatggagtttcgctctgttgcccaggctggagtgccgtggcagtatctcaacttactgcggcctccgcctcctgggttcaagtgattctcctatctcagcctcctgagtagctgagaccat

SEQ ID NO: 5306 - DNA, 1028 bp, Artificial sequence
  DNA replication origin
gagtctcctatgtctacttctttctacacagacacagcaacaatctgatttctctatcgtttccccacatttcccccttttctattcgacaaaaccgccattgtcatcatggcccgttctcaatgagctgttgggtacacctcccagacggggtggcggccaggcagaggggctcctcacttcccagaaggggccgccgggcagaggcaccccccacctcccggacggggcggcggccggacggaggcaccccccacctcctggacggggcggctggcagggcgggggctgacccccacctcccggatggggcggctgccgggccgagacgctcctcacttcccagatggggcggctgccgggcggaggggctcctcacttctcagacggggcagctgccgggcggaggggctcctcacttctcagacggggcggctgccgagcggaggggctcctcacttctcagacggggcggccgggcagagatgctcctcacctcccagatggggtcgcggctgggcagaggtgctcctcacatcccagacggggcggcggggcagaggcgctccccacatctcagacgatgggcggccaggcagagacgctcctcacttcctagacaggatggcggctgggaagaggcgctcctcacttcccagactgggcagccaggcagaggggctcctcacatcccagacgattggcggccaggcagagacgctcctcacttcccagatggggtggcggccgggcagaggctgctatctcagcactttgggaggccaaggcaggcggctgggaggtggaggttgtagcgagccgagatcacgccactgcactccagcctgggcaacattgagcactgagtgaacgagactccgtctgcaatcccggcacctccagaggccgaggctggcagatcactcgcggttaggagctggagaccagcccggccaacagagtgaaaccccgtctccaccaaaaaaatacgaaaaccagtcaggcgtggtggcacgtgcctgcaatcc

SEQ ID NO: 5307 - DNA, 1295 bp, Artificial sequence
  DNA replication origin
ctctcggcgcctcctctgcctgggctcacattttggcggcgctgtaggagacctttagcccgccgctgcactgtgggagccccttcctgggctggccgaggccggagccggctccctcagcctgcggggaggtgtggagggagaggcgcgggcgggagcaggggttgtgcgcggcgcttgcgcgccagcgcgagttccaggtgggcgtgagctcggcgggctccgcaccccgagcggccagccggccctgccggcccgggaagtgaggggcttagcacctgggccagcagctgctgtgctagacttctcgcggggccttagctgccttccagcgaggcagggcttgggacctgccgcccaccgtgcctgagcctcccggccgcgtgggctcctgcggggcggagcctccccgacgagcaccgccccctgctccacgggtgcccagtcccatcgacctcccaagggctgaggagtgtgggcgcacggcgcaggactggcaggcagctccacctacagtcccccgtgggggatccactgggtgaagccagctgggctcctgagtctggcggggacttggagaacctttatgtctagccaagggattgtaaatacagcaatcagcactctgtatctagctcaaggtttgtaaacacaccaatcagcaccctgtgtctagctcagggtttgtgaatgcaccaatcagcactctgtatctagctaatctagtggggatgtgaagaacttttgtgtctagctcagggattataaatgcaccaatcagcaccctgtcaaaacgggccaatcagctctctgtaaaacagaccaatcggctctctataaaatggaccaatcagcaggatgtgggtggggccagataagagaataaaagcagactgccccgcgccctcagtgataacccgctggggtctccttctaatctctgggagctttgttattttgctctttgggtccgtgctgcctttatgagctgtaacaccacgagagtttgcagcttctctcttgcggccagcgagaccacgaacccactgggaagaacgaacaactccagacgcaccgccttaagagctgtaatactcaccgggaaggtgtgtagcttcacttctaaagccgggagatcacgaacccaccacaaggaagaaacttcaaacacatccgaacatcagaaggaacaaaccctggacacactgcctttaagaagtgtaacactcaccgcgagggtcagtggctttattcttgaagtcagtgagaccaagcgcccaccaattatggacaca

SEQ ID NO: 5308 - DNA, 1003 bp, Artificial sequence
  DNA replication origin
gccactggaacgctctttccagtcgtttctcctcgactcacagagaaaaagattccaatcctgctccccccccacccacccgcactatataggcatggtcaagaaaactcctttcggtgacccttttttggagtacgggtacctccaatgtcctggccgcttctgcccgctcggagaggggctgcgctctaagttcaaacgtttgtacatttatgacaaagcaggttgaaactggacttacactgatcccctccatggtaaccgctggttctccagatgcggtggctactggagcactcaggccctcggcgtcactttgctacctgctgccgcagccaacaaactgaagtttctggccgcggccggacttttataaaaacacgctccgagcgcggcgcatgcgccgctggggcggggagggagaaggcggggtgggggagaggggcagacgcgaggaaggagggcgcaggggcggggcggagaggtgcgcggcttgggaagcccaggggaccctgctgtttgcgggtggtcggtagtgagtccggagccggacaggacctcccagaggcatttcctaagtttgagggaagcgggatgcgcctgaagacaggtgggaagcgcgggctaggaacgcgtctctctgtggcgcgtccatccttgctaaagtggatggaattccagacctgggaatgctacagtagagacactgaggcccagggaaggggagtgacttgctggagtaacccaaccagtaggcggcaatgctggaagtagggccaagcttccaacgccattccccgcgctttcagcagacgcagcccattcaggaggtaaaaggagtaaagatccttccttcggaggatgtagctatacttgcacattcacagcatcactagggtcaggtgcagataattaggagatactttcagaagaaggtaggatttggcataattctggagactgatcagatgtagatatgtattgctcagtaatttcataatag

SEQ ID NO: 5309 - DNA, 1272 bp, Artificial sequence
  DNA replication origin
gcttgcactcacccgtctcgccagagccgccgccgtaacctctgggagccgctgagccccgagcttcccgagcgcaagaaagatggtggtgtgtgtcggaagaccacccattccagcgtctggcaacccggcggcgactctggctcctcagcactgaaggaggaggaggaggaagagaaggaggaggaggaagagaaggaggaggaggaggaggaggaaggaacggcgcagtcagacgccatctgctgtacacctctgcgcagccattggctgcctggtgcgtccgagagccgcggggcgcggggccgcggggagccaccttgcgcctcgcctaccccggcagctgttccccaccgccccctctttctcccccctctcctccgcctcctaccgcctctgccgcgcacccgcacgaccctcggctcagcctgctccccaaggcgagcgaccgcgggcgcgctggcctggacctcagttcctctgctccccgcaactgtttgccgcaactttgaagcttcggggtgccggtgcgggctgggtaaggggactccccagctgagctcagcccggagtacccaagccactgagcccaggagagggtcgagcgctttgcgcctcggaggtccatgaagtgatgggggaagagagcaagaaagagtgggggtgccctaggcccctgttgataacgcgccccaacacgcacacatgcgcgacactccgacacacagtaaaacacacacaccgagccatcccgcaaggtccggatggtctggcgttcctctgcagtccccgggcacgagagggcttcggtgttactaggagaaaagacaaagaaaatcctatctggggagtacccctagcagcatacgtgggggagagagaaagggaaacattgtggtgactccgggaaacgccgggagctgggtgcatacctgcctggacatcccccctgttgcggggctcccagcgactgtcagcccacgcccaccagagcctgggaaaacccctagctctggggcctctgtttaaaggatttgcagtcccggggcgcggggaccggagttgcgggaaggagcgccttaggctcctgggtagctcatgccggaagcagcaaaggaggtggagagtccgagtcagcccaggtgaggcaggagtgcagacagcggagagcacgtgggcagtcgaggagcagagtcacagctcagaaagtcgtttgcttactctctgacacttgttccaaacccttctggtttttgacacctttgatctagg

SEQ ID NO: 5310 - DNA, 1084 bp, Artificial sequence
  DNA replication origin
tcctcctcctcctcctccttctcttcctcctcctccttctcttcctcctcctcctccttcagtgctgaggagccagagtcgccgccgggttgccagacgctggaatgggtggtcttccgacacacaccaccatctttcttgcgctcgggaagctcggggctcagcggctcccagaggttacggcggcggctctggcgagacgggtgagtgcaagcacgcggagccccgagtcggggatgccgggccccctggccggccgactggggcgcggggtggcagcgccggggaagggggcgcgctgccggcgcagactttgctctttcctcgccggacagccatcgtcgccccttctcccagccagacgcgggaacttggaagcggatcttctcggacgcctctggcttggggctgcgggaagcgtgggctgcccggggcgcagtgtgcggagaccctctaggcgggcggggacgccccacgcggcgacctgagcaccgacctcatgcaacgggaccgaaccttgggacccgggcagcaggagctctgttcccttcacctccagcttggtttgagggatactgatgaaggaaaccgggggtttcccgtcctgcgcggagagcctcggcgcccaaaatcgaaaggccgggagttgttctgcaggctttgcaaacaggttgactgagggtttcctttcccgtagcgctgactgcgaaatctgtgcataggcgttcagtgccagtggaggatagctgagcaagccaagaagttttgcagcttcctctgatttatcggtggagtgtcaggaggctgtagcaacagtttacatttcccctgtccctgcgagtggctaggggcaagctgggctcggacgtgatatcctgctgtttgtggagaggaaactgggaacggggcttgagagtgaggggcagggagggggggacaggcatattttctactgcatcgcccatctgcacctgtcccctttgctgtcttacatgtcccatagtattaaagttatttgaataagcaaatgaaccccgctctttggtgaccgcgtattttgaagttggaaaactttgcaggggac

SEQ ID NO: 5311 - DNA, 1259 bp, Artificial sequence
  DNA replication origin
aaggcgaggttaattaagtccttttgtggggtttgagggctggaatttaatttttggagttttatttaatgtcaggagtggattgggtaataaaatgtatattgagaataagaccgccttttgactttttagggtctagggctgtaaagcgtctcagagttgctgccaaacgagccatgaactgggctgggtttttcatatttgatgaaacaccctaaacgccactgatttgggagaggtctgataaaggagcattaaccttaactatgcctttagcttcagccacctttttaagaggaaattgctgggcaggtgggggagggctactcatggaatgagactgtaaaccggaccaggtgtgaggaggggaggtaataaaaagattatagggtggaggagccgaggctgaggaagaattgggaactagctcggcctggcgaggagcagcctggggaggaggggagaggtcagatgggtctgtagaaaaggaagattagaaagactcagcaaagcttggggttgggactgagggaacaggtgggagggaaagaaggaagatttgggacgagttgcactgggcacagagactagggagggacagatgtgtaaaaatgcctggatgtcaggcacctcagaccgtttgcctattttacaacaagaattatttagatcttgcaggatggaaacattgaaagtgccattttctggctatttggaaccactgtcgagagtttgtattggggtcaagcagcattgaagaagaaaataaggcatttaggttttaggtcaggtgtgagttgaagaggttttaagttcttgagagcacaggctaagggagacggaggaatggagggtggaaggttgcctatagtgaaggaggcaagcccagagaaaagagagagtagagacacagagggaaggggttcgggggttcttaccttccagaaaagtgggaaaggggtcggggtgcagaaataagggatcggggcacagagataagaggtcggggcacagaaataagggattggggtgcagagataagaggttggggtgcggaaataagggattggggattcttgccccctagaaaagtggaacttgccactaagggtgaaggagaaggggttgaggggttcttgcccgtctcccagaaaagcggagaaggggtagagacatggagagaaggggttgggtacttgcccctcccccagaaaagcgggacttgctaagggtgaaggactaaggcaggtgtccatgca

SEQ ID NO: 5312 - DNA, 902 bp, Artificial sequence
  DNA replication origin
caactatatactagtctgagctctagagaagagttcttaaccactaggcaacatttctcacaagaatgatgaaatggtaatttgaaatattccaccaatctcatcgtggcaggagagatgtaatttttcaaggtatgaaccttttacctctgtcagtttctagtccaagaaacagtggattcaattgcaagtgggaaagtgagtaccacaatgggtcaaactaggcccaagattattcaaaaatagacaaagcatcagaagcctggaaagaatcactgaatgacagagttcagtcaggaaagagacaagcgaaagttaggataagcagatggtgaatcttatttctactgggttgtgtgactgctttgagagagaaaatgctaccttcccttttcttttatgttgaatcaatatacaaatacattgactcaaaaagaattaggaaaaaggagagcagcaggaatacaagtgggctctttgaagacttggaccccgaaccgcgcggttagcttgatgtactctggtataagtgagcaaaaatgtattagaaagcaggttaaagagaggttaaaggcatgaccaccggactggaggtagtgagcggtctgcgaagctgagaactctgcctaaaatgggctaacagggacgagagtttcaagtgtctgtatttgggatgaggaggtatgaaagtggacgctgcgcggtggcagagcatgcagtttctgcctttgggcagcactcaggtaaaaaggggcaggtgtggaggtatacaggtatagaggaggagagaagccagaggaaaagaaggggcgaggcccgggggtaaaactaaaggggatcctggaaggtggaggctgggaaatcaaggagggattgggggcaaccccggggaaagtggtgcc

SEQ ID NO: 5313 - DNA, 943 bp, Artificial sequence
  DNA replication origin
aagcccggccaagcgggagagtccaaggcgcgactgaagccccccgccgcgtgccggagctcgagctgccccgcaggctctttgccggccccctccgaggaggggcgcgcggggggccgggagaggcacctccggtccgcccaccctcccccttccctgcccgcccacccggccagagctgcgcggcacggcgcagcgctcggattccgggagggaagcgccgcgctgtgtccctggcgtcctcagtcctgccccgcgaagtggagatgcgcgagaggcaggcgagggcgcgcagctcgtgaaaagccgcgccagccggcaccatgcgcctgcggccgctgcccctcgtggtggtccctggcttgctgcagctggtgagtgcccggcccgcgcgccgtcccacacgccggggacgcgtttcggcgggaaaaccgcgcaggcggctgacttggagcccagcctgggcctgcttgggaagtggggttgggggcgcgcggagggcaaggagttttgggttgccttagaggtcgaaagggaagaattgaagaacggaatagacgggatctacaggcgactcaggggcttagcacgggttgggacttgagcgctggggtaaagtaggcagaaggtggccgggaagtaggtccgggagaaggaagcggtttattgataagcggtcaaggagaggaaggaaagtaaattgataggatgagaaggggcagaaagaccttcctcctgttcacagtttgagaggcttggtggtgtttatttttcacgtggtgttttgcccagatgcacacagacacttctcccaaagcacagcatagtgcatgcatcctcgttctcagagccaggtagtggcgccttgctgggagaaaacttaggcaaaatacggatttgggggacagcttggatttctcttcgttttccgtctggcgctagg

SEQ ID NO: 5314 - DNA, 1385 bp, Artificial sequence
  DNA replication origin
actgaggacgccagggacacagcgcggcgcttccctcccggaatccgagcgctgcgccgtgccgcgcagctctggccgggtgggcgggcagggaagggggagggtgggcggaccggaggtgcctctcccggccccccgcgcgcccctcctcggagggggccggcaaagagcctgcggggcagctcgagctccggcacgcggcggggggcttcagtcgcgccttggactctcccgcttggccgggcttggggtgagcgcgtggggcgcctgcgggagggaggcggcggctcgggcgcttgggtgatgggttcagtgcgaggctgccctccagatccgatcccgccgggcggatgcctggccgagctgagcacgcctggccagccggtgccccagagccccgagaggccgggtgcctcctcccacccccgcccagcagaaggccggtccgagaggctccactgtgccaagcgccctgccaactgactggctctcgctttggctggggagattggggatgaggggaagaaaaggttctccctgggtggctgcaagaaagagtgcgcccgcctggagagcgcccagagagtttaggaggggaaggcgattgcagagtcctggggcggggcgtggggagctgcgaacggaaaaggctggggcggggaggtgaggctggagcccaggacgccctgggagagtgccctactctgccgcagcgccaagctcgcagagccgcgggtaaggggtacaaagtgcgcctggtgcggctggaaggatttctggggttggggagtaatggggacctcgagggaccaggagcagaactgtgagaaacggagctaggtgatgtctggtttactccggtttggggatggtatagacagctaggtgtcctgaagacagacaaagttgctcccagaccttctgcccgggctttggagaagcagaataaaggcaggataccccaccacagcctccgacttcagaaatattggagaggggtatctttgcggacgggcgaaggtgcaaacctgatgcctgtgagcctcgacctccgtgttaacaactcgccattggagagatccttaaccttttactatctttgtgctggacactcgagtggaaaaatcaaaggcaatggggctcacagacctgcactgtttttacggtagatcagagtttgggcgtcattcgtcactcctttattgaacaggtgggaaacctaaggtccagagagatacattcacttctccaaggatgagactttaggcagttgctccgacagaatacccaaggcgagaatgcttcttacatctagaaacgcaaagctcttagagaagaaaaccatgttgaagcaagggagtagaattgcaattgatttctaggct

SEQ ID NO: 5315 - DNA, 1320 bp, Artificial sequence
  DNA replication origin
ctgcaaccccagtgagagagtctggtggggacgtggagaacctttatgtctagctaagggattgtaaatacaccaatcggcactctgtatctagctcaaggtttgtaaatacaccaatcagcaccttgtgtctagctcagggtttgtgaagacaccaatcgacactctgtatctagctactctggtggggacttggagaacctttgtgtggacactgtgtatctaactaatctagctaatctagtggggaggtggagaacctttgtgtctagctcagggattgtaaacgcaccaatcagcgccctgtcaaaacagaccactgggctctaccaattagcaggatgtgggtgcggggggggacgggcggggggaggggggcaaataagagaataaaagcaggctgccccagctagcagtggcaacccgctgaggtccccttccacactgtggaagctttgttctttcactctttgcaataaatcttgctgctgctcactctttgggtccacactacctttatgagctgtaacactcactgcgaaggtctgcagcttcactcctgaagccaacgagaccacgaacctaccgggagaaacgaacaactccagaggagccttaagagctgtaacactcaatgcgaaggtccgcagcttcactcttgagccagcgagaccacgaacccaccagaaggaagaaactccgaacacatccgaacatcagaaggaacaaattcaggacacgccgcctttaagaactgtaacactcaccgtgagggtccgtggcttcattcttgaagtcagtgagaccaagaacccaccaatttccggacacaagagcacagctgcaaacgggaaatacagaggagccacatggctgagcaaaagcttacctactggccattatgtttaagcaccatctactggatcacagtccaaactttaacaccaaaaatactttgctaacatacccccaccccatgaaaccaaagacaaaagttcacctacaaataaagaccttgcacaaaggcttggccctttgaaagcatccagaaacaaagtcaactgactatactcaaattgtgctacagtttaaggaacatcggcccaccacagatgagaaagaactagcacaagaattttggcaatttaaaaagtcagagtgtcttctttcctccaaaggattacactagttcctcagcaaaaacttaaatggttgaaattacaaaaatagaattcagaatatggatgggaaagaaggctattaagattcaggagattgttgaaacccaatcaaggattacaatacaacaatacaggagca

SEQ ID NO: 5316 - DNA, 995 bp, Artificial sequence
  DNA replication origin
gttaaccattccaaggccagggccagtgccccaaatattcatctagtattttcctccctttttcaccagtgcatctgttgtcaaagattattaaactcgcacagggattcttgattttccagatgaaaagtttatagaatcccggctttttctaattcctacctcctttctcctctgctccccatatccattcccttctaaacttctaccattcaccagctgcttggagaaaaaggaaaagcaaagcgccagactggagagaggcactccaggggtgggttagcccctcagagcacctgggctgtgtcacagaccctcataatcgaaaagtcaatttcaagcaggtgcgtgcgcccggaatcgtcctaaaagcctctctgctgatgacaggactctgaccccagtctgcccccaggaaggggctatagaaacgaaaggggcctgaatcggcgctttcgccgctccacggacctcgaatgcagcaggtaaggaagttaacctgggagctaagttgagggcggacacgcttaacgcggagaacctggagctcgcaaaagctcgcagttgagggccatcgcggagggaagtctttcggaaatgcgaattctcattccaacatctgcagcgcttagaattcgcggacagaagcgcacagccaagtgcacacactcccggaggggacaaaatggggaccgggaaacggccaaagggaaaagctgtgggggtgccgaggactcaggcacttggttcagaaatcccgcaccgcacctctcacccccgcacagggccagcgcacggtggtcacccggtcccggggagcggagctgcaaggacttaagtttcacactcacttatctgcaagcatcgcccagcaggaaagccaaggaagtcaggggaggggagcggggaggtgttctccttacctcggtcggctcccacggtcagcaccctggcaatcggcaataatcccgagagagtgagtaaggcgaggagaa

SEQ ID NO: 5317 - DNA, 1170 bp, Artificial sequence
  DNA replication origin
tgcaccgcccttaatccatttaaccctgagtggacacagcacatgtttcagagaacacagagttgggggtaaggtcacagatcaacaggatcccaaggcagaagaatttttcttagtacagaacaaaatgaaaagtctcccatgtctacttctttctacacagacacggcaaccatctgatttctcaatcttttccccacctttcccccctttctattccacaaaaccgccatcgtcatcatggcctgttctcaatgagctgttgggtacacctcccagacggggtggtggccgggcagaggggctcctcacttcccagtaggggtggccgggcagaggtgcccctcacctcctggaaggggcggctggccgggcggggtgctgacccccccacctccctcccggacggggcggctggcctggcgggggctgacccccacctccctcccggatggggtggctgccgggcggagatgctcctcacttcccagacggggcggcggggcagaggcgctccccacatctcagacaatgggtggccgggcagagacgctcctcacttcctagatgggatggcggctgggaagaggcgctcctcacttcctagatgggatggcggccgggcagagacgctcctcactttccagactgggcagccaggcagaggggctcctcacatcccagacgatgggcggccaggcagagacgctcctcacttcccagacggggtggcggccgggcagaggctgcaatctcggcactttgggaggccaaggcaggcggctgggaggtggaggttgtagcgatccgagatcacgccactgcactccagcctgggcaccattgagcactgagtgaacgagactccgtctgcaatcccggcacctcgggaggccgaggctggtggatcactcgcggttaggagctggagaccagcccggccaacacagtgaaaccccgtctccaccaaaaaaatacgaaaaccagtcaggcgtggcggcgcgcgcctgcaatcgcaggcactcggcaggctgaggcaggagaatcaggcagggaggttgcagtgagccgagatggcagcagtacagtccagcttaggctgggcatcagagggagactgtggaaagagagggagagggagactgtggggagagggagggggagagggga

SEQ ID NO: 5318 - DNA, 863 bp, Artificial sequence
  DNA replication origin
cctcccaaagtgccgagattgcagcctctgcccggccgccaccccgtctgggaagtgaggagcgtctctgcctggccgcccatcgtctgggatgtgaggagcccctctgcctggctgcccagtctggaaagtgaggagcgtctctgcccggccgccatcccatctaggaagtgaggagcgcctcttcccagccgccatcccatctaggaagtgaggagcgtctctgcccggccacccattgtctgagatgtggggagcgcctctgccccgccgccccgtctgggaagtgaggagcatctccgcccggcagccaccccatccgggagggaggtgggggtcagcccccgccaggccagccgccccgtccgggagggaggtgggggggtcagcaccccgcccggccagccgccccttccaggaggtgaggggcacctctgcccggccacccctactgggaagtgaggagcccctctgcccggccaccaccccgtctgggaggtgtacccaacagctcattgagaacaggccatgatgacgatggcggttttgtggaatagaaaggggggaaaggtggggaaaagattgagaaatcagatggttgccgtgtctgtgtagaaagaagtagacatgggagacttttcattttgttctgtactaagaaaaattcttctgccttgggatcctgttgatctgtgaccttacccccaactctgtgttctctgaaacatgtgctgtgtccactcagggttaaatggattaagggcggtgcaagatatgctttgctaaacagatgcttgaaggcagcatgctcgttaagagtcatcaccactccctaatctcaagtacccagggacacaaacact

SEQ ID NO: 5319 - DNA, 2242 bp, Artificial sequence
  DNA replication origin
atggtccttgcttttgaaggttttgggctcagaagtcctgcttttcttctgaggagtaaagaggagagaacaaggacagggagagaaactggccttgcacggatcatagggctatttgtttcactacctgatctgttagcgcatttccagccgatatgtgattgtctggggtttggtggcccctgcaatgaatgatggcaactttctgcaggagcctgatagcttgaaggagtttgttgatgagagagccatttatgacaggagtgttttttgcagctaggaaaccccgttttttccaggtagacgagtgtgactgtactatatggaacgtataatgaatgacaaattgaatatatgttaatttgttgtccggctgtcagtgtgagagcttgagtgagggcaatgagttcagcttttgggaggtagtgcctaggggcagtggattggcttcaatagtatgtgggggcggggggcgggggacactatagcatagccagcatgccggcgtccttgctgtaagaaggagctgccgtctacaaaccaagtaaagaaggggttcatctgttagatttggaaaaggtataagaaaggtttgaacagtgttcacacagaagtgtttagggtctttggcggttgtagcttcaggtaagagcatggctgggtttagatgggagctggttagcatagtgatttggggggtttctatgaatagagcatacagttggaggagtcatggggcagagatgagactagtacactgcagtgagttggcatgtctttgatgttatgggttgaataaactgttaggttggcatggagagatagttttaggcttttaagggttaggacagcagctgccgccaatggtcggaggcaggcaggccatccaagaactgaggctttaagctgtttagagaggtaggcaataacctgaagggtgggtcctttagactgggttagaacacctagtgtaactctatgctgttggtcagtatagagggagaaaggtttggtgaggtctgggagagtgaggacagggctgaggtgagagccttccagagtagacggaaaggttgggtaataggctgtgcagatttttaaggctcatggagtggggctttagcagcttggtataatggtttggcaagtagagcgaaggagggaacctagagcctaaaacatcccactaatcctagaaaagagagagaattttttgcttagtttgcagaggcaggagggattggaggagagatatgcagtcagctgtgagcccttgggttcacggggtaagagctagccctagataggtgactaagggggtgcataattgtgctttcttagaggagacctaataccctcgttttgtcaagaagtttaaaagagagagatagtgtgggtgttgcagtgtttttgagaggggctacacaggagcagattattaacacattgaaggagagtggatggttttagggatagggtactgaggtcaagagcaagggcctgtccaaaaagatgggggctgtctctgaaaccttgaggtagtatgcaccaggtgagctgatgtgaaagtttggagttggggttttcccatgtaaaggcaaagaggttttgggaatcaaggtgtaaaggaattgtggggaaaaaaaagcatcttttaggtttagaacagaaaaatgggtggtattagacagaattacggaaagtaaagtatatgggttaggaactactagacatactgggagtacagcttggttaatgagcctgaggtcctggattaagcgataagtttcatctggctttttgacaggtagaactggtttgttaaaaggggagtttgttgggtggagtaggcgactggtgaggaggcgaaaatgataggctttaggcctatgcgagttgcttgggagatgggatactgcttctgtgataggaactgggtgggctttttaagggcaatgtggatgggggtgtggtgttttgtgactgagggtgtggaagtgtcctaaacagaggggttaactacggatgggggataaggaaaagttgcatgttttaaggtggcaggttggaggagtagaagaaagttagaagccccagaggggtctgggttggtgcgttgggtactatggggaacatggaagtgaagagtagtgtggagctttgaaaggagtggagtttggcatgagggtaggactaagaaagtgagtgaaggaaaaggtgtatagggagcagaaaagtggag

SEQ ID NO: 5320 - DNA, 927 bp, Artificial sequence
  DNA replication origin
tccgggagggaggtgggggggtcagcccccgcccggccagccgccccgtccgggagggaggtggggggggtcagccccccgcccggccagccgccccgtccgggagggaggtgggggggtcagccccccgcccggccagccgccccgtccgggagggaggtgggggggtcagccccccgcccggccagccgcctcgtccgggaggtgaggggcgcctgtgcccggccgcccctactgggaagtgaggagcccctctgcctggccagccaccccatccgggagggaggtgggggggtcagccccccgcccggccagccaccccatccgggagggaggtgggggggtcagccccccgcctggccagccgccccgtccgggagggaggtgggggggtcagccccccgcccggccagccgccccacccgggaggtgaggggtgcctctgcccggccgcccctactgggaagtgaggagcccctctgcccggccaccaccccatctgggaggtgtgcccaacagctcattgagaacgggccatgatgacaatggtggttttgtggaatagaaagtggggaaaggtggggaaaagattgagaaatcggatggttgccgtgtctgtgtggaaagaagtagacatgggagacttttcattttgttctgtactaagaaaaattcttctgcctggggatcctgttgatctgtgaccttaccccgcaaccctgtgctctctgaaacatgtgctgtgcccactcagggttaaatggattaagggcagtgcaagatgtgctttgttaaacagatgcttgaaggcagcatgctcgttaagagtcatcaccactccctaatctcaagtacccagggacacaaacactgcggaaggcctcagggtcctctgcctaggaaaaccagagacctttgttcacttgt

SEQ ID NO: 5321 - DNA, 936 bp, Artificial sequence
  DNA replication origin
ccgtccgggagggaggtgggggggtcagccccccgcccgaccagccgcctcgtccgggaggtgaggggcgcctctgcccggccgcccctactgggaagtgaggagcccctctgcccagccagccgccccgtctgggagggaggtggggggtcagcccgccgcccggccagtcgccccgtccgggagggaggtgggggggtcagccccccgccccgccagccgccccgtctgggagggaggtggggggtcagccccctgcccggccagccgcctcgtccgggaggtgaggggcacctctgcccggccgcccctactgggaagtgaggagaccctctgcctggccagccaccccgtccgggagggaggtgggggggtcagccccccgcccggccagccacctcttccgggaggtgaggggcgcctctgcccggccgcccctactgggaagtgaggagcccctctgcccagccaccaccccgtctggaaggtgtgcccaacagctcattgagaacgggccatgatgacaatggtggttttgtggaatagaaagcggggaaaggtggggaaaagattgagaaatcggatggttgccgtgtctgtgtggaaagaagtagacatgggagacttttcattttgttctgtactaagaaaaattcttctgcctggggatcctgttgatctgtgaccttaccccgcaaccctgtgctctctgaaacatgtgctgtgcccactcagggttaaatggattaagggcagtgcaagatgtgctttgttaaacagatgcttgaaggcagcatgctcgttaagagtcatcaccactccctaatctcaagtacccagggacacaaacactgcggaaggcctcagggtcctctgcctaggaaaaccagagacctttgttcacttgtttatctgctgaccttccctccactattg

SEQ ID NO: 5322 - DNA, 880 bp, Artificial sequence
  DNA replication origin
gaggtgagtaggctccgggctggggagccgcgcgggccagcggggaggcggggagcgcggcccctcccctcccctccccggcgcccgcctcgcggggccgcgctgcgcggagatcccagaggggcagcagcggcggctgcggcgcggggagccgggggcggggggtgtgggggaggcggagctgagagccgcgcgcttcccgggcgcacgcgctgcgctccctgcgccgccgtccgcaccgcgctcggaatggggcgtcacgccgtggcattttgtgccttctgcaaactggtcgtgttcgaattgcgtttttttggtgcctacatgtcgtgcgtgctggttttctgcggcccggcgctccgcttcttcctcgcgcaggctgagaggacgggtgggggcacgtcgccctcgcgcgggagaagggaggccgggcgtccgggttggcctgagttggctggggtgcttcgccgaccaccaggctgcccggcgcttggccccttgcagtgcgagccccaggccttcctgacggaaagcttcgcttctggctcctagtcgccctcagttaccagacctccccagcgccccactcctctctgccagccgagtgtgaagaccctcactgtgccccccaccccggaatccctcgtctgaggattaagcacataacttcccattttcatcgggatccagacaatcccattctgtccaggtggaaagattctctgaatttaagtcttgggaatgcagcagcgaaatttaacctttagtcccgaagtagtttttttgccttctctcgcacatacaacttttagagtcttctgacaactgtgctgctttaggttatcttgagattcttaagttaatgccttgaggccgtgtg

SEQ ID NO: 5323 - DNA, 1058 bp, Artificial sequence
  DNA replication origin
ttactcacataacttaaagcaacttgtggatataagtacaaagacctaatcgatttcctttattttggtatgtttcctaattcatttccacatcacagcctaactcttccgagttgcagttttaaaaatgaagttacttaataaaccagacatccagttatatttgcatgttttgccttcaccagagtcatttaacctacaacctccttccagatacaaaaacctttactttagaaaggatcctttacttcataaaggaatttaacgaagggacacattcctcactttacagtcaagaacacctgggacttcctggtactctttctactatgtattctataaataaaagagctaaagtgaaattaggtcgcagcgaaaaaacatccaacatttgtgaattttaagccccaacagaaaatcccattccttgaaattcaagtggcaatgagaatattattgcataaggaaaatatagatggaactatgcaagtcaaatgatggtctccactgctgtcgctttgctttgtgatttttaattactcaatgtgactctcctcgtgtaaatgggaccgcgaatatgcaattattgaatactcaaactgcatcagaagtgtgtggagtagtcagaaccgaaaggacgggaaaaatggagataaaggaaagcatgagccttgccaggagggaatcgaggaggtccagaaggagggatattaagaggcattggcaaagcagctgtggaggagctccgggctgcagagcaggtagaggtgtcggcaagggagccaggaacccgcacaggggccctgaggctctagtaggccggggagtggaccaggaaaggagatgcaacgggccggctggaaaactgcacggggaatccgaggtcgacctaatgaacagcacagaccttccagaaggaaagagaaggtgactatgcgagcttagaacaggactaggaggttggggaaagagtacgaaaaagctgaaagggcggacagggtgctgacgagatgggaaagggcgcacagggaggtggggagcagtgcgaggccggggga

SEQ ID NO: 5324 - DNA, 814 bp, Artificial sequence
  DNA replication origin
gaaacagagagagaggaagagagtgagagagagaccccctaggtattaccccaaacaaaatcgtgggaataaaagagaaaagtgattggcaagagcgcggaaggcgcctgggggaggggagagggctggggactagcgagggtgccgggggggggtgggggagctgacggaggataactgagtttaaaaagaaagaaaccaacccccgaaaacaaacaagcgaacgagcgccagcccagactcggaaaggaaacttctcgctcccctcgctctcagcccgatcacccggcgcggggccgcgtagacgctcccgaggcaggcgctgggacgcagcgcccacccggcctcccggcctccgcagccccagcccgcgcctcgcggggaccgcccgggcccacttggagcaactttcctctagagaagacaattgtgcgcgcccccggcctgccccagagctgcgcggcgcggggagggggcggctgggggcgcagtgtgaggtgctggaaggagcaaaacacaaagacgagagaattttgattagagacaaatgatgcttttctctctctctctctctctctctaggttttgtgtgtgtgtacgcgtgtgtgtgcgtgtgtgtgtcttttgcttgttgtggtggaggtgtcgagccatatgggggagtgatagaggaattttagtcagaaactgttcgttacgttatcctgcctttcccctttgtgctgtctttgatctatttgcttggcttagtattacagaaaaacaagtacaataatatattccgagctgcttccccaagattcagttcaggctg

SEQ ID NO: 5325 - DNA, 1074 bp, Artificial sequence
  DNA replication origin
cgagcctccctccgcggccggcgccggagcccggcgcgcgcggcggctggaccggggggtgttggggaagtgccgggcaaagtgagcgtcaggcacccgggggtccgagcgcgggggtccggccggggccccgcgcccccagccccgctgcccccctcgagcccctgcctccgccctccctccgcctccgcctcccgctccgctcgcgcccggcccgccgggtctccggccgggcttcgggagcgtccgcctggggcagggcgggggcccaggcgctggatcgcgcaggatcccggggcgggggcgggggtggcagagagactgcgaaggcaggagaggggaaccgggtctgcgcctcagcgaggcttaaagtttcttgccggagtcgcccggccgcttctcggtgcgccaagtaacggtccgcgggcagcggggcccggcccatcgcgcccagaccccggggtgggagggagtcggccggccccgcgcggggtccggtggggtcgatgatggctcggggacggatgactcctctccagcaggctctgcccccaggccggggactgaaggagtcgcagggcgcagcgagacttttcccggcagtttctacatggtctggaggagcccgttatccaggctgagtcaggaaggaggaaggagaaaggagatgggggttcgaggggcacacgcagatcagaggtgggatattaaaggggggggtgagagtttggtaggtccgttttggagacagccagagaagggacgcggggggacagagagaaacagagagagaggaagagagtgagagagagaccccctaggtattaccccaaacaaaatcgtgggaataaaagagaaaagtgattggcaagagcgcggaaggcgcctgggggaggggagagggctggggactagcgagggtgccgggggggggtgggggagctgacggaggataactgagtttaaaaagaaagaaaccaacccccgaaaacaaacaagcgaacgagcgccagcccagactcggaaaggaaacttctcgctcccctcgctctcagcccgatcacccggcgcggg

SEQ ID NO: 5326 - DNA, 737 bp, Artificial sequence
  DNA replication origin
caccccggggtctgggcgcgatgggccgggccccgctgcccgcggaccgttacttggcgcaccgagaagcggccgggcgactccggcaagaaactttaagcctcgctgaggcgcagacccggttcccctctcctgccttcgcagtctctctgccacccccgcccccgccccgggatcctgcgcgatccagcgcctgggcccccgccctgccccaggcggacgctcccgaagcccggccggagacccggcgggccgggcgcgagcggagcgggaggcggaggcggagggagggcggaggcaggggctcgaggggggcagcggggctgggggcgcggggccccggccggacccccgcgctcggacccccgggtgcctgacgctcactttgcccggcacttccccaacaccccccggtccagccgccgcgcgcgccgggctccggcgccggccgcggagggaggctcgccctagagccctgggcgccgccgccgccgccgcctcggttccttttccctttccccctccttctccctgggtctcgagccgcgtagtggcccggaaaagtttggttcgggctgcttcttaccgtttttcctcctgggattggcttgtttgcgcctcttgcaccgggggccatccgccatgatcggctgcttcattgataagagcggatcagatggcagttcgcatggactcggcgccctgcttcggcagcacgcaggctcgatctagcaacc

SEQ ID NO: 5327 - DNA, 902 bp, Artificial sequence
  DNA replication origin
gtgcccggcagagaaagggttaatggcccttgtgttacagtttgcatctgttacatcttttatagccccctgtttaaactaatcctcgaggcacagcatcttcccaacctccaccgagttttcaggattctcctcctctcctgcctgcctccgaggtcccccttctccaagttttgacagtttcaactgaaaaaatgcagcgcctctctcgatttttaggtacaaaagtttcgaagccagaaaggatacgatcatttagtagagcttaaaagtattgccgtagtggttggactttctctttcctttcttaagggaaaaaaaaaattctactggaactatttaagggaaccagtgtgggggagcatgtgtgtgagtgaggtggggggaaatacttaagtaaatattgtcaaagtggcgagggggggtggggtaaaggacagtgtccaaagaggcttataattatatttatcattgcggcgtaaaacgggaaatcttaatttgggggcgagggtggggggaggaagagacagtgcctcgataaactccaaaaggggaggggagggggcgctgggcgagtgggcttcctataattactattatcaatttgcccgagtgtgcttcatccaggggctgtttcgcgttgtttgtttgtttgtttcctctgggaattggggggtggggggatgagaaaagatgagaacgaaaagaaaacctcgcctcaccccaagttcccgagccgggggctgaggacttttcgaaggaaagggtccgcctagccctgagtcaagcggtcttactgtaccgccgtgtgcattccctcatacggtcaggagttatgactcattttgaagatgtaattcttgtctctctgatcccctcgcgggtgcaacacaccaaacagt

SEQ ID NO: 5328 - DNA, 866 bp, Artificial sequence
  DNA replication origin
cgcctcctcgccctccactccgccccgccctcgctctctcacccctcccccgctcccgcctcgcttccccgacaatctcctcgcgctcccggcccggcacgcgcgctgcgcccggccgccgctgccgccgccgccgccgccgccgctgccgccgagcgttcctccgctgcgcctggcttccagcttcgggccggaaccggaagtttggggggcggagcccggcggaggccaggagaccgaaaacgcggccgagcccggagcccggagctggagccagagcctggaccagaacttggccgccgcctgcaccgccgccgccgctgccgcccgccgccccttccccgcgccgcagccgcctcgccgccaccgccgcgagctcggccgccagtggtcctcggactttaggtgtctgggttgaaggtcggtccggacatcggacccagtcagttcccagactgtccgggcggcagcggacgccgctgccgccgccgcctcttcgtcgcctcagcctggcgttttgttccgagagacgggagaggcgagcggagctgacagtgattttgacagtgatttaaacccgcttttgttgttgttggcttttcgttgtttggttttgtgtgttgtgcgtgtgtgtggcggtttttcccccgtggtgcattttattttttatcgttgtgctcttttttttcttttttttttttaacccagtgagcgtttttttttttttttttttttttttttggtctgggcttccgaatatgttttatgacggttgattttacaccaggaggtttgtctccgaggaagacccagggaactggatatctagcgagaacttcctccggattccccggcgcctcgggaaa

SEQ ID NO: 5329 - DNA, 1322 bp, Artificial sequence
  DNA replication origin
gccagggccaagcagcagcagtagcagcagcagcagtagcagcagcagcagcaacagcagcagcagcagcaacagcagcagcaaagggtctgtgttgctaagaggcttttggtttctttctctcctcctctcacggccaaagaggaggagggtggagggagggaggcgagttggaggggtgagggggtaggagtcgtggatgggggttttcgaagaagaagaaactccttctcctctctcaggctcaatccccctctcagggctcagggctggagggtgggggaaggaactcagccgccttccccccacccccctgaattcaaggttgaagtggggtagaattagtgtcctgtccctttaaaaatagaaataaaaggtgccccccctctgccactgcctctctcttcatcatcagctgctgctgctgctggggtctctctgcttgggggggagggggggttcgggtagaagagacgggaggcactcactgcgcatgtccctctctgacgggtggctggttggttgaaggcaggaggagggggaggggaggaaatgagctattttcccagaaggcgtcgaggcgctagcgacccggaagacattgtagcgggaggtacaggagcgggggcggggaggaggaggaagtcgctacgcttttaacacccccagctccctcctccttcctaagggaaagtggaggaacggaagtgggcgtggacggagacgaaaggaggtcacgtgtttgggcgggagaggggcggggtgggagaggtagtgcgtgcgcggggcatgccgggagtggttgtgtacggtccgcagcggcaggtgaagtctagcagaggacgcggccaggcgattcggtgaagcgattcctgcaggcgttggttcccctctttgacctggtaaatgcaggcttttatgcgagaggtaatggtgggggtaaacttgctgcaaacgaaggccaggggcgtcggtggcgcaaggtgaatcgaaagtgggaggatggaaggctgtggagattgggaattgggaagggggcaggcttgtataggccgggaaggccaggaccaggcgagctccgtcttgtggccactcccgccccgtgagcttgccgaggaatccttgacaagtgcagggatcctgagtctacctctgcatcggggtagtaggtgaggagcgtgacggtccgagtgtaagagagaagggaactgtgaagcctcagcaattgaccctcatgactgcaggacggaggacttctatctagggacagagacaagtcctctgtatgcattttgaccagatgcatcacacgcgttgctcat

SEQ ID NO: 5330 - DNA, 912 bp, Artificial sequence
  DNA replication origin
cgcggccggcccgctcctcctcctcctcactgcccccggccacagcatgggcgcccaccccgcccgaaaacagccccccgcgcccgcggccgcctccacacactagatccgccgctcgcccgcccgatccgctccctgcgccatggccaacatggcggacattaccacagcggcggcgagcgatcccggcagcccgcgcgagagcgcgcccccgtcgcgggaacgcgcctcgccctctccctccctccctccttcctctcccttcccctccctcgcctgcccacccactctctccgcggcgctgccggcccgcgggagcgtgctcggtctcggtccgctccggggagagggggcgggggcggcgcccctccgctcgctggccggtgctttcgctgtgtggcaggtgccaggtgcgcaagttcgcccgcgcccgggagcgtgcgcctctcccgccgccgcccggtcacccctctcgctgggtgtcccggaggaaggcgccgggcaaagacggctgcgccgagcagcgcgtgtgtgcagaagtccgggagcgggaagggaaaatgtcgacccggaccccaccagccatcacccaagcctgtacttggacagcgctatccccaaggcgccctgtgcgcaagctaattcgcatcctccgaggcgcacatccccgagaggtgcaagaggtctctcccatcagtcccatcagtccgttcggaggactggaccgcgctgctggtgccagccctcttctacgccctcccctccgtacctgtccgaaagagctctccaaggtgcagcagcgcgttcatcctcgctttgcagtgagggttcatggtttgaggctgccagatgcaacaagtgaacttaggttccctgtcacccaaacttcggtacagctgtttagtggatggt

SEQ ID NO: 5331 - DNA, 2046 bp, Artificial sequence
  DNA replication origin
accaaagccctccagagctttttaataattcatgataatcctttagcttctcctcagtagcccacagccagagaagaacgattgataatccaaaaatcatttataattgactcaaatctattttcctagatgctttccctttcaatggatttatctccccattgattcctggcttatacaagtgctgacatctctttgtttgcctttgtcagggcaagaaccaaggcagaacgagagatgaatctaggacactctctactttgtgtctctctgaagtcctcaccctaaaatcaatgtgagaaaagtgagtgttctcataataatgcctcccatccccacaggaacagaagcatacccacatctaccacaggcctaggagctgggctgcttgatccagctcagatgcccaagagtggtaagggctttatgtgcagcaaactgggcctgccgaaacaatctgcaggtgtgtgtacgcaggggaggatgtaggggcatgtggagtgtgcacgtgtgtgtgtgtgtgtagtgttaggggagcatatggatgtgtgatgtgtgtagtatatgtctgtgtgtgatatacgtgtggggtgtgagggctacgtctgcgtgtgtgggggcgtgtgatgtatgtggagtattacatatatgtgtgatgtgggggttatatgtgtgtgagatggacgtagggaatgtgtgcaggtatgtgctatagcgtgaatgtaggaagtgtggcgagtgtgggggtgcttgtgatgtgtgtggctgtgtggcattctgtggcgtgtgtgtattgtatatgtgtgatatgtggtgtctgtgtctgtatgatgtatgcagagtgtgtgtgtgtgtgtgtgtatgcgtgtgtgttgtgtgtgtgatatatgtgggttctgcctgtatgtgtgcatgtatatgtggggggtgtctctgtgtgtgtggtgtgtctgtgtgtgtgtatgtagggggtatgccatacaatgtgtggtatctggtatatggtatgtctgtgtgtgtatgatgtatgtgggggtgtggtatatagtgtgtggtatgcgtgtctatatggatgtgtgtgatgtgtacatctctgtatgtttatgatgttatgtaggggtcatgtgtggtatatagtgtgtggtgtgtggtgtgtttgtatgtggtgtgtatatatctgtgtgtatatgtatgatgtatgtggaggggtggtatgtgatgtgtggtgtgtctgtgtgtgcatatgtgtgtgatgtgtatatgtctgtgtgtgtatgatgtatgcgtgtgcagtatgttatgtggtgtgtctgtatgtgtgtgatatatatgtctgtgtgtgtttatgatgtatgtgagggccatgtgtggtgtgaggtatgtctgtggtatgtatatgtctgtatgtgtctgatgtatgtggaagggtgtgtggtatgtggtgtgtagtgtgtctgtgtgggtatatgtgtggtgtgtacatgtttgtgtgtgtgtatgatgtatttaaggagtgtgatatattgtgtgtggtgtgtctgtgtgtatattatggtgtgtggtgtgtctgtgtgtgtacatgtgtttggtgtgcatatgtctgtgtgtgtatcatgtatatggggggtatgtggtatatggtgtgtcgtgaatgtatgtgtgtgcgtgtgtatgatgtatgtgggaggcgtggtgtgtggtgcatctgtgtgtgatgtgtctgtgtgtatatgtatgtggtgtgcatatgtctgtgtgtgtgtacaatgtatgtggggtgtggtagtggtgtatggtatgtctgtgtgtgacgtgtctgtgtgtgtatacgtgtgtggtatgcatatgtctgtgtgcatgtacaatgtatgtgggggtgtatggtatgtggtgtgtggtgtgtctgtgtgtatatgtgcgtggtgtgcatatgtctgtgtgtgtgtttacgatgtatgtggggggggtggaatgtggtgtgtgctgtttctgtgtgtgtatgagagtgaggtgctccttagaggtcttcactgcttctacactgac

SEQ ID NO: 5332 - DNA, 1215 bp, Artificial sequence
  DNA replication origin
aacaggctccttgccgcctccccagcgctggccactaccacactgccgcccgcctgggcctcctttcaacctcgtggtggagccctgcggtttcccagcggagccgggcccggggctgctccctcgcgggcgaggctcacctgtcccggcccggccccctcccgcgccccaggtggttcagggcagggaggagccgcgccccgccccgcgcggtagcagccaacgccggccccaggcgggtgcgctgggagcctgggccgggagccgggtgagggcgccgagaggctcggtgggcgcgggcggcgaggtgagctgggccagcgcagcaggcgggggcggtggtgggttcgggacggctcaccccgcgccggagcgagtgcggggccgcgcgactgcggcgggagatgcgctgcgccccttctgggcgcgctggggcagccaggagctcgcggggccgcggggccgcggggccgcggggccgcggcgcagtggcggggtcggggtctggtcgctgcctcgaggcgagcagctgccaacatctggacgggacgggagcagggggccggggcaaggctggagcggtgtgggtctctaatcgtccagagccctgcggggccagtgacttcggcagagccgaggggagaggagatactgggggtcaaactgctggagagagcgcggagctggggctggggttcaaggccgatcgtggggccaagagcgagcgtgccagctccagtgtttccccctgcagcgcttcacgcgcgaccagcttgggtgccgccgcttcccttgccccggctctttacttttgttgttgaataacctaccttacacattggttagttacctggggcttctcaaaagccgggtctggaggctgctctgactccagggggcttgggttgtgaggcttcaggtctgtatgccctgtggcgtttggggggagctggtgggtggaggggtgctgtccacctcccaaggccaggggatcagagagtgggaaaagtctagaatgctatttaaattccagtaactagctgtgtgaccttgggcaagttactgaactgctctgagcctcagttcccttaaagtaaaataggtattattaatattataatcattacaacagacttaggttatatgatgttcatggagtacatagcatactgcttgatttttccccctttgtgttgatgtggtgatgtgtgtgtt

SEQ ID NO: 5333 - DNA, 1234 bp, Artificial sequence
  DNA replication origin
ggagaggcggggggcggctaggggcgcgcgcgccactcccactcgcgccgggcactggccgccgcccgcagccgcggccggcccggcctcgagggccgcgggaccaatcagcgcgcgcggggggagcggagccctccgcggggcgcgctcattggcccggcgcgcgcggcccaactccgggagaatcggcctgagcgccaagtctgcaaactccggccagcgggagccgaccgcccggcgcaggtggggcacccgggcgccgcgctcccgcccgcagggtgagcggaactggagagatttgggaccttcccgggaagcctgttcccagtgagcgttggaagcgagcagtgtttgctcagggtgcaccgataccttcctgtgcgcgaccccctggcgcctctccctagccgccagcctcagccgggccagcagctgcgtgcgtggctgcaggcccggcagtgtgaaatgaccctggccaaatctcactccccgccatcccctgggccccgcgaaatccgccggaccgcagagctcaagagcaagtgaagctccgaacccagggaaggcggagaccacttgacgtttgcagtaaaagacctaagctgcggggcggagcatggaggcggtgggaagagccaggaaggcaggtcttaggaagtgggaatccggttatgggtttggtgcaaaaaagtccagggcataatactgccaccctctgcccaacccttcctccagttaaagcccctgcagccctcttgggacgtattggtttttctcttccttgttgtaaatcgtgtttgacccccctggacggttcgatctagagccttagagtggaagtgggtcatagtcctactctcccctgagcagcgcggggggccggcggggagccggggtgaccggggaaggtccccaggaaggtctggaaggactccacggatatgcccggaaactcggaaccagcctccccacctccccccgaacttggcctgcaaggctaccttcgtaagggcggcccgccatgtggctatttgtcgatctttgagacccctccaccttctccttggattttctacccctggagcattttttcaggcctctcctgaatcaccctgccttcccaataatctatccatcccaacataaaaacattcttactcttttttaaattaaacttccttccccagtccctctatttggaagggcctaggataacctatttttgatcgacagc

SEQ ID NO: 5334 - DNA, 1636 bp, Artificial sequence
  DNA replication origin
gcgggcgggagcgcggcgcccgggtgccccacctgcgccgggcggtcggctcccgctggccggagtttgcagacttggcgctcaggccgattctcccggagttgggccgcgcgcgccgggccaatgagcgcgccccgcggagggctccgctccccccgcgcgcgctgattggtcccgcggccctcgaggccgggccggccgcggctgcgggcggcggccagtgcccggcgcgagtgggagtggcgcgcgcgcccctagccgccccccgcctctccccgctgcgctccctcgctccttccctgagctcccgggctccggcagcgggctggcggggcgccgcattgcacactctgggggcgccgcagtgttcgtgggatggggcagcgggctgcagctggcggccggaatccgcgcgcagcccgggtgagtagaggcgggcttcccgggagagcacaaaagaacaggggattggtgccagcggccccggcttaggcggggcctggccaaggcagggagtgcgctgagtccctggaactacccgatgctagggcagtcccctggggccagaggaactggggtcccggcctccggcgttttgcccctagtgggcagagagccccgcgagtagcctggacgggtccagaggggcgtgtgtactcgtgtgtgttgggctggcgcgtggagggtgggatggaaaggtcaggagctgccaagttcaaggctggaggaacctttcccaggagtaattcagcatcttctcacggcccaacatgcgtccaccaggaactccagccggagggagttcctgggcggcggactggcagcaccccacatgttgctgcggggcggggggcagtggcggtagcccggctgcggccacccggagcctctaagggaggtgcagtgtgctggaggtacctccccgccgctgcaagaccacgctaggcctttcagccatccaccccgacaacccagggaagggaccatccacccacagagttgggatttggcctgggcttgacttggcgacctgtttttctctccggtaacagcagttccgttgattcacatttggctaagcgttcagttacaacctaaagctcactatctgacggtctgactcgctctgacccccaccatatcctcactatctctaccgctgccctcctccagtcccctctcccgccccagtatctgccctgctcctcactgcggggctcaaaacttggtgtttgagcatgattgccttcggtgtggtccttggcattttcaagtgtcacaatcacatcccgtttcctagaggactccaaagacttgttataatgggatcgggggagagaattgggtgggggggaatggaagagggtctttggtagtcacttgttggaagaacagcattgacctcccagagcatatgacaaaaagaatgttaagcttctttctatggtaacctacccaaggtgtgacctccaaaattcaattttctttgtgggaggcaagggagtttagattctccagggggaagcttatttcttgttaaattgacttgcggtgacatacacactgttctgctctgctctggccagccattgcagatgccatgatattattagagcaattcccttaaagccattac

SEQ ID NO: 5335 - DNA, 1154 bp, Artificial sequence
  DNA replication origin
aaggaattgcaactcagaaatatgttggttgctacttggctgcctctactctattattgtacaccttgaaggcgaggttaattaagtcctgttgtggggtttgagggccagaatttaatttttggagttttatttaatgtcaggagcagattgggtaataaaatgtatattgagaataagacggccttttgacgtttagggtctagggctgtaaagcatctcagggttgctgccgaacgagccatgaactgggctgggtttttcatatttgatgaaacagcctaaacactaactgatttgggagaggtcgcataaagaaaaagcattaaccttgactatgcctttagctcaagccacctttttaagaggaaattgctgggcaggttggggagggctagtcacggaaggaaactgtaagccggacagggtgtgaggagggcgggtgataaaaggattatagggtgggggagcagaggctgaggaagaattgggacctggctccgcctggcgaggggcagcctggggaggaggtgagaggtcagatgggtctgtagaaaaggaagattagaaagactcagcaacacttggggttgggactgagaggacaggcgagagggaaaggaggatttgggacaagtcgcattgggaacagagagtagggagtgaacaatgtgtaaaagaatgcctggacttcaggcatctcagaccgtttgcccattttacgacaagaattatctagatctggtaggatggaaaaatcgaaagtgccgttttctggctatttggaaccactgtcaagtttgtactggggtcaagcggcattgtagaagaaaataaggcgtttatgttttaggtcaggtgtgagttgaagaggttttaagttcttgagaacacgggctaagggagaagagggaggaatggaggctggaaggttgcccatagtgaaggagacaagcccagaaaaaagagagagtagagacacggagagaaggggttggggagttcttgccctccagaaaagcggaaaaggggtagagacatggagagaaggggttggggagttcttgccctccagaaaagcagaaaaggggtagagacgtggagataaggggtcagggggcattcttgccccctagaaaagaggtacttgccac

SEQ ID NO: 5336 - DNA, 1168 bp, Artificial sequence
  DNA replication origin
ttcagcctttggcggtcgatgggactgggcgctgtggagctgggagcagtgctctcgtcggggaggctcggccaggcaggagcccatggcggaggtggggcgggggaggctcaggcacggcgggctgcaggtcccaagccctgccccgtggggaggcagcccaggtgctaagcccctcactgcccggggcttccgggccggccggccgctcagagtgcggggcctgccgagcccacgcccacccggaactcgcgctggcccgcaagcgccgcgtgcagccacggttcccgacagcgcctctccctccacacctccccgcaagctgagggagccggctccagccttgaccagcccagaaaagggctcccacagtgcagcggcgggctgaagggctcctcaggcgccgccagaatgggcgccgaggctgaggcaccgagagcgagcgtgggctgcgagggctgccagtatgctgtcacctctcagtatgatagaaaaaagtgagtatggcgaactggtggttaaagagaggaagagcactcgtggaggtcgtagctccagatatcaggacaaagcccagcttgagactaaggcttaatcagagcgttagggaaccctttcttcccccactgccaccctaacacactcagtaaaaatagccatgaaattcaaccggaagagctgcaagagatagatcattattggggggcagtacaaagacagattaaaagccaatgaaataacagacattgaggaaataatctctgttaaatacacagtatcacaagaggaattttaagcctgaggggcacttggggtaatataacatcaacaaacccccaaacttagcccaactcctgaatagatgaatatgagcccacagttaaggtccagctgaagaaaaggcatgctcatctccaacgttaagaagagatttatctctgtatctgtagccctacacaagatgtctaattgtcaactaaaaattgcaaggcatgtaaaaagacaaatacacacacatacccccccacacactgaagacgcaaggtaatccttgggagcaggctgcatatgacaccacggatattgggactatcagacagagaatttaaaataactatgattaataggctattagctttaatggaacaaagtagacaacatgtaagat

SEQ ID NO: 5337 - DNA, 892 bp, Artificial sequence
  DNA replication origin
tctgcgccgcgtttcagaggttgcccatcagccttgtgatttatttttatatctgctttttataaagagagaaatatatatatatatatatatttttttttttcttcttaagagaaaattcctgttccaagagaaaataaggcaacatcaatgaaggagagaagagccagccagaaattatccagcaaatctatcatggatcctaatcagaacgtgaaatgcaagatagttgtggtgggagacagtcagtgtggaaaaactgcgctgctccatgtcttcgccaaggactgcttccccgaggtgagtgtggccggccgcggcttccacgagggggtcggccagtgggatcccagtcccgaggtgggcctccccgctttcatccgttttcccttaaaaaaaaaaaaaaagaaaaaaaaaagtctttctcggtccttactactttcccctgattagactgcggggaaagggaaagtgcgctggaagcttttagggttgggacgcgcctgcacatgggctggttagctcctgaaacttgttcgttcctgtgtgcataacctggggttgggagattcgggtcagcagatctgtgagagccgggtggggtgagtggggagtaggacaggggtttcggaaagggtccatgtgcttagtgtgtggtctgatgtgtgaaggttttctttcttaactggggagcggggaggggaagggtgttcaatgggtgtcgtgcgtttaaacgtaacctctttgccctctttccttcctcttttgcccattttgtctatccagaattacgttcctacagtgtttgagaattacacggccagttttgaaatcgacacacaaagaatagagttgagcctgtgggacacttcgggtaagagtgggaggaccg

SEQ ID NO: 5338 - DNA, 1089 bp, Artificial sequence
  DNA replication origin
ccttagtacctgtgaaaagtagaagggcaaggtggtgtgtccagaattggtgggttcttggtctcactgacctcaagaataaaccgcggaccctcgcggtgagtgttacagttcttaaaggcggcgtgtctggagtttgttccttctgatgttcggatgtgttcggagtttcttccttccggtgggttcgtagtctcggtggctcaggagtgaagttgcaaaccttcgcggtgagcgtcacagttcttaaagtgatgcgtctggagttgttcgtttctcccggtgggttcgtggtctcgctggcttcaggagtgaagctgcagaccttcgctgtaagtgttacggctcataaagtcagtatggacccaaagagagaacaatagcaagatttattgcaaagggtgaaaaaacaaagcttccacagtgtacaaaaggactccaaggggttgccactgctggctgggggggggggggggcagcctgcttttattctcttatctggccccacccacatcgtgcagattggtccattttacagagggctgactagtctgttttacagagagctgattggtccgttttgacagggtgttgattggtgcgttcataatccctgagctagacacgaaagttctccaggtccccactagattagctagatacagagtgtccattggtatatttacaaactctgagctagacacagagtgctgattggtgcatttacaaaccttgagctagatacagagtgccgattggtgcattcacaatcccttagctagacataaaagttctccaagtccccaccagattaactagatacagagtgcccattggtgcatccacaaaccctgagctagacacagggtgctgattggtgtgtttacaaaccttgagctagataaagagtgcccgttggtgtatttacaatccctcagctagatataaaagttctccataaaggttctccaagtctccactagactcaggagcccagctggcttcacccagtggatctcacacaggggctgcaagtggagctgcctgccagtcccgtgccatgcgcccacactcctcagaccttgggcg

SEQ ID NO: 5339 - DNA, 1198 bp, Artificial sequence
  DNA replication origin
caggagcccagctggcttcacccagtggatctcacacaggggctgcaagtggagctgcctgccagtcccgtgccatgcgcccacactcctcagaccttgggcggttgatgggactgggcgccctggagcagggagcagtactcgtaggggagtcttgggcgtgcaggagcccacagcaggtctggtggggggacagggggatggggacggtggggggggcggggaggggcggggagaggcgggggggggccggggagaggcggggggccggggagaggcgggggggcggggagaggcgggggggcggggagaggcgggggggcggggagaggcgggggggcggggagaggcgggggggcggggagaggcgggggggcggggagaggcgggggggcggggagaggcgggggggcggggaggggcgggactcaggcatggcgggctttgggtcccgagccctgccctgcggggtggcagctaaggcccggcgagaaatctagcgcagcgacagtgggccgagaccgctgggggacccggcgcacccaccgcagctgctggcccaagtgctaagccctcactgctcggggccggctggccactccaagtgccgggcccaccaagcccacccagaattctagctggcccgcaagtgccgcgggcagccccggttcccgcctatgcctctccctccgcacctccccgcaggctgagggagccggctccagcctcggccatcccaagaaggggctcccacagtacagcggcaggctgaagggctcctcaagcgcggccagagtgggcgctgaggccgaggaggtgccaagggcaggtgccaagagcgagcgagggctgcgagggctgccagcatgctgtcacttctcagtgggactgaaagcaagaagaaaggttgaaagtccattaaagaagaaattggatccttagaacccctcaactaccacacccagtcaggtgatccttcctcccataatctgcagataagagagtttaataagataggctgtaaagtgtggtatgccagggttactgagggttagttagtctgacatgctgtactgaaaacgggagttaagtgaagattaacatactgaatggagatacccaaactttcttctttcaaggttggcaacgaggttcataatctccaggtatgaaattgaagaactaggcctggggtcgt

SEQ ID NO: 5340 - DNA, 886 bp, Artificial sequence
  DNA replication origin
gccgccccgtccgggaggtgaggggtgcctctgcccggccgcccctactgggaagtgaggagcccctctgcccggccagccgccccgtccgggagggagatgggggggtcagccccccgccaggcgagacgccccgtccgggagggaggtggggggtcagccccctgcccggccagccgccccgtccgggaggtgaggggtgcctctgcccggccgcccctactgggaagtgaggagcccctctgcccggccagccgcccgtccgggagggaggtgggggggtcagccccccacccggccagccgccccgtccgggagggaggtggaggggtcagccccctgcctggcgagccgccccgtccgggaggtgaggggcgcctctgcccggccgcccctactgggaagtgaggagcccctctgcccggccaccaccccgtctgggaggtgtacccaacagctcattgagaatgggccatgatgacgatggcggttttgtggaatagaaaagggggaaaggtggggaaaagattgagaaatcggatggttgctgtgtctgtgtagaaagaagtagacatgggagacttttcattttgttctgtactaagaaaaattcttctgccttgggatcctgttgatctatgaccttacccccaaccctgtgctctctgaaacatgtgctgtgtccactcagggttaaatggattaagggcggtgcaagatgtgctttgttaaacagatgcttgaaggcagcatgctcgttaagagtcatcaccactccctaatctcaagtacccagggacacacacactctgcctaggaaaaccagagacctttgttcacttgtttatctgctgaccttccctccactattgtcctgtgaccctgc

SEQ ID NO: 5341 - DNA, 1492 bp, Artificial sequence
  DNA replication origin
tgtttcttcctcccttaatacgctcagagtaactctcacattgttttgcagtgatatgtttacaggtctctctcccattgacagtgaacctcccaaggacttggttgtgacttaattttcttcagaagcaacaccagcagagctgttgatggaatcagttgtggcatcaggtgaatggactgagtccatgttctatcactttctgtttgtgtgaccttaggcaagtaataatgtgaaataaggatgataatgcctgccttgtaggatggtgtcagaattttgaaaaatgaaataatatatgtagatattggatgcaaattattctatttaaaagcacatctcactgtagctcttcttttcaagcagggtggtggccataatatgtatcggtatttgccttccactttcagagactggtgggaagtctgacattttaaagcctctgcctgtttctctgtttgttgggggaacatcctagagtgatgatggtaatactggtgatggcagtgagggtggttgtggtgatcacggtgatattagtggttatgatggtgctgttgatggtcctgggtgtcagggcaggggtggtgatgatgaagatggggcaatagtggtgactgtaggatggtgatggtgcttggtaagggttgggtggaggtgaaggtgatggtgatgatagaggtggtaatggtgagggggtgatggtgatgatagaggtggtaatggtgagggggtgatggtgatgatagaggtggtaatggtgagggggtgatggtgatgatagaggtggtaatggtgagggggtgatggtgatggtggagaggagggtggggacggtagtagtgattatgctgtggtgacagtggtgacggttgtggtggtgctgctggtggtgatggtggtggcagtagcggtaatggtggtgatggcggagaggagggtggggacagtagtagtgatagtagtgattatgccacgatggcttggtgatggttatggtggtggtgctgctggtggtgatgatggtgatgttggtgatggcggagaggagggtgggaatggtagtagtgattatgccatgatggtagtggtgagggtgctggtggcggcgatggtggtaaagcggtgatggtggtgatgttggtaatggtgatggtggtattggtataaatgggggggtgctgatggtagctgtggtggagatggcaacgatggtggtggtgatggtggtagtgttggtggttcttaccctgggttcctcacctctgttgctcagcctgcctgttgggattcatagcctcctggagtgatgactgcataacattgttttcttttgttttgccattcctcccctgcctgcctgccttattctgaactcagtccccttcacatgggcttacctaggactcttcagctgattctcagcctttgaccctggacaatagctttggatccagcacagcatcctatcctgcctgcccctatcccctgc

SEQ ID NO: 5342 - DNA, 1048 bp, Artificial sequence
  DNA replication origin
ggaggagaaagggacgtggaggaggggtggggggagcggggccgccgactcccgggactggggccccgcacgcccggcacgaaggcggggcgcgctagggcggcggaggaggtgtgaggaaggaagaggaggaagaggagaagggggaggagggggcggtacctgcgaggtgggggagtgcggcccgtccgcggtcccgttcttggcgtaggaggaggaggacatcgttcagagccgccgcatggccagcccgtgtgcggtgggcggagggggctggcccccgaggctgggctgcggacggagggggagggcgcaggacttccccacccggctccaggacccgcgccggcgcccaggctccctgcccgcacttcggagagcgcggcaccttaaagggaccgaggcgcttcccccgcgctcgcggcggggtcccggggagggggcttctcggaaactcgcctacccgagcggattgggagaagcgctctcccacctagcaagcgctttacatcagagcttccagaggatgaagggagggggaaatctgggatgggggtggcaagattaaaatagtctgcacagtttaaaatgagacaaaggtggcacggttcatgaatcaggacttggggacggaagctggtgcagtgtggcgggaatgggaagaaccgagcgggtgtgtgtgtgtgtgtttgctgcactggaattttaaaagggcaagagcagagccaccttccgcgacttcactcatcagcctaatgtgtaaggcatggggttttgtggcttgcttttcgtccgtgtttttgtattgctttggcaattctgtccttagagctgcgagtcacacacatccaggcagctgtgagaaacccagccagcctgagtctgacgggagatgctgccccgccaaagaccagtatgtcctacggagttttgaaggtcatgttagacctgctaagaagcaagagttggtcactgtgcctcccatttctatgcgaatggatattttcaagggggagaaactcatccttgcaaccatacacaacgtttg

SEQ ID NO: 5343 - DNA, 1274 bp, Artificial sequence
  DNA replication origin
cagacggggtggtggccgggcagaggggctcctcacttcccagtaggggcggctgggcagaggcgcccctcacctcccggatggggcggctggccaggcggggggctgacccccccacctccctcccggacggggcggctggccgggtggggggctgacccccccaccaccttcccggacggggcggctggccgggcagaggggctcctcacttcccggtaggggcggccgggcagaggcacccctcacctcccggatggggcagctggccaggcggggggctgacccccccacctccctcccggacggggtggctggccgggcggggggctgacccccaccgccctcccggacggggcggctggcctgggtggggctgaccccccacctccctcctggacggagcggctggcctggcgggggctgacccccacctccctcccggacgcggtggctgccgggcggaggggctcctcacttctcagacggggcggctgccgggcggaggggctcctcacttctcagacggggcggttgccaggcagagggtctcctcacttctgagatggggcggccgggcagagacgctcctcacatcccagacggggtggcagggcagaggcgctccccacatctcagacgatgggcggccaggcagagacgctcctcacttcctagatgggatggcggccgggaagaggcgctcctcacttcctagatgggatggcggccgggcagagacgctcctcactttccagactgggcagccaggcggaggggctcctcacatcccagatgatgggcggccaggcagagacgctcctcacttccccgacggggtggcggccgggcagaggctgcaatcttggcactttgggaggccaaggcaggcggctgggaggtggaggttgtagccagccgagatcacgccactgcactccagcctgggcaccattgagcactgagtgaaggagcctccgtctgcaatcctggcacctcgggaggccgaggctggcagatcactcgcggttaggagctggagaccagcccggccaacacagcgaaaccccgtctccaccaaaaaaataggaaaaccagtcaggcgtggcggcgcgcgcctgcaatcgcaggcactgggcaggctgaggcaggagaatgaggcagggaggttgcagtgagcagagatggcggcagtacagtccagctttggctcgtcatcagagggagaccgtggaaagagagggagagggagactgtggggagagggagaggga

SEQ ID NO: 5344 - DNA, 944 bp, Artificial sequence
  DNA replication origin
gaagtgaggagcccctccgcccggcagccaccgcgtccgggagggaggtgggggtcagcccccgccaggccagccgctccgtccaggagggaggtggggggtcagccccacccaggccagccgccccgtccgggagggcggtgggggtcagccccccgcccggccagccaccccgtccgggagggaggtgggggggtcagccccccgcctggccagctgccccatccgggaggtgaggggtgcctctgcccggccgcccctaccgggaagtgaggagcccctctgcccggccagccgccccgtccgggaaggtggtgggggggtcagccccccacccggccagccgccccgtccgggagggaggtgggggggtcagccccccgcctggccagccgccccatccgggaggtgaggggcgcctctgcccagccgcccctactgggaagtgaggagcccctctgcccggccaccaccccgtctgggaggtgtacccaacagctcattgagagtgggccatgatgacggtggcggttttgtggaatagaagggggggaaaggtggggaaaagattgagaaatcggatggttgccgtgtctgtgtagaaagaggtagacatgggagactttacattttgttctgtactaagaaaaattcttctgccttgggatcctgttgatctgtgaccttacccccaaccctgtgctctctgaaacatgtgctgtgtccactcagggttgaatggattaagggcggtgcaagatgtgctttgttaaacagatgcttgaaggcagcatgctcgttaagagtcatcaccactccctaatctcaagtacccagggacacaaacactgcggaaggctgcagggtcctctgcctaggaaaaccagagacctttgttcacttgtttatctgctgaccttccctccactattgtcctgtgaccc

SEQ ID NO: 5345 - DNA, 1036 bp, Artificial sequence
  DNA replication origin
ccttcaccccgtgccgggagcgagcctccattcccgagggggaggctcccgctttcccctttgtggccccccagcactcctcttcacccccctggcagtcccccgcgctcagtctctcggggtcccgggatggggatgggggctcagggccggctgcccaaccagcctcgaacccattgtctggctggagaggcacctcacggcgcgtgtgcccgggaggtgcggcgtgggcgtgaagagaaggtggcgcgggctgggaggaggaggtggcgagccgcttaggctttttttttaaaaaaaacaaaacaaaacaaaacaaaacaaaacaccctgagcccctgcggaccatccctcgggcggccagcccgggacctgcgaagtccccggcagatggggcgcatgtggccggccgcgggcgccgcgccgggcggtgagcggaggcgaacttggagggctcacgtcgcggcttggccaaggggagcttccccgaaagggaaagcggagacccacagcagtgcggcgccccggcccttggcgaggagcaggggcatctgaaacccaggccggggagaacctcagcgcgttccctctagacttaaatcttaaaccacaaaaatgtggagttttgcggggacgtgttgcgagctgtcctgactgcacgggcgacccctcccctcctcttgcacgcccagccaggtcccccgctccctcctgcattccgcttctcccagctttccagctcctcaaatccaggactctgaaaactcccctctttctccctttcctgctgggacagtgtctgggcccctcccagccgaggcttgtgctgtgagctgcagagggtgtggcggcttgccccagccaggatctggactgctgttggtcccccagactaccagttttagtgtcccagcctcttctaagggatgttgggagggacacacacaggcgagattgggctcattcctactcctgacacttggacacttctcttttcctagttggttacctctaaactccacaagactaggcagca

SEQ ID NO: 5346 - DNA, 850 bp, Artificial sequence
  DNA replication origin
gcggccactgccgctacacataccaacaagaagcgatctgagtggctggcgcccactggggctaaaggttaaaggctgccctgcgctacggggcgggatcagcggggccaacaggctgacgggcttccccgctgtccaatcagaatgcgccgccgacacgcagctctgcggcgattcgcccccagcctcagcctcactcggcgtcgcctgcatgggggggggggaggaggaggacggaggaagtttctgcgccgagtcctccgtcgggaaaactctaccaacttccccaggggaagggaagacaacagtgtcccagcttcccgagcttagaccgcctcaccccgtagggggtggggcagtgggggtctgccaccttcaccctccccgcccgagttacgtacgccccacaaacctgaggccgccaggggtagggtggagggggcgggggtaagcagcctgtagtgttagcggtggctgggaccgaatgcgcgcgcgcggtgctcgaggcggaggggaggaggcggggaaggcgaaaggaggggttcggaggagagggttcgatctccgtacgcaccaggtggagagcgcgcgcctggggaaggaggcgtgtcgagtagcgggagggaagttgtagtacgggtggggagaaccacactaaagggagatgggggtgagcagttaaggaaccgcgagagcgccaggtagagaggtgcccttaatgggggaacctggagaagagtgtgagcgtagtggggaagaagggagaagacaaataggttcgggaatgtgtctccgagggcgcgagcgggcgctaggacccggcgtcgaaaagatgaggctttggggctgt

SEQ ID NO: 5347 - DNA, 1372 bp, Artificial sequence
  DNA replication origin
gcctgggtgcagcagcgcacggctcgctccagcgcctcgctgctgttggccaggaacaggcccgccacgtccgtctggttgcctagggccggattcatcgcaggaacgggcgggcgccgcgagcggcgcgggtccgaggggtgggaaggcggcggcgctggaggaacaggtgccgggctgagcgctcactcgcagactagcgcgtgcgagggctcctcgctctgctttcgaaagtccctgggccgtgggagtttcccaggagcctctccgacgcgcgcagcagctaggctcttctaaagccgtccgctccagccctggtggtgctcgttcccggcgctcgctcgagggggggctgttggaacttggcggggctggaccagcccggccgtgggaggtgcgggccgcggcggctgcagcggcggggtggctgcgctgagcaaacagcggccccttccggccgcaccgccgcgctgcgcgctgctcttgggaggtggaggaagcaaaggggcgaacctggtcttgctttttattgcttgcttcttttgcaaactccaaaggccaggcagaggtcactgtactcttctagcttgatggatgattaaagagtttgtcgggggagggtgcggtcagctgaaagtttcagaggaactgggacacacgagctctgcgtgtcctttgcctgctgcccccctgacctctgggcgaatggaaagtggcgatgaatcgcaggtgccagatggtgccggctgaggccacccgcccactgcctgtgcttgactccgactcgcctgcgttggatttctagtggagtggaggtgatctgagaatgtttcttacaaagcaatgaatttggaaagacagaaaggcatggaagaaggaaggaagaaaggaaggaaggaaagaaaaaaggaagggagggagaaagaagagctctacacccagcttcctttacaaaagcgattgggagacagagcaaggcaggttttaccgtgaggtttgaggccaaggaaagagggttagaggaaggaggagttcttctgtggcccttgggtggaggtagttgccgggagcagggtcacctctctggtaaaggaggtgaacagagtgaccacttgcttgtaattttaattgcagataagtttttggatgtgcttccagcattttgtccgttggcagtaaatcagttgttgaagggaattgctcatcaacatccatcacctagaacgctggccaaatactgggagccctccccattttccataagctgatgtatttcacccttagtcatttaaactaaacacagatgtttttataggcctgattgacgcttcagccattgtgattttgctctaggttccaacgaaattctata

SEQ ID NO: 5348 - DNA, 1053 bp, Artificial sequence
  DNA replication origin
ttctggctttgattatggaagattccagggggccgggaagccccagctgtgtcttctggccccttgaggttatgaccctgacggctagaagtgctgaagcgttcctcataagctggccccaaaactttaaggagaatgctggctgaagcgcttcgtagggttgttggcagtggtatcagtgctcacctgtgcttgccagtcactgtggccttgcagtggagtgcttttgtgtcagtggggtggtgcactagtatgggtgaggtgctgacaggggcgggcacaccggtgtacactgtgctcacttgcgccagagaagaagcggcacagcaggggtgggctgctggtggacacgaggttctggaatctgtgcacgcagttgcacccaccgctgtgcggtgggctgcccacacatcagcgagggcgcagtgctggcaggggtgggcaaggcagcagagtgtgctcatgacagcagcggtggggcagtggggtgcacactcacatgcctgctgtaggaagagggttggcgaggtcggtcggcccttgcgcacacactgccaaagcagtgaggggaggctgcagtgagaagaggctgtgggtgggctggttttgtcggcagagtccggtctgctggacttctctgatggttaggcatggactgccagcgaagaagctatcatgaaggcatcagggaagcaccctggttaggcatttgatgctgcattgcaagcgggagtgatcaggctggggctccaggagaagctggcagcaggagaggctgctcagatagaaatggctctgaaacatgggcaggaccgccctgttcccaatccgactgtcacccaaatgcaaaagccacttagaggagcttggtgagccttgggggatagacatccctggccatgctccactgcagccattcccccgacaaaccttctgagctatgcccaggttggagtcctggcactggcatctctcaaagcagctctcgctgccagatcaagtggtttgtgggggtcctgaggtctcctgcaactaggattacgggggtctgtg

SEQ ID NO: 5349 - DNA, 1052 bp, Artificial sequence
  DNA replication origin
ctgggaccgctccccgcacccccggcgcacctgtctcctatcttttagccaaaatcccgcccaaaggcatgtctgccgggcactggtgcaacgccccctacccacgccctccgggctcagattcccgggttccggactccagagacctgtccgcctggcgtcccccgaccgccgagtttccgcgggcgccaccggggccctccggcggaccctcaagggcccgcaggccgcccccgcgctcagctgagacacggcagtgcgcgaagcctgggcactcacccagcgggagagggcaggaggcggcgcagcgggcggtagcggcagcctggcctcgcactctgcgctcacggctgttttcctcgttcccacttttcctggtgtaccacgatgggcgccaatgcaggtcccccaagctccgcacctccctgagggcaccgcgctgtccctgccagaaagatccttggcgcacagagcacagaatgactcgagcgggggctcgtgggttccttggcgctgtgccctccttccaggcgacagcggtgctgctggacggggttcgagccttgggctgccggtcagactttcaggttaaacagtagcgccgctctagcttttcctctgcctcttccttcttcggtcccccactccttgtcagcgcctcggtggccccgggtggaagatgcgaggcgcaagccggggcagcaggaatgtggtgtgtgtggtggtgcgtgtgatcagctgcagagccgcgctagccccgcctgtccctgccttcccccgctgctccaccagcctgaattgcacctccgagcctcagttgagcctgcagtgtctggcagctcaggaaaagcgagcccctccaatgagaagcggctctaaatctgctcccaaacgcccgccaactctccttcctcgccccctgcatcagtcagaaagcccccagtaaaaagcaaatgctgctctctgaaggaagagaagtacaatatgtctctgtaactgggcactcgtttaaacggatgcctggatttggggttgcatcataaacagagatc

SEQ ID NO: 5350 - DNA, 929 bp, Artificial sequence
  DNA replication origin
cggcgctactgtttaacctgaaagtctgaccggcagcccaaggctcgaaccccgtccagcagcaccgctgtcgcctggaaggagggcacagcgccaaggaacccacgagcccccgctcgagtcattctgtgctctgtgcgccaaggatctttctggcagggacagcgcggtgccctcagggaggtgcggagcttgggggacctgcattggcgcccatcgtggtacaccaggaaaagtgggaacgaggaaaacagccgtgagcgcagagtgcgaggccaggctgccgctaccgcccgctgcgccgcctcctgccctctcccgctgggtgagtgcccaggcttcgcgcactgccgtgtctcagctgagcgcgggggcggcctgcgggcccttgagggtccgccggagggccccggtggcgcccgcggaaactcggcggtcgggggacgccaggcggacaggtctctggagtccggaacccgggaatctgagcccggagggcgtgggtagggggcgttgcaccagtgcccggcagacatgcctttgggcgggattttggctaaaagataggagacaggtgcgccgggggtgcggggagcggtcccagggggcgggagattggggagcggcggggaggggggagggtctggtccaggcaggtaaaggcagcttcttaggcagccagcgagttggcaggtgggttgggactcgcttgtcaactcattaattttaagcagtcagtttgggggtactgcaggataatcaggagggccgtggggagtcaagaggtgacccgggatgccggtggtggggaaagaaaagaggagcctctggaagcttggaggcaaaattgcgcttgggttcctgttccttgcatccctcctggcttgagtgcgggagaacactttttaaagactcaccttggaaagaag

SEQ ID NO: 5351 - DNA, 1132 bp, Artificial sequence
  DNA replication origin
cccttaatccatttaaccctgagtggacacagcacatgtttcagagagcacagggctgggggtaaggtcacagatcaacaggatcccaaggcagaagttttcttagtacagaacaaaatgaaaagtctcccatgtctacttctttctacacagacacggcaaccatccgatttctcaatcccttccccacccctcccgcctctccattccacaaagccgccactgtcatcctggcccgctctcaatgagctgctgggcacacctcccagacggggtggtggccgggcagaggggctcctcacttcccagtaggggcggccgggcagaggcgcccctcacctcccagcgggggcggctggccgggcggggggctgacccccccaacctccctcccggatggggtggctgccgggtggagaggctcctcacttctcagacggggcggctgccgggcggaggggctcctcacttctcagacggggcggccgggcagagatgctcctcacctcctagacggggttggggccgggcagaggtgctcctcacatcccagatggggcggcggggcagaggcgctccccacatctcagacgatgggcggccgggcagagacgctccttacttcctagatgtgatggcggccgagaagaggtgttcctcacttcctaggtgggatggcagccgggcggagacgctcctcactttccagactgggcagccaggcagaggggctcctcacatcccagatgatgggcggccaggcagagacgctcctcacttcccagacggggtggcggccgggcagaggctgcactcccggcactttgggaggccaaggcaggcggctgggaggtggaggttgcagcgagccgagatcacgccactgcactccagcctgggcaccattgagcactgagtgaacgagactccatctgcaatcccggcacctcgggaggccgaggctggcggatcacttgcggttaagggctggagaccggcctggccaacacagcgaaaccccgtctccaccaaaaccagtcaggcgtggcggcgcgagcctgcaatcgcaggcactgggcaggctgagtcaggagaatcaggcagggaggctgcagcgagccgagatggcagc

SEQ ID NO: 5352 - DNA, 923 bp, Artificial sequence
  DNA replication origin
gtctggaaagtgaggagcgtctccgcccggctgccatcccacctaggaagtgaggaacacctcttctcggccgccatcacatctaggaagtaaggagcgtctctgcccggccgcccatcgtctgagatgtggggagcgcctctgccccgccgccccatctgggatgtgaggagcacctctgcccggccccaaccccgtctaggaggtgaggagcatctctgcccggccgccccgtctgagaagtgaggagcccctccgcccggcagccgccccgtctgagaagtgaggagcctctccacccggcagccaccccatccgggagggaggttgggggggtcagccccccgcccggccagccgcccccgctgggaggtgaggggcgcctctgcccggccgcccctactgggaagtgaggagcccctctgcccggccaccaccccgtctgggaggtgtgcccagcagctcattgagagcgggccaggatgacagtggcggctttgtggaatggagaggcgggaggggtggggaagggattgagaaatcggatggttgccgtgtctgtgtagaaagaagtagacatgggagacttttcattttgttctgtactaagaaaacttctgccttgggatcctgttgatctgtgaccttacccccagccctgtgctctctgaaacatgtgctgtgtccactcagggttaaatggattaagggcggtgcaagatgtgctttgttaaacagatgcttgaaggcagcatgctcgttaagagtcatcaccactccctaatctcaagtacccagggacacaaacactgcggaaggccgcagggtcctctgcctaggaaaaccggagacctttgttcacttgtttatctgctgaccttccctccactattgtcctatgaccctgccaagtccccctctgt

SEQ ID NO: 5353 - DNA, 1306 bp, Artificial sequence
  DNA replication origin
agacacccggaagtccccgccgcagcccatggtctcctgcagggcagcttcggcggaccccggagagctgggcagtcccgggagagctggggctgggctactggcaccaaggcagagggcacactccgaggtcccgggcactaggggctccctacctgcctactccgctcccgccattgctcaccttaaagaagcctttgcagccctcacaggtgcgcacgccgtagtgttggcaggccgcgttgtccccacacacagcgcacagcccctcgttggagggggagccccgcgacggcggtgagggcacctgcgtgtcgagcagctgagacgcgtggccgatctgcaggcccgggaagcccatggacgcgggcttgcgaatggggttgggcacagcgaaggtctgcccgtccaccacgtggtggctgccggcgggctccgggttcatggggacgtgcaggggcccgtcgaagcgcatctggcaactagacaccggggtgccagggggcgattgcttaaaggagaagagggagaggcgggagactggcgttttcctctgctcgatcatgtgcgtagtggccacgtagttctggtggaagttgtggagagatcccgggtcgtcccacatggggctgtgctgcacctggaagcccggggtggtgggcgtcgggggcgaggagggcttgtagtaaaccgacccggagtgcggcatcatctcctcagactgggggggcaggtggctgtgttgctggtagttgtgcatctgaatgtcttctaccttaatggaggactgctgtccggacaggggcatttggtacaagcaaggtggcttgacgtcgtagcctgtgctgtagttgtccataaaggtactgaagctggggagagaagtggtggcagtgatttcagtgttggtgaggtccatgctaaacttgacaaactctggagttaagaaatcggagctgtattctcccgaagagtggtaactgtagctctgagaagcggggctggctccttgaggcgaggacccatactgcgcctgaacacaaggcatggctggaaatgaaacagggtgataacacactcagcctggtcaactgaacactttctcccgggctcgggtacacctggagctacaccggcagcccgcggcagtcagagagcatgtaggggcgcgagaggaaaggcaggagagagagaatgctgcagaacaacagtttagggcgtggaaagactaaccaaataaagacccagagctaaaaagctactgagggtctacactcctgggtatttccaaacatctccctcatac

SEQ ID NO: 5354 - DNA, 806 bp, Artificial sequence
  DNA replication origin
caccttaagtttcccccagatgttgcggctgccgctgctgctgccgccgccgccgctgctcggcgatgccctagcgggcgcgagaaaaaaaataaaaccaggaagtgggtggggggggcgggttgtggtggcgggtgagggtgtgtgagtagggggatgaggaggggagggcgaagaatagcatattagcatgagctcggtagcgtcagcgccccgtgggcagaagcgattccatgcgaacgaaagggaaaaagtgagagtttggagagctggggagaaggaagggggtgggggtggcggtgacgcaggggcgcaggcattgacgcaccggccaggctgggcccaaaatagcagcaactccagctcagaggcgccctcccgggttcccttccccttccgcgagggagcagggcgcggccacgggaagctttccttgatccccgcggtgggccaggctcccggccgctattttcaggcagtcggaaactcaagcacaggcacgccggggtggcagttattattttttaatatagtcctaggaaaacgggggccgggagaacttgaaggttgtaaccaccagcctccatacacatactcccgtctaagtagatacattcactctgcacgcttccccctccctcattgccattaaaaacacattcagtttaggttgggttgagcctgggacaatttgaaaatgcctccccagagagctgaaaagtgtcctggagttcttaaagtgagctccaaggaagccaaacattgtaatatgatgccttattctttaataacaacctgtcgagtgc

SEQ ID NO: 5355 - DNA, 1008 bp, Artificial sequence
  DNA replication origin
accatatggcaacatgttgcattccgtatgctatctgcccatccgtgcttaagctgtcattagcaacatctgtaccttacggaaatccagctgcgccgacgacggctgacggaattgtacttggggggaaaatctagcttagcgccattaacttgagacttagagtctatctaccaggacggatggaagctttcacaattagacgagacgacacgaatgctttattaaagtttaattttgaactcccaattagcgaaagtgcattacaaatcgattgcaatttcctagaaggtgcagcaagttctctgcctgcctgccacgtgcgagacgctccacagcgagcttccccagctccgggcagcagaaaggggatggttcagagccgatctccgcatcccaggaagtccctaaaatccgcgccagcccctcctcccgcagggcgggggcgtccacggcgcgaacccgccagaggtgtagggggaagtgtggggggctggtccgcagccttcgaggggtggggcgacaggagcgagcggccgggggaggagaaaaaggcgggcggcgggagagggggcctctattatctcggcttctcgggaggagcctcatctagtcagtcacgcagaagtttctctttcgctcttcgcgctacacacccagattggcttccagcgcgcaggcgagtggggcgaaggaggggggacaggagtcccggaagggccgtccggcgttcacacccacccctgttccgctcctcccgccccaaacaaagtcccccgactctaggtccaggatacgttacctgcccggcgctcccggcccctcggtcaccgcatcccccgctgggcgcgcctggtacgggtcccgctccccggggctcacaaagtggtcgcccctggctgggcggctgggtagatgcccctctctggacatgttggggcggtttttggggtggagggaacgcgggaagtgaaagcggaggctgggacaaggggaacttactgataa

SEQ ID NO: 5356 - DNA, 1322 bp, Artificial sequence
  DNA replication origin
acggggcggctggccgggcggggggctgaccccccacctccctcccggactgggcggctggccgggcggggggctgacccccccacctccctcccggatggggcggctggccgggcagaggggtcctcacttcccagtaggggcggccgggcagaggcgcccctcacctcccggacggggcggccggccgggcggggggctgaccccccccacctccctcccggacggggcggctggccgggcggggggctgaccccccacctccctcccggactgggcggctggccgggcggggggctgacccccccacctccctcccggacggggcggctggcctggcggggggctgaccccccccacctccctcccggacagggcggctggccgggcagaggggctcctcacttcccagtaggggcggccgggcagaggagcccctcacctgccggacggggcggctggccgggcggggggctgaccccccccacctccctcccggacggggtggctgccgggcggagacgctcctcacttcccagccggggtggttgccggacggaggggctcctcacttctcagacggggcggttgccaggcagagggtttcctcacttctcagacggagcagccgggcagagacgctcctcacctcccagacagggttgcggcccagcagaggcgctcctcacatcccagacagggcagtggggcagaggtgctccccacatctcagacgatgggcggccgggcagagacgctcctcacttcctagatgggatggtggcggggaagaggcgctcctcgcttcctagatgggatggcggccgggcagagacgctcctcactttccagactgggcagccaggcagaggggctcctcatatcccagacgatgggcggccaggcagagacgctcctcactttccagacggggtggcggccgggcagaggctgcaatctcggctctttgggaggccaaggcaggcggctgggaggtgtaggttgtactgagctgagatcacaccactgcactccagcctgggcaccattgagcactgagtgaacgagactccatctgcaatcccggcacctcgggaggccgaggctggcggatcactcgcggttaggagctggagaccagcccggccaacacagcgaaaccccgtctccaccaaaaaaaaacgaaaaccagtcaggcgtggcggcgcgtgcctgcaatcgcaggcactcggcaggctgaggcaggagaatcaggcagggaggttgcagtgagccgagatggcagcagtaccgtccagctttggctcagcatcagagggaga

SEQ ID NO: 5357 - DNA, 923 bp, Artificial sequence
  DNA replication origin
cagccccccgcccggccagccgccccgtccgggaggggggagggggggtcagccccctgcccggccagccgccccgtccgggagggaggtgggggggtcagccccccgcctggccagccgccccgtccgggagggaggtgggggggtcagccccccttccggccggccgccccgtccgggaggtgaggggctcctctgcccggccgcccctactgggaagtgaggacccctctgcccggccagccgccctgtccgggagggaggtgggggggacagccccccgcccggccagccgccctatgcaggaggtgaggggcgcctctgcccggccgcccctactgggaagtgaggagccgctctgcctggccagccgccccgtccgggagggtggtggggggtcagcccccgcccggccagccgccccatccgggaggtgaggggcgcttctgcccggccgcccctactgggaagtgaggagcccctctgcccggccacgaccccgtctgggaggtgtgcccagcggctcattggggatgggccatgatgacaatggcggttttgtggaatagaaaggcgggaagggtggggaaaaaattgagaaatcggatggttgccgggtctgtgtggatagaagtagacatgggagacttttcattttgttctgtactaagaaaaattcttctgccttgggatcctgttgatctgtgaccttatccccaaccctgtgctctctgaaacatgtgctgcgtccactcagggttaaatggattaagggcggtgcaagatgtgctttgttaaacagatgcttgaaggcagcatgctcgttaagagtcatcaccactccctaatcttaagtacccagggacacaaacactgcggaaggccccagggtcctctgcctaggaaaaccagagacctttgtt

SEQ ID NO: 5358 - DNA, 798 bp, Artificial sequence
  DNA replication origin
gaggagcccctctgccgggccagccgccctgtccgggaaggaggtgggggggtcagacccccgcccggccagccgccccgtctgggagggaggtgggggggtcagcccccccgctcggccagccgccccttccgggagggaggtgggggggtcagccccccgcccggccagccgccccgtccgggagggaggtgggggggtcagccccccgccctgccagctgccccgtccgggaggtgaggggcgcctctgcccagccgcccctactgggaagtgaggagcacccccgcccggccagccgccctgtccggaaaggaggtgggggggtcagccccccgccctgccagctgccccgtccgggaggtgaggggcgcctctgcccggccacccctactgggaggtgaggagcccctctgcccggccaccaccccgtctgggaggtgtgcccagcagctcattgagaacgggccatgatgacaatggcggttttgtggaatagaacggggggaaaggtggggaaaagattgagaaatcggatggttgccgtgtctgtgtagaaagaagtagacatgggagacttttcattttgttctgtactaagaaaaattcttctgccttgggatcctgttgatctgtgaccttacccccaaccctgtgctctctgaaacatgtgctgtgtccactcagggttaaatggattaagggcggtgcaagatgtgctttgttaaacagatgcttgaaggcagcatgctcgttaagagtcatcaccactccctaatctcaagtacccagggacac

SEQ ID NO: 5359 - DNA, 2180 bp, Artificial sequence
  DNA replication origin
gctgacccccccacctccctcccggaaggggcggctggccgagcgggggggctgacccccccacctccctcccagacggggcggctggccgggcgggggtctgacccccccacctccttcccggacagggcggctggcccggcagaggggctcctcacttcccagtaggggcggctgggcagaggcgcccctcacctcccggacggggcagctggcagggcggggggctgacccccccacctccctcccggacggggcggctggccgggcggggggctgacccccccacctccctcccagacagggtggctgccgggcggagacactcctcacttcccagacggggtggctgccaggcggaggggctcctcacttctcagatgggcggagggtctcctcacttctcagacggggcggccgggcagagacgctcctcacctcccagacggggtcgcggccgggcagaggcgctcctcacatcccagacggggcggcggggcagaggcgctccccacatctcagacgatgggcggccgggcagagatgcttctctcttcctagatgggatggcggccgggcagagacgctcctcactttccagactgggcagccaggcagaggggctcctcacgtcccagacgatgggtggccaggcagagacgctcctcacttcccagactgggtggcggccgggcagaggctgcactcctggcactttgggaggccaaggcaggcggctgggaggtggaggttgtagcgagccgagatcacgccacctcactccagcctgggcaccattgagcactgagtgaaccagactccgtctgcaatcccggcacctctggaggccgaggctggcggatcactcgcggttaggagctggagaccagcccggccaacacagcaaaaccccgtctccaccaaaaaaatacaaaaaccagtcaggcgcggcggcgcgcacctgcaatcgcaggctgaggcaggagaatcaggcagggaggttgcagtgagccgagatggcagcagtacagtccagcttcggctcggcatcagagggagaccatggaaagagagggagagggagaccgtggggagaggggagaggggagagggagaactctttcaagaagtttcattatgaaggaaagcagagacgtggaaaagttcttggaagaggatattggtcaagggagggtttgttagaactagaggataatacagtgaatttctatgctgacaaaatgattaagtagagaagaggagctgatgaaggtaggagagagtggtgggtaattgtacaaataaaatttctgaagagccaggaaggaaggggatctagtgtacaaatagaatgattggtctttacttgaaacaggcacattttattagtaaaaggaaggactgcagagagaatgagtacagaggtggataagtcatcatttgggtggtgggaagatgaaatttttacctagttgcatctactttactttcccagtgaagtgtgatgatattggggtgtggaggggtgaaacaggtttgggaaaagagatttcaaatggctattttgaaacatcctggggaaatgtaataggattgtgggtcagtgtggattgcacattaatgatttgcagctatgaatttaaattgaggccagttgtggttgcatgttttttttcccaggcagtttcttcagctgtttgggtggagatgtgaaacaggcagatagttgggtttaactggtttgggggtttgccaagtaaaaatgaagcatgaagagaggagcaagggagttaagggtgcttggaagggagaaattacagtgatggacctaatttaattctcagctaggcagcaggagaagtgactgatagtgaagcaaatagtagggtcaatggactgaagggccagataatgccaagatggtggaatggaaattccagactacagtagataaactgaagaaagagaaggtggtgtttacagtgtagggtgcttgaggctggagtctgcggagttgatataaatagtggggatgcccaaatcagaggttatgataatgaggtagggtcaaacaaaggtcatcagaggtgaggtggttgaggaattggagccttcatgtagttgtagaaaacagcaatgatggccgggcctgtaatcccagcacttcgggaggctgaggc

SEQ ID NO: 5360 - DNA, 1145 bp, Artificial sequence
  DNA replication origin
tttgggataaagaaaaaggagcattaaccttgactatgcctttagctccggccacctttttaagagtaaattgctgggcaggtgggggagggctagtcacagaacgaaactataagccagaccaggtgtgaggaggggaggtgataaaaggattatagggtggaggagcggaggctgaggaagaattgggacctagctcggcctggcaaggagcagcctggggaggaggggagaggtcagattggtctgtagaaaaggaagattagaaagactcagcgacgcttggggttgggactgaggggacagatgggaggaaaagaaggaagatttgggatgagctgaattgggaacagagactagagagggaccaatgtgtaaaagaatgcctggatgtcaggcacttcagactattttcctattttatgacaagaattatttagatcttgtaggatggaaaaattgaaagtgccgttttccggctatttggaactactgttgagtttgtattggggtcaagcggcattgcagaagaaaataagatgcttagattttaggtcaggtgagagttgaagaggttttaagttcttaagaacacaggctaagggagaagaaggaggaatggaaggtggaagcttgcccatagtgaaggagggaagcccggagaaaagagtagagacacagagaaggggtggggggttcttgccctccagaaaagcagagaaggggtcgggttgcagagataccaggtcggggtgtggaaataagggatcggggtgcagagatataagaggttggggcacagaaataagggattggggcacagagatacaagaggttggggcgcagaaataagggatcagggcgcagagatataagaggtcggggcatggaaataagggatcggggtgcagagatatgaggttgggatacttgcccctcccccagaaaagtgggacttgccactcagggtgaaggagaaggggttgggggtttcttgcctgctagaaaggtggagaaggggtagagacatggagagaaggggttggggtacttgcctttccttcagaaaagcaggacttgctgctaagggtgaaggaccaaggcaggcgtccctgcgtggtctgacacctctgaaatgtgggtga

SEQ ID NO: 5361 - DNA, 1198 bp, Artificial sequence
  DNA replication origin
cagggccgcctttgcctgcctgccctgcagcagcaggcccgggcggctgcgagagggcgcagggggcggaggcgcggcaggggcgggctctgccgcccgccccaccacccgctccccgcccggctgcggggccagtggcaggagcgccgcgcaccgccagccgcagggggcgtgggatgggggcggccggggaggggggcgcccacactgactagagccaaccgcgcacttcaaaagggtgtcggtgccgcgctcccctcccgcggcccgggaacttcaaagcgggccgtgctgccccggctgcctcgctctgctctggggcctcgcagccccggcgcggccgcctggtggcgatgacccgggcgctctgctcagcgctccgccaggctctcctgctgctcgcagcggccgccgagctctcgccaggtacggtgctggtttctctcccgacgcccgcgagggtgggagctgggaggaggtctgcgggtgagcacgggggtgggggacagggggtgctccgagcaaactgaccttcggggcggacagggaagcgccagtcggattgagggggcgcgggatagggtgcagcgtgggcacctgacgtctggcagccgtaggggtagacaggtgtgttggggacgaagccgcccggaagagggaaaaggcagcagggacgtgggggaataagtagtaggggtgaggtgggtgactaatttgtgggcagtttgcagcggagaaaataggagagcgtttgtgggtgcgcgcatggctgggagctgggttcaccctgcagggacctggagggctgcaggtatgcgtcggacgcgctctgtgctaagcccctgagagctgctcaaggatggtggcatggtggtggtgggaggtggtgatttagtctgagttttaggaggcggggaataccccaaaagccgcagatgccaagctatggaggcgagagtgggagcttaaatctgtgtggtttgcaacgcacattgctttcgaggtacgatctttactcagagttcctggggaaaaaaattctggcaagcgccccagagtttataacaggtctgtgccttgataggctaaatagagccctctacccaatctagaagccagacgtttctttataatgtttactagaaagtggggcaaatgcatctttggtaaaatcataatatgctgtgactaaaagccc

SEQ ID NO: 5362 - DNA, 1085 bp, Artificial sequence
  DNA replication origin
tcccccgccgcccccgggggcaagcccagctggtccgcccgccccgcccgcggtcgtgctcccagcccgagcctctgcgcctcgggaagtttattctgcccgccctcctccccttcctcctcctcttcaccccgcctccccgccctcccccggctctttcccccgggtggctgccgctgccgccgctgccgctgccagcctgctcctcggccagccgcgccggccccagggccgggaagctcccggccccacgcaccgctccgctgcagccaccgcagccgccgccgctctgggccggccctcggcccccggctcccggccccgcagagttccgggctccctcgccggctgcaccgccccgccccgccccgcgccgccccgcgccgcgccgacctgcagcgcccggctgcctcgcactccgcctcccccggctcagcccccggccgcggcgggacccgaggtgagcgcaggtcgccggccgcgcctgctggagccgggaggactgagggaggaggtagcctagcgggagaagaggcagggatcgggggtggcagggtgggcgtctgcggtgcctccccctcgctttcattcctttctcccccaagcttgatcccctctccgtgggggaagcagccgcggaacaaaactgtcttgctttgggcctgaactgctggtgggatatggggggtgggggggcagaggcgtggagcgggggtctcaggtttgtattggggtgtgtgtgagtgcgtgtgtgtgtgtgtgtgtgttgtgaactccttcagggtgtgcgactctgacttgtaaatcgatctggccgcggggccacggggcttaccttcctagctgagcttgtagagagtaaggagatagataggcgaatttcccccaccctcaaaatatccatctcttccaagaggaattttctgctggagagacagccaataaactctgctcaactccctccctccctcggttcttcctagctgcagtttcaaaaagcttcaaagccaggaatgtgggattcatcttccgatccccagaaggcaaatgtggttacagatgttgcacggtactttgccaagttt

SEQ ID NO: 5363 - DNA, 1339 bp, Artificial sequence
  DNA replication origin
gctgcaaagagcaggagccggagcgggaggagcgggaggaggaggaggaggaagtggctgcggagcgctcggccaatgagtgtctggagctgtgattaaccaggcagcaacacatcatttcctcccggcgcggatccagggagccgggaggggagagaggaggcggcggggcggggccgtccccgcgccccctgcaggcgcccggccgagggcgagcccgccgagccccgccgagcctgaccgcgccgcccccggcgcgcctggcgctgtctggccggtcgcttggcccgggtggaagctatgagcgcgccgccagcggggctcctcggaggcggcggggcaggcccgagctgggctcctgtggccggggtgggaggagaagaggccgcgcggcacgggtgagtgcccaggtaggcgcgggcggggccgtctggacagctcccgagggcgcgcggggcaggcgggcggacgggcgggcatcccgggcccggcgactgcgggcggccacctactcgagccctgcatgtcagacttgggctggattctcagagagaagccttagcattctcatccaggccatctctgacctgccttcagatccccttccactttgctcatttccttgcaaggtctagggttatgacagagcttgccatgttcgcctttggcttccttagtaacagaaataagcatggaggggcttctgcagtgatctagccctgtcctaggcgccatgggagcttacagtggaaatgcaggaacattctccgctgcagagagtctgataacctcggtccttagatacacaaaaacaccccagtgtgctaatattacccagagcatcaaaaaggcatgcaaggatcaaattttgcatggttcctgctgagtgtaaaggaaagcactaagccattttctctgccctctagaagcttataatgtacagtcctatcacaaagcagaataaaaacatgaaacctataaatgggaatgccataaagtatttttatctctacaggttcattcatgcagagggcatttattgggtgactgcagtactgcaaaaggttgcaaaggaaatggaagatctggtccctgcaggttgggagtttacaatctaattagaaatacaaggcatatatacgtgaaaaaactagaatccccagctgtaagcaaaaggatggagtaggtgggagcatttttttcataaagagagctttgtacctgtatgattggtgaggagcaggagaggcaagttcagtaccaatcaaggcaagagcacctatatgtatccctgctctatagaatgatgtaacagggccctcattgtcacttggctgaa

SEQ ID NO: 5364 - DNA, 1168 bp, Artificial sequence
  DNA replication origin
ttcttttccctacatttcccccttttctatgcgacaaaactgccatcctcatcatggcccgttctcaatgagctgttgggtacacctcccagacagggtggcggccgggcagaggggctcctcacttcccagacgtgacggctgggcagaggggccccccaccccccagacggggccgccaggtagaggcgccccccacctcccagacagggcggctgccgggcggaggggctcctcacttctcagacggggcggccaggtagaggcgctcctcagttcccagacggggtcgtggccaggcagaggcgctcctcacttcccagatggggtggcggccgggcagagacactcctcacctcccagacggggcggccgggcagaggcactcctcacatcccagacagggcggccgggcagaggcgatccccacatcccagacgataggcggccaggcagagacgctcctcacttcctagatgggatgacggccaggaagaggtgctcctcacttcccagactgggtggccgggcagaggggctcctcacatcccagacgatgggcggccgggcagagacgctcctcacttctagacagtgtggcggccgggaagaggcgctcttcacttcccagactgggcggccgggcagaggggctcctcacatcccagaagacgggtggccaggcagacgctgctcacttcctaggcggggtggtggccgggcagaggctgcaatctcagcactttgggaggccaaggcaggcggctgggaggtggaggttgtagcgagcggagatcacgccactgcactccagcctgggcaacattgagcactgagtgagccaaactccgtctgcaatcccggcacctcgggaggccgaggtgggcagatcactcgaggtcaggagctggagaccagcccggccaacacggcgaaaccccgtctccaccaaaaaatacaagaaccagtcaggcgtggcggcgcgagcctgcaatcccatgcactcggcaggctgaggcaggagaatcaggcagggaagttgcagtgagccgagatcgcggcagtacagtccagcctcggcaacagagggagactgtggaaagcgggagatggagacgagggagagggggagaccgtggaaagcgggagacggagatgacggagaggg

SEQ ID NO: 5365 - DNA, 1263 bp, Artificial sequence
  DNA replication origin
ctggccctggcgcgtgttcggggcgagggccgagggtctcgtgggcaggagtctccgcgccctcccgcgagcccacacacttactttccagcttaggcagcggccgtcgtcgctccagggatcagggacatcggcgccgaggggtcgccgctgcggcacccgaaaaaattaaaaaagtgccgcggcggcgcggctgcccgcccctccctcccccaccggcccccgcccccggagcggctctcccaccacccccggcggcggcggtggccaacttgcccctctaccccttgcccatggtgccgcctccgcggccggcgtcgacgcggactcagccccggagccccctctactgcccagaggccgccgccgccgcccgccccgctgccagccctcccgcccggccagccccgggctcccgggaacgtcagcacgccgccgtccccgggccagctcccgccaccccattggcgggaaggagagggctggccctccccattggcccggccctcatattgaacaggccaatgggagctgcggtttcaggtcgccatagagaccgatgctgttcagcgcgagagggcctggagagggtgggtgtgagagagaaggtgtctcaggtctcgggcgcgggagggggtggcggagaggacagggagattccccagcgctggctctgaaatctggggcaggctttccttgccttactgccaatcccaactgtgcctggtagggtttgtccctggcgtcaaaggtaggaacagctgagcccttagatgtacccctgacggcgagagcccaggagtgggcgtttcacttttcctgcgtttggggagtccctgaggctatgccctttgacctttgacatgtgtgcagcttctgcttctccaggtgagtttgcaccccatcccttccatcgctgcttcctcctgacgtcactgagccacctaaatcctacttatgtttgttctctgcagccactcccccttccctggggtggatctttcctcaacgttttgggtcctcaaactcataactcttctgaaagactcaaagaggatttcctttgaggatattttggtaagggaacgaggtggcggattgtatgatagatgccaaagcgtcaacacatgagctagcctgttccctgattctcaaagcaaacctctaatctccctgtgggcagatatttattaaacacatctgtgtgtacatcccgcactatgagcttgacaggtgcatgttctttcacttgagaggttacag

SEQ ID NO: 5366 - DNA, 970 bp, Artificial sequence
  DNA replication origin
ttaccgcgcttcccctctgccgcatggagggaagctatgggaggagaggagtggaatgaggctcaccagctccgaagatgctccggtgacctctggctgcgcggcgagagctggggagggaaggcgctagggcagccgcggcgggctgtgtggactctgcccctggtgcattcctcgcattcctgcacaatctgtcgccagcccaggagccggcagcgcgcgtcccccgctgtacacacacacctgactaccgctgcgccccgagcggccacggccgccgcggcacctccactgcccgcgctcgcggtgtgtcgcactcagccaacacgcagccaaatcccggccccgccgctcgctctccgggtagcggtccaggggagagggccggcagcctcggcagcgggcggggataccagatccgccagggaggtgccgcagctccgcttcaactcctggcagggagaggaggaagcggcggcgcaggagggcagcggcgaggctcggcgctggggagccgggaggggtggagcgtgaggatccgcggccggtagagaggggcgcactaggcagaggggtgggcaggaccggcaaggagtacaggacttcggggacaaacgcaagaccgcgcgggcagcaggggcgtgggaagacggggaggggaccaaggtgcaggatctggggctagaaggacagacagccggccccgagtgctgaggagggcgggcgcccagtggtgtcgagggcgacttggggcgcgcggcggcaggcagcggggaagccgccgcgagggcgtccagcagggctcagcgcggcgctcaagttcggggctgggagctctgaatccgaacagcccagcgtgggcagaggtcgtgcgctgcgcgtacgggagaccggggagaggaatcgccgggaaaagcaaatggagggtgaaacttgtgcgcctgccggggggaggggagcagcaggcgag

SEQ ID NO: 5367 - DNA, 2047 bp, Artificial sequence
  DNA replication origin
actccgccgcgggcctgcgagcgccccgggcatggccagctgccagtgtgcggagaggtcgagagggacccggggtggagagggtgatgggagaagggaaaggcgtgtgggaaagtttctggagcgccccctcctccgccgggcacacccgggagctttccgggaataggcacagacatgttgggcgccccgggccttggtctctcggcggctttggggagtccgcaccttccttgcgcggttcccccgcgccggaccgagccggcctcccctggaaccggtgtggtgggaaccgggaacgcttggggcacgctcgagttctgggaccacccccgcccggcgcgcccgctcgccccctttcccgccttctctgtagccctcgggcttggcaagggcctgggctacgcctggtacctggcgcgggggaggcggggggaggcgcgcctggcaccgcggggtcctgggcgccccccggagtgttggggtgcgcgggtcgcgaagttgccgagagaacttaagccggaggcatggtattgccccagtctgggctgaaagtctattgctttgcttccaagaacactgcgattagcatatccacactcctttattgggggtgggggtgagttaggattagacgttgggggtttttctttaggggtggggcgctgagaagagcggtaattgtcaagattgtgagcccccttgttcttggatgcagagtggtcattttcgggggacgatatcagggcactggcttcctggaggactttggggtgcgggcgcgcagcgctgtgggtgtgcggggctcccggctttggcgcggcggctttccggaacgcctggctgggaaggaagctctaggcattgtgtggtgtgtttgcagacagaaaggtccctggaccggtgttctcaaaacttactggacttattgtgtaaagctccgggaggaaatgtggcgttggccaggtagaaacgcggcgctgcggccaaggggcggaggacgccaggctcggcaacggccttctcccagccccctcctgccagctccagatccgcgtgcctccagtgttgggaccgttctcagtggcgttgttccctgctggagttaacttgggaggtgaggagggaactttcatcttgaacttgaccccagaagcagcgtcgtccgtacaggttacaaggtaaatggaagctgagtcttaacgtgggttggaccgcaaactctggctggcgcggaaaggaagttcctggttcagaatctttgaggaaagggctcaagattgctgagatcgctcgctctggaaatgccagacacaccagactgcagaagttaatgcgtgtttggaggggtgggggtgggagaggaaaggagaaacctggttagttggcacagagggctggtatttctctgtagtggaaatgaagggagtctgcgtctctgctttcaccagatccgctaccctcttttttccttccttggtcatctttattcctgccaggctggcactcctgaggcaggggaggggaaggagaggaaagcagttgtgaagcttcctgggtcagcctggaggtatttcagatctgctactaggaagattccaggattttaacagctgcttcttgattgctgggaatgaaggagtttatgagcggctgagactacttcattatagaagtagtctgagtgttttactcatctaagctacttaaagacctcacaagggaccttccctagagtatgccagtttctgcagtttgtgtcagccagaatgcttggtgagtgttagtcaaaaagcatcataaatatatcctggtggttctgaaatgaaaagtatgtggcagtaaaggaagtatggtatctgatatccttcaggacttcctcctagggttgttcctgttacctgccaagtgaacttggttcaggcttccggactgttgtgatttgacaataagagatgggaaatagtgtcatcgattttagtggaagcaggaaaagtccacaaataaatttaaggtgagtttttatgaccctgtcttgcacatgtgg

SEQ ID NO: 5368 - DNA, 1288 bp, Artificial sequence
  DNA replication origin
ttgaccctaggagccagaagctggggaggaactcgcagtccgggcggaagagcgcgcatgcgccgcctcaggggccggtcccgggggcggggcctgttccctccgccctgggtctccacaggctttcgcggggcggggcctactccctccgctctgggtcacagcgggcgttcggggggcggggcctgttccctccgctctgggtccccgcgggcgttcgggggcggggcctgttccctctgctctgggtctccgccggcgcccgccccgccagcctcacctgcgcggcacgtgacccgcaccgcccgtgggcaccttgaaggcggatcccgcgcgcccccgctcctgcaggtgagagcggccgcgcccacgggccggctcagcggcggtggcggcaggtggggaagcgcggctgggcctgctcgcgcggggcgtctgagccctccatttcccggttctaaccgcgcagcagggcccaaccgggaccttgagtgcggcgaggcgtggttcgtgcacccttggcccggggctagggcgggcgtgtcggcgtcgggtggaaggaagccccttgcgggtgagctccctgcctcccaggcctccctcttgcctggggtcgctcagtccacagaggcccggccgctcatagaggggggcacattcctggtctttcgtgcatggggggtgtaagtggcggactttattttgggagcgctggacacctttcgggtttgctttgaatgagatgggattcatgtgtttacgctggccaactgacctggtgtgcccgggaatttactgttcgcgtgacagccgaggcccgagggaacgcccacaccgccccccctaccccaaggcaggtcctgggtaggcctgagagctttttcaaaacaaactgttcagctgacggtggcctcggtacttcccactgaatgccctggaacttgcaaagggagctgagtgcggcagagggctgggagccggagtttgtttggaaaatcacctgtgcgcacttgcacagctgggatttgcgagctctccagaaagcaccacctggtcttgattgttttcaagacagcagtacagggatagtctaccagaaattttcgtgtttggtttttaggctttattggagtttatgttcgaagaaaagaagctgaacttatcctaaaaggataagatgaagatagggaaaggcatgctccttatgccttaatatttgtttgattgattgatggggtcctgctctgttgcccaggctagagtgcagtggtgcaatcacagctcaccg

SEQ ID NO: 5369 - DNA, 1004 bp, Artificial sequence
  DNA replication origin
ctagcgcccagccctgttcatttcccacacctggcccgctccgccccggggccgaggagacgcacgtctgattggccgagggcggcgggggcggggccggggcgcccccagaggcctagacagaggtgcgggcggggcaggccgcgctcagcaggcggggcgggagccgcgtgcgcccgaggacccggccggaaggcttgcgccagctcaggatgaggacaggctgggcgacccctcgccgcccggcggggctcctcatgctgctcttctggttcttcgatctcgcggagccctctggccgcgcaggtaaccgcgggcacgccagccccgcagtccgctgggtgcctcgacgccacagctctgctgccttccagcctggggcagggctgcgcccctggggcaggtcacggctgctttgctgttggggcgggggggctctggagccggaagagtgagtcgcaggggaggtctggcagaggaagcgccccagtgccctcgggggcccggaggagggcgcggtggatgtgggaggacagggcccttctggtgcagaggggacgcggtgcaccgtagagtaggcgcacggaggcttttttggccgggtgcgctgctccatcgtcgcctctcttatataatgttgctggagtatggggttccccatctgccctcttgcgtcccgtccctcccgttctcgcttttccttcggcccttggtcaccttggccacagggccaagaggagcctccacccacagcgccaaggattccccacgattcccggatttcactgcgcctacggtgcgcatcaggaaggaagtcaggttaaataaaccatctcctccgaaagtgaccaagaccaagagtcagctatgatgccctcacccaccgcctagagcaacaaacctttcttctcattggtttatcagctccaaatgaccccgctcccccaaggctgacagcctcacggtgaagggcaggtcgcctgcttggggacctgctgcctctc

SEQ ID NO: 5370 - DNA, 1596 bp, Artificial sequence
  DNA replication origin
cccccagaaaggagagagcagggctgcaagctagaggagcggagagtgtgacccgagcagcctcactccgcctgtccccaccccaaaggcaggaatttctgggatgggcagatggcccacccctcctcctcctccttccccaagccgcagtgggtggggcgaggaaaacctccgcgactttcccgcatcccagcccagagccccgagtgtcggttcactgtggagacagcggtggcggagtgggtctccagggctctgggctggcaaggcccccggagggggtggggcgcggaggaggctacggatccgcttccgcgcggcggggccgggtgcttgggacgcggctctgggctcccgggataaggggctcccgggacaaggggctcccggagagcccagtggttagcgatgctgctgtcgccgtcgctgctgctgctgctgctgctgggggcgccgcggggctgcgccgagggtgtggcggcggcgcttacccccgagcggctcctggagtggcagggtgagtctcccagggtcggggactggatcggtacgttggggaggggggtcggggtggtcgaaggagaggaagaaggggcgaagctaggggccaagctggcgggcaagggcggccgcgtttgtaggggttcgtgtgtcagcagtcctgagcatggggggagcgggtggtgtcctgcagcctcttgtctaggcccagcaccccacttgcgcggcccggcaccctcctggctcctgcgggggtcgggcggcgggggcgggggggcttggtctcgcaggtaactcctctcggctctggcgcccggagccagcccgggataggagtgtcggagaagtttcaaaacggaaactttctgagagctgcttatttgggacggataaatgatagcaaaaagatggctcagttcgtccccttgcaaagcaagcgctcagggtctgcgtcgccacctaggagtgacccccaagccaggcctccccagtccatcccttccttaaggaaaactttttttgtttgtttgttttttgagacagggtcttgctctgtcgcccaggctgtagtgtaatggcgggatctcggctcactgcagcctccgcctcccggggtcaagcgatcctcccacctcagcctcccgagtagctgggaccacaggtgtgcgcccgcacgcccagcaaaatttttgtatttttggtggagacggagtttcaccatgttgcccaggctggtctccaactcctgggcccaagtgatccgcccacctcgtcctcccaaagttctgggattacaggcctgacccaccgcaccccgcctgaaaacatcaggccaggtgagggagagaagccccagtggctccatgaactgcgtgatctgaagcctttatgccttagtctctctcagtggaaaaacggggttcaattcagcaaacacttattgagcacctactacacatgagactcagaaggttgtgtaaagagagggaggagagatttctggcctgcaggggcccgcatttgagaatgggccacctcaggcagagaagcctgcgcctaagtgcagaagtccatatatgcaagtaggagggggac

SEQ ID NO: 5371 - DNA, 1147 bp, Artificial sequence
  DNA replication origin
agtgcggaggtcgaaggcggaggggaagtcagcgcggagctgcagcccccgccggccgccgccgcgcggcgagagggagttcccagagctgccgcggccccgggcccggccggccacctccttgcgccctccccctcgcggcgaggctgccccgcgcccgcgcccgcgcccgcacccgccgccgccgcccgcagcgatgatcttccccagcagcagtggcaaccccgggggcagcagcaactgccggacgccctatcgcaagcaggtgaggcggcggccgggatgccgcgccgaggtcggcgagccccgcgttacaaagggggccgcgctcaggggctccgcgcctcctcggagggaccggctgggcggtgaccttgtttcccaggaaggcggccgcggggactgctcggccggcgacctgagcaggggagatgccctcgccgccgccgcccgggccgggcagggtgggaagtggaggaaggggcaggggcaggagcggagagccggcgagggcagaagcgcgccgggccgggggcttcacccagctctgcaacaagtttgggtttttcccaaaacctttgtgtgtagcggagtgcggtaataagtcgtcacgctggtgtgcagtcttcgctaggaacctcagagaacctgtctgattcgtaggaaacccggaagacgtgtgtctgtgtgtgtgtgtctgtgtctctgtgtgtgtctgtgtgttcgcgcgcgcccccctcatttaaagaaaaaaaaagagaaagaaacaggaacttctactgtcactttctcaaggttttcagtagcacagggaaatcctgtgacatcctagttgcagaagatacttggatatgcctgagtcatacacatgctctttcctattttaataccgtttcatacattttttaacagattgaactcgaaagccacttcagtggttagatcacaatcccctgctgggaaaaggaatggagctgggagcttatagttgaggccttttgtttttcatctttgtttttaaaagaaggttactgaagccatgttgtgatacatctcacagagcctttcagcagcagcaataacaaaacgtagctttaaattatctaaaaaatgtgcaagtctgtttagaaaaggttaaattgattta

SEQ ID NO: 5372 - DNA, 1481 bp, Artificial sequence
  DNA replication origin
acattctgatgaatgttttctattttatacttgtgcttgataacttgcagtaaagggtcctagtgagaggagacagcaaaagggaagtcaaaacagttgtcttatgcatggagtagcagaaaatagttccaccagatacaccaattttcaatgaatgctcattatactgtgtttgatacttaatcactttaaaggacagatttttacgtaaattttgtctggcaagttcttactcgtccattgtgcacctagcactgtgcccagaataagttactttgcttttttttttttttaatgaaaagaatcaggaattacatgtgtgttttatacggttatttataataggtgaggctttccagttatctggctggagaatgttggaagagcctgagtatggaagaggttcactaagtcaccagcaggatatctaggatgaatattttttccagttccttgctgctagaaaagcctttgaatggccacagctttgccagaagacttcatttccataggggacactgttttccttagggaagccagaaggcatacgccttcactttttagacaagttaggatttttcattatcatggcagatgagcctttccaggaaggtattaagagaccagaaaccaaggaagaactctgtagtatttactgcagcgatagtattctgtaaaagtcaccgtggaacaggccaatgtgaaggatggcaagcccgtcccagtggcttatccagagaccgcaggctctgtcagtccgggctgctgtggaggccttctgcactgcacaggttcggggcttcatacgtccacggaaaggtggtcgagaaaagggacggcttgagcagccgtaggtcatttacatcgggaaacaaagggaagtccctcctccctttgtctcttttttgccgagtttctgtgtcctaagaaaacacatttgtgtcgcatctaataattaacataaggaaggattacactgttccaggttttagggagaaaggtttaccaaaccggtggccttaaatgattttcgctccttgatattatcatcttgaaggaaagctggtaaactctggcttagggataaaacaaaactttaccgatcgtatttgggtgaggggctggggagtggagagctgtttcctctgctaaaattttagcgtgtgaatcgggggatggagatttgcagaggtttgacgggagggtcgtgtgttcgttgaagtaggggtgattgtccacaccttttcttgaagagtggcgcggggggcctagttcgaaaggtgaagaagagagggaagaccgaggtgccagagtggtccccgaagcgacgaccttaaaaggggcttcgagccggggtgcaaagctgccgctggtgcttaggaaagaaccgagggggaaaaagaacagaggaggggggttggctactccgaggaatgtgcggcatgcggggagccagacccaaccattgcaccagagcgggg

SEQ ID NO: 5373 - DNA, 952 bp, Artificial sequence
  DNA replication origin
gccctgtctgagaagtgaggagcccttccgcccagcagccaccccgtctgggaagtgaggagcgtctccgtccggcagccacctcgtccgagagggaggtgggggggtcagccccccgtccggccagccgccccgtccgggagggaggtggggggatcagccccccgcccggccagccgccccatccggcaggtgaggggtgcctctgcccggccgcccctactgggaagtgaggagcccctctgctcggccagctgccccgtccaggagggagattggggggtcagccccccgcctggccagccgccccgtccgggaggtgaggggcgcctctgcccggccgcccctactgggaagtgaggagcccctctgcccggccagccgccccgtccaggagggaggtggggggagtcagccccccgtccggccagccgccctgtccgggaggtgaggggcgcctctgcccggccgcgcctactgggaagtgaggagcccctctgcccggccaccaccccgtctgggaggtatacccaacagctcattgagaacgggccatgatgacaatggcggttttgtggaatagaaaggggggaaaggtggggaaaagactgagaaatcggatggttgccatgtctgtgtagaaagaggtagacatgggagacttttcattttgttctgtactaagaaaaattcttctgccttgggatcctgttgattggtgaccttatccccaatcctgtgctctctgaaacatgtgctgtgtccactcagggttgaatggattaagggcggtgcaagatgtgctttgttaaacagatgcttgaaggcagcatgctcgttaagagtcatcaccactccctaatctcaagtacccagggacacaaacactgcggaaggccgcagggtcctctgcctaggaaaaccagagacctttgttcacttgtttatctgc

SEQ ID NO: 5374 - DNA, 1197 bp, Artificial sequence
  DNA replication origin
ggtggccgggcagaggggctcctcacttcccagtaggcgcggccgggcagaggcgcccctcacctcccggacagggcggctggccggacggggggctgactccccccacctccctcctggacggggcggctggccgggcagaggggctcctcacttcccagtaggggcggccgggcagaggcgcccctcacctcccggacggggcggctggccaggcggggggctgaccccccaatctccctcctggacggggcagctggccgagcagaggggctcctcacttcccagtaggggcggccgggcagaggcacccctcacctgccggatggggcggctggccgggcggggggctgatccccccacctccctcccggacggggcggctggccggacggggggctgacccccccacctccctctcggacgaggtggctgccggacggagacgctcctcacttcccagacggggtggctgctgggcggaagggctcctcacttctcagacagggcggctgccgggcggaagggctcctcacttctcagacggggcggttgccaggcagagggtctcctcacttctcagacggggcggccgggcagagacgcccctcacatcccggacggggcggcagggcagaggtgctccccacatctcagacgatgggcagccgggcagagacgctcctcacttcccagatgtgatggcggccgggaggaggcgctcctcacttcctagatgggatggcggccgggcagagacgctcctcactttccagactgggcagccaggcagaggggctcctcacatcccagacgatgggcggccaggcggagacgctcctcacttcccggacggggtggcggccgggcagaggctgcaatctcggcactttgggaggccaaggcaggctgctgggaggtggaggttgtagcaagccgagatcatgccactgcactccagcctgggcaccactgagcactgagtgaacgagactccgtctgcaatcccagcaccttgggaggccgaggctggcggatcactcgcggttaggagctggagaccagcccggccaacacagcgaaaccccgtctccaccaaaaaaatacgaaaaccagtcaggcgtggcggcgcgcgcctgcaatcgcaggcactcggcaagctgaggcaggagaatcaggcagggaggttgcagtgag

SEQ ID NO: 5375 - DNA, 1054 bp, Artificial sequence
  DNA replication origin
agcaagccgagatcatgccactgcactccagcctgggcaccactgagcactgagtgaacgagactccgtctgcaatcccagcaccttgggaggccgaggctggcggatcactcgcggttaggagctggagaccagcccggccaacacagcgaaaccccgtctccaccaaaaaaatacgaaaaccagtcaggcgtggcggcgcgcgcctgcaatcgcaggcactcggcaagctgaggcaggagaatcaggcagggaggttgcagtgagccgagatggcagcagtaccgtccagcttcggctcggcatcagagggagaccgtggaaagagagggagagggagaccgtggagaggggagaggggagaggggagaggggagaggggagagggcttttttctttttttccctgagacagagtctctgttgcccaggctagagtgcagtggcgtgatctcggctcactgcaagctctgcctcctgggttctcaatactttcttataattgtgaacataaaggatttatccttctccattaggaagcctgaccacatgaacttcatctcctatctgaggcaggacccaacatccctggcctcaagaaacaatgcacaagaacaattctgacacctaaaacgaatccagcatccctgacttgatgatgcttccacctcagctccaccttcagcatacacttaccaactgatctttcatccatcgtttgactcccaagctgaagaacacctcaaataccccaggaaggatctccatgtaccaccttctccactggatgaggcatgagggtcgccatatttactgctagcaaagcctgtccccatctctcccccaccctcaccaaaatctagtcactctaaaatggcctctccggtgatgtccctagatctgctggcacagaagtggaaatatacagtactttccatttccatttccttagtaggttgttgactcgaggtcactctctgtaacattctttctagggattcttatagcacagacgtatttgtgcacattggaggcagctatcaccttctcccaag

SEQ ID NO: 5376 - DNA, 1240 bp, Artificial sequence
  DNA replication origin
gtttcagagagcacggggttgggggtaaggttatagattaacagcatcccaaggcagaagaatttttcttagtacagaacaaaatggagtctcccatgtctacttctttctacacagacacagtaacaatctgatctctctttcttttccccacatttcccccttttctattcgacaaaaacgccatcgtcatcatggcccattctcaatgagctgttgggtacacctcccagatggggtggcggccgggcagaggggctcctcacttcccagacggggcggctgggcagaggcgccccccacctccctcccagatggggcggctggcctggcgggggctgccccccacctccctcctggacggtgcggctgcccggcggagacgctcctcacttcccagtgggggcggctgccgggcggaggggctcctcacttcccagacggggcggctgccgggcggaggggctcctcacttcccagacggggcagctgccgggcggaggggctcctcacttctcagacagggtggccgggcagacacactcctcacctcccagacagggtggcggtcgggcagagacactcctcagttcccagacgggatggcgaccgggcagaggcactcctcacatcccagatggggtggcggggcagaggcgctccccacatctcagacgatgggcggccaggcagagacgctcctcacttcctagacaggatggcggccgggaagaggcgctcctcacttcccagactgggtggctgggcagaggggctcctcacatcccagacgatgggcggccaggcagagacgctcctcacttcccagacgggttggcggccgggcagaggctgcaatctcggcactttgggaggccaaggcaggcggctgggaggtggaggtcgtagcgagccgagatcacgccactgcactccagcctgggcaacatcgagcactgagtgagcgagactctgtctgcaatcctggcacctcgggaggccgaggcaggcagattactcgcggtcaggagctggagaccagcccggccaacacggggaaaccccgtctccatcaaaaaatgcaaaaaccagtcaggcgtggctgcgcgcgcctgcaatcccaggcactctgcaggctgaggcaggagaattaggcagggaggttgcagtgagccgagatggcggcagtacagtccagcctccgctcggcatcagagggagaccgtgcaaagagggagac

SEQ ID NO: 5377 - DNA, 908 bp, Artificial sequence
  DNA replication origin
acctgcgtacagcactgtgaagattgcatgaagtgattcccatagagtgcttagcacccctcgtagattccacaaaaagagtgtttcctctgtgcctggtatacagcaggtggcagttgtcattcaggatggcagcaagtgctggtatggttggtgtggtcagcagggtgaagggtgtatgctgcagagtggagggggtgagaaaggaatctgcaaaagaaggagggtgggcttgaggtggggcttgtttgtaagtcatactgagggcagcagggagtcctgtggcctcatcaggttggagatgtatagagctgaaaatgagaaatgagctttggtgaaggggagagccacatttagcaccaagcagggcaggtattctttccattcatcccccattttttaatttttttttagtatttattgatcgttcttgggtgtttctcagagagggggatttggcagggtcacaggacaatagtggaggggaggtcagcagataaacatgggaacaagggtctctggttttcctaggcagaggaccctagggccttccgcagtgtttgtgtccctgggtacttgagatgagggagtggtgatgactcttaaggagcatgctgccttcaagcatctgtttaacaaagcacatcttgcaccgcccttaatccgtttaaccctgagtggacacagcacatgtttcagagagcacggggttgggggtaaggttatagattaacagcatcccaaggcagaagaatttttcttagtacagaacaaaatggagtctcccatgtctacttctttctacacagacacagtaacaatctgatctctctttcttttccccacatttcccccttttctattcgacaaaaacgccatcgtcatcatggcccattctcaatgagctg

SEQ ID NO: 5378 - DNA, 1256 bp, Artificial sequence
  DNA replication origin
cgcgcggcgaacccccgccaccgccgggcggagttgctggaaggttgctaactatagcgctggcctgggcagagccgggcggcgcgcggggcggcggcttccctgggagcggagtgcggggatcgggttacagaaagccgcggggggagagactagacaggaaagagccaccagccccttcctggcccggccagcggggagggtcgtggggtcgagcggcgcccctcgccgagccctggctggccggcggccgtcgcctggtgtgcgcgtctggatccgctggtggcccggcttttcgaccccttctccaagggcctcgccctgtaagctgtaactcttcgctcccctcgccgtggcgcggagcctcccgccccccagggacgcccctccacctcccgcgcacgcgatgactggggctggaggggcggcggggccgggatattttcctccccgcctccggccctgagcgcccgcccctcgcctctgatctttgtgcggtgtggcacttcacctggttactgatttctacttttacgctggtgttttgggtagaaaagtggccaaagttcactcgcgttcattgatgtcccttctaatctctagaggttttgcaaaggagggacaatgggcagatttcagtgcagagaaagaagtgacttcgtatttggttaaaaaagaaacaaaaacaaaactagcttatatgtttgccacagatcgatttccaatgttgctttttaaaaagtgacctcggcacactcttgggtaacaacagttgatgacatgtagccatacaaattgcgcctggctttctagggaccctgggtactttgttagtgggcctatcttatttttacaataagaatttgatgcctcccgaactcatttaaaaaaattatttgggccatgaagactggaaatttcactgctttggaagcagccgccagaatttgggagggtggaagttggacgcagcagccttcttcagccattaacatctatcacaactctgggtgcccttctagatcacaaaagaatcaggtatggatgcagtgtccgaactttctttgggaggttgtaatcatgctctgcttgctggtagttgggcatttccggcctggtacaaagaatctctgattcagccttttctttcttagaatgtgtgtggtccacgttttcatgtacttacgacatagccctgtatttgtctacgtaaaaaggacacttgtcagtttcgagaccagaaatgtcctagcaat

SEQ ID NO: 5379 - DNA, 683 bp, Artificial sequence
  DNA replication origin
gtggttaaaactcagccctcacctccagcgggtcccgggctcggcggcgcccaggccccgcccccgcccgcccttcccccacggcctcggaacgccagcccctctcctctctccacatcgggcgcacccaccccagatgccgcctggcaccaagcgcagccgccgctgccgcactttccacttgtattgatcacctctcagccccgcgcagccggctcgcccgagcggaccgcggccagcgcgccagcccttggcagccccggagcagtcgggctccgggaggaaactccttgggagcgccctgtccggggtgccctctgcgctctgcagtgtctttctttctgcctgggaggaggaggaggaggaggaagaggaggaggaggaggaggaggaggaggaagaggaggaggaggaggaggacgtctggtcccggctgggaggtggagcagcggcagcagcagcagccgccgccgccgccgccgctgccgccgccgccggaaagggagaggcaggagagcccgagacttggaaaccccaaagtgtccgcgaccctgcacggcaggctcccttccagcttcatgggcaaagtgtggaaacagcagatgtaccctcagtacgccacctactattacccccagtatctgcaagccaaggtaaaggggcgccggggagaggtgacggcc

SEQ ID NO: 5380 - DNA, 1258 bp, Artificial sequence
  DNA replication origin
gcagaaagaaagacactgcagagcgcagagggcaccccggacagggcgctcccaaggagtttcctcccggagcccgactgctccggggctgccaagggctggcgcgctggccgcggtccgctcgggcgagccggctgcgcggggctgagaggtgatcaatacaagtggaaagtgcggcagcggcggctgcgcttggtgccaggcggcatctggggtgggtgcgcccgatgtggagagaggagaggggctggcgttccgaggccgtgggggaagggcgggcgggggcggggcctgggcgccgccgagcccgggacccgctggaggtgagggctgagttttaaccactcctcacctcccaggctcgcggttggacgggcggaagccctgtgagtccagatcgctttgtgtcgggggtggggaaatgggagtgggagtgggggtggagggggaatgcggggggacccagcttaagaactgcagggcgggcacctcttttgctttcccgagtttttatcttcgtaagggggaggggaaataagggaaaagaggaaatctgattaatcgttcacttcccaccgcccagtaattttttttcacaagggaaggaaaatgatttaatgcccaacaaagctggagtctggacacctgggttctgttcctcccacccacccccgacccggggccacaagactaatctaggtgaccttgggagggttagcgtccttcggtttggttttcccagatgtgagacgtgaaatcatgccccttgcacaaggggaggcaaagcacatacatacatacacacacacacacacacacacacacacccctcacaacatatagacggatccttctaagagggggatgccgcaaagaggcagaatgttattagaggacacaatatagacatcagcttttctctgcctctttctaatgctgccagacagtctgtcaactcccactcaggagcaaggaaactccctgagtttggaatattttaaggccattttgaaagtcacgctggcatattgttgcagtgtgcttcagtgacatataaaatcaatctctctttctgcctctctccatctcctaattgtcacagctctagacagcctcagaccagcagtggttcagttcactacataactagatataatttaatggaattaattggtccccgaagctgcctgcagaagacttttatattccagctcaaaaagagagctaataccaaaatgtacatacggatagcataggt

SEQ ID NO: 5381 - DNA, 1275 bp, Artificial sequence
  DNA replication origin
ccgccgagttaacctttcgcgtatacatgtgtgcatttatctgtatatgggaaattgggtgtctgtgcgtgagcggggggcgggctggcagttttgcgggaaacactgcttccacgccgagagaactcgcttctcctaaagatatttttgggaagggaggagttgcagagagggacgggaggggagagttggggagacctcaattaatgctttaaagatctcttagaaattaacaaactggggagtcttggaatctgctgtcagaagcgtgttttcccctctctcctctaacaagcactgacagtctaattactgtagctacaagcagctgtcgaggcagcagcccgggagaggaggcgccacaggctgggcgcgcccggccggcccctgcgcccagccgaaccgccgaagcacggcccgactcggggaaggactcagggaggatggagaggggcaaggccccgcgcccgagaaccccggcgggcctgcgagccagcggacacgcttattgtttccttaagtctttaccttgaaggttaaaagatgtgacgaaaggaggggacgtggggggagtgggaagaaaatcttctaagcttctatccaccccttttctacctcctcgagctctccctccccccgtgttggtaaaataaccacgcaacccggggctgagggggcggggtgagccaggctggagtgtaagaaagcagatgtccccgctggcagcagcctcagcctccggggaaagctgcaccgggggggccctcccgaggacattcacctcccacttctcaggcatcccgctcacaactgcctcgcctcggcgggggtggttttttcagactcggcgtttcgcgtgtgcagcttttttacctgggagctgttcttacccggccacgcttagcagatgccaaaagccagaccctgcacgactcagtcatgagacagagggagagacctggcgggtgcccactccacctttagagcggtgacccgcgctccctctgtagagcagggcagggggctgctctccaggctgcctttcctgtggccccaaagggtctatgtccctcaccacgtggagcttagggtgccgctggaatccagaagaaaaccgagtttgctagtcctgctaaaagtggtgggggcggggaaaggatgggctggggaggaaggtcaatggtacactttaatttgagtcaccttctgggacacggagtttcctctggttgtcagcaagctagtagatgtcaactgtgttgagagaaagtcttc

SEQ ID NO: 5382 - DNA, 1206 bp, Artificial sequence
  DNA replication origin
tcggggtggcggccacgctcgggcagggcaggagatctgcgctcagtcctggagcccttcttggcctttgtggccctgtcactcttttcacccctggctggccctagccctttctgaattcgcctggactcccagtcgcgctcgctggccgacgcggtcgattcaccagacagcgagtgggcgtgagaacgcaggctcttcggccgcttccccagtacgtggatcccggagcgcgggtcctcgccccaccgccccggggagtgggcgcgcggcgcaggccgagccctcgggcgagcccgcgcggggctgcactccaccgggccggcgctgggggccgcgcgggggctcctggcccgctagggactcggtggcggtggctgggttccactcgccagcggcgggaaggacgcgcgggaaagcgagggagcaggaagcgggtggcggcggcggcgcggggcccgctggaaaggagggagcgccgcaggcgggaggagggagcgcggaggagggaggccgggaggaaggagggagcgcggcaggcaggcggagggagggctgattagcatgcagcagcgctcgcgcgcccggctccattgttttaacacctcccctctcctccgcgccaatctgtcaccgttcagcaggcgaacgctgctgcctcaaatgctgctcttctcaaatgagacggataattagttgccccgcacgaatgccgcactcttctcacccctgattgctatcaccttcttgctcctggcagttttgacacctcgtaatcagcctgctgcttttctcttttcttcccgacttctgcttccctccccccgctttccttcctagtttatttatttatttattattattattttaaatgcaatcccggtgcttatttgggcgagtcctccgccgagttaacctttcgcgtatacatgtgtgcatttatctgtatatgggaaattgggtgtctgtgcgtgagcggggggcgggctggcagttttgcgggaaacactgcttccacgccgagagaactcgcttctcctaaagatatttttgggaagggaggagttgcagagagggacgggaggggagagttggggagacctcaattaatgctttaaagatctcttagaaattaacaaactggggagtcttggaatctgctgtcagaagcgtgttttcccctctctcctctaacaagcactgaca

SEQ ID NO: 5383 - DNA, 593 bp, Artificial sequence
  DNA replication origin
gaaggctggagagaagctgggagacacaggagagtccctgaggcctgggggtgaagagttgaaagacataggggaggagcaccgtgaggctcgtgagtttgtaggtgattcctgggtgtggagggctgactccagctgaaatctggggttgtttggagagtagctgggagacacaggagactccccgagagctgggggtgagctgctgggtgatggcagtaggaacatgtggtatattattgatgaacgtggtgactctgaagaatcctcagaggaggacacgggagagcccaatggcttcattgattgcccatcacggagaggacagggaaatgggagcttgtgggatactggtgatgacagaggtgagtgtggtgaagccctaggggatggtgaatggtagctccggatccctggtgaggagcttcctcttaagtctgagtatctgagaggggagagggagaagctgggtgaggctagcatggatcttggggagtccgggctgggggaccgttcataagaagagccagacaagaccctactgttcttaggtgcagacatgattaggaaacctgcagctcccagggaccccc

SEQ ID NO: 5384 - DNA, 743 bp, Artificial sequence
  DNA replication origin
agtgcagtggcatgatctcagctcactgcatcttccacctcccgggttcaagcaattctcttgtgtcagcctcccgcgtagctgggactacagtacagacgcccgccaccacacccagctaatttttgtatttttagtagagatggggttcacatcagcagtgtcactgccaggaaggagggtcatgctagccatgtcaccggtagtgtggcccgcagggacgccgacatgctggagtgtagtgccagcatgggctctggcagccacgtgggccagcaggagggtcccgctgcatagctgtggggtgaggatagactgggcggtgatatcggccattacaggggcctcttctgctggcaagagtgtgacagtagcaagtggatggacaggcctgtgtgtgaggatggaatgcaggaggggcttttctgcggctgggtgtggggccctcaccagaaatgtggagaaatggccaggtagctgcatcatgttggctggtagattggccagggcttcgaactgaaggacaataacggggagtagctgtcaggccctgggagtgtctgagtgtaagtggagatgggtttggggtcactgagggatgcgtgggagccatccctgtatagatacaggtcatagggagatagtctcgtgaggcctgtgagtgtccagggttcccctgtgtgcctggggctgactgtggcagaaatctggggaaggctggagagaagctgggagacacagga

SEQ ID NO: 5385 - DNA, 1128 bp, Artificial sequence
  DNA replication origin
aagtgttaagaagataaaaagacaagcccatgtactgggagaaaatatctgcgaattatatatttgataaagaacttctattcagaacatataaagaactcataaaattcattaacaaaggacggggcgcggcgggatccctcggggtcgcagctggccggcactcggcggccgcggcgcgatggaggcgccggccgagctgctggccgcgctgcctgcgctggccaccgcgctggcccttctgctcgcctggctactggtgcggcgtggggcggccgcgagcccggagcctgcccgcgcgcccccggaacccgcgcccccggccgaggccaccggggccccggcgccgtcccgcccctgcgcccccgagccggcggcctcgcccgcggggccggaggagcctggagagcccgcggggctgggggagctcggggagcctgcgggaccgggggagcccgaagggccaggggatcccgcggcggcgccagcggaggcggaggagcaggcggtggaggcgaggcaggaagaggagcaggacttggatggtgagaaggggccatcatcggaagggcctgaggaggaggacggagaaggcttctccttcaaatacagccccgggaagctgaggggaaaccagtacgagaagatgatgaccaaagaggagctggaggaggagcagagaactgaagaataacgaagttatccttagcgtcctcctaaaggcttttccttttggcatcttaaaagcttgagagataaaatggaaaccccagagaggagtctgggcaggcgcccagggtgcatgctgcctccataaatctgctgagctctagaccctcaatcaggacttgtcccttggctagcaggatcctgagaacacctttggccctgccctgtgtagagatgttcatgtctgttcctgtgggtcactttgttaagctgaagagttttaagagttagagctcagaccctggactgggatttttcttaccactcaaacttgctatccacacaccctgcacaccttagataaaacgaacattttaaaagcagagttcactttcactccagtcccccctcttttgccctcactgaagccaaaccacagaagactttgaggaatgagag

SEQ ID NO: 5386 - DNA, 1108 bp, Artificial sequence
  DNA replication origin
ctcgcccaggtagggattggcgccggccatgcgcgcggcggccgcggcgctgttgggccagcagggcagcaccgagcccgacttggtgccgcagtactgcgggggactgcgggcgccccagcccgacgggtcggcgtagtagccgagcgggcggccagtgcagcctgcagcctgcagcggcagcgccttcacgcccgccgccgcgtaagagagcagcgtggccgcgttgcccgcgaagtccgtggccgtgtcataggccgaggccgcgaagtccagccggttgttggccggcgtcacaaaccagcgttgcggcgagggcgcgcccgggtcctcggcctgctgcggcgacagcagcccgttggtgtgcggcacgctgcggtccgtacccggcccggggcccgcgcccgcgcccgggtggaagcgggccttggcgtagttgctcacgaactggtcctgcaggaaagagccggccatggcgtagcgggccccgggcacgatctgcgagcgcggcgagtcgttgggcgagggggtcaggcggtccatgtcacagccggtgtagatcctgcggggtagggagagagagagagagagccgaggggtggcgcggaggtcccttggggtgggggtgggggcagaagggaaggccacctccacttttcgcccacccccacaccctccatctacaaacttgcagtccaggatttcctggagaatacaagaggccacagacctctatcattcccaaaataaatcacggaattatagaggagccaatctgtctatgcagggacctgagcaagatacagaccatcaagggaacgacttccctcttctcttgctctctctcgtcaagtgtactggggtactgagagaggggcacaagcaaggactttcatcccacttctccaacatatgtgtgcacattaaggcagatttacctagggagtaagatgctctttgcccagtgggcctttcctctgcggtcagtttatgagtgaaatttctaagcaaggtactcactcctccacccttttaagacctcctgtgtccatttgattgttcaggtgatatctctcctttttctagattgtttcagaaacccctagga

SEQ ID NO: 5387 - DNA, 932 bp, Artificial sequence
  DNA replication origin
tttgtgacgccggccaacaaccggctggacttcgcggcctcggcctatgacacggccacggacttcgcgggcaacgcggccacgctgctctcttacgcggcggcgggcgtgaaggcgctgccgctgcaggctgcaggctgcactggccgcccgctcggctactacgccgacccgtcgggctggggcgcccgcagtcccccgcagtactgcggcaccaagtcgggctcggtgctgccctgctggcccaacagcgccgcggccgccgcgcgcatggccggcgccaatccctacctgggcgaggaggccgagggcctggccgccgagcgctcgccgctgccgcccggcgccgccgaggacgccaagcccaaggacctgtccgattccagctggatcgagacgccctcctcgatcaagtccatcgactccagcgactcggggatttacgagcaggccaagcggaggcggatctcgccggccgacacgcccgtgtccgagagttcgtccccgctcaagagcgaggtgctggcccagcgggactgcgagaagaactgcgccaaggacattagcggctactatggcttctactcgcacagctaggccgcccctgcccgcccggccccgccgcggcccggacccccagccagcccctcacagctcttccccagctccgcctccccacactcctccttgcgcacccactcattttatttgaccctcgatggccgtctgcagcgaataagtgcaggtctccgagcgtgattttaaccttttttgcacagcagtctctgcaattagctcaccgaccttcaactttgctgtaaaccttttggttttcctacttactcttcttctgtggagttatcctcctacaattcccctccccctcgtctttctcttacctcctacttctctttcttgtaatgaaactcttc

SEQ ID NO: 5388 - DNA, 1041 bp, Artificial sequence
  DNA replication origin
ctcttaagtctcgcatacttccacagcgccgttccgccgccatgtgccaccgctcctccggtccgagattatgtaacgaagcccggcgcccgcgagcctgccgtacccgccaccgccagcgctcgccccctcgagccccatccgttggccccgcgcacgcccggcctaggcccggcgctcgcggggcagaacccccgccgccgccgccgccgcgggcccaggccgcgcctccttcttttcaaagtctgaatgatatttcttttttttttttttttttttttttttgagacagagtctcgctctgtcgcccaggctggaatgcagtggcgtgatttctgctcactgcaagctccgcctcctgggttcacgccattctcctgcctcagcctccggagtagctgggactacaggcgcccgtcaccacgcccggctaattttttgtatttttagtagagacggagtttcaccacgttagccaggatggtctcaatctcctgacctcgtgatccgcccgcctcagcctcccaaagtaaggccgaatgatatttcattatatatgtgtgtatcacattttctttctttttttttttttttttgagacaccgtcttgctctgttggccaggctggagtgcagtggtatgatcttgtctctctgcaacctccacctcccaggttcaaagtgattcttcggccttagccacatgagtagctggaattagaggcatgcaccaccagggtttcatcatgttcgccaggctggtctcaaactcctggcctcaagggacccacctgcctcggcctcccaaagtgctgggattacaggcatgagccaccatgtccagcctacattttcttcatctattcagcagcaaacactttgtttccatgtcttggctattgtgaataatgttgcaatgaacatgggagtgcagttatctctttgggatagtgattttattcttttggatatatacccagaagtaggactgcttgattgtatgatagttcttttttattttttaactttgtgagaaacctcc

SEQ ID NO: 5389 - DNA, 1233 bp, Artificial sequence
  DNA replication origin
cagactcccttctccaaggtgctcagcagcagttcaactgcctgcatgttcccggaggtggcgactgtcctctgaatctgctccttcacctctgcaggcagaaaggtcaggtagtccagcacaggctccacctggatgtacattttcaccctggccctgaagcacgagatgagatagcggaaattctcgtctgtggaatacccattcgacatctttctttctcagagaagggagagggttctcccaagcagatggtgctgttgtctgcgggacaggtgaaatgtgcgtgccgctgtccgctgcccacttagagaagcagggtctaccgctctgtgcctgacaatgacgaggttgtccacagggctctcaggccggcgcgcggggctgcactcgcacctgggcaggtgggcaggcgggcaggtgggcagcggggcggcgcgcggggccgcggcaggcaggtgcggccggcaggcgcggcactttggactctgcggtgtgcgcctggggtcccggaccggggcgatcctgctgcacactcgggtaggagctttgagtccagctttctgtcaggcagttcttacagagtttgcctgactttggtttctgtttcgattctcttctcaggactttgtaaacgtaatctgcctggcggggagggagtttcctcagggagacgccaccttttggtcggggcgggtgaagagaggaggcctttggttaaggacaccgcgggaaacagaaaaggaaagcgaattctctctgacaccaagaccaacgctctagcaaagctcctccggcggatattttgttttcccagcaggttctgccttaacaataaggtcctttgtaggccaaaatgtgcagggcataaaagcatgtgatttgggactttccaaaggggaagtgaacagaaactgccacagacccggacgtgaacagggagttaccctcggctggtgaatgtaggcaggcctggctgagggtggtgagactgcgagggacaggtgagagatgaagctcagaagacatctttgcagagatgtggagaagacaggaggaagtccttcctaaaataaacctgacctcctgtgggttcccaaacactaacttgtttccctgggaatttggaggtgggttcgaaaaagtgagtaacaataaacagttaactttactgcctcatatttagattgctggtatttatgcagctttgaccaggacctggtaacagatgtg

SEQ ID NO: 5390 - DNA, 1225 bp, Artificial sequence
  DNA replication origin
gggcacagggttgggggtaaggtcagagatcaacaggatcccaaggcagaagaatttttcttagtacagaacaaagtgaaaagtctcccatgtctacttctttctacacagacacagcaaccacccaatttctcaatcttttccccacctttccccctcctctattccacaaaaccaccattgtcatcatggcctgttctcaatgagccgttgggtacacctcccagacggggtggtggccgagcagagaagctcctcacttcccagtaggggcggctgggcagaggcgcccctcacctcccggacggggcggctggccgggcggggggctgacccccccacctccctcccggatggggcggccggcctggcgggggctgacccccacctccctcccggacggggtggctgccgggcggagacgctcctcacttcctagacggggtggctgcccggcagaggggctcctcacttctcagacagggcggctgccgggcggaggggctcctcacttctcagacggggcggctgccgggcgtagggtctcctcacttctcagacggggcggccgggcagagacgctcctcacctcccagacagggtcgcggccgggcagaggcgctcctcacatcccagacagggcactagggcagaggcgctccccacatctcagacgatgggcgggcgggcagagacgctcctcacttcctagatgggatggcggccgggcagagaggctcctcactttccagactgggcagccaggcagaggggctcctcacatcccagacgatgggcggccaggcagagacactcctcacttcccagacggggtggcggccgggtagaggctgcaatctcggcactttgggaggccaaggcaggcggctgggagatggaggttgtagcgagccgagatcacgccactgcactccagcctgggcaccattgagcactgagtgaacgagactccgtctgcaatcccggcacctcgggaggccgaggctggcggatcactcgcggtcaggagctggagaccagcccggccaagacagcgaaaccccgtctccaccaaaaaaatatgaaaaccagtcaggcgtggcggcgcgcgcctgcaatcgcaggcactcggtaggctgaggcaggagaatcaggcagggagtttgcagtgagccgagatggcggcagcacagtccagcttcagctcggcatcagagggagacca

SEQ ID NO: 5391 - DNA, 897 bp, Artificial sequence
  DNA replication origin
gtctgagatgtggggagcgcctctgccctagtgccctgtctgggatgtgaggagcgcctctgcccggccgcgaccctgtctgggaggtgaggagcgtctctgcccggccgccccgtctgagaagtgaggagaccctacgcccggcagccgccccgtctgagaagtgaggagcccctccgcccggcagccgccctgtctgagaagtgaggagcccctctgccgggcagccaccccgtctaggaagtgaggagcgtctccgcccggcagccaccccgtccgggagggaggtgggggtcagcccccgccaggccggccgccccatccgggagggaggtgggggggtcagccccccgcccggccagccgccccgtccgggaggtgaggggcgcctctgcccagccgcccctactgggaagtgaggagcttctctgctcggccaccaccccgtctgggaggtgtacccaacggctcattgagaacaggccatgatgacaatggtggttttgtggaatagaggagggggaaaggtggggaaaagattgagaaattgggtggttgctgtgtctgtgtagaaagaagtagacatgggagacttttcactttgttctgtactaagaaaaattcttctgccttgggatcctgttgatctctgaccttacccccaaccctgtgccctctgaaacatgtgctgtgtccactcagggttaaatggattaagggcggtgcaagatgtgctttgttaaacagatgcttgaaggcagcatgcttgttaagagtcatcaccactccctaatctcaagtacccagggacacaaacactgcggagggccgcagggtcctctgcctaggaaaaccagagacctttgttcacttgtttatctgctgaccttcccttca

SEQ ID NO: 5392 - DNA, 1063 bp, Artificial sequence
  DNA replication origin
tccccaccttggaagcggtggacgccaagtgcactaacaaggcagaaagcgagggcgagagaagagaacaaacgaacttactttgcccttcaaatttccgaatgatggtccccagaaatgtattttgtggtgccacatgccccctgcgcacaggcatgttggccccggtcttccgaggagcgctcccccggagctctggagttctcccgggatctctcctcggctagagcccaggccagcgcgcgagccgctctttgtggcagagcatcctcttttgaaaccagaattctcttcccattagcaccacttctagacacccgctttccccaccggagtccaatccattcccctcaccttccggagggggcctcgcaccggactgccgcgggtgagagggtttgggggtggggaacgggaaggaggcggggtgaggggaggtggcgggggagggaaagagggagggagctgtgggggtggggtgggaagggggcggggagtcacaagggcaatcgatctgtttctcttctcccaaacagcgccaatttcccagtgcaaatgggcttaacctggcggttgcccagagcagtaaggaatggctgaggggggatggaagacttgtgccggttttgctggaaggagagagagaaaaggaggctgggggtcggcggggttgacgtttctatccccgccctctccccctaacacacacacacacacacacacacacacacacacacacacacacacacacacacacgctctctttatcttggtagcttgggcgccgccacagctcggattactcaagcgtgctttagcggaagccagccaagaaatctccaaaactcagtgacaaacagctactctgggaaggtgatctctacggccaccggccacagggctccgtccctgagctcctcacgccgcagtagctaaagcacccttagctgcaaggaaaacacaggtgggaaaacagtttcttaatgaggaatatttgtaagctctgttggcgctcagcaggttgaagattgacaatgaaccacctaagggtgcagatttagcc

SEQ ID NO: 5393 - DNA, 838 bp, Artificial sequence
  DNA replication origin
gttgccctctgggagcccctttctgggctggccaaggccagagccagctccctcagcttgcagggaggtgtggagggagaggcgcgagcgggaaccggcgctgcgcaccgcgcttgcgcgggccagctggagttccgggtgggcgtgggcttggcgggccccgcactctgagcagccagccggccctgccggcctgggcaatgaggggcttagcacccaaggcagcggctgcggagggtgtactgggtcccccagcagtgccggcccaccagcgctgcgctcgatttctcaccgggccttagctgccttcccgcggggcagggcttgggagctgcagcttgccatgcctgagtctacccccgaccccctccgtgggctcctgtgtggcccgagcctccccgacgagcgccgccccctgctccacggcgcccagtcccgtcgaccacctaagggctgaggagtgaaggcgcatggcgcggaactggcaggcagctccacctgcagccctggtgcgggatccactgggtgaagcgagctgggctcctgagtctggtggggaggtggagaacctttatgtctagctcagggattgtaagtacactaattggcactctgtatctagctcaaggtttgtaaacacaccaatcagcaccctgtgtctagctcagggtttgtaaatgcaccgattgacactctgtatctagctactctggtggggacttggagaaccacctttgtgtggacactctgtatctagctaatctggtggggaggtggacaacctttgtgtctagctcagggattgtaaatgcaccaatcagcgccctgtcaaaacaga

SEQ ID NO: 5394 - DNA, 831 bp, Artificial sequence
  DNA replication origin
gtggtcattgtcgccggccggggggctcgggcgtcatgggagactcggcgcgtggggagaaggggtttgcgcggcgggaggcgaggtgccggctaggcagcccgagcgctctgcaggtgtggtggcctcgccgcctgcgctcggggccccggcggctgagacgcgcggccgagctatctgcgaggcggcgggggaggggagggggcggaggaggagggtggggagaggggaggagcggccggtgggtgggggccgcgggcggcgaggcaaggcgcggagggggcggggagggcgcgagagcggctggccggccccgcgcgtggcccggggcgctcggggccactggcattgctcccgcgccgtcccatccgggacgcgaggccgggaccgctgcctcctcaggtgggcaccggggcgcgaggctgagcccagggtctgggcggccccggcgccgctggaggcggggacccagccgagcgggcgctcccgctgggcttgccgggaggaccgcaggcgggataggggtccgcgcagccctgaccctcatacccttgcattctttctgctctgccatctgagatcacctaagctgttgctgggccgccatgacagtccccaccgggccaggaggccaggacaccagagggtttgccccagtccttccccacgtgcctcttcttccatccactccgcagccaaagattggggggttgatagggagcaaggagtccaatcattatagaaaactactgagattttgagaattctcagtaaagcatgagtaaacctgaaggtgtctggaattagaaagactattagttttatggtaat

SEQ ID NO: 5395 - DNA, 914 bp, Artificial sequence
  DNA replication origin
cggcgcccgcgggctgggagccggggcccgcaggtggaagcgcacccgggaggcgggccggccggggctggagcggctcgggcgggctcttgacgctcagccagcttcgctccggcctcgggaaggcgcgcgtcccgccctgacccgccggcctctcccaccccagcagtgacgcgccgcctgggagctggagcccgcgcagcgccccgcagggcgatggacggccgaaccccgcgcccgcaggacgccccagccaggtaagcccagagcgccgcgccgcctctcaccggggagggcgaggccggcgaggacagcgaggcctcggccgtttcacctggctggcaactcgctgccctgccggcggcctgactcactgactgtcctccacgcggccggggaggctgcttcctcccggccttctcggaggccgcccgggcggagggctcgggtcgtttttggttgccttcctaccggggctgccctgggttgctacaggccagctgaatgccaggaattgggtgaggagtccgggagcaaaaattgtaacaaagggacccttgtttgggctctgggggagcggtggacgatacctgtaagtgagctcctggggagggagggcaaaagtttccttggtcatgggctgaggcccaggcaggtgagcaatgtcaaggtgactgtagggagtgggctttctgcaggcgggtggagggcgacaggagggtgtgccagctgtcagcccgcatgacagttccgggagcgagcggggtgcgcgcctctgattgggggtgtgtgtgcctgtggccaattgctggttccaaaacccagcgcaaatcagattgcaaacaactctacttttctttttatcctcacatgtttgagaagagaggaagggggctgtcacatggtgagttaat

SEQ ID NO: 5396 - DNA, 1013 bp, Artificial sequence
  DNA replication origin
cggcggaggaggagctctactgagccgcaactgtggcgacagcaaccggagtcgcagccgccgccacctgcacctggcgcctagcccacgtccagcgcctgcccggccgccgcttcccgccaccctgccctgcccacccgccaggtaagccggcggcaggcggagggagacgcggtacccctgggctgcgttagagcaggcgggaggacggccgcaggggttcacgtgttggggacagggctacggtccaggtggccggttggagacggtctcgagagcagtgtgtcggttgcccctggagagatcccgaaaggggcgccctgggccaaggggcaggtggcgcctcgggggggagcccggtcacaccctctcgcccacggtgcccccgccagtccctatggggcggcccctgaggagctggacggagaccaaagacctggtggccccggacttgcccttgggagggtcgcagcgtggggaccctgagagggagggcccggcgggaggcgggcgcgcttccactccggctagcaggttgcctgtctcctccagcctctctgcccgagaggacatcccgcgacagcgaaagacatggctttgccaggcaactttcctagccggggaccccaaacagttctaggctgcaaaccgcggccgccgagccatttaaatggtttccgagtggtttggaaagggctctgtggccgggacgcggacacccctctctctctgtttcgactctgcacttttccgggtgcgctctccaggccagagttgggcccactttcctgatcaatggagaagagttcttttcttccgtggcgggaagaaatccaactgccacgcaccaaccactcaccatctcgttagaggacctgttgacttaaggacctgcatatcgcggctatggtttgcctgtggcatatgactcaaaggttcaaaaaaacattgtttcaggatcctgccacgtctaagcttgggtgtgccaggcccagattcctttccctgcctaa

SEQ ID NO: 5397 - DNA, 851 bp, Artificial sequence
  DNA replication origin
ataggtaacccaagctttcctagtaaacatgatacaaaagtaaacacaaccaacagcatggggaccagcaattcagaaacaccgagcgggcgggctgcccagacctgggcttccccagcagggcccgcggagaccggccgtgagcagaggctgcaggcccaccccgcaacccgagcagccggggcaccgcagggaaacagcggcctagcgaagccacccgagctccctccgcgcccccgggccaaaaggccgcaaaggaactccgcccgcccgcccgctcacccgctcacccgctcacccgctcaccttcaattcctgcgagtccatggctgccccgaggccgggccgcggggctctggggattgtctcgccgcagcctaaaggaagacgcagaattcagctcccctagcctcccggagcgctctagcgccccgggccccagcgggaggggcggggtcgcgccgcgattggctgtcggagggagaggcgggcctgtgtggcggggatcgtgctgtaatggagcaggggcggcggggacccggaggtgagggctgcgagggccgcccgggagggtccgggctgggaaaagggcctccgccggagagtgcagctggaaaaggaggtcacactgggaaacggctgtctgaggacagtgggtgggcgggccgaggaaatggaattcaggaataaaggaaacggagtatgaagaaggggaagtctgtttcctgtcactggttgtaaaggaagacaccattttctgcacgtttgtctggaggcggattcccgcagtgcggctctcagcaaggctctgccggcgcgggaaaaagcggtcaactttcacgtgggcaagt

SEQ ID NO: 5398 - DNA, 1458 bp, Artificial sequence
  DNA replication origin
tccctctgcttgcggggaggtgtggagggagaggcgcgggcgggaaccgcggctgcggttggcgctggcgggcccgcgcgagttccaggtgggcgcgggctccgcccgccccgcacttggagcggcgggtcggcaccgctggcccgaggcagtgaggggcttagcacccgagccagcagctgcggagagtgcaccgggtcccccagcactgccagcctgcccctgcggcgctcgaattctcacggggcctcagccgcctcccgcgcggcagggctcgggacctgcagcccgtcatgccatgcgcgagccctcccctctcccggtggactcgtgcccagcccgagcctcctcgaagggcgccgccccctgctccacggcgcccggtcccatccactgcccaaaggctgaggagtgcgggcgcgtggcgcgggactggtgggcagctccgctgcagtctcggcgggccgggaaccgctaggtgaagccagctgggctcctgagtcaggtggggacttggagaacttttatgtctagctaaaggtttgtaaatgcaccagtcagcactctgtgtctagctgaaggtttgtaaacgcaccagtcagcaccctgtgtcttgctcaaggtttgtaaaggtaccaatcagtgctctgtgtctagctaatctggtggggacttgaagaacttttgtgtctagctaaaggattgtaaatttaccagtcagcactctgtgtctagctcaaggtttgtaaacacaccaatcagcatcctgtcaaaacggaccaatcagctctctgtaaaacagcccaattagctctctgtaaagcagaccaatcagtaggatgtgggtggggccggataagggaataaatgcaggccacctgagctagcaggggcactctactggggtcctcttccactctgtggaaggtttgttcttttgctgtttgcaataaatcttgttgctgctcactctttgggtctgcgtgcgtttatgaactgtaacactcaccgcgagggtccgcggctttattcttgaagtcagcaagaccaagaacccaccaattccggacacattaaggtctgaacgaaaatgacgtatttctggagacgaagatgttaactgctacattatattatctagctttatagtgctcatcatctggtagagaacattaaacaaaaatgcactataactagtaatacaaggactatgcaagtgtaataagtcttatagagcaggggtccccaatctgaggactgcaaatcagtgctacacagcaggatggggtatacagcaggacggggtacacagcaggaggtgagctgcggggcaggaaagggagcgttaccccaagctccacctccttgtcagatcagcgaggcattagattctcatacgaatgcaaaccccattataaactgtgcatgtgaaggatctaggctgtatgctccttagat

SEQ ID NO: 5399 - DNA, 1089 bp, Artificial sequence
  DNA replication origin
ggacagaaccttacccgcggggcgcgtggtctccggccgctgggctggcgcgcgggccacagggacgctgcagccagggtcccgaagatgctgctgctccgctgccgctgccccgatccccggcgccagcatcacttctctgccgcccccgcctcctcgtgctccgctctctcggccgcccctccccggcggccgcctgcaagaccggcagcgccggcggcgcggcggggtgggcagcagcagaggcggcggcggcgcccgcgcgagctcgcccagctgcactagccgagcagccgcggcggcagccgaagcacccgagcccggctgcgcttccccggcgatggctctggcctcggcgactgacaacgcccggcagccaatcgctgcctcgccccgctcggcggggggagaccaatcagagcggaaggcccaaggttttcctccgcctttgctcagcgggcttgtttccgggagaggcagcgacgctgctggggtttgggatgggggaggcgcgggaggggcgcaggatgggggactcgtggccccggagccttaggtgaggagggaaagccgggcccgcaggggtgggcctggggcgctttctgaccgccaggagcccgcggcttggcaggaaagggcgccgcggggtgactttgtccccagagcctcgtccctgcggttcagcgtcttggcatcgctggggcgaggggggagcggggaggggtcgcgggacccgagtacgaacggcgcggctggagagcgaatcccaggaggtggtcgccgccttgaaggaatcacgcgaacagtcaccagacagcgcccccgtccttctccctttggcagctgaaaagagtactacttcttaggcttcgaaccactcctcatagtaatcagccacgaagtgtccccagctagcaaagaggcacacggagaaatgtcggagttgtaggcagagtggaccttccccgtcttccctccaaataaacgcccctcacctccccaccccaaacgcaacaaacaaacaaacaaaaaaccttgagaatggggaaagataatttaagcagccaccctaattggttggcttccttt

SEQ ID NO: 5400 - DNA, 1265 bp, Artificial sequence
  DNA replication origin
tcccggaaacaagcccgctgagcaaaggcggaggaaaaccttgggccttccgctctgattggtctccccccgccgagcggggcgaggcagcgattggctgccgggcgttgtcagtcgccgaggccagagccatcgccggggaagcgcagccgggctcgggtgcttcggctgccgccgcggctgctcggctagtgcagctgggcgagctcgcgcgggcgccgccgccgcctctgctgctgcccaccccgccgcgccgccggcgctgccggtcttgcaggcggccgccggggaggggcggccgagagagcggagcacgaggaggcgggggcggcagagaagtgatgctggcgccggggatcggggcagcggcagcggagcagcagcatcttcgggaccctggctgcagcgtccctgtggcccgcgcgccagcccagcggccggagaccacgcgccccgcgggtaaggttctgtccggcagcgcccgcgacgcccccgggacggctggcgtggtctttgggggttacgaggcgcgtggtggccggggcatcccgacgaaggtgttgggacccggactgcgtgtcccgacgctgggctgtgctactgcccgcgcccgtgcggctccagctggtgcgttctcccttccgcgctcacagactttgacagcgcggggatggcattgtgtgagtgtggatgtggatgcgtgtgtgcgcgcgcgcggcttggggcactttgcagcgagaacagtgggtcccctctgcgtggcccgacgtccttcaaggacccaagctgggctggagtgagtaggatgctgttggctcggcgggaggtagaacgcacggagcgcacgggaaagtccaccgtggctcgtaaagagccgagcaaattgaactttattgcggtgattaaaaggagctgtggacctggcgcgccaggggagaggcgcgttccacgaggctccccaaagtcccactttgccccggggacttcggaggggaagggaagagagggaaaagtaactgttggtccacattgctgaagaaaaggaggaaagagaagttgggggtgggggtgggggtggaggttactcttgggggagtggcgacttttaggtgtctgaagccccgcgtgggaggcttgctacacttttctggagcgcagacttgaggatggagagtcccactctgaggtactggtagcggctcctcctgcctggtggcggcgtagggcgcagcgggacagcttggtggaggcagagcggggctccg

SEQ ID NO: 5401 - DNA, 1198 bp, Artificial sequence
  DNA replication origin
aacgcacggagcgcacgggaaagtccaccgtggctcgtaaagagccgagcaaattgaactttattgcggtgattaaaaggagctgtggacctggcgcgccaggggagaggcgcgttccacgaggctccccaaagtcccactttgccccggggacttcggaggggaagggaagagagggaaaagtaactgttggtccacattgctgaagaaaaggaggaaagagaagttgggggtgggggtgggggtggaggttactcttgggggagtggcgacttttaggtgtctgaagccccgcgtgggaggcttgctacacttttctggagcgcagacttgaggatggagagtcccactctgaggtactggtagcggctcctcctgcctggtggcggcgtagggcgcagcgggacagcttggtggaggcagagcggggctccgacgcccgacggcccggcgtccaggtggggccactgcctccccaggccgctttggcccgctgacctcccaggttgagacccggcctggtgcgcctctggcagctgccaaatgcctggcggctccgctttccgacaaagttcaggcccgctggggtctggtccatcagacctaggacacgttaaccacgcagagtaaccaggttagggtacccagctgcctccagagcgtttttgtttcatattagattatcttatttgataaagctgttgagagttccacccgtgctgcaaagccttccgcagaaggcgaattctttgcgctgctgcaaatggatggtgctactgggccagatccgaatctccgtagttcagtgcagtgggttctccatccctgctcaggacgcacaaacttactcttggcgattgttttctatgtggctccttgtctccgtgggagtatctgcttaggaaagttcttgaaatacctcaatactaaggagctctccccactgtctcagatggggcgaggctccggtacttgactggcgttggggttgcagcagggaatggaggtggaacatcagctccctgcctgccagctttggtaaaacaaaaattggctcaatacagggaggcggatcttgaactggggacagcatttttcttgttatgtagctccgtaatctctttcactagagggatcttttgtcccaaaacaaaacaaatcacaacacaacaaaaatacccaaaaccaaaccgcagaa

SEQ ID NO: 5402 - DNA, 904 bp, Artificial sequence
  DNA replication origin
ggtcagccgccccggccagccgccccgtcccgaggtgaggggcctctgcccagccgcccctgctgggaagtggggagcccctctgcccggccagcccgccccatccgggagggaggtggggggggtcagccccccgccgccagccgccccgtccgggaggtgaggggcgcctctgcccggccgcccctactgggaagtgaggagctcctctgcctggccagccgcccctgtccgggagggaggtggaggggtcagccccccgcccggccagccgccccgtccgggagggagggaggtgggggagtcagccccccgcccggccagccgccccttccgggaagtgaggggcgcctctgcccggccgcccctactgggaagtgaggagcccctctgcccggccagccgccccgtctgggaggtggggggcgcctctgcccggctgcacctgctgggaggtgaggagcccctctgcccggccaccaccctgtctgggaggtgtgcccagcggctcactgagaccgggccatgatgacaatggcggttttgtggaatggaagggggggaaaggtggggagaagattgagaaatcggatggttgccgtgtctgtgtggaaaggggtggacatgggagacttttcattttgttctgtactgagagaggttcttctgccttgggatcctgttgatcggtgaccttgcccccaaccctgtgctctctgaaacatgtgctgtgtccactcagggttgaatggattaagggcggtgcaagatgtgctttgttaaacagatgcttgaaggcagcatgctccttaagagtcatcaccactccctaatctcaagtacccagggacacaaacactgcggaaggccgcagggtcctctgcctaggaaaaccagagacctt

SEQ ID NO: 5403 - DNA, 1159 bp, Artificial sequence
  DNA replication origin
ttcccagcaggggcggctgggcagaggcccctcacctcgggacggggcggctggccggggcggctgacccccccacctcccccggagggagcggctggccgggcagagaggctccccacctcccagcagcggcggccgggcagaggcgcccctcacctcccggacggggcggctggactcggggctgacccccccacctcccccccggagggagcggctggccgggcagagaggctccccacctcccagcaggggcggccgggcagaggcgcccctcatctgccggacggggcggccggccgggcggggccgatccccccacctccctcccagacggggcggctggccaggcggggccgacccccccacctcccttccggacggggcagccggccggacggggggccgaccctcccacctccctcccggacgaggtggctgctgggaggagacgctcctcacttcccagacggggcggctgccgggcggaggggcccctcacctctcagacggggcggctgcctggcggaggggctcctcacttctcagacggggcggttgccaggcagagggtctcctcacttctcagacggggcggccgggcagagacgctcctcacatcccggacggggcggcagggcagaggcgctccccacatctcagacgatgggcggccgggcagagacgctccccccctcccagatgtgatggcggccgggaagaggcgctccccacctcctagatgggacggcggccgggcagagacgctccccactctccagactgggcagccaggcagaggggctccccacatcccagacgatgggcggccaggcggagacgctccccacctcccagacggggtggcggccgggcagaggctgcaatctcggcaccctgggaggccaaggcaggacgccgggaggtggaggccgcagcgagccgagaccacgccactgcactccagcctgggcaccaccgagcaccgagtgaacgagactccgtctgcaatcccggcacctcgggaggccgaggccggcggatcactcgtggctaggagctggagaccagcccggccaacacagcgaatccaaatcacaagcattcttatacaccaataacagacagacagccaaatcatgagtgaactcccattcac

SEQ ID NO: 5404 - DNA, 1761 bp, Artificial sequence
  DNA replication origin
gtacgcgtccctgcagatgggccagccgacagcctgtgccgccggggccggggccggggccggggccgcgggagctgccggggccggcgctgctgtcgcggccgccggggccgccgccgccgccgctgtcaccggggccgcctgctggggaagctggacgtgcacgggcgagccgctcggctccgccatgatgctgcggaggagagcaggaggacgcgccggccgacggacgaccttccacttgaaacttcctttgcctcgccgccgacacctctcggccggcgcacgccctccccgcccgccgccgccgccgccgtccccgccgaagccagctaggaggggagggagcaagggaggccgagctgggcggagggaggaggcagcgccggcggaggcggggaagggaggaggcggcggccgctgcgctcgccgcgcgcccagagcctagcgcgcgctgttctccgcctcggcgaggggaaccgccgccccccctctccgccgccccctcccgctcccgctccgctggcggccggggaagttcccaccaaaggagtcaggccgctttgtgtgtgctttcggggccaccggccctggttctcctcctccctccctgctcgccctgcgccttggccccagacgatcaggcttgccggaggacgccccctggggaccccgagggcggggtcgttgaacggccgccaggttctcacattcagaattctcctgccaccaaagagaacctgaagttcatttacaagttgacgagcgggatacctacatggtgtccctttgcaagacgccagttagaaaataacccaagttgtaagtttccggcgctttacttgccggtatccctttcccaccttgcctaatctaatcgcagtccttctagtttttcttagtaaatgaaacttgattccttaggtctctggctgttcagacttcattttttccaagccgcctggatcccagggaggcgatttaaggggctgtggaattagaataagacatgcaggagaggtttagaaagtttgctcaaattctacacccttaataattgccacgttagcccgtgaggacactgaggccagacatcaggcgtttctttaagagcgtatacttggtggggaaataatttattggggcatgaataaactgtgttggaagcttttaattgctgttttttcaacaccccaaaaataacctcgtctgtaaaactgctatggtaaaaccataggttttcctaattataggtgtcatatttaacagtgaatgttctctgtgttccctccgtggaggtgaccaggatccaccgttcttgtctccaactgaaacggggcagtaaaccaatagtattggtcgtttggccaagatgatcttgtctggttctcattgctaggactgctgaagaaataggtaagaataatgaggatgtaataaaaactctagggatatcatgattttgtctcccgagtgtatgtacagaaatctcactaaaatttttgaaagattattcagaagaagcccagaaatttattaggaaagttagttgtctaatcaaaacattgatgtccactgaagatgagggcacttaatctcttggagcattacaaaagttggagtaaagcagctacctcgctctggtcttgaagcagaagttcatgctgaactaagtgtacattctttgatgcggaggacttcaaaaactgtgtcttgtcatgtctgtcaagaaacagagcccttcataaacaaattctaggc

SEQ ID NO: 5405 - DNA, 1374 bp, Artificial sequence
  DNA replication origin
gttagaaaagtgaggagtaaccaggaaggagactgagaagaaatggccatgaaggaggaagaaacccagaagagtgaggtttctggaagccaagtcaagaatgttttaagacacacgacctgacaactgggccaaatgctactgacagaggtgttgtgaactgctatgaactgaatgtgtgtgtcccccaaaattcatatgctgaaatcctagttcccaatgtgatagtattcagagacagagtctttgggaggtaattagctaatgagggtagaaccttcatgaatgggattagtgcccttataagaagatagggcactaatctgtgtttcctctttctgtgctctctgccatgtgaggatacacaagaaaacagctgttttcaaaccaggaagaggatccttgccagacactggatctgcctgcatgttgatcttggacttccctgcctccagaaccgtgaggaataaattctgctgtttaagccacctagtctaagcagcctggactaagataagaactgacctttgtgtttagcagcatgaagatcacaggtgaccttgggcagtttcaatgcagcagaggagacaaatgtccaaatggaagttcaaaagaaaatgaggggagagaaattggaagcaccagtataggccattcttcagtttcactttcaagagatagagtggaaagaggggagggaagagtaaaagaaactccctctctctgtgtgtgtgtgtgtgtgtgtgtgtgcggttatatgcccactggaaaggtttagtatagcctactggcagcaccaggcagaaaatgaatgtgagaaaaatgaacaaaaatgccccagaaccatgtatacatgggccatggaatgaattcacacatggctcctgtatcaatggggaaatgcattgcgggagggaaggtgcctgggttaggcctcacaggcctaatgccttaaaggttttagattcaaaaggcagaaataatgagcctgccgagtagcacagtggaggttctcatgatgtgccaggtcaaaatgtggtctagcagccttttcagagaggttagttgagaggggtggttttacagaacgctgcagttgctatcatcatcatcatcatcatcatcatcgtcatcaagtagcaattaataatcaaatagcaattaagtgcctaattttttgtaccacctcataaatcaatataggggggcttgttccctgggggagctactttgatgagaagcagcagtataaaagaccggaaagtcaaagattggggaaaggcaggcgtggggcagaggcagaaggctcttgccaaaccatcctgcctcagttcctgatttttcaccctgcctctccaagcgcgggagtggagg

SEQ ID NO: 5406 - DNA, 806 bp, Artificial sequence
  DNA replication origin
cagcccctacctgctgacccaccgcctccgggcgcacgggaagaggactgagagccctgaaaccccagcggggcaggagccagcattctgagcatgtgcgagccagccagggggctagggcggatttggggggtcgactttaggtcgtcgccctaagcgcaaagcgaaagagcggtgagagcaggggcgggcgacactccccggagcggtgcccctgcgcccagggcgcagcgactgcgccctgccctgcgggtgtgggcgagttggccgcgtgtgtgcctcgctgtttgacgcgaagacgagccaatcagggcgggcggcccgagctgccatgtgacgggcaaggcggcccctttccccagcgcggccagagggaggagagaaccggggctcgccgcgagccttcgagagcagcggccgcggaggaggcggcggcggcgggcgggagcagcggcggcggcggcacaggctcggggccagccgggcgcgcatccccgggcgccctgcgcggtggagagcttggcgggctgcgggtgccgcaggacaggagtggacaaagcaagatggcagggatcttagcctggttctggaacgagaggttttggctcccgcacaatgtcacctgggcggacctgaagaacacggaggaggccaccttcccgcaggctgaggacctctatctcgcttttcccctggccttctgtatcttcatggtgcggctcatcttcgagaggtaagaagggctgaagcccctcctcccctccccctgcgcacacacacgcgcgcacacactcgcgcgctctctg

SEQ ID NO: 5407 - DNA, 1076 bp, Artificial sequence
  DNA replication origin
acagtgaaaccccgtctccaccaaaaaagtacgaaaaccagtcaggcgtggtggcgcgcgcctgcaatcgcaggcactcggcaggctgaggcaggagaatcaggcagggaggttgcagtgagccgagatggcagcagtacagtccagcttcggctcggcatcagagggagaccgtggaaagagagggagagggagaccgagagggagaggggagaggggagaggggagaggggagaggggagagggggagggagagggagagggagagggagagggagagggagaggcagagcaaaaaaggaccatatcttatttttcttttttcttccactgatcctaggacaattgcatatagtagttatgaatttatttgtggctttagtgaatctggcatcatattcttttggtccttatttatttattcatttatttttgcacttaaatgatgtgtctacatgataatgcatcaatttgcattgtgggttttgtccccaaatctttgacttcttgaaatgtccttatagtattgttttgctctaagaaaacatcagggctctgaatcaataattgggacaaagcagtctattcagtggtttgtaaactggattaaaaaaaaaacccaaaagaattcctgccacctatttgatgatctgtaaggaaaaccagacagttaaaatgttgcacagaaagagactagcaggttggtttgctgttcctgtcttgtttcagtttcattaactgaatccttgactattctatcaatttgacactagacagggtagagtgctccatacaatttgttacccttggctatcatcactatagtgtaaagttttggaaataagcaggtgactctaaatcttcaaaaggggactggccttgtttatgtgggcaaggtatgggaattgtagtgaactgtcagccaacttatgaatatcagaaggatgtctatccataccaaaggaatcaaaattaagtatagaaaaagtgaagcaaaaattatggataagttaaggaattgcctcttaaatttgtttgtttctttgagttcagtgaaggtggaactattaaaatgt

SEQ ID NO: 5408 - DNA, 1023 bp, Artificial sequence
  DNA replication origin
cggggggctgacccccccacctccctcccggacgtggggctgacccccccacctccctcccggatggggcggctggccaggcggggggctgacccccccacctccctcctggacggggcggctggccgggcggggggctgacccccccacctccctcccggatggggcggctggccgggcggggggctgacccccccacctccctcccggactgggcggctgccgggcggagacgctcctcacttcccagacggggtggctgccgggcggaggggctcctcacttctcagatggggcggatgctgggtggagggtctcctcacttctcagacggggcggctgggcagagacgctcctcacctcccagacggggtcgccgccgggcagaggcactcctcacatcccagacggggcggcggggcagaggcgctccccacatctcagacgatgggcggccgggcagagacgctcctcacttcccagatgggatggctgccgggaagaggcgctcctcacttcctagatgggatggcggccgggcagagacgctcctcactttccagactgggcagccaggcagaggggctcctcacgtcccagacgatgggcggccaggcagagacgctcctcacttcccagacggggtggtggccgggcagaggctgcaatctcggcactttgggaggccaaggcaggcggctgggagatggaggttgtagcgagctgagatcacgccactgtactccagcctgggcaccattgagcactgagtgaaccagactccgtctgcaatcccggcacctcgggaggccaaggctggcggatcactcgcggttaggagctggagaccagcccggccaacacagtgaaaccccgtctccaccaaaaaagtacgaaaaccagtcaggcgtggtggcgcgcgcctgcaatcgcaggcactcggcaggctgaggcaggagaatcaggcagggaggttgcagtgagccgagatggcagcagtacagtccagcttcggctcggcat

SEQ ID NO: 5409 - DNA, 1587 bp, Artificial sequence
  DNA replication origin
ccccaagctttttggcaccagggactggtttcgtggaagacaatttttccatggacagcagggtggtggtgggggagggatggtttcgggatgacactgtttcacctcagattatcaggcattagattctcataaggaatgcacaacctagatccctctcatgtgcagtttacaacagggtttgtgctcctatgggaatctaatgcagccactcatctgacaggaggcggagctcaggcactaatgctcactcacccgcctctcacctgctgctgtgtagcctggttcctagcaggccacggaccagtaccagtttgtagcccagggactggggacccctccctcatggaacctgttcgtagtttgccatgcaagcggacctgctttggatgcttctggggcagctggaggggctgcaaggtgagacccttctctgctagcagcctcttgcctgcacctaccagcctgctcactgggctcagggttggggtgaggttctggggattgaagtggagctccaagctcttttcatggtcaaagtctgtatgctagttcaggctttacctactcagagtgatcttcacttttaatgcagttattgtctgagtaatcaccctcatactcatttgacaggcactctttggcttggcactgaaagctctttttctccatcttctcagccttgttgcctaccactctccaagaggtcatcactgcttgggtcatacttattagaccctcacccatgctaagcttctgtcaagtttttgttcttttttttcttagagacaggtttcaccatgttggccaggctggtcttgaactcctggcctcaagtgatctgcctggcatggcctcccaaagtgctgggattacaggcgtgagtgatcacgcctggcctgtcaagttgttttgaccctacacacaaagcctggtctccctcttcaccttcccaaatcctgctcattcacaaagacccagtgtagtcttataattctttgtgaagacttctctgatgacaccggcctgtagtgttatttttttcgccaaagtcagttagtttttattatctccattgcttatttggaaccaaattgtctgttgtcagaggcatagctttggaatcagactgcctcagtgtaaatctgtgctccactacctactagctgtgagatttgttcaagccttgtcgtcctcatctatgaaatggggccattgataccatctcacaaagctgttgtgaggatatgtaaggtaatgcatgggaagcacttaaaatattgctggcaagttctgggtgaacaaatgctgtcatttgctttgcaggacatgaaatgatgaaataagtacaggctctggagtcacacaggtcctggggctaaatcagacttcgacattttctacctttgtggcccttgggggagttggttaatgtcactgaggctcaggttccccttctattaaataagtataaatctcacatcatacagttctgagaggatccagtggatatgtataaagctttatatattgtataacacatagtaggtactcagtaaacaatatcagctgttgttattgcatgga

SEQ ID NO: 5410 - DNA, 902 bp, Artificial sequence
  DNA replication origin
tctgcacctccgccagctcctagtggccaaaagcctgcccccacgcccgaggcatcccgttttctacccgcgccagtccccaccctccagacagtgcataaagccctttagacccgaccgccccggaacaagcatgcgggaatccagcgggcaggccccctgccgcccggcccgccccctgcactttgcagcgcggggaggagtgggcactcgaacacacgcgtgctcacacagggacactcacacaggcgtgtgcacactcacacacgcactcatacaggcgcatgcactcctaagtgtcacaccaactgacacagattcactcatacacgccagtcacacacgcgcgcacattccacagtcacacttcaacgccgacatacacagtcccctttacgcgtgcatacaagagcacactcctgtgcgcacactctcacaggcacactcacacgtgcacacgcgctgccctcgcctctccgcagggtttgccccgcacagaagccggcgaggcggctcacggggaaatctgcacggacgcagttttactaaatgagcaatggaaagaaatggacgaggaggaaagtcaagaatagagaagagaaagaaaaaataagaaatggaaaaggaaagcacaaccagacaagtaaaaatgaaggaaagagaaagaaagggaaagaggcgggggtagggaagggaaggagtaaagagcctgctggatggagatctgtgaccttcattcctggcctgatctctctaggctccttcggatatcttggtttcccctgataggatacaggctgctgagatggggtgctttgtgtttttacaaattagagagggaggtggatctttgttggggaggttggatccttatttagcaattattcagcaccacatctaca

SEQ ID NO: 5411 - DNA, 1345 bp, Artificial sequence
  DNA replication origin
gctcctcacttcccagtaggggcggccgggcagaggcgcccctaacctcccggacggggcggctggccgggcggggggctgacccccccacctccctcccggaccgggcggctggccgggcggggggctgacccccccacctccctcctggacggggcggctggccgggcagaggggctcctcacttcccagtaggggcagccgggcagaggcgcccctcgcctcccggacggggcggctagccgggcggggggctgatcccccacctccctcccggacggggcggctggccgggcggggggctgacccccccacctccctcccggacggggtggctggcggggcagaggggctcctcacttcccagtaggggcagctgggcagaggcgcccctcacctcccggacggggcggctggccggacgggggactgacccccccacctccctcccggactgggtggctgccgggcggagacgctcctcacttcccagacagggtggctgctgggcagaggggctcctcacttctcagacggggcggctgctgggcagaggggctccttacttatcagacggggcggttgccaggcggagggtctcctcacttctcagacggggcggctgggcagagttgctcctcacctcccaaatggggtcgcggccgggcagaggtgctccccacatctcagacgatgggcggccaggcagagaagctcctcacttcctagatgggatggcgggtgggaagaggcgctcctcacttcctagatgggatggcggccgggcagagacgctcctcactttccagactgggcagccaggcagaggggctgctcacgtcccagacaatgggcagccaggcagagacgctcctcacttcccagacggggtggcggccgggcagaggctgcactcttggcacttcgggaggccaaggcaggcagctgggaggtggaggttgtagcgagcggagatcacgccactgcactccagcctgggcaccattgagcactaagtgaaccagactccgtctgcaatcccggcacctcgggaggccgaggctggcggatcactcgcggttaggagctggagaccagcccggccaacacagcgaaaccccgtctccaccaaaaaaatacgaaaaccagtcaggtgtggcggcgcgcgcctgtaatcgcaggcactcggcaggctgaggcaggagaatcaggcagggaggttgcagtgagccagagatggcagcagtacagtccagcttcggccattttgggaagaagttctttatcagctcccttgaaaaagcacacgtagatcaccagtcctctttggacctccacccactgg

SEQ ID NO: 5412 - DNA, 909 bp, Artificial sequence
  DNA replication origin
gcagccgccccgtctgagaagtgaggagcccctccgcccagcagccgccccgtcagggaagtgaggagcgtctccacccggcagccaccctctccgggagggaggtgggggtcagcccccgccaggccagccgccccgcccgggagggaggtgggggggtcagccccccgcccggccagccgccccgtccgggagggaggtgggggcggtcagctccccgcccagccagccgccccgcccgggagggaggtgggggcggtcagccccccgcccggccagccgacctgcccgggagggaggtgggggggtcagccccccgcccggccagccgccccgtccgggagggaggtgggggggtcagccccccgccccgccagccgccctgtccgggaggtgaggggcgcctctgcccggccacccctactgggaagtgaggagcccctctgcccggccaccaccccgtctgggaggtgtacccaacagctcattgagaacgggccatgatgacaatggcggttttatggaatagaaaagggggaaaggtggggaaaagattgagaaatcggaaagttgctgtgtctgtgtagaaagaagtagacatgggagacttttcattttgttctgtactaagaaaaattcttatcctgttgatctatgaccttacccccaaccctgtgctctctgaaacatgtgctgtgtccactcagggttaaatggattaagggcggtgcaagatgtgctttgttaaacagatggttgaaggcagcatgctccttaagagtcatcaccactccctaatctcaagtactcagggacacaaacactgcagaaggccgcagggtcctctgcctaggaaaaccagagacctttgttcacttgtttatctgctgaccttccctccactattgt

SEQ ID NO: 5413 - DNA, 1143 bp, Artificial sequence
  DNA replication origin
cttttctattccataaaaccgccattgtcatcatggcccgttctcaatgagctgttgggtacacctcccagacggggtggtggccgggcagaggggctcctcacttcccagtaggggtggccgggcagaggcgcccctcacctcccggacagggcggctggcggggcggggggctgacccccccacctccctcccggacggggcggctggccgggcggggggctgacccccccacctccctcccgggcaggtcggctggccgggcggggggctgaccgcccccacctccctcccgggcggggcggctggctgggcggggagctgaccgcccccacctccctcccggacggggcggctggccgggcggggggctgacccccccacctccctcccgggcggggcggctggcctggcgggggctgacccccacctccctcccggagagggtggctgccgggtggagacgctcctcacttccctgacggggcggctgctgggcggaggggctcctcacttctcagacggggcggctgccgggcggagggtctcctcacttctcagacggggcggccgggcagagacggtcctcacttcccagacggggtcgcggccgggcagaggtgctcctcacatcccagacggggcggtggggcagaggcgctccccacatctcagacgatgggcggctgggcagagacgctcctcacttcctagatgggatggcggccaggcagagacgctcctcacttcccaaacggggtggcggccgggcagaggctgcaatctcggcactttgggaggccaaggcaggcggctgggaggtggaggttgtagcgagccgagatcacgccactgcacttcagcctgggcaccattgagcactgagtgaacgagactccgtctgcaatcccggcacctcgggaggccaaggctggcggatcactcgcggttaggagctggagaccagccccgccaacacagcaaaaccccatctccaccaaaaaaatacgaaaaccagtcaggcgtggcagcgcgcaggcacttggcaggctgaggcaggagaatcaggcagggaggttgcagtgagccgagatggcagcagcacagtccagcttcggctcggcatcagagggagaccgtgga

SEQ ID NO: 5414 - DNA, 1242 bp, Artificial sequence
  DNA replication origin
gagtttctgttcctctaaggtcgtggggcagccggacccgagcctggggcgaaacgggagctgaagttggcgcccaggaagagggactgggcgactacccggagtcggaccgggagtccgagcggggtcagtcagagtcggaggggaagccggagccgggccggggccagacggcgcagctcgaggtctgggtccgggtcggtggaggtcccggggtgggaccaaggaccgaatcgaggccggtctgggcgtcagggcagccctcggagcggcgatcgttgctggataaggggccgcagccaccccggcgtgggttggaaggacgcacccctgctggggcgaaaccccgaatccgtagccgtctgcccgcgactgccaagccgaccgcctgaaagggccgctgtcccgcgccttccagtggctggggtggtggtgggcaccccgatcttcctctggcgcccatgatgctgccggccgcgctgggctccggcttcctttacctgcccgaggacgaagaaggtctggaggagccgtgcgcccaggggagcccggccaaggctgagtgggcttcatgcggggccatttcaccaccaccgactcctaccgcttctccaggaggcgccccgaggccaatttcgcctccattttggtggtctcccacagcgacttatagctggaaccagatacctttgccgaagttggtaaattgggcagcctgatgcaggatctgcaggtcccaaggggaaacggaagccacatccagtaccagcaggtgtccctgaggcaccagacgctctgtgtgccccccaacccgctcctggatgcctggcaggtggacaaaacgcttgacctgagcagcatcaccttccccatctacaaccacagcgggcatcttgtcttcctgaccggcttctttggaagacacatcttgggggacagcttgggaatgggccagttacttctgcaggccaaagccatgcagctgctgtactacctgaagacccagcaccggaggacaacgtgcagagcaagcagtggctcacccatttcctccaccaatttaacaatattaacaacagtctggtcatgaagaaaattgaggtacctggcggttcaggtttacaaggaggccaagagaaggtgggagggatgaggaagacttgttcccagaaccgtaacaaaagcaccgcatgactacttcaaggggtccttgcctcaaagccgggtttgctttactgtatt

SEQ ID NO: 5415 - DNA, 933 bp, Artificial sequence
  DNA replication origin
gggtcagcccccctgcccggccagccgccccgtccgggaggtgaggggcgcttttgcccggccgcccctactgggaagtgaggagcccctctgcccggccagccgccccgtccgcgagggaggtcggggggtcagccccccgcccggccagccgccccgtccgggagggaggtggggggggtcagcccccctgccccggccagccgccccgtccgggaggtgaggggcgcctctgcccggccgcccctactgggaagtgaggagcccctctgcccggccagccgccccatccgcgagggaggtgggggggtcagcccccctgcccggccagccgcccccgtccgggagggaggtggggggggtcagcccccctgcccggccagccgccccgtccgggaggtgaggggcacctctgcccggccgcccctactgggaagtgaggagcccctctgcccggccaccaccccgtctgggaggtgtgcccaacagctcattgagaacgggccaggatgacaatggcggctttgtggaatagaaaggcgggaaaggtggggaaaagattgagaaatcggatggttgccgtgtctgtgtagaaagaagtagacatgggagacttttcattttgttctgcactaagaaaaattcctctgccttgggatcctgttgatctgtgaccttacccccaaccctgtgctctctgaaacatgtgctgtgtccactcagggttaaatggattaagggcggtgcaagatgtgctttgttaaacagatgcttgaaggcagcatgctcgttaagagtcatcaccaatccctaatctcaagtaatcagggacacaaacactgcggaaggccgcagggtcctctgcctaggaaaaccagagacctttgttcacttgtttatctgctgaccttccctccactattgtcccatgac

SEQ ID NO: 5416 - DNA, 1315 bp, Artificial sequence
  DNA replication origin
cggacggggcggctggccgggcggggggccgacacccccacctccctcccggacggggcggctggccgggcggggggccgacccccccacctccctcccggacggggcggctggccgggcagaggggctcctcacttcccagtaggggcggccgggcagaggcgcccctcacctcccagacggggcggctggccgggcggagggctgacccccccacctccctcccggacggggcggctggccgggcagaggggctcctcacttcccagtaggggcggccgggcagaggcgccccatcacctcccggaccgggcggctggccgggcggggggcatgacccccccacctccctcccggatggcacggctggccgggcggggggctgaccccccacctccctcccggatggggcggctggccgggcgggggggctgaccccccccacctccctcccggacggggtggctgccgggcggagacgctcctcacttcccagatggggtggctgctgggcggagaggctcctcacttctcagacggggcagctgccgggcgaaggggctcctcacttctcagacggggtggttgccaggcagagggtctcctcacttctcagacggggcggccgggcagagacgctcctcacctcccagacggggtctcggccgggcagaggcgctcctcacatcccagatggggcggtggggcagaggcgctccccacatctcagacgatgggcggccgggcagagacgctcctcacttcctagatgtgatggcggctgggaagaggcgctcctcacttcctagatgggatggcggccgggcggagacgctgctcacttcccagactgggcggctgggcagaggggctcctcacatcccagacgatgggcggccaggcagagacactcctcacttcccagacggggtggcggccgggcagaggctgcaatctcggcactttgggaggccaaggcaggtggctgggaggtggaggttgtagtgagccgagatcacgccactgcactccagcctgggcaccattgagcactgagtgaacgagactccgtctgcaatcccggcacctcgggaggccgaggttggcggatcactcgcggttaggggctggagaccggcccggccaacacagcgaaaccccgtctccaccaaaaccagtcaggcgtggcggcgcgtgcctgcaatcgcaggcactcggcaggctgaggcaggagaatcaggcagggaggttgcagtgagccgagatggcagcagtacagtccagcttcggctccgcatgagagggagaccgtggg

SEQ ID NO: 5417 - DNA, 1676 bp, Artificial sequence
  DNA replication origin
aggagctgcaggcgctgctggagcgggtgctgagcgccgagcggccgctggccgcggctgccggcggcgaggacgcggcggcggccggaggcgggggcggtccgggggcggccgaggaggaggccctggagtggtgtaagtgccttctggcgggcggcggcggctacgacgagttctgcgcggcggtgcgggcctacgatcccgcggcgctctgcggcctggtctggacagccaacttcgtggcctaccgctgccggacgtgcggcatctcgccctgcatgtcgctgtgcgccgagtgcttccaccagggcgaccacaccggacacgacttcaacatgttccgcagccaggccgggggcgcctgcgactgcggggacagcaacgtgatgcgggagagcgggtgagtggagccctccccgcgggcgaggcgaccctgggccggggacgtcgcgggagggcctggagcggagcactgggagcccactctgagctgtcaaggggagggtgcgggggagggtgcagccacagggggatggaggtgactgagctgtcagcggtggaaagggggtggggaggagaaggaggggagaggagagcggagagcatgtttaggaaaccgggctgtgaattttggggaagccagggtgggtaaatgatagcgagaaaagagccagtgtatggggtaggaggggagtgaggggaaatgatttttggggaagctcgtgtcgagctgtcaagtgtgtacttgttgggaaaggctgtaaagcctggttcttgggaagagacttaggttgtgatttggattggctgggaggggatgttattggggaccgtattggctcgcgggatgatgagagctggggaggtggtcttgtacgtgcagggaaggacgcttgaggaaaaggtcttctgaactgccagtgtgtctgtcactgtgagagaaggagctcttgagggttgagggaggagggaaggggaggggcctgcatgaaaagtgactgttgagctgtcagtggattatttggtatgctggaatgacatttagaattgggctactgagcagtcagttacagaataccctccataccaggagaacaaacaaaatactgagcgaaccaggaatcaagtgttaggtcttctccagttaagggcactttgttcactcactgatacgtgaacctctgtctaaaaggagacaacaaatgcccttttgacagaagcgatgcatcagatgttgggacttatgagaaaagacatttcagagtttgcagtgagttacagagagttggtacatgtagggtcgtggcttggaacatgatgtcaatgtcagggacagtctgagaaaaaaggaaaaagtgaaaggggcgattttggatgggcagtagttgaaagaatattagcaactacaggttgctatcagttattaaacttcttcaattttcaggtcttaggattaatgacagagtacaatctttttataaatggtcacctttttcttcggagtacttgtaaggttactgttactccaaaatgtttgtacctactatgtgcaagcaaggcttcttggatattaaaaatgaatgaaacattgaccaaccccttactctacttgcactggagtagaaagtaataaattccttaaacaataacttggtagctagaggagggagatgagg

SEQ ID NO: 5418 - DNA, 951 bp, Artificial sequence
  DNA replication origin
cctctgcccggctgcccagtctgggaagtgaggagtgcctcttcccggccatcatcccgtctaggaagtgaggagcgtctctgcccggctgcccatcgtctgggatatgggaagagcctctgccccgccgccccatctgggatgtgaggagcgcctctgcccggccgcgaccccgtctgggaactgaggagtgtctctgccccgccgccaccccgtctgggaggtgaggagcgtctctgaccggctgcccccgtctgagaagtgaggagcccctccgcccggcagccgccccgtctgggaagtgaggagcccctccgcccagcagccgccccgtctggcaggtgaggagcgtctccgcctggcagcccccccatctgggaggtggggggcagcccccgcccggccagccgccccgtccgggaggtggggggcgcctctgcctggctgccccgtctgggaagtgaggagcccctctgcctggccgccaccccgtctgggaggtgtacccaacagctcactgagaaggggccatgatgacgatggcggttttgtcgaatagaaagtggggaagtgtggggaaaagaaagagagatcggattgttactgtgtctgtgtggaaagaagtagacataggagactccattttgttctgtactaagaaaaattcttctgccttgggatgctgttaatctatggccttgccccaaccccgtgctctctgaaacatgtgctgtgtccactaagggttaaatggattaagggcggtgcaagatgtgctttgttaaacagatgcttaaaggcagcatgctcgttaagagtcatcaccactccctaatctcaagtacccagggacacaaacactgcggaaggcggcagggccctctgcctaggaaaaccagagacctttgttcacatgtttatctcctgaccttccctccactattgtcctat

SEQ ID NO: 5419 - DNA, 1419 bp, Artificial sequence
  DNA replication origin
tttctattccacaaaaccgccattgtcatcatggcccgttctcaatgagctgttgggtacacctcccagacggggtggtggccgggcagaggggctcctcacttcccagtaggggcagccgggcagagacgcccctcacctcccggacggggcggctggccaggcggggggctgacccccccacctccctcccagacggggcggctggccaggcagaggggctcctcacttcccaggaggggtggccgggcagaggcacccctcacctcccggacagggtggctggccgggcgggggactgacccccacacctccctcccggacggggcggctggccgggcagaggggctcctcacttcccagtaggggcggccaggcagaggcgcccctcatctcccggacggggcggctggccaggcggggggctgacccccccatctccctcccggacggggcggctgccgggcggagacgctcctcacttcccagacagggtggctgccgggcggaggggctcctcacttctcagacggggcggctgctgggcggaggggctcctcacttctcagacagggcggttgccaggcagagggtctcctcacttctcagacggggcggccggggagagacgctcctcacatcccggacggggcgacagggcagaggcgctccccacatctcagatgatgggcggccgggcagagacgctcctcactccccagatgggatggcggccaggcagagacgctcctcacttcccagatgggatggctgccgggaagaggcgctcctcacttcctagatgggatggcggccaggcagagacgctcctcacttcccagatgggatggctgccgggaagaggcgctcctcacttcctagatgggatggcggccgggcagagacgctcctcactttccagactgggcagccaggcagaggggctcctcacatcccagatgatgggcggccaggcagagacgctcctcacttcccagatggggtggcggccgggcagaggctgcaatctcggcactttgggaggccaaggcaggcggctgggaggtggaggttgtagcgagccgaggtcacgtcactgcactccagcctgggcaccattgagcactgagtgaaggagactccgtctgcaatcccagcaccttgggaggccgaggctggcggatcactcgcggttaggagctggagaccagcccggccaacacagcgaaaccccgtctccacccaaaaaacacgaaaagcagtcaggcgtggcggcgcgcgcctgcaatcgcaggcactcggcaggctgaggcaggagaatcaggcagggaggttgcagtgagccgagatggcagcagtacagtccagcttcggctcggcatcagagggagaccgtggaaagagggagagggagaggga

SEQ ID NO: 5420 - DNA, 914 bp, Artificial sequence
  DNA replication origin
ccctccgcccagcagccgccccgtctgagaagtgaggagcccctccgcccggcagccaccctgtctgggaagtgaggagcgtctccgcccggcagccgccccgtccgggagggagatgggggggtcagccccccgcctggccagccgccccgtccgggagatgaggggcgcctctgcctggccgcccctactgggaagtgaggagcccctctgcccggccagccgccccgtccgggagggaggtgtgggggtcagtcccccgcccggccagccaccctgtccgggaggtgaggggtgcctctgcccggccacccctcctgggaagtgaggagcccctctgcctggccagccgccccgtctgggagggaggtgggggggtcagccccccgcctggccagccgccccgtccgggaggtgaggggcgtctctgcccggctgcccctactgggaagtgaggagcccctctgcccggccaccaccccgtctgggaggtgtacccaacagctcattgagaacgggccatgatgacaatggcggttttgtggaatagaaaggggggaaaggtggggaaaagattgagaaatcggatggttgccgtgtctgtgtagaaagaggtagacatgggagacttttcattttgttctgtactaagaaaaattcttctgccttgggatcctgttgatctgtgaccttacccccaaccctgtgctctctgaaacatgtgctgtgtccactcagggttaaatggattaagggcggtgcaagatgtgctttgttaaacagaggcttgaaggcagcatgctcgttaagagtcatcaccactccctcatctcaagtacccagggacacaaacactgtggaaggcggcagggtcctctgcctaggaaaaccagagacctttgttcacttgttta

SEQ ID NO: 5421 - DNA, 1501 bp, Artificial sequence
  DNA replication origin
cacataaagacttgtacatgaatgttcatagcagcattattcatagtagccaaaagttggaaacctagatgtccatctcctgataaatggatcatatctgataatctatgtaaaggaatattattcagctataaaaagggatgaagtaccgatacatgttacaatatggatgaaccttgaaaacatgctaaaggaagccagtcacaaaagtcacctattgtatgtttccatgtatatgaaatgtctagaatagaaaaatccagagacggaaagcacattagtggctgccagggacttgggggtgggggaagagggaatgactgccagtgggtaaggctttttggtgggggtaaaagtatcttcaaatcgattgtggtgatggttatacaactctgtgaatatattaaaaaaatggtacagtttaaatggatgaattatatgatacaatatggtatgtaattctatctcaataaagctgtttaaaaataacatcaaaaggaccccaaggttttagcctgtgcggcaggaggaatagctcagttgctgacaaaagcaggagaacaaggaaaagagacagctgggagttaagcagaaggactgaattcagcgtgggctgttgaatctaagattttggctggctgctcgtgaagaaacgcctgcagaaagctgtaaatgccggcagtggcagtgagtgtgatggacaaggctaaagagaagactcatgaactttcggtaagtagggagggctgaaaaagtgagctcataagagtgagtggagatcaaacaggtagagaaaagctacaacaggatttggagagaatgcacaaatataagatgaacagaggaagagaagccatcaaagcagcccaagaaaataacggtgagagaggcaggagaaaacacagagagtaggggtgggaggatgagcaagaccaatgtgcttgcccaggctggggaaggcggtggagagggccgcgtggtgagcaacaggaagagtctttttgctggagaggaagccttgagggtccattcgcagagccgaggtggggaagaaggcagaagattcgagtttaagaagcagtgaggacagatagcagggcaagaaaaaagttgtgtttgtgttttaggacctggtaaaaacggggaagtggtaggtagggagcctagaaactggccgtttgcagtggagtgtgggtgtttccattaatgaggagaggaacttctttttcccagcctggggtgaagcaagtatagccccaggacataacttctgacctggggggagtgaaacaaactcaaggagaagctgctgctttattgatttgaaaggacaagggcacagtcgttgctgggagtgaaaggggtggtcacaagttcaaaagacagtaggaaactgtggcaggtcagccgcatacacttgcttgtgctgagtcttgtcctgtgttttacttgatcacattcaagccttacacgtttaaatcccaccttctcttccactctg

SEQ ID NO: 5422 - DNA, 989 bp, Artificial sequence
  DNA replication origin
ctggtctgccaggcttgcgagagggcgcgctggcttggcggggctccgggcgagaaatcaccagcagcgctggggctttcggccccccacagcccagcccgggcctcctgggtggcctggggagaagggggcgggacagcacagcttcttcccctcgggtgggcatgacgggtcgccttgggtgtcctgccgagctcagctttgagggtatgcgcggcgcgggtgtttttcccaggtccactctgcaaaagttgtggcctgaggaaaacttccaggtcgccagcaggaacgtcacaggagagccccggtcgctcgtcaggcgggcggccctggagcgtgcgcgccacccaacgccgcgctgggcggccgcccggccccgccccaggtcacagccctgccctcggccccaccgcggcgggcgggggacacgcggcgggccgggcgctgtcggtcccacgccccaccggggatctcgcttgggtccgctgtgtgcgcgggcgggtgcgtgtgcggcgagggtgcagggtgtgcaagtaaatacaggggagagttacactctttgccgtctcaaagtccggcgcctggaagccgaaggcagatttttccagagataacaaagacactttgtcactttgggcgctgcgtcggtgcaaatctttaattgcaagtgtgtgtgtgtgtgtgtgtgtgtatgttggggggggcgggaagagtgtctcgagcaacccaagcgcgggtctccaggcggcaaggccccctttgatcaggaaaatccaattatttgtgtatatacatttcccacatagtgattacttcattaattgtcccgcctttatctcctcccttcccatcccccctaataatcagttcttttatccagaccaacaaacacaccataggagctttgtggattcaaaggatttgctttcgcttctgaaagagccgctattctttgatgattgggtagcggcaaacttcaaagccataaa

SEQ ID NO: 5423 - DNA, 1275 bp, Artificial sequence
  DNA replication origin
ttcccggaaccccggaggcccccggcccggcgcccgcctgcgggatgctccaccacgggaggtcgtcgggggccgggttgggtgacaactggcggcaggtgggcggcgggggcggtggcggcggcggaggcagcaggttggagtagcctggcggcagcgcggcctgcgccgcgtagggcacgtaggcgggcgcgcagctggcgggcagagccgccatgctcgagggcagcatcttgaccggcgagaactcgtaggggtacgaggggtcggcggggggtgtaaggggaagctcgtgcgcagccccgaaggacggctgcaggtgcgtcttctgcggcgtcagccccaagctgggatgcgggggcggcagtgcgcctggcgagtgcgccggcatgtcggcggtccacgggtggaagagcctggagggtgagcccagcgcggggtcgtagggcacctgcaggaagtccgggggcgccgccgcgcccggctggccgatgcggctacaggtggcggccagcaatgccaggggcgagtgcttgcccaggtccggggaggcgctgggggtgcggtcctgcataggcggcgagggagggcggagaagagacaaaaggttagctccaagcgcggactccgggccagcccgccgcccccacgcccgctattataccgccgcccctcctccgtcccggccgtccctcccccgccaccgcaccccacgcacgcacccaccggccgagggaaacttttggtgcctgcgctacctgaacgtggggcccgcgagcgcttcttgctaaactacttggtgcactgagacgccatccagccttagaggaagcaggcgcgaagtgggagggggaggcatccgacgggcccctcccggctccgtggtcagtaagagtcgggaaacacccacaaccccgccggccggccgctctccctcccatcttttaagctctcttgtcctcactgccttcgcgctcctccctggcccgccccaggctgaaatcagcaggagggcccagcagggtgagctccggtcctgttctcggccagccgggcacctccgaacaatcccggatccacgcgtccctccagcaaaggccacaccggattaggtgtgaagttggcgtgggcacccctaggcctggctccagctgcacccatcggcggggttccctttgaggttcaaggtgcacggagtaccaggagagatccggacacggccctttccacctttctcccgccccctccgggctcggccctgacctggagaaaggc

SEQ ID NO: 5424 - DNA, 1018 bp, Artificial sequence
  DNA replication origin
cgccgcccacctgccgccagttgtcacccaacccggcccccgacgacctcccgtggtggagcatcccgcaggcgggcgccgggccgggggcctccggggttccgggaagcggcctctccggcgcctgtgccggggccccccacgcgccccgcttccccgcctctgcggccgctgctgctgcggccgccgccgccctacaaagaggcctggtgttgggcccgtcggactttgcgcagtaccagagccagatcgccgcgctgctgcagaccaaggcccccctggcggccacggccaggaggtgccgccgctgccgctgtcccaactgccaggcggcgggcggcgcccccgaggcggagccggggaagaagaagcagcacgtgtgccacgtgccgggctgcggcaaggtgtacgggaagacgtcgcacctgaaggcgcacctgcgctggcacacgggcgagcgacccttcgtgtgcaactggctcttctgcgggaagagcttcacgcgctcggacgagctgcagcggcacctgcggactcacacgggcgagaagcgctttgcctgtcccgagtgcggcaagcgcttcatgcgcagcgaccacctcgcgaagcacgtcaagactcaccagaataagaagctcaaagtcgctgaggccggggttaagcgggaggacgcgcgggacctgtgagccctcccggaggtggacccccttcccagcacctctgcgagagatccggggacctgtgggcagctggcggaggggagactcagcagacggaccctctccgttgcctgcctcccaaaatggagccaggcttccaacttccgctgccttcggacatagggacccagttcccaggagcggggaggtagggttggggctggggcatttggattgtaattgggagctctgccgtacgccagggcggttccaaactctaaaccgttcccaccgtcagggagacctacagtttcgggggaccaccctggtctggccttgtatataggaaatgctgctga

SEQ ID NO: 5425 - DNA, 992 bp, Artificial sequence
  DNA replication origin
ccggggacctgtgggcagctggcggaggggagactcagcagacggaccctctccgttgcctgcctcccaaaatggagccaggcttccaacttccgctgccttcggacatagggacccagttcccaggagcggggaggtagggttggggctggggcatttggattgtaattgggagctctgccgtacgccagggcggttccaaactctaaaccgttcccaccgtcagggagacctacagtttcgggggaccaccctggtctggccttgtatataggaaatgctgctgaactgaatagaaaggaacttgggagatttgaaacagtgctcgggttttcgctaggaccggtttgggctttgtacaggttatttaatagctttgttaaagataattataataattataacattaataaaaatgttgcttttgtcttcagctccatgcagagctacagcatgatatgtctctgtaaagtgatcagcagttgcagcgtgaaaataaatactttaactcaggggtcactacaggaagaccccgttgagccggtctcatttgatcttttcttcttctgggtggctgtactaagcggtcgggtttccccgggaatttgatggttcctatagtctgcctgtgtcggaggcttctttggtttggaaggatctgggcaaatgtgttgggttcaggaatggacaaaggcaggcaattccgttttgtggtaaagaggtagggcaagattttccaatcacaatttgagtttctcatgcggccttaggattcacccgagactgtttgtcttccaagtttgtttttacctgacgaattccctgtggctttctatttgttggtactctcgggacaggtcacaactatgctggtgttaagagaggtattagaggcgccaggatctgttcacaggtgagactttgtggagaggtacagagaaacgggacccttgttcaggttggtctttgcctgggaaagaaccaagaagata

SEQ ID NO: 5426 - DNA, 1261 bp, Artificial sequence
  DNA replication origin
ggtctgggggtggtctgctgtgggggctgggtcagactgcacaccgggctagggagagggagaccggtcgttgcctcggagtgtcttaccagctggcggccctcttcagcagaccatccgaagggcacacaccgagagccagcccggctagctgctcgcgcggagctgggggctccgagtcgggaacgcagcgtcgccgtggagactgcacggcgcgtggaggaagctcgggcagcagccgagggtgggggctgggggaattgggcgacggcgggggaggtggcgggggcgggggcgggggcaggggcagcccggggaaccacggagaggcagggtggaggcgggcccaggccgtagggcggtggagggcgcgggacggagcgggcgcggcgaggagggcccggggcggggctgggaggcgggtccgggggggcggggcggggcgggcggccgagctgagggacagccccgcggttgtgggtgtcccgcggcgccggaaactgggcgcacacaccctcggattgacgtgcgcacgcgcaccggttaccttcaggagcgccgaagaaggaaagaaggttggaatgtcggtgtccatacctgattctaagcgagggagagggaagggggcggggtggcctcagagttttaaacttggggagtaaaaagaagtcttgagttgggagagatgggtgtccctggtagtggatgaacaagtgtcccctgcaggacttagtcccccaacctgaggtcgccccaagaagattatgggtctccggggggagtccctggacgccagttttcccagaagtcagattcaagtgattagaaccagagacccggctctcccccagctagagcagcccaggttccctctagcgccagagctgctgctctgccacgccggccaatgggaggtattagtgtttaagtaactgcttgggtcacagtagggggtggggagcttttctgttacagaattctaaaggtccctcaagcttggcttctaggaaggaattggttatttttctccacttgggatgccggaagtaactagaatcaatttgttgctaggcaacgtgttttgaaggacgcgtgtttgttggactcaaatctggattcgactttcacatggtagacacataatatcaggtgtactccctatttaatctctggagttgctacccgctgaggatatgtaccttggtagatggttgtgaagctaaaatgacataaaaatgtataaagctctgacatgtggaag

SEQ ID NO: 5427 - DNA, 712 bp, Artificial sequence
  DNA replication origin
gcctctactgtccagagtcctcgactggtccggcgcagaaacaggctgcaaagagaagcgagagctgtgcggggaggacttccggggtcctgcacaccggagggactgagcagccgggggcacggaggctccccttgaagatccggctctggagagacaagagggaggaaaggcagcgagcctgcctggtaggggtgcgcaggggtgggggcagcggaggagacgtgcgcgctagctccggtactggggcgcagggagcgtagccctgggccgctctcgagtctggcggtgcatcggcgcgacctggagtgaagcgccgagacgaggcggggtcggggtcggggtgggggtccaaggccagtacaagacgcaagggtgtgggggactaggctaggagcacaggggagcgctcagtgagcgattttccagccgagccgctacaagccccattgggcactcagcagccggcgtgtgggccagcggggggagggcgcacggggcgggcatgtctggttcggtgtctggttcccgttgttgtgtctggctaattccctggaaagaaagaggctaactgctccggggactagggactttggtgagacaaggtgagagggggaaaaaggcccatatctttacgttctccctcggacttggccagagaagaaccacagtcaccttgcactccagacagccagaaagcagcgagtcggaa

SEQ ID NO: 5428 - DNA, 2094 bp, Artificial sequence
  DNA replication origin
aaggcactcacaaggcgactcttctcttccaggctgttggtcctttgcaagaagcctatggcacaagaagctggtcagagagagtgctgcaaactgcccagcccctgagggtcagctgcagagtgaatcaactctccaagcagggctcttgtttctcctgagaaaagaagtgagtgtctgtgttttaaatacagtggctctggcactgctcgccttcaggcagggaggggggcagtgccaaatgtcatcagtggcagaggcccagtcatgcaagagagaaaaacagtaagtgaagcccgttctcctctctgaatgtgacagtgaactcacaattaagtaagttggacagcttccactccagtgaccagccccaggatagggctttaaaggaggagacacaatcagagaagatgctgccagcactgtttatgggctgtataagcagaaggaggaggggagagaacagcagaggtaggaggagaggtgaggacagctgagggaggagggtgaggacagcagagggaggaggagaggtgaggacagctgagggaggaagatgaggatagcagagggaggagaggtgaggacagcagagagatgaggaggggtgaggacagcagaggaaggagagtgaggaccacagagggaggagagcaaggaccgcagagggaggaaggcgaggacagcagagggaggagaggtgaggacggcagagggaagaggaggggtgaggacagcagagggaggagggtgaggacagcagaggtaggagggcgaggacagcagagggaggagggtgaggacagcagagggagaagggtgtggacaacagaggaggagggtgaggacaacaggggaggagggtgaggacagcagagggaggagggtgaggacagcagagggaggagggcaaggacaacagagggaagaggaggggtgaggacagcagaggaggacggtgaggacagcagaggtaggagggtgaggacagcagagggaggagagcaaggacagcagagggaggagatcaaggacagcagagggaggagatcaaggacagcagagggaggacagcgaggaccgcggagggaagaggaggggtgaggacagcagagggaggagggtggggacagcagagggaggagggtgaggacagcagagggaaggggatgaggacagcagagggaggaagatgacagcagagggaagagggtgaggacagcagagggaggagggtgaggacagcagagggaaggggaggggtgaggacagcagagagaggaggggtgaggacagcagaaagaggaggggtgaggatagcagagagaggagaggtgaggacagcagagagaggagggcgaggacagcagagggaggagggtgaggacagcagagggaggagggtgaggacagcagagggaggacagcagaaggaggaggggtgaggacagcagagggaggacagcagaaggaggaggggtgaggatggcagaaggagaagtagtgaggtccaacacagaggattcgggcagacactttcctccagcaccaggtaatgctcacagggttgaacgtaagtggtatttttctgaatgcaaacctgaatgcagcttttcttgcaccaccccctctccttgaatgaaggtactgtgagacaaaaaaaagcttcaatcttctgtgttgccatttaattctataagtacttattgagcacctgttgtacaaaaacactttgctaagcatctaggattggggactgataaagctagtgggacagatcccctgccctccaggagcctacaagcctggcagatggtgacaaatgctggaataaaactagtcatccaagaactccacagagatgacaggagggatctgagcccagggcgggattctcagtgcctcacctctgcccctcggagtgagtggaaagttctcctgcccaaggtgagcaggacaaactccggcagcaaacggggaaagagggttaagccaaaagggcaggagaacctgccagcgtggagcacactccctccacatctccaccatcccctgtggggctcctggcccgcacgtctgctctttcctttggct

SEQ ID NO: 5429 - DNA, 1012 bp, Artificial sequence
  DNA replication origin
tctccgggccgccctcgcagggcccctgggcggggccggggcgtcgcggtggggcgctttccgttctttggaagaagggctctggtcccccgctttctttccatctcagacccagtgcggaaacgtgggggatgagcctgggcgccttcaccaaacggaaccccctttaatctgatgtgaaggcaaatctctccaccgggggacccgttgggtgcggcggagacacccttcggtggctgagaaaccctcagacgccgtggaagcaccaggggtctgagcgcccagtgcgggaggtgcggggccggcttccctccccggggctggagccttcaggagcgccgcccccacccggcttcctccgagggcagtgctggactctggcctggcccctggccggccgctgcccttggcctcgtccaacccacacccgcggggcggaggctcctgctgtgcacaagcccggggcgccggggtggggcggctgggtctgggcccaggtgtcccgaatccaaaagcatcccactgcgctgcctgtaaattagcgatttcggatctagtgatgagcagaggggacagaatagcccagaggccgggtaactaacatgtgcgggatcaaggaaggcgttcgtgggcagctactattagggctttgaagaatgcatagaggttctcttaggtggtcaaagtggaaggaagaggttctcttaggcagagggaacagcgtctgcaaggacacacaggaatgtggcacgtggtgtgtcccggaactacaaacagctctggttgctggaatgtgaaaagtcaagtatggagtggtagcagttgccacagaagggggagcggggccagatcgccgaaggccttgaatgccatgctcaggggcttagactgcactgccctggggagtttataagggggatggatgttttttgttcttggcagtgaagtacccagggagcttgccccttacataggtcagtggtctgaaaaacctcctttttggcaagcaggg

SEQ ID NO: 5430 - DNA, 1605 bp, Artificial sequence
  DNA replication origin
tttaggggctagggctgtaaagtgtctcagggttgctgccaaacgagccatgaactgggctgggttcttatatttgatgaaaaagagcctaaacgctatctgatttgggataaagaaaaaggagcattaaccttgactatgcctttagctccagccacctttttaagagtaaattgctgggcaggtgggggagggctagtcatggaacgaaactgtaagccggacccggtgtgaggaggggaggtgataaaaggattatagggtggaggagcagaggctgaggaagaattgggacctagcttggcctggtgaggagcagcctggggaggaggggagaggtcagatgggtctgtagaaaaggaagattagaaagactcagcgacacttcgggttgggactgaggggacaggcgggagggaaagaaggaagatttggggtgagttgcattgggcacagactagggagggactgatgtgtaaaagaatgcctggatatcaggcagctcagaccgtttgcctattttacgacaagaattatttagatcttgcaggatggaaaaattgaaagtgccgttttctggctatttggaactactgtcaagtttgtattgcggtcaagcagcattgcagaagaaaataagacatttaggttttaggtccagcgtgagttgaagaggttttaagttcttgagagcacaggcgaagggagacagaggaatggagggtggaatgttgcccgtagtgaaggaggcaagcctagagaaaagagagagtagagacacggaggaaaggggttcgggggttcttaacttccagaaaagcgtgaaaggggtcggggcatggaaataaggggttggggcgcagagataagaggtcggggtgtggaaataagggatggggcacagaaataagaggtcagggtgcagaaataagggattggggcacagagataagaggtcggggcatggaaataagggattgggggttcttgccccttagaaaagtgggacttgctgctaagggtgagggagaaggggttgaggggttcttgcctctcccccagaaaagcagagaaggggtagagacacggagagaaggggttggggtacttgctcctcccccagaaaagcgggacttgccgctaagggtgaaggaccaaggcaggcatccttgcatggtctgacacctctgaaacgtgggtgaataatcagacaggtgtccctgcaatgattaaacaccaaggaaagcctgccttcccagtccgtgaccgacgctggagtttgggttcatggataaaacgtgtctcctttgtcgctaccagaaaatgaaaggaattgaaattaagagaagggagagattgaagtgtggtgccaagattgaaaggagaaagaggttgagggatagtgagagaggttggagaagacagtaaaaagagactgcttactcgatttgaaattggtgaggtgtttcttgggctggtcggtctgaggacctgaggtcgtaggtggatctttctcacagagcaaagagcaggaggacaggggattgatctcccaagggaggtaccctgatccgagtcatggcaccaaatttcattcgcgtccgt

SEQ ID NO: 5431 - DNA, 1153 bp, Artificial sequence
  DNA replication origin
ttccctcctccctgtcccctctccttccctcacctctttcctccccacctcccctcttctcggtttcctcccccatccccttgactctcccctcccagccctcgctctctcgctcgccctcagcgcggcccccgccatgacggaggcgggtgccggtgccgttgccgccgctgccgtcgcagggggggagtcgggttcccagaaagtagcttgatgagtgtccaaagtagcagtggaagtttggaggggccgccatcttggtcccagctctccacgtctccaaccccgggctcggcggcggcggccaggtccctgctgaatcacacgccgccatccgggaggcccagggaaggtaagcaccgccgcgcccgcgcccgctcgcgggcctcctctcccgcgccgcggacccccgcgccccccccccgccccccccgccccggggcttctccgccagaccctggggtgggggatggtggcgaggtggacgcgaggccgcccggctccccggctctggggaggtagtgccctggctgtggatggtggttcgcgggtggcggaggagacggacgagggggtgcgcgctggtggggacggggcgaggcgcatagactcgcctggggttcctgggagccagtcctgcgagggtgggaagcctccccccagacgcgagcccctttctgctccatttgccagtacactcagtactcttaacctcctggcctccggtctctggtgggttttccctcccgctggagccttcgtcctcgagccccctccccttctcccgcgcactcctcccatagaggcggtccccactttgcgagctttgctgcccgggacctggaggatgcccctcgcttgctgggtttctcctttggggagagacgctgaaattatctgggcagactttgatcccctgtgtggccccctagagcaatttaaacgacagactgactcgtgggcaggcttttaaaaccgcccctccagatggttgcaactttctctccttcgccgttgcttcctgcgtgtttgtgcgttatattctctgctgcaagtaggctactgttcttctgtgacagggtcgtgggttttgtgggaaatatctgcgtaaaggttattgcaaacacgcaccaaatcggttacaattgttttc

SEQ ID NO: 5432 - DNA, 910 bp, Artificial sequence
  DNA replication origin
gcaaagctcgcaaagtggggaccgcctctatgggaggagtgcgcgggagaaggggagggggctcgaggacgaaggctccagcgggagggaaaacccaccagagaccggaggccaggaggttaagagtactgagtgtactggcaaatggagcagaaaggggctcgcgtctggggggaggcttcccaccctcgcaggactggctcccaggaaccccaggcgagtctatgcgcctcgccccgtccccaccagcgcgcaccccctcgtccgtctcctccgccacccgcgaaccaccatccacagccagggcactacctccccagagccggggagccgggcggcctcgcgtccacctcgccaccatcccccaccccagggtctggcggagaagccccggggcggggggggcggggggggggcgcgggggtccgcggcgcgggagaggaggcccgcgagcgggcgcgggcgcggcggtgcttaccttccctgggcctcccggatggcggcgtgtgattcagcagggacctggccgccgccgccgagcccggggttggagacgtggagagctgggaccaagatggcggcccctccaaacttccactgctactttggacactcatcaagctactttctgggaacccgactccccccctgcgacggcagcggcggcaacggcaccggcacccgcctccgtcatggcgggggccgcgctgagggcgagcgagagagcgagggctgggaggggagagtcaaggggatgggggaggaaaccgagaagaggggaggtggggaggaaagaggtgagggaaggagaggggacagggaggagggaaagggggagaagcgagggagcgagcgggcgcgccagaggagaggaggaggaaaggagcgcggcggcggaggcgtcgagggg

SEQ ID NO: 5433 - DNA, 917 bp, Artificial sequence
  DNA replication origin
ccagccgggccggggtcggagcgcgggcggagcgcgggctgcgccggccgaggacacttccgcgggcggaacctgccggcacctctgcagtgcgtcggcccccggcgtcgcccgggaggcggcggcggcgggctgtgggtggcggctgaggcggtggggtaacctctgcatcagttacaggcggcggcggcgtcacgcgccgcctgtgcaaacactatcgcgaggctcctgcgcctccggtagcggcggcggcggcggcggcggcagcggcggccgcgggagcaggcttgggggagggacctgccaggggctggggggtgggggcatggggaaggagcgagcgcgcgagggaagagactagagcgccggggcgcccctgccgcacccgcggatcgccgcgcggcgcgggagcccggggttgccggactcgcgtgcgcgggggcagcgtccccgcgccggccggagggaggcgcgcccccgccgcgccgctcgggctccagcgccgctgccacctgactccccctgtctcccgcggaagcgcgcctctctcctgacccacacccaacacggggagaaatgctgctgctctcgctcagctgccgcttctcgggagttcaatgtgatcgtttctcaaaatggaactgaaaagttgagagttccttctttcttgcccctctgtactgtgcagaaaaacgtatgtgcgcctccccgtctgcagaatgggaataatgaccgaataaaagagctatgaaaataaacatgggtagtgggagagttgggaaataaaactttctcgtgttttctaaaaaagagtgaagaatctttaatgaggaaattgaaaattaccagttttgtagactgtatggtatagcaattctttgttttaaaacagtaagtggaaaatctaaatgaaaaat

SEQ ID NO: 5434 - DNA, 1064 bp, Artificial sequence
  DNA replication origin
ccttatgatttctattttaaacattaatgctagtcagctgttgagtctaaattccaaaatggagggggtagacttcccttccggctgtagctagaaactcagctttaaggtttttctggggtctgcttggccaaggaggtccattcagtcagtgaggggcttaggattttatttttagtttacaccaccttacaggttcctccttaacaccctttgatgtcagagacagccaattctccagcactgtggctaaggaggcttcgttagtagttaaaagcacacacataaccctacccaacggatccctctcttctcttaaccaagagggcgcaccactgccctactcaacctccccacaaataaggacgagacacgggaagtgttaaaagcaagtggtgagtataaaatcctcggaattttctctttgagcaactaactaggtctgttactgaagccctctgcgagcttggatgctggacgagggagagggtgaggccaccaggcaatgagcgccctcggcggccgcgtgatcccgggggtggggcccatttctgagttggggccagctccccacccccaagaggccccacattccgggccagcagcccagaaagtccctccccgcaggcggagacagccccaagaagtcgacgccccggtcccgccgcccggccactacccagagggctgccgccgcctctccaagttcttgtggcccccgcggtgcggagtatggggcgctgatggccatggagggctactggcgcttcctggcgctgctggggtcggcactgctcgtcggcttcctgtcggtgatcttcgccctcgtctgggtcctccactaccgagaggggcttggctgggatgggagcgcactagagtttaactggcacccagtgctcatggtcaccggcttcgtcttcatccagggcatcggtactggcacctcctgggggggtgcggggaggaaagcggggagaacggcgggggcagagggtcctccgtgaagccccttccagctgaggaagtgctggaggatcgcggggcccggaggagtgcggtga

SEQ ID NO: 5435 - DNA, 1189 bp, Artificial sequence
  DNA replication origin
agcacatgtttcagagagcaccgggttgggggtaaggtcacagatcaacagcatcccaaggcagaagaatttttcttagtacagaacaaaatggagtctcctatgtctacttctttctacacagacacagcaacaatctgatttctctatcttttccccacatttcccccttttgtattcgacaaaactgccatcgtcatcatggcccgttctcaatgagctgttgggtacacctcccagacggggtggcggctgggcagaggggctcctcacttcccagaaagggcggccgggcagaggcgccccccacctcccggacggggcggcggccgggcagaggctggcccccacctccctcccggacggggcagctggccgggcgggggctgccccccacctccctcctggacggggcggctgccgggcggagggggtcctcacttctcagacggggcggctgccgggcagaggggctcctcacttctcagacggggcggctgggcagagacgctcctcacctcccagatggggtcgcggccgggcagaggtgctcctcacatcccagacggggcggtggggcagaggcgctccccacatctcagacgatgggcatccgggcagagacgctcctcacttcctagacgggatggcggccgggaagaggcgcttctcacttcccagactgggcagctgggcagaggggcttctcacatcccagatgatgggcggccaggcagagacgctcctcacttcccagacggggtggcagccgggcagaggctgcaatctcggcactttgggaggccaaggcaggcggctgggaggtggaggttgtagctagccgagatcacgtcattgcagtccagcctgggcaacattgagcactgagtgaacgagactccgtctgcaatcccggcacctcgggaggccgaggctggcggatcactcgcggttaggagctggagaccagcccggccaacacagcgaaaccccgtctccaccaaaaaaacacgaaaagcagtcaggcatggcggcgcgcgcctgcaatcgcaggcactcagcaggctgaggcaggagaatcaggcagggaggttgcagtgagccaagatggcagcagtacagtccagcttcggctcggcatcagagggagaccgtggaaagagagggagagggagaccgtggggagacg

SEQ ID NO: 5436 - DNA, 878 bp, Artificial sequence
  DNA replication origin
gcctcttcccggccgccatcccgtctaggaagtgaggagcgtctctgcccggatgcccatcgtctgagatgtggggagcgcctctgccccaccgccccgtctgggatgtgaggagcacctctgcccggccgcgaccccatctgggaggtgaggagcgtctctgcccagccgccccgtctgagaagtgaggagcccctctgcccggcagccgccccgtctgagaagtgaggaccccctccgcccggcagccgccccgtccaggagggaggtggggggcagcccccgcccggccagctgccccgtccgggagggaggtgggggccagcctctgcccggccgccgccccgtccgggaggtggggggcgcctctgcccggccgccctttctgggaagtgaggagcccctctgcccagccgccaccccgtctgggaggtgtacccaacagctcattgagaacgggccatgatgacgatggcagttttgtcgaatacaaaagggggaaatgtggggaaaagatagagaaatcagattgttgctgtgtctgtgtagaaagaagtagacataggagactccattttgttctgtactaagaaaaattcttctgccttgggatgctgttgatctgtgaccttacccccaacccggtgctctctgaaacatgtgctgtgtccactcggttaaatggattaagggtggtgcaagatgtgctttgttaaacagatgcttgaaggcagcatactcgttaagagtcatcaccactccctaatctcaagtacccaatgacacaaacactgcggaaggccgcagggtcctctgcctaggaaaaccagagacctttgttcacttgtttatctgctgaccttccctccactattgtc

SEQ ID NO: 5437 - DNA, 916 bp, Artificial sequence
  DNA replication origin
cgccaggccagccgccccgtccgggagggaggtggggggggtcagccccccacccggccagccgccccatccgggaggtgaggggcgcctctgcccggctgcccctactgggaagtgaggagcccctctgcacagccagccgccccgttcgggagggaggtgggggggtcagccccccgcccggccagccgccccgtccgggagggaggtgggggggtcagccccccgcccggccagccgcccggttcgggaggtgaggggcgcctctgcccggccgcccctactgggaagtgaggagcccctctgcccggccagccaccccgtccgggagggaggtggggggtcagccccctgcccggccagccgccccgtccgggaggtgaggggcgcctctgcccggccgcccctactgggaagtgaggagcccctctgcccggccaccaccccgtctgggaggtgtacccaacagctcattgagaacgggccatgatgacaatggcggttttgtggaatagaaaggggggaaaggtggggaaaagattgagaaatcggatggttgccgtgtctgtgtagaaagaggtagacatgggagacttttcattttgttctgtactaagaaaaattcttatcctgttgatctgtgaccttacccccaaccctgtgctctctgaaacatgtgctgtgtccactcagggttaaatggattaagggcggtgcaagatgtgctttgttaaacagatgcttgaaggcagcatgctcgttaagagtcatcaccactccctaatctcaagtacccagggacacaaacactgcggaaggccgcagggtcctctgcctaggaaaaccagagacctttgttcacttgtttatctgctgaccttccctccactattgtcctatgaccctgccaaatccc

SEQ ID NO: 5438 - DNA, 1149 bp, Artificial sequence
  DNA replication origin
ggcagggggctgaccccccacctccctcccggacggggtggctggccgggcagaggggctcctcacttcccagtaggggcggccgggcagaggcgcccctcacctcccgaaccgggcggctggccgggcggggggctgacccccccacctccctcccggacggggcggctggccgggcggggggctgacccccccacctccctcccgaacggggcggctggctgtgcagaggggctcctcacttcccagtaggggcagccgggcagaggcgcccctcacctcccggatggggcggctggccgggtggggggctgaccccccccacctccctcccggacggggcggctggcctggcgggggctgacccccacctccctcccggacggggtggctgccgggcggagacgctcctcacttcccagacggggcggctgccgggcggaggggctcctcacttctcagacggggcagttgccaggcggagggtctcctcacttctctgatggggcggccaggcagagacgctcctcacctcccagacggggtcgcggctgggcagaggcgctcctcacatcccagacggggcggtggggcagaggcgctccccacatctcagacgatgggcggccgggcagagacgctcctcacttcctagatgggatggcggccgggcagagacgctcctcactttccagactgggcagccaggcagaggggctcctcacgtcccagacgatgggcggccaggcagagacgctcctcacttcccagacggggtggcggccgggcagaggctgcaatctcggcactttgggaggccaaggcaggcggctgggaggtggaggttgtagcgagccgagatcacaccactgcactccagcctgggcaccattgagcactgagtgaaccagactcggtctgcaatcccagcacctcgggaggccaaggctggcggatcactcgcggttaggagctggagaccagcccggccaacacagcgaaaccccgtctccaccaaaaaaatacgaaaaccagtcaggtgtggcggcgtgcgcctgcaatcgcaggctgaggcaggagaatcaggcagggaggttgcagtgagccgagatggcagcagtacagtccagcttcggctcggcatcagag

SEQ ID NO: 5439 - DNA, 1105 bp, Artificial sequence
  DNA replication origin
gccttaggaaacctggggctttcctggcggcgacctagctgtggcaaccacgcggcgcgtcgggatcccatgggtcgcgcttgttttccccgtgggaggcgcgtccccctcctccgcccggccggccggccctggaccagctgcctttctggccgggacgccgggcccctttccgcacgcggcgcgccccgagttcatttgcatagggacgcgcgcggcgccggcgagagggagggcgggcgcggccgggaagacggcgcgcgcgcgccctgacagctcggccctgctcgctcactcgctcgtccccggcttccgagcacagcatggcggtcaaggtgactccaactctctgctgctgcttttattgcataagagacattccgagcgccctgcctgcagccccccactgcttcccattttattcattgtctaggtcttagatagcttgtcctggggctccggcttgctgcggggagagctgtgcggggcttggaccggaggaggggatgcccggctgggggaggggaaggaggagggattgtgagttgaaggggcttgtacggtaacacgggtcagtgaaggaagagtaatgtcctgtcctaggtgcatgggattgtgagtccggagttggagggcatcagaaagggtgtgggaggaagtggcaagtaaagctggggatacctagggtatcagtgaattgcggtgggggagggagtaagtattgagtaatttggggcctcaataaggccgagggcagtggttggcttttgcgttgcagattgcagggtatggaaagtatttgtatttgtggcagctctcatattttaggttggatggggagagggacgcggagataattacatgttgggtttgctttttatggagaaaggctgctaggccaagtgattaatttgggtgatttaactttcctgttgatctactcttgttagcttcttgatttgaaggtgggtggttactactgtgttgctagtagatgtggaataaagtaaaagatcctcattgccttccctttccagtccagaggaagcactgtccgatagctttgctgtatcttaggctattcgcacctgtttttctgccctct

SEQ ID NO: 5440 - DNA, 1353 bp, Artificial sequence
  DNA replication origin
tctacacagacacggcaaccatccaatttctcaatcttttccccacctttcccccctttctattccacaaaaccgccattgtcatcatggcccgttctcaatgagctgttgggtacacctcccagacggggtggtggccgggcagaggggctcctcacttcccagtaggggcggccgggcagaggcgcccctcacctcccggacggggcggctggccgggcagggggctgaccccccccacctccctcccggacggggcggctggccgggcagaggggctcctcacttcccagtaggggcggccgggaagaggcgcccctcacctcccggacggggcggctggccgggcggggggctgaccccccacctccctcccggacgggtcggctggccgggcggggcgctgaccccccccacctccctcccggacggggcggctggccgggcagggggctgaccccccacctccctcccggacggggtggcggccgggcggagacgctcctcacttcccagacggggcggctaccgggtggaggggctcctcacttctcagacagggcggttgccaggcagagggtctcctcacttctcagacggggcagccgggcagagacgctcctcacctcccagacggggtcgcggccgggcagaggcgctcctcacatcccagacggggtggcggggcagaggcgctccccacatctcagacgacgggcagccgggcagagacgctctccacctcccagatgggacggcggccgggaagaggcgttccccacctcccggacgggatggcggccgggcagagacgcccctcaccctccagactgggcagctaggcagaggggctccccacatcccagacgatgggcagccaggcagagacgctctccacctcccagacggggtggcggccgggcagaggctgcaatctcggcactctgggaggccaaggcaggcggctgggaggtggaggttgtagccagccaagatcacgccactgcactccagcctgggcaccattgagcactgagtgaacgagactccgtctgcaatcccggcacctggggaggccgaggctggcggatcactcgcggctaggaactggagaccagcccggccaacacagcgaaaccccgtctccaccaaaaaaatacgaaaaccagtcaggcgtggcggcgcgcacctgcaatcgcaggcactcggcaggctgaggcaggagaatcaggcagggaggttgcagtgagccgagatggcagcagtacagtccagctttggctcggcatcagagggagaccgtggaaagagagggagagggagactgtggggagaggaagagggagaggcaga

SEQ ID NO: 5441 - DNA, 856 bp, Artificial sequence
  DNA replication origin
caaccgccctgtctgagaagtgaggagcccctccacccggtagccgccccgtctgggaagtgaggagcgtctccgcccggccgccaccccgtccgggagggaggtggggggtcagccccctgcccggccagccgccccgtccgggagggaggtggggggggtcagcgccccgcccggccagccgacccgtccgggagggaggtggggggtcagccccccgcccggccagccgccccgtccgggaggtgaggggcgcctcttcccggccgcccctactgggaagtgaggagcccctctgcccggccagccgccccgtccgggagggaggtggggggggtcagccccctgcccggccagccgccccgtccgggaggtgaggggcgcctctgcccggccgcccctactgggaagtgaggagcccctctgcccggccaccaccccgtctgggaggtgtacccaacagctcattgagaacgggccatgatgacaatggcggttttgtggaatagaaaggggggaaaggtggggaaaagattgagaaattggatggttgccgtgtctgtgtagaaagaggtagacatgggagacttttcattttgttctgtactaagaaaaattcttctgccttgggatcctgttgatctgtgaccttacccccaaccctgtgctctctgaaacatgtgctgtgtccactcagggttaaatggattaagggcggtgcaagatgtgctttgttaaacagatgcttgaaggcagcaggctcgttaagagtcatcaccactccctcatctcaagtacccagggacacaaacactgcggaaggccgcagggtcctctgcccaggaaaaccagagac

SEQ ID NO: 5442 - DNA, 957 bp, Artificial sequence
  DNA replication origin
caaatgaggaaaacaagtgaaagcttctcccgcaactgaaactcaacctctacattttacctaggtaaaatggtaaaattgcccacagggctcaggtgtttggatgcactgtccaggccaagaggaaagattttcagccagtctccaaaacatctcagggacgggtatggaaaacaggcgtaaagtgtctgtattgatcaaatcaaccccagagaaactttcctagggccagagagcatctcaaccgcgaaagtccgtttgcggcctccttctccacttcaggcctgcaaagcggctgacggcattcgcagtggctaggcaacggcccgcgcagacttctcggcgttagccccgcctcttgaggcgcttccgccgccgggctcctggacacgcctcctttaattggctaacgtcacgctgggagtgggcggggaaaatatgtcagactgtgcggtcacttccggcccgggagcgcgcgggttgattcgtccttcctcagccgcgggtgatcgtagctcggaaatggcgggtaagttaccgggaaaagtttaccaaggggaggaggcggccagatcggggatagaacgccgagacggtggtgacaatgcccgcctagaactttcgggctgtagcctgggttccagaaggcctgcttgggaccggaagcgcggaactctcagcccagcagctccttgttggcggcggtccgcgcccccgcccccaactgcttggggttctgcgccttctgccagcaatccggcccctaccgagggccgaagacgccagggaaaagcgtcatgatttgggctcgtaaaatgccacatgccttggggcctgtttctcttcccattccttttgtccactgctgcttgcttcagctcttgtacatctggtcctgttcccgccagctgattttaatgctcagatcctcctcctcttccaggtctccgtctacct

SEQ ID NO: 5443 - DNA, 968 bp, Artificial sequence
  DNA replication origin
ggatgcggcagagcgtaccggggaggcgcggccggataggcgctgcgctaggcacaaggctcttaggagaacctctgtctgttggccgcctcgggcgcccccagtgcgcgactccgcgctccagaggcagaggtcagtctcctcctgagccgccctagctctgcgccgaactgagtggcagcgacgagaagcggtcccgggtgtccggtgttagggaccgctgaagggtggggacagtggtaggggggcggcggcgcggagccgctggttggttcctggggaggaaagcgcgcgagggaggcgggaggccgatgagccgcgggccgcaggggccccggcgcagacgccgcagcccattgtgcttcctgcccggcgcgctctgttgcagaggagccccggccgggaagtgtggatgcgtcttacccgaggccgggccgcctcgcccgctctagtccagcggagcccgagcgcctcggaccaatccccagtgattatgcaagacagcggaccaatcagctccgccagctcatgaatatttatgaccttcgctgagtcaaagctttgaaccgagtttggggagctcagcagcatcatgcttagacttttcaaagagacaaactccattttcttatgaatggaaagtgaaaacccctgttccgcttaaattgggttccttcctgtcctgagaaacatagagacccccaaaagggaagcagaggagagaaagtcccacacccagaccccgcgagaagagatgaccatgaccaccatgccagaaagtctcaacagccccgtgtcgggcaaggcggtgtttatggagtttgggccgcccaaccagcaaatgtctccttctcccatgtcccacgggcactactccatgcactgtttacactcggcgggccattcgcagcccgacggcgcctacagctcagcctcgtccttctcccgaccgctgggctacccctacg

SEQ ID NO: 5444 - DNA, 815 bp, Artificial sequence
  DNA replication origin
agctgctcctccaagacctgcctgcactttcttttcctgaaacacagtctccccgccccgcccagcatcaggccgcagggcggaatgtaacatcttgtaatgcggcaatcactgccaaacccgtccccgcgaggggaactcccgcggggggggaagggagatcgaagggatgtggggcctcagcatccgccttcactggtgtgtgtgggggcgggggtggtgtgggctggcggcggcgtgcctggcagatcctgggtggggagggaagggaaaggtcggccgggggaggcttccctggggctgctttgggtgttaggatcctgctagaggccgccagtccccgcaggacctagtgccctagcgccaaggctggaagtaacgcggcccccaggatagcgccccatcctacagcttctaggattcctggaccccaaagttgaattcgaagggaaaggacctatctgtatttttggaggaggagaggatctgtagcttaattctcaaaggagtctccgaccctaaacaggttaaagccactggtggtcgctgttccatggagggaaaggagcgggcttttgacttttgagcgagttcgggggacgccaggagtgggggagttgcactcgagttttactgcccgtaagaacgactttttgagaggggacggggcttcttgctcccggacattgttctcttgggcggaggggaccacttcagagcttctctttgcacccgcctcttctgcccctcgtcttctaccactgaactgtttgtaaacaaagttccagtcttcccccgctctctccgcctccacc

SEQ ID NO: 5445 - DNA, 1066 bp, Artificial sequence
  DNA replication origin
ctttgccaagctgctgtccggttcccccgagagaggggcccgtttggtggccccgggagtgagcagggcctgagacgggccactgcaggtcgcagcctgcaggagaggtgggtggcggcagcgggccgggaggagggaaccccggctcggggtaagcaatgaggataagtggtctctgctctcagtctctggcgagttctccctggggttagaaaatcgtccccgcgctcaccggggcgcccccgccgccgtgatggtggtggtggtgatgcggctgcggggtctgagtggggtgcagcagcggcgccgtggcctgcaggtgtgaggcggatcccgaggtctggtggtaccaggggtagttgcccagaaaagccgaggccgcgctgctcgggctggagcccgagctgccggcgccgctgccgccactgcccggaccaccgccgcccgccatccgctgcggcacaccaaagtcccaggaggccggcgctgagactggcggcgaagcacaaggtggagaagcgctggccccagggtgctgctccgaggggatctcaccacttttccacatcttcttgaacttggaccggcggttctggaaccagattttgacctttgaggaaaaagacctgagcattagtggaggaacctagtcttggggcagtaggggttcgaagaggagaaaaaagaaggcagagaaaaaccgctggctagcggtgggcagcgagcgccctggggagataagaggatcacgggcggcggccttcgaggctctgccggttcctgctccctggggaggtaattgccaaaaggccaggactgctggtgtacgtgcactgtgatgatggtgacagcgggagggtgaggagggccagttatttcacccgcttaatcagtagcgagaggtacgggatttctgtccacccggtccctttccttccctcccacggcggccccttgggggtttccagctttgggcctagaagcttacttagggccgctcgaggcgcaggcctggaaatccttaaaagtacttaaaatgaactttaaaaagcattgtcctaaaccc

SEQ ID NO: 5446 - DNA, 756 bp, Artificial sequence
  DNA replication origin
gtcttttggaaacgccgctgaagagccgccagctggaaactggagtagatggtgcggggtttccggactttctttggcttcccgttcactatccgaatttcaggctcaaggtcctccttctctgcaacgataaagaatcgtaagaacagcgcaacccaggggtcctggagttcccgccctcctagagggcccggcgggggggacttggcttgagcaaagaggtgggtgcactgaactgtggcgccacgggcaggcgcaacttcgcagcgtgcgatcggagccgccaccgaccccgggagctgtaccctccagggaagggggagacaagtgcacacccaagagaaagaagctggtggcaaggagatgcccttatgaggcaggcagagcacgcccacttggctcttgaggccaccaggtcctaccaaaggagagagggacgtaaccggcgacctgcggcagattggaggctggggagggtaaagggcacaagcgggcggtgagcaggcagcgtgaaaatccagagctttcgaaggccccccgccccaaacacgtttacccatccatcccattaactagaccgactcggcactcttgacttcagcgttatgcataccaggctcgttgttggctggggacgaactggttccatagggagcgtaggaggtgtaggcggcggtgtagcccaggtcatagctgctcttggcggagtaagggacgttgttgaggccgctggcttggtactggtaggaacccatg

SEQ ID NO: 5447 - DNA, 815 bp, Artificial sequence
  DNA replication origin
accaaaggagagagggacgtaaccggcgacctgcggcagattggaggctggggagggtaaagggcacaagcgggcggtgagcaggcagcgtgaaaatccagagctttcgaaggccccccgccccaaacacgtttacccatccatcccattaactagaccgactcggcactcttgacttcagcgttatgcataccaggctcgttgttggctggggacgaactggttccatagggagcgtaggaggtgtaggcggcggtgtagcccaggtcatagctgctcttggcggagtaagggacgttgttgaggccgctggcttggtactggtaggaacccatgtgcgcgtagggcgagcccccgccgccgccgccgcccgccgggtgctgctggttggtgtagtagctgctgtcggtggcggtggacaccggaagggtgggcgactcctggggcttgtggaggctgctgctgctgctgctgttgccacccgggccggcgccgccgccgctcgggggctgctggtgctggtggtacgtgctggaggcggcgatctgggtcgagtgcatatcagccactagactgtcaaagactccagtcatcctggcccgagacgggaaagagcagaggtggcgggcgtgcgggggaagccaggcgcctcctctgtctctcccggtcccctccagcagccaatgtaattacgggggtggtggtggggaaacaagaaaggaggcaaccgtctaggcgcctcctcctccgggggaggcgatcaccgtgcgctgctcgggacagctgcctctggtcgcatcctctttcggcctctg

SEQ ID NO: 5448 - DNA, 996 bp, Artificial sequence
  DNA replication origin
caggcgcctcctctgtctctcccggtcccctccagcagccaatgtaattacgggggtggtggtggggaaacaagaaaggaggcaaccgtctaggcgcctcctcctccgggggaggcgatcaccgtgcgctgctcgggacagctgcctctggtcgcatcctctttcggcctctgggcccgctcggctccttgcccagcgcgagcgcgggctctggcggggggcgggcagtggagggggcaggggtggctgggccgggtcggggctctgggaggcgggagcaggtgagcggccccgagcggctttacgattgtctgccaggcgggctcctgaagtgtgggcatttaacactcgtcacgtgagcgctggcgacgtcacctagcaacagccaatcagaagcaaacggccgcggagctccgggaacgcccggccaaggggcgggcgtcacatggtgggcgctgtggctgcggctgcggctgcagcggccccaggtgcaaacagactgccgccgaatgtgagcagcgaggcgaggggtcgaggtagcgaggagtcagggtggcccgcagcaggaagacagaaggcgtggagacagactggcgttttgcctcagaggaagaagtggggtcccctctcccattctgtgagcaagtgccagttccagtgattcgtactttcatgtccgaggtcagttttcaaacacattaaagtacatcggtgcccagagtccagccagctctatcttcacttttcctcgaagtgtctggcatttattcttgttagccactcggcacttgacataatcaattgatttaattatccacaaaccacgtgtaatgctcgcttcttaaccaatccgcagggatattaggacaattaatcatataatattgaaacgggttttccttgttgcttcaaagagaagctacataaacttaaaggtattattgctaatagtatatttgaaaccactttccctggtactttcccgacacgcgagac

SEQ ID NO: 5449 - DNA, 1391 bp, Artificial sequence
  DNA replication origin
tcccctccccgtgcgtccgcccatggccgccgccgggcagctgtgcttgctctacctgtcggcggggctcctgtcccggctcggcgcagccttcaacttggacactcgggaggacaacgtgatccggaaatatggagaccccgggagcctcttcggcttctcgctggccatgcactggcaactgcagcccgaggacaagcggctgtgagttcccagacccttcccacccccactggggcgccggcctgcgcgcgagttgaggcgagggcgcgccctgttcccgccggccccggggagtagttggcccgtgggtcgcgcccgggccggccgaggcgcacccagcgcccagcgcgctcggctccccgccctgacccgccccgcgcggcgcctccctccattcagctcgggaaggaggagaacccgagggctaggctgggccccgggagagtttacttttttttctgttttaaacaaagtgctttccgccggttcttccctccgggcgtgtttgctgggaccccggcaggtggcacgctttgctgagcttcacgtgtgtgtttggggctggggtggcgttcagggtcaccgcagcgctgctgtgggtttgcagggagcgtagttccaggatggtctaggcctttcccaaactcacggtgcaccccgtctcccccgcagactggcgcgccccgcacaagttggaaagccactttccatgtgtcctgcatgactttctcagcaaggcgggggcgctccttaggagatacttttacatgcctttgaaaaaaaaaaaaaaaaagatgggggtgggggcgggaattaaccaaacacctgttcgctggactagatcagctgagaaaacaagtctgagtgatgtgcccagcccccaaagtactcggccgcacccgagacccgctcggctcctgcgttgggcgggcacagccaaggggttaaagcaaaatgtccgatctgagcctggactttgcaaacaaggtttgtaagggacaaccccccaccgtagcggtaaacctcccaggagaaagaggagaccggcactactggcctctccttttatttcttaaacagtgtttggttcccacatgatcggctatttaagccggagagggtattttggcgcttagtcgccttaatcgctatggggttgcattcttcatctgtgctactgaaaaataggctgtagcaacaaaaggtctcccctccccacccaggccttgagttgaactaaggaccttccaggaccaacagaccggagaaagcaaagtgcagccacagtgaagagattttgtgtttaggagaggcgaatgggattttagaactggaggaaacctcttgatttcagcggttaacaactttggaattcgtgaatgttgcag

SEQ ID NO: 5450 - DNA, 1321 bp, Artificial sequence
  DNA replication origin
gcagaggcgcccctcacctcccggacggggcggctggccgggcggggggcttatccccccacctccctcctggacggggcggctggccgggcggggggctgacccccccacctccctcccggacggggcggctggccgggcagaggggctcctcacttcccagtaggggcggccgggcagaggcgcccctcacctcccggacggggcgggtggccgggcgggtggctgacccccccacctccctcccggatggggcggctggccgggcggggggctgacccccacgcctccctcccggacggggcggctggcctggcggtggctgacccccacctccctcccggacagggtggctgccgggtggagacgctcctcacttcccagacggggtggctgccgggcgggggggctcctcacttctcagacggggcggctgccgggcggaggggctcctcacttctcagatggggcggccgggcagagacgctcctcacctcccagacggggtcgcggccgggcagaggcgctcctcacatcccagacggggcggcggggcagaggcactccccacatctcagacgatgggcgccgggcagagacgctcctcacttcccagatgggatggcggccaggaagaggcgctcctcacttcccagatgggatggcagccgggcagagacgctcctcactttccagactgggcagccaggcagagggtctcctcacatcccagacgatgggcggccaggccgagatgctcctcacttcccagatggggtggcagccgggcagaggctgcaatctcggcactttgggaggccaaggcaggcggctgggaggtggaggttgtagcaagccgagatcacgccattgcactccagcctgggcaccattgagcactgagtgaacgagactccgtctgcactcccggcacctcaggaggccgaggctggcggatcactcacggttaggagctggagaccagcccggccaacacagcaaaaccccgtctccaccaaaaaaaatatgaaaaccattcaatcgcaggcactcggcaggctgaggcaggagaatcaggcagggaggttgcagtgagccgagatggcagcagtacagtccagcttcggctcggcatcagagggagactgcggaaagagagggagagggagaccgtggggagacggagagggagaggcagaggcagaggcagaaaggaagatttaaaaaaggaagctagaagttgtggatggatgagaacagaataagtcaatgtaaaagttacacagatagggccaggcgcggtggcttacgcctgtaatcc

SEQ ID NO: 5451 - DNA, 934 bp, Artificial sequence
  DNA replication origin
cgccccgtccgggagggaggcgtgggggtcagccccccgcccggccagccgccccatccgggagggaggtgggggggtcagccacccgcccggccacccgccccgtccgggaggtgaggggcgcctctgcccggccgcccctactgggaagtgaggagcccctctgcccggccagccgccccgtccgggagggaggtgggggggtcagccccccgcccggccagccgccccgtccaggagggaggtggggggataagccccccgcccggccagccgccccgtccgggaggtgaggggcgcctctgcctggccgcccctactgggaagtgaggagcccctctgcccggccagctgccccgtctgggagggagatgggggggtcagccccccgcctggccagctgccctgtccgggaggtgaggggcgcctctgcccggccgcccctactgggaagcgaggagcccctctgcccggccaccaccccatctgggaggtgtacccaacagctcattgagaacgggccaggatgacaatggcggttttgtggaatagaaaggggggaaaggtggggaaaagattgagaaatcggatggttgccgtgtctgtgtagaaagaagtagacaagggagacttttcattttgttctgtattaagaaaaattcttctgccttgggatcctgttgatctgtgaccttatccccaaccctgtgctctctgaaacaagtgctgtgtccactcagggttaaatggattaagggcggtgcaagatgtgctttgttaaacagatgcttgaaggcagcatgctccttaagagtcatcaccactccctaatctcaagtacccagggacacaaacactgcggaaggccacagggtcctctgtctaggaaaaccagagacctttgttcacttgtttatctgctgaccttccctcc

SEQ ID NO: 5452 - DNA, 1025 bp, Artificial sequence
  DNA replication origin
ggaactgcttcatggagagcggggacggcgagaagcgcgcgtagaagtccacctggcccggaacgccgcgctcggacgccgggctggagcccgagtccgagctgaagctgcggctgaagccggcggcgcgcagccccgggcccgggccggccaaggcggctccgcgaagcagccgcgccagcctcatgccgagtcccgctagagaagccacagccagtacgccaggtttccccgcgcctctgccgagtggtacgtgagggacgtggcgggcagcaggggcggggatcggctgtcaccggcgcggcccccaccctcctagccggagcccggccccctgcgccgctgggcgggacgcggagcgggaaggaggcggggagagaaaaggggcgggcgcttgcggggcccgccccctcgccggagtcccgcccagcctcccgaggaaggagatgcggagcgcgcgccaggccgcagccgccgcccagatcccgccccagccggcgaggtgtggggtgagcgtgtcggccgtccccgtacacgtcgggtgatgggactggggacactaagaggcgaggcggtatggagcgtccccttcccgcacccttttgaaacaaatcccaccttcctgcttcctctgccctcccaatctcagccaaaaggctcaaggacagggcggcgttccgcttgcacacaccgcggtgtcgtgctgcgagcgcgttccagaaacgctcctctgtgacgcaagccacgcattttccagggtcagagagcttcaggagtccccgcttgccaaacagtagtacgtaaatacgaaagctgaacactgggacgtgtggccctaaatagtatcaccgcgacggcggccccgggagaagagatgtactgccatgtactggctctgtgcctttgagtgagctgtttaacctctctgagcctccgtctctttacctgaaaaaggagcatattatctgtttcagttgctgtgacatgggtagtagagctatctgtgttagcacaatgccggggac

SEQ ID NO: 5453 - DNA, 1141 bp, Artificial sequence
  DNA replication origin
gggcgggacgcgggtgcggggagggccgagtcgcccgcccgcccgccgctgcactgcggcgcccgtgggtggggattccgccccggggtggggaccccgcggtcccgctgctgggggacactgggggtggcgaccccggtggccggccacctgcgacaggtgtccgctgcgtccctcggagactggggccccaccctcaccccggggcctctgaggcggggcgggagggcaggcgccaaggcagagtggggagagggctgccagtgtctatatatttttcatacagcaaatgctactaaaatggctgctgcctctctgtttccttagaaacccatgagtcttcctcagcagctgtcgaaacttgccggcggttgcttgctcacctttgctgtctccccttcagaaaaggctggaggggagggcgaggaaggcttggcgtggggacgcccgtcgagtctctcagtgaggaatgagaggccagcttctcctgcggggtgaggaagggctgggcgcaatggggggcagtgcgggcagggctgaggggcagggagggaggaggccggtgggcccgatgtggtctgagggggtgacaggctgaagtcactggccttgaaccctgggcctgcctgggcttccatcacctgcatggtgaagaaaacacagttgagaatggggagtagccgggccacagcagaaccgagaccccggacgcgcaggtgaacttgtatggctggcccccttgctgttcttcctctggctggagtgttgaatgggtggtgataacggcctgtctcttgtagatgttcacacaaatgtcatgtctacaagttattcagttacactctgccaagaaccaaattacacgccaatggttgtttaggaatttgcggacaagttaaatgttttggactattaccaagcactgttttgatatttatggcactacatttggggccagacaatgggggaaagggacatagcattgctttcttctactgttccctgcctcctccccccaccaaacctcctatccaaccctgctcaggggagagtcagggggactggagagaaggaaagagcaagtgctttctgggatgctttgatcctaataaaacaattattaccatgatataaaagcctc

SEQ ID NO: 5454 - DNA, 1183 bp, Artificial sequence
  DNA replication origin
gtgtcccccagcagcgggaccgcggggtccccaccccggggcggaatccccacccacgggcgccgcagtgcagcggcgggcgggcgggcgactcggccctccccgcacccgcgtcccgccccccgggtcccctccctctccccaccgccccaggccgcgggagcccgcggggagggcgggcctgtcgcagccgcgctggtcgccaggcgtccgggaggagcggggtccgcgcggcggacgaggcgggggcggaggcgcaggcagagcgagcgcgggaggtcgccgcagccagggacaccgcgcgccgccgctcaacatggtcgctgcgcacgctgcccattcttcctcctctgccgagtggatcgcctgcctggataaaaggtagctcgccgggggccgcagccgggggccgagctctgcggtgctgcccgggccctgagaccgccgcagctccgcacctgggcgcagcgcggccgggctgcgggtggccggggtccccgagcgggggaaggggttgaggtcctcgtccgggagacaggaggacaaggatccccgcctctcgtggggtgccagcggcatgagattattacacgtggtggagaaaatgcagcgcagtaaggggagagagcacccacctctccaaccccctgccctgccgcgactccaggctccgctcctgggtgggggtttattttctcttggcatcacgggacagaagaatcgatgcataccctttccggctattcagaccttgcggggtatgaagttttaaagaggggtgggggcaccggcaggtgcagagtaacattctttttttgttcttgaaagcaaagtgtgagggacccggtggagctgtcgaatcccttgctgaaattcacagctctctgcccccgcagtcgctcgctcaaggtctgtgttagagaaggtcatttgggaggctgctttcgtcttaatacctgcttctcgggaaaagatctttacgctaaaaataattaaaaccataaagcatgtaactcccgacgacagctctctctaaggaggatgtgtgtgttaacagtggattgcagttgtttccaggctgtgacagcataattttctgtttgtccagattgcaggtttaaacgttacacagtatgttagcaattatagcttattaccctgattaaaaggtgatgcatctgaa

SEQ ID NO: 5455 - DNA, 1741 bp, Artificial sequence
  DNA replication origin
cgggccctgggtcggggaggggagccccgaggagcctcccgaggccgcctagactcccgggctccggcggagcctcggccccgagacgcagggacgactcgcgagcgcggcgggcctcgccccctccctccccgccctccgcgggctccagcctgacccctacctggctcccgggcggggcgtgagcagcagccgggggcgcggaggccccgcgcgcgacgagggcggcgggggttgggacgacagcggcccgcgcggctcccacgtttccgctgcagttaggagttgaacattccgcctctctgcacggcgccaatgaggaagacagtcacggcaacagcaccacctacctcccggcgcgaaacggctgggccgccctcccctcacacgcgcgggcgagcggggcgtggggaaggcgctcgggcctccctggcctgcgcccggggggcaccatccgccccgcgccccggcacccgccgaggcccccagacacacctgccttgctgtggggggagggccgtgggggtgttccccctcgcccccagcaccttaactcatctttttgacaaattaacaccacctgctactccttcaactcagtcttcaacaaacaggcgctggggacgcaaagaaatagaggctgttttgtgccccgcaagagttaattctctagttgggaaaggcacaaacgtagagatttctgggaacataggtctgaaggctgcctctctagaaagatcagtaggtacctctggaattttgaggaggggccgtggtctgctgctctagttgctaattttaacagagcagaattcagaagaggagccagagtccgttacaggcctaagccaaaggtggaggtgggcgttgggaagaaaagaaatttctgattggggaggatggttctgtgaaggaaaagtgagaggaggttgcaagggcatgggcaacattattcaggattttgaatttgaattttattatccatggacactgggagctgtgaaaaattagaatcaaaggggtgaaatgggggtttgtgattctgtttaaatggtaattttgagagagtagtccacagtagttgtaggttgggttgctaggatggaaccaggatgagtagtagatattgtcaccacccggttgtgggatcatgaggacctgagttaggatgtaggaaatggaattaaaaagaagaaatgggctgggcatggtacctgtaatcccagcactttgggaggccaagctgagaggattgcttgagacctggctgggtaacacagtgagacctcatctccaaaaaaatcagaaaattagcctgatgtggtggcatacatctatagtcccagctactcgggaggctgaggtgggagaatcgcttgagctggggaagtcgaggctaaagtgaaccacagtcgcgccactgcactccagcctggatgaaagtgagactctgtctcaaaaaaaaaaaaaaaaaaaaaaaaaaaaaaaaaagaagaaatggaattgagagaaatattaaacgtttcagcaagaggccacagaaattggtaacccacaagatttagaagagaagaagaagagagatgatgccaagatctcagacctggatgactggaagaatgatggtgtcattgacaaaaataggaatacgtgaaagggaagctggcttcatgttgagtttgaggtcataggagtaaaaacaggtagagatgcagcaactgaaatatgaaactgaaattca

SEQ ID NO: 5456 - DNA, 916 bp, Artificial sequence
  DNA replication origin
ggagccgcgcgggccgctgtcgtcccaacccccgccgccctcgtcgcgcgcggggcctccgcgcccccggctgctgctcacgccccgcccgggagccaggtaggggtcaggctggagcccgcggagggcggggagggagggggcgaggcccgccgcgctcgcgagtcgtccctgcgtctcggggccgaggctccgccggagcccgggagtctaggcggcctcgggaggctcctcggggctcccctccccgacccagggcccgcccggcggcggcggccggagcgagcgggcgggcgagcgagcgagcgttcgcggcgcccgggaagtcctcgcgggaccttggccgcggcgccgccaagtgcggttcgggagagttcgggccggtcccatggagaagttggcgcctggaggcgcgggcgcaggccggagcggccccggctttcgcggtcccgggcgtgcggcacgggcaggggctccgcgagcagcagagccggccaagcagcgggtgactggggcactgtcgggaggcgaaccgcgaggcccccaaatcagggtagggtgcaggccacttcccagcactcgctgtgcgtgcgaggagggacgacgaacttctgcttttctaagaactcgaccgcgagcggtgttgcttcccatccattttccttcattctgttttcctcacacaattaggccatgcgaataaccagcaggaacaatgaacactaaagattagttttaaaaacatgcgtaaatgtatccagagccaccgctccccgcccttcctgccccgggcttgggcagcatgaagcgcccgccctctcgggcttccccctttcctcccaccggagccggggatgtctcctttggcgaccctcaggcagcggctttttgtgggctcccagacctgcaccaggcc

SEQ ID NO: 5457 - DNA, 1285 bp, Artificial sequence
  DNA replication origin
tagagctcccgggaacggcctagccagcgccttcccctctccagctccctgccgccgcgcggctcctcccaccctgggctcctcccgccctactcccgcctccccggccggttaggccaatgggcgggacgcgcgggcaaggcggggaggggcggggcccatggtctgcgcgcaggtgccgctcggcgcccggcccgcccgttccgccgctgtcgccgccgtcgtgcgtgccgctcggcggaggggacgggcctgcgttctctcctccttcctccccgcctccagctgccggcaggacctttctctcgctgccgctgggaccccgtgtcatcgcccaggccgagcacggtgaggccctcagggagcccgggggcgcgatctccgccaggtcttcggcgcctgggctcattgccctgaggctggcgcggggcccgggcccagtggccaagatggggccagggcagcgggtggcttggggatgtgtggatgaatgaggcgctgtcggactaggccgcgcgtcgggagatcggcctacgcctcacgcgggaaagccctggggaaagccttctcccgacgccaggacgcccggtggcccagtccggagaggaggatggggggtggggcccactttgggtgggctgccggccacctctctgtaggccagaggacccgacaggcgctgttcctgtatctgttctttggaggcctgggagttggccaggaacaggtgtcaggacgctgagaagggaaattcctggccctcggggtcagggatcagaggctggaatactactgcaagggcagggccccagcgtggtcctaggaggtacaactctcagccagaagactgggacagttttagttcccagcttctgagacgtgagcttagcggtctttgtgatttcactttgcagtccaagggtgggagtaattctgcacgcatgatttggagacagaactagtaagggacagagaaagtttcgacttgtaaataaaaaggttccgtcgattaatttaccattagaaatagtaaccataatgtagattttggaggttgcttatgaggactgatgagccgtaccttcagtgccaaaggtgggagggacttggtggaaggaccccagtacctggtgggtgttcatctatgtgaaaaatgggggttgtgggcgaatgggaaagataagattccagattatagaggaatggtttggtgtgaagggtgacttggctgctggtggttccacaatggaattttctttgactgtcttctgtgtacttgcttcca

SEQ ID NO: 5458 - DNA, 984 bp, Artificial sequence
  DNA replication origin
gctccgcgacaactcgtcgtttgcacccgagggtttggggttggtagtttaattttttttttttcctaagaagcagggtgtgggtttagtggggagtgtgctatattaaaaccagtgcccaggtctgcccgagggcgctggtatttctggttcaaaaacagcttctggctaccctggagaagaaagagaaagcggggcccagaaagagaaaaacaagcaggtcagcggttgctgggggactcgaagacgcaccctggtctgcttgaggacgcctcttttcacactgacaaggtccagggaggacttcaggatgcttccagcctgcaaaatgtggaagcgcccacgtgtggcctggtcctccgccctcccgggtgaaagtcctggagagatttctcgggcgcgtccgtgaaagcagggcactaatggggagcctacctcttaaaacagcgcacttgccctacggacgagcctctaggccctggtggtctggaatgggagtgggttggagctgggacaagaaaactccactccaggatgaaacgcgacatgcaaatcttcaccgggttaaacaaacagccgagcaagctgcagcttcagcggaggtggaggtgggggcggacgccgctcgcgccggtctctgtttccaaagttgttacagtgagaaaataagcggcttcgtgcagcgtgttgtatgggctgatgcctcccacccccatgccagcccacagcaaaacccggcagataatcagcacatcccactgtttagtcatatttgacaactgggttaacctggtatctaagcgctggcgaaaccgtacaaagggtgccctcaattaccaccagaagcctctagcgtgagtggcacttgtattaccccccgggtcagaggccagagcgacaattaggaagtcacttacaccgctggggggaaatggcgggatgcagcaggctccaggccctcccaacaaatctgtggatgtagat

SEQ ID NO: 5459 - DNA, 850 bp, Artificial sequence
  DNA replication origin
gcggcccttcgtgtgcaactggctcttctgcggcaagcgcttcacgcgctcggacgagctgcagcggcatctgcggactcacacgggcgagaagcgcttcgcctgtccggtgtgcaacaagcgcttcatgcgcagcgaccacctgagcaaacacattaagacgcacaacgggggcggcgggggcaaaaagggcagcgacagtgacacggacgccagcaacctggagacgccccgttccgaatcccccgacctcatcctgcatgactccggcgtcagtgccgcccgggcggcggcagcggcggcggcggcagcggcggcggcggcggcggcggcctccgcgggaggcaaggaagcagcgtctggccccaacgactcttagaggccgggcgagaggcgcgagcacacaagcgagtagagacaccgagaacgaacgagaggttcggagggcgagcgagcgggaggcgggagggcaggggcttcagtgacgcccccagggcccgggctgggcgcgaggtggagccgctcagggctcccgggctgcggttcgcccgctgtgcgaggagctcccctctgccttccgcgcccggataagaatcgaacgcgtggtccggaaacaaaagcgaaccatcctccgacacaaacactttaaaaactgtactcccagacgtacacatacaccggagacctacaaccacaagcacgcacactcgcgcgcgcacacacataccactcgcccaaacttctcgagcgaagagcaatacatagaaaggctccctctttgcccactctccacctccctccaacacccgtctctttccttttctcaaaaacaagccaccacccagcaaag

SEQ ID NO: 5460 - DNA, 906 bp, Artificial sequence
  DNA replication origin
ccgtggacagcctgggtcccgcgcctcgggctgagctcaccgctggactccgcggacccggggccgccccgtggggctcgggacccactatctccgtaggtctcgagcaggggcttcgcggcgatgccctggggctgcacctacaccccagctaggacagagggggacgttcgggcatcccctggggccggctcaagttctggcaccgcccgcctgcctgtctatgggaaccgtgcccctcccgcgctccagcccgcctccctcccggccctcccgggcggcccgctcgccccaggtcggcgtagacgcgcgcgttaggggtctgcgtcgaccttagagacatctccagtcccggtcagtgcttttcgcccggagtggggacgggggttgagggggggtgatcccccgaactctccagagacagcttcacttcagtctcgcgtcccctacctttttctactatacatacttttctttttaaagaaagaactgttagcgttgtgagtgtaagggaaagcagctgacccagtcgctgtgagcctttgttaatcgcaaagagctctaaatcagaccactggtggttggttagactttgagctctttgggattaacaaagggtgtggctgtgtgaggaactgagcctggtgaggtcttctggtcctgcttaaatcccgatggagtattccttcttcagccacgggctcctggccttattgagttctctgggaagcctctcaagttggctcagtgaccaagtggacttggtcccttttactgaaaagcgtgtgtccgtcctgccccctggatcgtctctggaccccaccccactcccattcccccatccctggctgcgtgtagccccagactcccgtcggatgcagccgcagagcccgtgaacagattcca

SEQ ID NO: 5461 - DNA, 1315 bp, Artificial sequence
  DNA replication origin
ggccgcgcgcccgcgcccaccgctcgcaggggacgcggcctcgacgtccccagccgccccacccgcgtcaccggtgccaggcggcacttccgtgccccgccgtcgagcccagcccctcccggcgtctcccccggcccccgggagcccggaacccgggtcgcgccagaggcgacgcgtcccttaccgcgcagcggctccggacgactccgcagccccgcgccgcgctgggcattttttctgggaaacttctcccggggtccgcagggctgagccgggcgggcaggaaaagcgctcagcgccgggaggctgcgaccatccgggaacttcgccgagatgtgggccctcccctccggcgccgccgcccccccgccgccccgccacatgtggacgcgccgcgaggccccgccggcccgcgccctgccctccgcgcgcccgcctgccccgccagcaatggggctctgcgcctgcagcttcggcccgcagaggatcgcggcggggcgggatggtcggggctggagtccgcagtttcctcagtcccgctcccctgcgcggcgaggggaccgaggcaagaggacaggagtttgcagaggggcgggaactggaaggggagtctagcccagggcctttccccccaactcttgaatcttctccaccttcttgcggctgctggcggggggatcgggtgggggtgttccctctgttcgagccggaaggaacgccttttcccacgctttcccgtctgctctcaaaaaaagagtgtccaactttcagatatctgaaattcaaattaatttttaaaaatggatttaaaatcggggtgaaccccacagagggccaaggtccacacgcatctgactcctgcccactatgtggggacaacgtgctgctcttccctcggaaagatgctgcctctcctcacaagtcggttggaattgagtcgttttgctgccagtggggatggatttatcatcagccacccacttccttaaatacggtaggatccacagcaaacatgtggagaaaaccgaagctctactccattgccctagctaactcctgctcatcagggggttctgaccagctctgagagctgccacctccaggccccaaagaaaagttaacattcactcgctaagacgctatagctactgagtgtgcatttgaaaggaataacaacaaaaagttcttgctcagtgtaataaccatcggatcatattgttaaaatatcaaggctgtgtatccctttgaattaaagcagaaaggtgagaatataaaaccacctttgcagaattataactgaggaaattgtgacagt

SEQ ID NO: 5462 - DNA, 1096 bp, Artificial sequence
  DNA replication origin
cttgaactcctgggctcaagcaaccctcccatcttggcctcccaaagtgctgagattacaggtgtgagccaatgtgcctggcaggaagcactgtttttagaaggcaccttaaatagttctcttgctggggtcctcagaccacccttgagaagtattattcttgaaggatgaccaggagtttgggcaccaaggggagtgtgggctgtcacagagttcttgaggtcatgcacatgcaaggggtaccacaacatcatactacatcatactacatgcccatggtccacccagaggtggggtgcatgacctgcaagaccataggcagtggccctggggaaggaggcagagggaggatgtttcaggcagagagtgccgtggggaggggtggggcatgtctgtgtgatgtgtgtctgcatagtgtgatgcagggtatgttggggacactgaagatttttggggagcacatagggtaggagacaagggagcaggtcgggaggtccttgggtgtcatgtcccggaagccctgctttacctggaagcagtgagaatccacagaaggatattagcaaagatgggaccagatgcatggatggccacatgagaggtgagctgagagggtaggtctgcaggcagggacagtcattgagggttctaaacaagccaggtgagagccagtgagagagctgaactgagcccaaagcagagtatgtgttgagcagagcacagacttgagagatgtccaggaggagggtgtggattggttgctggatggggaagaggaggcaggtgctgagatgaccaggagggtccagtcaggggacccagcatgtgattctttgcgaaggcaggtcgggaagagcaggtgtttgtggaatgggaaatcagtgattagttaagggctgatcatatttaatgtaaaattctcatgtgacatccaggttctggtccccaggcatctagaactcagaggacaggcctgggaaggaggtaaatattttgatctacagtcttggcttgaggtgactgctaaggtagtgtgaggagtgggaagaggaggatgtgctaatgtgattcctgatcacatcaatcccaggagcca

SEQ ID NO: 5463 - DNA, 1035 bp, Artificial sequence
  DNA replication origin
cctcctgcctcgcaggtacctcctcccgcgcgcacgctccgcgcctgatggcagcgacaagtgccggctcgcggagagctagcggggctccctgggcccggtgcgcccgacaataacgcgtgaataactttttcttgcagcggtcccccgcgtcccggcctgcagcctccccgggcgccggcgcccccagcacgccccatcgggcaccccactctctccgaggtgtgggtgcggcgggctgatgaggtgatccctagcccgcctgggaggagcgcctggactcgcgggcggcggcgagcgcctttacaatggccctgaccctgtttggtaagtgcagccgtctccccgcgccgccgcaggtgggccgcgtcccggggctcgggggcgggggcctggggggcctgggcgcccggggagggggcgcggcgcgtggggtcggggcgggccggggccgcagagttggggcgcccggggcgccggcttgctccctcgcgcctctcccattgtttcctctcccggcagggccgatgggcgtgtgctcccctggccaattctcggctgggaggctcagaggtcctgggtgttttgcaaacgcacaaagattctctaagatgccaacttgggagtgaagttaactggttgttttcaaacctgcctttcccgtcggtaaataaatccttggaaagtttatttattttgaacgaggtatctgtgagtccccagcctccttggaattgccaaatgcatgtgttgcttcctgttggactattggggaattttttttttggactcagtatattccgttggaaataagtatgatttgtgaactgaatatgggttaaaattgaaaatgtttgcactaacgaatgagagcagacagaataaagttggttaccagaagataactgtaatctcaggagactgagtattcattaagaatgaaatgttatttttgtggtgtaattactgcagcactgttgcttttggtggttaagacttcaagctgtttttttctcagtctgcaatgacaatggg

SEQ ID NO: 5464 - DNA, 1054 bp, Artificial sequence
  DNA replication origin
ctcacttcccagaaggggcggccgggcagaggcgccccccacctcccggacgggtcggctggccgggcggaggcgccccccacctccctcccggatggggcggctggccgggcgggggctgaccccccacctccctcccggaaggggcggctggccgggcgggggctgaccccccacctccctcccggacggggctgctggccgggcgggggctgaccccccacctccctcccggacggggcggctggccgggtggacgctgaccccccacctccctcccggacgaggcggctggccgggcgggggttgaccccccacctccctcccggacggggtggctgccggacggagacgctcctggcttcccagacggggcggctgctgggcggaggggctcctcacttctcagatggggcggctgccgggcggcggggctcctcacatcccagacggggtcgcggccgggcagaggcgctccccacatctgagacgatgggcggctgggcagagacgctcctcacttcctagatgggatggcggccgggaagaggcgctcctcacttcccagactgggcagccgggcagaggggctcctcacatcccagacgatgggcggccaggcagagacgctcctcacttcccagacggggtggcggctgggcagagggtgcaatctcggcactttgggaggccaaggcaggcggctgggaggtggaggttgtagcgagccgagatcacgccactgcactccagcctgagcacctttgagcactgagtgaacgagactccgtctgcaatcctggcacctcggggggccgaggctggcagatcactcgcggttaggagctggagaccagcccggccaacacagcgaaaccccgtctccaccaaaaaaaatacgaaaaccagtcaggcgtggcggcgcgcgcctgcaatcgcaggcactcggcctgctgtggcaggagaatcaggcagggaggttgcagtgagcagagatggcggcagcacagtccagctttggctcggcatcagagggagaccgtggaaagagagg

SEQ ID NO: 5465 - DNA, 898 bp, Artificial sequence
  DNA replication origin
gaggagccccgccgcccggcagccgccccatctgagaagtgaggagcccctccgcccagcagccgccccgtctgggaagccaggagcgtctccgtccggcagccaccccgtccgggagggaggtggggggtcaacccccgcccggccagccgcctcgtccgggagggaggtggggggtcagcgtccacccggccagccgccccgtccgggagggaggtggggggtcagcccccgcccggccagcagccccgtccgggagggaggtggggggtcagcccccgcccggccagccgccccttccgggagggaggtggggggtcagcccccgcccggccagccgccccatccgggagggaggtggggggcgcctccgcccggccagccgacccgtccgggaggtggggggcgcctctgcccggccgccccttctgggaagtgaggagcccctttgcctggccaccaccccatctgggaggtgtacccaacagctcattgagaacgggccatgatgacgatggcggttttgcggaatagaaaagggggaaaggtggggaaaagatagagaaatcagattgttgctgtatctgtgtagaaagtagacatgggagacttcacttagttctgtactaagaaaaattcctctgccttgggatgctgttgatctatgaccttacccccaatcatgtgctctctgaaacttgtgctgtgtccactcagggttaaatggattaagggcggtgcaagatgtgctttgttaaacagatgcatgaaggcagcatgctcgttaagagtcatcaccactccctaatctcaagtacccagggacacaaacactgcggaaggccgcagggtcctctgcataggaaaaccagagacctttgttcacttgtttatgtgc

SEQ ID NO: 5466 - DNA, 1238 bp, Artificial sequence
  DNA replication origin
ctctctgggctggccgagaccggagccggctccctctgtttgaggtgaggtgtggagggagaggcgccggcaggaacccaagctgcgcgccgcgctcgcgcgccagcgcgagttccgggtgggtgcgggctgggcaggatccgcactcgaagcggcgggctggcgccgccagccccgggctgtgagagtcttagcactcgggctagcagctgcggagggtgggctgggatacccagcactaccggcccgcccgcgctgcgctcgaattctcgcggggcctcagccgcctccccgcggggcagggctggggacctgcagcccgccatgcccaagccccgccccccatgggctcccgcgccgcccgagcccgatcctcccctacgggcgccgccccctgctctgcagcacccggtcccatcgaccgcccaagggctgaggagtgcgggtgcgcggagcgggactggcgggcagctcgcctgccgccccagcgcgggatccactaggcgaagccagctgagctcctgagtcgggtggggacttggagaacttttgtgtctagctggagggttgtgtatgagccaatcagcactctgtgtctagctccgggtttgtggattcgccaatcagcactctgtatctagctaatctggtggggacttggagaacttttctgtctagccagaggattgtatatgcaccagtcagcactctgtctagctcaagatttgtaaatgcaccaatcagtgctctgtgtctagctcatctagtggggacttggagaacttttgtgtctagctaaaggtttgtaaatgcgccaatcagcaccctgtcaaaacggaccaatcagctctctgtaaaatggaccaatcagcaggatgtgggtggggtcagataaggcaataaaagcaggctgtcagagctccagcaacgacctggtggggtccctttccacactgtggaagcttggttcttttgctctttgcaataaatcttgctgctgctcactctttgtatctgcactggctttatgagctgtaataccacgaaggtctgcaccttcactcctgaagccaccaagaccacgaacccaccagaaggaagaaactccggacacactatctttaagaactgtaacactcaccgcaagggtccgtagcttcattctttaagtcagtgagaccaagaacccaccaattccatacacattactacaactttttataagactttgcctacat

SEQ ID NO: 5467 - DNA, 1323 bp, Artificial sequence
  DNA replication origin
ccgcggcagccgcggcagccgcagcggctgcggcctcctcggcggcggcggccggcgcgccccccagcggcggctctgcaccctgctcgtgcctcagttgccacagcagtcagtcggcggcggcagccgcggcagcagctgccgcagccctgggttcccggggtggcggtggcggcggcggtggtggtggtggcggcggcggcgggggcgccggggccgggggaggctcggacttcggctgcagcgcggcggcgccgcgttccgagagcggcttcctgccctactcggccgcggtgcttagtaagacggccgtgagcccgccggaccagagggacgaggctccgctcaccagataactacgtcgccaccgccagggggccgcgcccgcctctctgagtgtgcccgggagtcccctgtgcgccccctgagccctccgcgcgttgcccgctgctgccgctgccgccagggggcgccccggggcgcgggaggccgaagggaacctgctccgaattgggggagaaggagcaggcgcaaaagcctggcgggcatccccctaaattatttctatttttgtatttgccacccagccgtctgcccttctctctcttttctggctcccgggacccactttccacctctgtcctgagcgcttggtttcccaaagaccaacccctcgccccctaagctagtcctggctgtgcactctcaggtccgggttgcttggctgaacggcgtggcccgaagcaacggagaaccacaacaaagacagagggggatgctgtgcgctggtgcttgggggcgggggaggagtcgccccggaggtttctcgctgctgctgtttttcttccttttctttcaacgagggtgggggaggtggcaaacgttctttcagcctgagcttattagggaccctgcccgaagagtgcgggagaacggaggtctgataaggccgggaggacggatggagagcgtgggcagcggtggttgtttgtgagattgtttactacgttcaggagcaaggcgggtagggatgtggccgccttccccgggaaggacaaagccgaggtgctggaaggggtggccgttgcgccgcctccttttcggtccaacacctttctctcttttggtctttggtttcagtgctgatggaatggaagcatcttgcatattttatgcaaaaagtgatggcaaaagaggttgccacggccagggaagggaaaggaagggagttggggtaggggtaagactgatagatcgctgtagtatttggagaggcgttttcagctcagttttccaactaccgggttccactcgatctgggaa

SEQ ID NO: 5468 - DNA, 995 bp, Artificial sequence
  DNA replication origin
gcctcccccggccccggcgcccccgccgccgccgccaccaccaccaccgccgccgccaccgccaccccgggaacccagggctgcggcagctgctgccgcggctgccgccgccgactgactgctgtggcaactgaggcacgagcagggtgcagagccgccgctggggggcgcgccggccgccgccgccgaggaggccgcagccgctgcggctgccgcggctgccgcggcagaggccgcgctgttgagccccgcggcggccgcgggagcctggtagagaccagggtggcggaagctacacagcagctccggccgagagtaggggtgcgagagggcgcggaaggtgtccagtggccggatggaagtagcgaagggcgacgaagccgcggccgccgcgcctgaggctgcagccgcggccgccgccgccgtgacgcccacgtgcgggtagtagtgcagcggcacgtgcgagtggaaggggtagggcaggcttccggtggcggccgcgtgcgtcatcatgtaggtgtagaagctggggtcggctgggtgcggccaggacatggccaggcgctgccgcttgtccttcatgcgccggttctggaaccacacctgcggggagagacgcgccgcagcctgggttagggagcgccccgtgttcccagctcctgtcccaggacctctgccccttccggacctctgaatggcttggtctacttctctccgaccaagcccaaccccgagtaccctgtggtctcccagctgggaaagtgtggacggcagtgtgtggaccgccgtgggcacaccgtcctcaacgaagagggtcctctcccccgcgtccggctgctgctgctcctcaggcttttattcccttacttcttgctgcacttttttgtcccaatccaacctttcctctccctcccgccacccaccagtgccggtctcgctgagcacccgtctctcaatcccaggatttgtacggggattctgggcagcctttgaag

SEQ ID NO: 5469 - DNA, 1576 bp, Artificial sequence
  DNA replication origin
gtttggtaccaaaattgtttcataaagacccagccaaaccctctttaaaagttagcaatcctgtcgcctcgccacagttggcctttttaaaatgctggttgaactttcattgctgacttttgccttcttttcccaaatagtgaaaaaaattttctcatcagcaaacttctattccctatgatttcctgtaaattcaggcccctcccatctcaaatttgatcatgaacatgtctagaacttcaaaacgatgaaacgaattctcttgcttttcctttccaacacccctctcataactttcccctttatttgagccttttatggttactgcgttttgcatgtcaacactcctaacaccagcagcctaccctgaaatgccaggccaggccaaggagggccttcctggctctcttcctcatcttactcagggcatctttggtcggggaacagtggtgctgggtgacaagctttcaccaatcacaggcttaggggagtgattttcttggagatgggctggcttggggagtgcatgccacagaaccaaatgggctctgaaggatcccatatccacccccagaaccctgggctcattggatctaatattgttcctaaggcagagccccaaagtcacagcaggactctcattggtgccccattagttgctgagattgagggatggtgggctggagctctgaggctgaggagcaacagaaagggatgatgagggacagggctgtaatccctaacaccctggcagcttggttccagagctggacctagccccaccagcactgccctgagcccacctaaccccttgaagtcagaccgtttctctgggctgctcctatcacaaaatccgaatttgcttggaacaagcgccctcttaatttgcccctctcagttctctgcagttgacagcttggaaaaggaagcgaaacaaaggtccctgggaaagtgaagttttcaattaatttggtgtgagaaacgggcgggagtgggtggtgactgcaaaatgcgaggccggtcggctgctggagagacacagaagtttcacggtgggaggctgagtggctttctcccccggcgccgttctcagggtctttctgcgggtcgaagaaggacccgcgggagctgagaggcccaggtcggaagcactcccggctggcccaagagtagaggcgaagagcgttgagtaggcatccatggacttttctttctgggacagattgtcaggctcactgcgccgatgcctgtctttcatctgtttaagtctctgccgccagccccaagggcgcttcatgggcattttccgaacggacagcgtgtgtgtataggaagggtctgctccaatgcctcttacctgtgtgaaatgcctttgccgggtaccagtgcacaaggtagggcaaattagctcactcggatttggggtctagaagtcgactaactgagggattcagcaacaggataaaaaaatgggcctgttttcacatcattctgatcatctctgtccttcgtcttcattttgctgtgcaactcggggagccgaggagaggtggcaaaaacagcggttgccgagaca

SEQ ID NO: 5470 - DNA, 1171 bp, Artificial sequence
  DNA replication origin
cgaaccagagagaaaggagaggagggaggaggcgcgccgcgccatggtgtcctgcgcggggccagggccagggccggggccgggccaggccgggccatgagccgcgccgggagctgggacatggacgggctgcgggcagacggcgggggcgccggtggcgccccggcctcttcctcctcctcatcggtggcggcggcggcggcgtcaggccagtgccgcggctttctctccgcgcctgtgttcgccgggacgcattcggggcgggcggcggcggcggcagcggcggctgcggcggcggcggcggcagcctccggctttgcgtaccccgggacctctgagcgcacgggctcttcctcgtcgtcgtcctcttctgccgttgtagcggcgcgcccggaggctcccccagccaaagagtgcccagcacccacgcctgcagcggccgctgcagcgcccccgagcgctccagcgctgggctacggctaccacttcggcaacggctactacagctgccgtatgtcgcacggcgtgggcttacagcagaatgcgctcaagtcatcgccgcacgcctcgctgggaggctttcccgtggagaagtacatggacgtgtcaggcctggcgagcagcagcgtaccggccaacgaggtgccagcgcgagccaaggaggtatccttctaccagggctatacgagcccttaccagcacgtgcccggctatatcgacatggtgtccactttcggctccggggagcctcggcacgaggcctacatctccatggaggggtaccagtcctggacgctggctaacgggtggaacagccaggtgtactgcaccaaggaccagccacaggggtcccacttttggaaatcttcctttccaggtaggggcgatggagaaaagggaccgacacgagggagggggagagagaaggagaaaagaaaggactaagagtatgcgcccctacttgggagtgggagttgtgcctgtgctccacacgtgaccagggttaacccagtggaaatttgtccagttcgtgtgaaatctgtaaattcctcctctgatttcaactgcctccgtcactgccctttctttcctgtgtgcagcgcagacacgtttttctcctaaagttgagagtctctgcgtgccctttccttgggcctctcccttttctcct

SEQ ID NO: 5471 - DNA, 1434 bp, Artificial sequence
  DNA replication origin
aacctgaggccgaatggcggccagttggccgcgcttccccctatctcctacccgcgcggcgcgctgccctgggccgccacgcccgcctcctgcgcccccgcgcagcctgcgggcgccactgccttcggcggcttctcgcagccctacctggctggctccgggcctctcggcctgcagcccccaacagccaaagacggacccgaagagcaggctaagttctatgcgcccgaagcggccgctgggccagaggagcgcggtcgtacccggccgtccttcgcccccgagtctagcctggctcctgcagtggctgctctcaaagcggccaagtatgactacgctggtgtgggtcgtgccacgccgggctccacgaccctgctccagggggctccctgcgcccctggcttcaaggacgacaccaagggcccgctcaacttgaacatgacagtgcaggcggcgggcgttgcctcttgcctgcgaccttcactgcccgacggtaaacggtgcccatgctccccgggccggtttgggccgggatgggaggtggggttcaagggagagtgtaaggggaggtgaaccgcctgggggcgggcaatagacagagtacgggctgggttgacgtgggttggggctgtgttgcaggcctgccgtggggggcggccccggggagggcccgcaagaagcggaaaccctacacgaagcagcagattgcggagttggagaacgaattcctcgtcaacgaattcatcaacaggcagaaacgcaaggaattgtccaataggctgaacctcagcgaccagcaagtcaaaatctggttccagaacaggcgtatgaagaagaagcgcgtggtgcttcgggagcaggcgctggcgctctactagccgcgcgcgtggccagggccgggttggatctgcccttttggacagaggccttgtttggggagggggatctggggctaaggctaaggcttttccttcggttccttctctgctggccccagaagccaccaagagatttacagaccaggccagttgggcctccttgctttcctcagtccctgagaagcccgtgagaaacgtgcggaagtaccagtgcaactctggctggccttaaggcttccacgttgggggactgaggccaactctccttgctcctggctggggcatttgcacccaccgctcattcttgctccccggtacctggatttttctgtttccacccaattcgttctccctttccccctctctccagccccttcagcgtatagcagtcgcctagttagggctcagagtggaaggcctcctgagggaatggaaaggactgtgggtacaattaggtctctgcagcagaagccctttgtggcaaggccaggatcttcactctggagaaaggaaagggcaccatccaccctccaccctcctgtctgccctggctgat

SEQ ID NO: 5472 - DNA, 1448 bp, Artificial sequence
  DNA replication origin
acacaagatgggcagttctagttgggggaggctcgatgccctccagtcgccacagacctatttgcgcagtgttgggggagggaagaagacatgggaaggggcggaggaaggagagaggaagggagaaagggagggaggagaaaaagaggaagggggggtacatcagccagaaaatagatattagctcagaccacccgccttttctctgtctgtccgcacggtgggcagagcgcacagcaccggcactgcagcagcccgggccagggagggaaccagcatcacagccagcgccgcctgccctgggtataggactgaggcccaggccccagcgctgggattgcctgggcggaggaatcttggggaaaggggcagcctcctgccctcggttctgggatttgggtttgggaagagacggtttacctttgaaaagcgtctgctcactcggaggtgggatcccaggccttgcctggacccatgggctaggagagggtcgcggcaggctgggaggagagtgaggccttgggggagtggatggggtgccccacgaagagtctgcctcagagccaggtgacacagaggggctccaggagggagtcaggctccgctgagagcccttagagagacaacctatcttgggggaggggctgaagtgaccatgcagacccaagggtaccagaagagcctcggggaaacgcggcgtggattcgcaggccttggcggggctccgaagcagtgaagggtctaggtataaggcggacacccaggctaggcctgaaagcagaggggtgaggaggacgaaggtgcgagtgtgtgggggttgtctcttgtggggagccagcgggaagccaagcaccctaagagtaggactccagatccttttgttcaccagactccccagattctagggaggctggggaccacgggctgagccccctcctggcttcagtgctgaaggagaaggcagagaggcaacggggagagagacagagacagtgacacacagcttagaggaaaggaggggagaggatgagaggacagagagagagaggagaagggagacaggaaagcaagaggaaggaagaaggaaagcggaaaagaagaggaaggagagaagtgaagacaggagagagaagggagaagactgaagagaaacgaggcaaggagaaagagagacaagaacagagagggaaaccagagagaagggaagagagccgggtgggcacgaaggccccggcctgggtgagtgcctaggtggtgaatggcctgggtttttccgaggccagcactcgcacccttggggtcagaaccggaaagagccaagtcactccactctgaacgcgctgggcagaaaaatatgtaaatcagggctccctgcgccctggagagtggcgaaattactcccgcccggtgaacaagaagcaacaagctcccaggcgggtgagctgcag

SEQ ID NO: 5473 - DNA, 859 bp, Artificial sequence
  DNA replication origin
gaacgcgctgggcagaaaaatatgtaaatcagggctccctgcgccctggagagtggcgaaattactcccgcccggtgaacaagaagcaacaagctcccaggcgggtgagctgcagagggtggcagagtcgcgggggagggagcggctgcagtaaggggggtggggttcggaacctcacaccctcacacctagttcctagcttctagggagcctggagccggggcttccccccctctgctcgctgcttctctcccttcccccttcctccccctcttccccctccttcctcctccccgccggcctcggtccgcgtacttaaagcggcgcgggagggcggacgcgggcgggcggcccgttcgggcggtggcagatgcgcccagcggtgacagcggccagcggcgcgcaggtgaccggcctgaggcgcagcctggtcagggagcgcccggggagagctggcggcagagggcagccgatccgcccccagcgcgcgcgtctcggcgccaggagccgtcccggggcgtgttggcgagcgttgatatagatataaggacatttctcttcatggcgtcacgtgacataattaccaccagaatcaatcaagatgaattgcacgtcagcgcccggtggggatttttgcttagttgatcctggcccaagcctcttgtgcaatcgatggctcaggttggctgcgcggggagcggccagaggctcgctggcgcgcacgccgcggagtcatgaacgactttgacgagtgcggccagagcgcagccagcatgtacctgccgggctgcgcctactatgtggccccgtctgacttcgctagcaagccttcgttcctttcccaaccgtcgtcctgcca

SEQ ID NO: 5474 - DNA, 1275 bp, Artificial sequence
  DNA replication origin
cctcggtcccgcagtcgggccccgtcgctgactctccagcttccgagccgcgggcggcgagtccagggcacacggagcggccgcgggggcgccaggccggtgtcgcccgaggcaggcgggccctcggggcggcccctagcgcccgaggggagctgttctcccctcgcctctctccctactcacacccacccctccccacacatccccacacacacgcttgctcacagcttgtcgtgttgtttaaaacaggtggaagacctctgtaatgatattatgcctttcaataaaaattttatgaggtgtatttgattatagattaatgtgtccctaataaaacggacggatggagcagatcggagggccccctccccctgccacactcacacacgcccgcgcggccacacacaccccgacgtgaggctgggcacacgccgcggcccgaggggcgagccggggcgcggcggtggaggacacagaggggcttctgcctgccctcggaagggcgggcggccgggcgagttggcgcagcacggacagtggcggccagggtgcttcgtcttctccgatgatgctggaaaggccctggaagagaacacgccacagggcagaacccaaatgctagagcagcttgctcccgcccgccgcctcagccctgcctcagcgagtctccccgggcagggccgcttcgcgcggttcgcacttaaaggcctcggaggagactcccaaaatgtctaaaaaattcggccgaatggctaggtccttgggacactcccttctgatttttttccccctacagaggtgaggttgagcagccttgaatctgagggaaatgcccattgtcactcccaaatccatggtacaaagcctcggaagcccggctgggagcccagacaaaagcggccggggcgccggcagcggagggcatattccttgctctacaagttgcccagctcacccttggagggctcccggcccacctccagccccgaaaaggaagcgggtaaatggctatttatggcctgattgattacctttgccaatagctttctgattttgttccagatgggatgcctttgccttgtagctcaggctttcctcggatacatggcccgctatcaacagctaatggtattccccacatgatcggagaaacggctaaataaaaattaccctcctcctgcccaaccggtgttaagtctggggcaaagctattacaacgttttcaatctagcattgattccaagccctctcccccacccccaggaaatggccccc

SEQ ID NO: 5475 - DNA, 1515 bp, Artificial sequence
  DNA replication origin
tttgcccccagatcggccgtgttctctgcctcgtggtccgcggtgccctcccagcccccggcagcggcggcgatgagcggcctctaccacccgtacgttcccccgccgcccctggccgcctctgcctccgagcccggccgctacgtgcgctcctggatggagccgctgcccggcttcccgggcggtgcgggcggtggcggtggtggtggaggcggcggtccgggccgcggtcccagccctggccccagcggcccagccaacgggcgccactacgggattaagcctgaaacccgagcggccccggcccccgccacggccgcctccaccacctcctcctcctccacttccttatcctcctcctccaaacggactgagtgctccgtggcccgggagtcccaggggagcagcggccccgagttctcgtgcaactcgttcctgcaggagaaggcggcagcggcgacggggggaaccgggcctggggcagggatcggggccgcgactgggacgggcggctcgtcggagccctcagcttgcagcgaccacccgatcccaggctgttcgctgaaggaggaggagaagcagcattcgcagccgcagcagcagcaacttgacccaagtaagtgcaaaagaaattgccccctgatttattgctgaaacctgtaaggctcgaatgtgcaaaactgatagttttactaacctataaaaacgtctagacgcctacccaagcctaggcgaacaacatgcatccataaaaagagcttcccataaccacctaccctgggcgctcagttagtacggtaaacagagcgcgagcattaaggctttttatgataattccccacaagttgtgaaaagcgaccatccttggtgaaattaatttaacgacctctcttccccaccctgtggtctctccctgcctcccctcctctcctctctccccgtctccaaacctccctctttgtagacaaccccgccgcgaactggatccacgctcgctccacccggaaaaagcgctgtccctacaccaaataccagacgcttgagctggagaaagaattcctcttcaacatgtacctcacccgggaccggcgctacgaggtggccaggattctcaacctaacagagagacaggtcaaaatctggtttcagaaccgtaggatgaaaatgaaaaagatgagcaaggagaaatgccccaaaggagactgacccggcgcggtgctggcgggagcgctcaagggcagcggatttgttgttgttgctgttttcctttgtgggtgtttggtgcttgatttccagaaactctccagcgacttggacttcttcttctttttttttttctttttagatagaagtgactgtgtggttggtctctgaggtatttgggggactctgtatttgctcgtttacgtgttggaaaaaccaagtggctttggggtttcgccctatcccactccctctctttcctgctccattggttccttaagaaatgctatattttgtgagtgcaagctggct

SEQ ID NO: 5476 - DNA, 892 bp, Artificial sequence
  DNA replication origin
aagccgcgagtgtggccccagatcctggcgttatcaaagcaaatcaaagcctttcttttccagccgagcgggccctgtggaaatgagatgtacatttacccttgacgcaccgcaagcctggccgaggctctcaggttaattgatatttaatggaaatcatgcccatgaatatagtttccatcatttcacccttgatagacgtcagccctgggcgcagggggaggctgaagaatgcaggagggggcattaggcttgctgagagagtaaatagaagagcggacagaaacgttctgaggcgggaaaaagggctcgcgctggggagggtgacatttcctcgggcaggacgcggctcccgggtctcagccccggcgcgcagcgaaccagggccggctgcggttcccggaggagtgcggagggcagacgaccgcaagttccccccaggagcctcccagccggcgttcagatcgcgccggttccaggcagctgcaggcggcccatcttatgctaacgatcctacttcctccgccaagcctgtgaaattactgccgagagagcgcgcaggcctcaaagttacgaatttttcccaaagcagagaaagagaaggctcagcctagtttgtgagcagagatgaagaaaagttgcccgagtcatgtggcccagtcgagtgtgaatcgacaaaatattcccgattttagcagctctctccaaagctgtctggctttaccctaccaaccgcctccccacacacttcctttccctctctgctcccgtttcaatgtccaataaatgcaatggttctctgttgtgtgtgtgtgttttcccctctcctgctcggcctttctcgtgggctctttgggtgactgagccccgtttccttcgggataggtacaat

SEQ ID NO: 5477 - DNA, 1016 bp, Artificial sequence
  DNA replication origin
gctgcctccactgtttcctctcaggcaccagtgactgagcgcacccggacaagaaaaaagtgcgctcggcccacggggacactctggcctcggtttacaaaccccggctctggagggaaaagaaaaaaaacaccctctgcccgccgccacctcttaccgcgccccccccgcgcccccctcccgccaatctcgcccccgccgccgaggctgccgacccggtgcgcaccggcgaggcattttcgcaccacagcactgcacggaaagtcagcgtgacggggacgaggagccccgcggagggatccgcgcgcagttcagtcgctacggccgacggacggagcgccgcgcccggcccgagatgcctccgccggccttaaagggggcccataaagacgcactgccaagggctccgtgtgccccggggccgcgggaatgcggatcgcagccggcagggaggggccgcggcggagccttagacttgggggagccaaggaggccactcccaggaggctgcggagcaaatgactgcctccccgagcccctggctgcaaaagcagaggttgcccgtggcttttgcagctctggacacgcgggtgcagcccagggaacgtggacaagaggtgttgacggaccggaccgtgcatttgagttggggcatatcgaagtggtttaattaaaagccgcgagtgtggccccagatcctggcgttatcaaagcaaatcaaagcctttcttttccagccgagcgggccctgtggaaatgagatgtacatttacccttgacgcaccgcaagcctggccgaggctctcaggttaattgatatttaatggaaatcatgcccatgaatatagtttccatcatttcacccttgatagacgtcagccctgggcgcagggggaggctgaagaatgcaggagggggcattaggcttgctgagagagtaaatagaagagcggacagaaacgttctgaggcgggaaaaagggctcgcgctggggagggtgacatttcctcgggcag

SEQ ID NO: 5478 - DNA, 1012 bp, Artificial sequence
  DNA replication origin
ccccgcggcagtgcggccgagtcgaggctcgctctctggctgcttagcgccgcccgcccgcccggggccgccgccgctgacgccccaatgagttcgtacttcgtgaacccgctgtactccaagtacaaggcggcggctgcggcggcggcggcggcgggcgaggccatcaatcccacttactacgactgtcacttcgcgcccgaggtcggcggccgtcacgccgccgccgcagcagccctgcagctctatggcaacagcgccgccggcttcccgcacgcgcccccgcaggcgcacgcgcacccgcacccgtccccgccgccctccgggactgggtgcggcggtagggaaggccggggccaggagtacttccaccccggcgggggcagcccggccgctgcctaccaggccgccccccctcctcctccgcatcctccgcctccgccgccacctcccccctgcggcgggattgcctgtcacggggagcccgcgaagttttacggatacgataacttacagagacagccgatttttacgacccagcaagaggccgagctggtacaatatcctgactgtaaatcgtccagtggtaatattggcgaggacccagaccacttaaatcagagctcgtctccttctcaaatgtttccgtggatgagaccacaaggttgggatgcattttttttttaagaagggagagggggagaaatctgctttcatctcacgttctggctttaaaactcccgttccctctccccctccttttccttcttgtgtagccacagtggctcttattcataaagtaatacagactttttttaaaaaagtaggaaccatgtaaagatgatggggacagaataattgtgaagacctctctgctcctcttgcctgcacaccctatatatatatatcggagctaaagagctctgtgtatatttcaccccgtagacccccgttccacaaacctccagcaacatgcagaggtaccataacatttttaaaacttttattcccc

SEQ ID NO: 5479 - DNA, 938 bp, Artificial sequence
  DNA replication origin
ggccgtggtctacccctggatgaagaaggtgcacgtgaattcgggtaaggctagggtccagtaacctttctgtccacatcccagcccgttagcctgggtcctctggaagggggtgcgagtaggtgggggcgtgtggagcttccatgggcgccgcaattactctccccataaatttttatagctgagggagcaggtcaggaccatgtggctggctgctcggctgtgggcgcaaaagggggtggggatgggggggtgggggaggactccattttcagagcagggggaaggctgtggaggagcgggggatttccaaaatgcttgagggttccggacctggtggtgggcccagaagaaggagcacatttggggatcccgcaagcctggggtatgtgggtgtgtttgaggaggtgggtgggagtgagcgtgtgcgccggggagagggcgggagggaggaagcaagcgagcttgggagcgcgcggggagggccgcgggcctcggggcgcgccaggaagtgagcggcggaggcgaggggcctaactagtggccgggcgctgacctgcctgtcctgtctgttttgtctcgcagtgaaccccaactacaccggtggggaacccaagcggtcccgaacggcctacacccggcagcaagtcctagaactggaaaaagaatttcattttaacaggtatctgacaaggcgccgtcggattgaaatcgctcacaccctgtgtctgtcggagcgccagatcaagatctggttccagaaccggaggatgaagtggaaaaaagatcataagctgcccaacactaaaggcaggtcatcgtcctcatcttcctcctcatcttgctcctcctcagtcgcccccagccagcatttacagccgatggccaaagaccaccacacggacctgacgaccttatagaagtggggaccctgggcc

SEQ ID NO: 5480 - DNA, 1187 bp, Artificial sequence
  DNA replication origin
aaggcccagccagggtcagaggtcgttgtggggagagactctcaacgcccccaacccactgagggcggccaggccaagactgagtcggcccggagctgcgaaaatgtgttctttccttccgccccacacccatccgcgtctgccccaggaatggggcccaggtcccaagcctcctgcgcccttccttccagcccccaggcttggctgcgctccgggactgggtggcgtgaaagtttcagcctcaatcagtacaagcttccctcggggtcacgtgaacaaatatgcttgcatttgaaggcagcgtctgtatttcccgactatgagggggtttccggggctctctccaaatccagaaacgaccacgttccgcaagcaaaacaaatcccaagctctggggggcctgggagggctgggcagaaacccaggagtgggtgggggcgcgggtggctgccgctctgggcccgagagcggacgggcgggcgggtggaccgatgggcgcgcagcgcaggcgaagccagctcggggactacgaactcgttcctcctgcgtttattggtagttgaacctcagcctggttccgttctaccgggaattccgtgtgctcgagtatatggccgtgtctgcgagcgcgcaagaccagggttgggacagtgttgtctgcagacaaagggggaaggctagctctgccccccactggcgcccactctgaggccgaggacaccaggtttatgataaattgggatccaggtaagcaattgcatgacaaaatggaaatctttgggcacggggctgcttgccgccctgagcgggatattaaatatgatttattttgtgtaatctgtgatcttgattattgccaattggtgaggcagcccgcgtagacctagatacactgctacatatacatggaggacggtgattaatcgtaacaaggcgcgctttgtggggacgttccccgcctaccaaagggttaggaggacactaccttgccaggcttggagggtggccggcagcattgggggtggtagtagcagtttaaggaggggatctggtgaggggattgagtgctggaggaaatatttgggggctaaatgtgcacttaggagaatgggctgaaaaagaaattaaaacttttttacactttactgccaaagtaagatggagcgtcatattaattctgtgtcttg

SEQ ID NO: 5481 - DNA, 1860 bp, Artificial sequence
  DNA replication origin
agtcgtccctgagacgagtggtgggccgagagatctgtgtaggtgggatgagggtcgcaaggtccatggtggtggttgcctggaatctgcgcggcgcaactgtagtccacgctggccgacgacgggtgcgagaggtggcccaggttgaagacaggcccggacgcgggcgccatggactcgacgaagttgccgcccacgtacaccgggctgccctgcaagttggcgctggcgaagccgccgccgttgctcgccatgggatggggctcgaactccggcgctgcgtagcgcttctgttgtggcaggcagctgctgagtggcgccgtgtaggcggccaggccgtacatattgggctgtgatttggcgaaagcaggcggcgagggcgcgtcgtaggccaggccgggcactggcggcagctggccggagtaggccacgtggccagcggcgccgccgagcggtgggctgcgctcaggggactggctagccggcgagtgcaggatgcccttggccttctggtccttcttgtacttcatgcgccggttctggaaccagatcttgatctggcgttccgtgagattcagcaggttggccatctccacgcggcgcggccggcacaagtagcggttgaagtggaattccttttccaattccaccagctgcgcgctcgtgtatgccgtgcgtacccgcttggatgctgggcctggcgggctcttgtcctcgcagctctctcctgggcagggagggagagagggagggcgctgagcgagtgggtggggaccctcaggactggagaggggtgcttccctggttctcttttcctcctccctccccccacctccaatcctggctggggaggggaagggccgtttgagaggtatgattccaagggggaattcacctacctaccaaccccctactaggcctacctatcagtcgcacctgaaacctccatcagccttctgagatccagttcactctgcccaccctctcccctgcagcctagtccatcatcccatacccacccaaaggccatgaaagagtttaatgagagaccaggagcagctggtaaggcctccctctgtcaaagaagggccagactcctttgaacactcctcccagcctctgctgccaggggtggggtatggagaaggaaaggaagaggaaatagctccagcctgccttgcttaggagctggcctctgggcaaagccccccaccaacccccagcaaagtatggggatggagatcttggcgccccactgcagcccaactgcactcaaagccagggaggtgacaaaccaaaaaataaaaaataaaaaaaaaccaaccaaacaaacaaacaaaaaaaaacactgcctgggtattttagggagtccaaggccaggctggaagcattttgagtattcacagtgctaggagcagcagcctcaacactggcttttactaccctgccacctctcagctgcttgtccactccctcccagggaagacaaatggatttctcctgggagggagggcctgagcctgcagctgaggaaggaggggcaggaaaaggaggttgcaggcaggataataccctctccctaggagcagcagccccagaaaacatcaggcaaaccagatccctgatagcaagccacaccccaggccccaaacttgccctggacctggaagcaagttcatctacctgaagataaaccacatcagataccacaaggtcagaaaatttcaggaaccaagcagtctaagcagagagaaggaacagccctcagagttcctggccatgcctatcttctacatgccctgggtggacctagagaaggccccaactggaggggctccccttccagttagagaaatccaa

SEQ ID NO: 5482 - DNA, 1391 bp, Artificial sequence
  DNA replication origin
gctgacgaaggcgccgtcgccgttgcccagagggaaggcgggctgcagagccacgggccgggcgtcggagcggcagaacttgggtgccaagctgagcacgtcgccgccgaccccgccgctgctgctgcatgacacgtactccaggtaggagctcatggttcgggccccacctttctgagggcgcaggccggggccggagtacggagccgggcagaggctgagcaggactgccgccgtctgcgccgctccgccagccctctctacccgagctgccctctccaacccatggcgagtgagccggaggtaaatagtggcctaatataccggcgggggcggccacgtggcgctggccggccaatgggcggcctctccgctcggcccggtcggcgcgccgctcctcgcgcctgccccgcagccaagttagccaaagcagcccagggccgccgcccagcgcccccgagccccgaggagagccgtcgcgaccgggggctgcctgggcaagggcggggcgagagggcagaacgcctgctctcggacaggtattgggcgaggtggggggagaaaggcaggactggacgcttgggtgagggcccgtggatgcagcggggcgagccgcttctgctctggatcgtggggggggctagtccctcgagggcggagtgtgggcgtcgcggcatggaaaaggttaaatgggagcgtgacgcgcggccggtggagactgctcttcgcccacctccaggacagataaagttattcctcttcccctcttctgagtcctctgcgctttcggtttgcttggcgctgatgttatccctcttctaaacctagagcagatgtttggttttttcctttcttccccctttcctaggactcatggaactacatcttatgctgtgagtgctgtgtgcctagggcgggacaaaattttcactttttgactaggcttccttttaacgtgactttgcagctttcttctatccctcgcaatttgtggcggcgtgatgagggccagtgttgtagtgccagattttgataaagtttctgccttgtggggtggtttagcagattttcccctccggctgggttgttggaataaagaatccagagtggtggtggaacactccttatgctcctttctgggagactggcacaggcaccggtgcggcgcttgctttcactgaggagcttgtctggagggcgcaagggcttaccggggacgggtgagatctcagaggtttagatggacttgtacctcgaagcaattagagcttctgctccatcagataagtgctgcatcgtctcttgtgagtgaaatctgagggctcacaatgttaatgggctcacgtctttcccttgataatatggttttgtttactgagtgtagagagacg

SEQ ID NO: 5483 - DNA, 930 bp, Artificial sequence
  DNA replication origin
aacagactggcggcgcgcggaaaacgcgtcacgtgacgactggccccgcctcttcctctcggtcccatattgaactcgagttggaagaggcgagtccggtctcaaaatggaggtaaaaccgccgcccggtcgcccccagcccgactccggccgtcgccgtcgccgccggggggaggaggtattagggggagagcggggggttggtggggaatggccggcgttgggggcctggttcggtgggagcggggaggccgggtggaccgggtcggccgtcccgcgctcttgcgttgagacaggctgtgggagggggaggggagcgagagttggagacctccttggggcccctcgcccgcctcgccttcaccttcggctgcacaggcggccccttggaggcgcggcttggtcggggaggcctcgggagggaagccggcctgccggctgcgcggcctccgaagcgaggccgagggcggcatggcgggccccggcgggagcggttgggaggaggtggtgggggaggggaggggacgagcaggcacatccgggcgagcgagcaagcgggcggcggccacattgacattgatccgccgccgcgttacgaaatggcgcattggcccgcaatggccgccgcctcgctctgccgccgggaaagcgagcctgggattggagggaagagggcggaggcggcccggcagaaaaagccgcaaatggcctcgaagcatggggaggtagtgctttcgctgaagttctgccgacgcttttctaggccttttacgggtcctctccgcgagaagtcgataattggccttttctttttttcgcagcatcctgttggaaatacgagattgttaaaaactttgctgctttaaaatacttcctgatatatttttgctaaagtacttacattacacttcttaaaccgccatgtgggcg

SEQ ID NO: 5484 - DNA, 1129 bp, Artificial sequence
  DNA replication origin
gcggctctacccagcgccgcggtcctggctctggccagacgtgggggaagccggttgcggctgtccctcccgggccgcggttccctagctcccccgcccccgtcccggcaccaccgcagggcccagagggccgaggcagcacctgctgggacgggagtcccggcggcggcagctccaagtccatcatgatgagctgtggaccgtgtgttggggctccccgacggcggccctgttccggctgccgaggcgcggcgcggacagggcggctctggtggcggcggcggcggcggtggcggctgcgtcggcggctcctccgggctccccggcactcggtaatcggctacacgccggcgggcccctgccccgctccgcctcccgccccacaagggcggggcaagagtccgggcccttccttcccccgccggccgcgcgggctgagcttccgaaaatcccccacccgcgccggggctgacgcaagaagctcgcggtccgggggcgggaagggactgccagctggggtcccagcaggcgggggacctagaggaggtctccgttagctccccggtgccggcgttcagtttgccctcccccgcaaataagggcagcgctctcgcccgcgagataaagagttgtttgcgaaggtcgctggagttcggacgctttgaaacagtttaaacagttggaacaaacacacccggagccccggaaaggcgttggtgtaggagctgcgcctccctgatttggagttgcagaaccttgccctgcttttatctcactttaccgcccgagaatggcgccagccggggtggggggggctaaagatttggacccagaccgtgccactgccaactgccctcccgcccttgctcccttcccgggctggggccagtgggccctgcctaggggagatgtggacagctccggcagctcgtgttcgcagtcaccctgaacgccctcctctgaactcccacgtgtctccattctcctaagctcaggtcgtcaaaggcaaacggagaagcccctttaggtcggagagtggtcagtattgcccacccagagctgggagaaaaacgggaaccccaagagaacctcttcccaccaaagcgcagccaccacgccacagatggcg

SEQ ID NO: 5485 - DNA, 977 bp, Artificial sequence
  DNA replication origin
cccctctgcctggctgcccagtctggaaagtgaggagcgtctccgcccggccgccatcccatctaggaagtgaggagcacctcttcccggccgccatcacatctaggaagtgaggagcgtctctgcccggccgcccatcgtctgagatgtggggagcgcctctgccccgctgccccgtctgggatgtgaggagcgcctctgcccggccgagaccccatctgggaggtgaggagcgactctgcccggccgccccgtctgagaagtgaggagaccctctgcctggcaaccgccccgtctgagaagtgaggagcccctccgcccggcagccaccccatctgggaagtgaggagcgtctccgcccggcagccaccccgtccgggagggaggtggggggggtcagccccccgcccggccagccgccccgtccgggaggtgaggagcgcctctgcccggctgcccctactgggaagtgaggagcccctctgcccggccaccaccccgtctgggaggtgtgcccaacagctcattgagaacgggccaggatgacaatggcggctttgtggaatagaaaggcgggaaaggtggggaaaagattgagaaatcggatggttgccgtgtctgtgtagaaagaagtagacatgggagacttttcattttgttctgtactaagaaaacttcttctgccttgggatcctgttgatctgtgaccttgcccccaaccctgtgctctctgaaacatgtgctgtgtccactcagggttaaatggattaagggcggtgcaagatgtgctttgttaaacagatgcttgaaggcagcatgctcgttaagagtcatcaccactccctaatctcaagtacccagggacacaaatactgcggaaggccgcagggtcctctgcctaggaaaaccagagacctttgttcacttgtttatctgctgaccttccctccactattgtcctatgacccagccaaatc

SEQ ID NO: 5486 - DNA, 1194 bp, Artificial sequence
  DNA replication origin
ccctgagtggacacagcacatgtttcagagagcacagggttgggggcaaggtcacagatcaacaggatcccaaggcagaagaagttttcttagtacagaacaaaatgaaaagtctcccatgtctacttctttctacacagacacggcaaccatccgatttctcaatcttttccccacctttcccgcctttctattccacaaagccgccattgtcatcctggcccgttctcaatgagctgttgggcacacctcccagacggggtggtggccgggcagaggggctcctcacttcccagtaggggcagccgggcagaggcgctcctcacctcccggacggggcggctggccgggcggggggctgaccccccccacctccctcccggacggggtggctgccgggcggagacgctcctcacttcccagatggggtggctgccgggcggaggggctcctcacttctcagacggggcggttgccaggcagagggtctcctcacttctcagacggggcggccgggcagagtcgctcctcacctcccagatggggtctcggccgggcagaggcgctcctcacatcccagacggggcagcggggcagaggcgctccccacatctcagacgatgggcggccgggcagagacgctcctcacttcctagatgtgatggcggccgggaagaggtgctcctcacttcctagatgggatggcggccgggcggagacgctcctcactttccagactgggcagccaggcagaggggctcctcacatctcagacgatgggtggctgggcagagacgctcctcacttcccagacggggtggcggccgggcagaggctgcaatctcggcactttgggaggccaaggcaggcagctgggaggtggaggttgtagcaagccgagatcaagccactgcactccagcctgggcaccattgagcactgagtgaacgagactccgtctgcaatcccggcacctcgggaggccgaggctggtggatcacttgcggttaggggctggagaccggcctggccaacacagcgaaaccccgtctccaccaaaaccagtcaggcgtggcggcgcgtgcctgcaatcgcaggcactcggcaggctgaggcaggagaatcagacagggaggttgcagtgagctgagatggcagcagtacagtccagcttcggctcggcatgagagggag

SEQ ID NO: 5487 - DNA, 1355 bp, Artificial sequence
  DNA replication origin
taggggcggccgggcagaggcgcccctcacctcccagacggggcggctggccgggcggagggctgacccccccccacctccatcccggacggggcggctggccaggcggggggctgacccccccacctccctcccggacggggcggctggccgggtgggggggctgaccccccatctccctcctggacggggtggctggccgggctgaggggctcctcacttcccagtaggggcgggcgggcagaggcacccctcacctcccggacggggcggctggccgggcagggggctgacccccccacctccctcccggacggcacggctggccaggcggggggctgacccccccacctccctcccggatggcacggctggccgggcgggggggctgaccccccacctccctcccggatggggcagctggccgggcggggggctgaccccccccacctccctcccggacggggtggctgccgggcggagacgctcctcacctcccagatggggtggctgccgggcggagaggctcctcacctcccagacggggcggctgccgggcggaggggctcctcacttttcagacggggtggttgccaggcagagggtctcctcacttctcagacggggcggctgggcagagaccctcctcacctcccagacggggtctcggccgggcagaggcctcctcacatcccagatggggcggcggggcagaggcactccccacatctcagacgatgggcggccgggcagagacgctcctcacttcctagatgtgatggcggctgggaagaggcgctcctcacttcctagatgggatggcggccgggcggagacgctcctcactttccagactgggcagccaggcagaggggctcctcacatcccagacgatgggcggccaggcagagacactcctcacttcccagacggggtggcggccgggcagaggctgcaatctcagcactctgggaggccaaggcaggcggctgggaggtgtaggttgtagtgagccgagaccacgccactgcactccagcctgggcaccattgagcactgagtgaacgagactccctctgcaatcccggcacctcgggaggccaaggctggcggatcactcgcggttaggggctggagaccggccgggccaacacagcgaaaccccgtctccaccaaaaccagtcaggcgtggcggcgcgtgcctgcaatggcaggcactcagcaggctgaggcaggagaatcaggcagggaggttgcagtgagccaagatggcagcagtacagtccagctttggctccacatgagagggagaccgtggggagagggagagggagacggagagggagagggagagg

SEQ ID NO: 5488 - DNA, 939 bp, Artificial sequence
  DNA replication origin
ccgccccgtctgggagggaggtgggggggtcagccccccgcccggccagccgccccgtccgggagggaggtggggggggtcagcccccctgcccggccagccgccccgtccgggaggtgaggggcgcctctgcccggccgcccctactgggaagtgaggagcccctctgcccggccagccgccccgtccgggagggaggtgggggggtcagccccccgcccggccagccgccccgtccgggaaggaggtggggggggtcagccccccgcccggccagccgccccgtccgggaggtgaggggcgcctctgcccggccgcccctactgggaagtgaggagcccctctgcccggccagccgccccgtccggaagggagggaggtgggggggtcagccccctgcccggccggcgccccgtccgggaggtgaggggcgcctctgcccggccgcccctactgggaagtgaggagcccctctgcccggccaccaccccgtctgggaggtgtgcccaacagctcattgagaacgggccaggatgacaatggcggctttgtggaatagaaaggcgggaaaggtgggcaaaagattgagaaatcggatggttgccgtgtctgtgtagaaggaagtagacatgggagacttttcattttgttctgcactaggaaaaattcttctgccttgggatcctgttgatctgtgaccttgcccccaaccctgtgctctctgaaacatgtgctgtgtccactcagcgttgaatggattaagggcggtgcaagatgtgctttgttaaacagatgcttgaaggcagcatgctcgttaagagtcatcaccaatccctgatctcaagtaatcagggacacaaacactgcggaaggccgcagggtcctctgcctaggaaaaccagagacctttgttcacttgtttatctgctgaccttccct

SEQ ID NO: 5489 - DNA, 1295 bp, Artificial sequence
  DNA replication origin
ctgcaccgagccgcgatctccagcaccgacagcggcggcggcgaccgtgctgcgcctccagtggtccgctgcgctgcagcccctcctctcccacgggcggggcgcgctggcggggcggcgctccgggttccccgcccccggctcccgcccgtccgcccggctggagtggagcggcaagcggctggggctcatgctgcgcacccgccctaccgggcgcccctccctgcgccgccagatgggctaaggacccggcgccctgcgccctggtcacgcggggtcccacagccagggctctcccctggcccggcctccgtgggaacccgtggtgtcccgagatcacccgcagtggaaaccccgagttgccatccgcgggcctgcgcgcagtagcggagccctcgccccgcgcagtccggcggaggtgagccggccgcgctcgggagggttgcccagaacggctccagcgctcggcccaggagcgccgcagccgggagcactgcgggagaccgaattccgaaaggaacggctgcctggcggcctccgctcggggctgccaaacccatgtccctgggcgcccttctgaggtcgtcatttcatacacttacgcgactgtgcgtgcctgctcccgtccctgactcgctcgggagcaaaaacttcccgggcccagagaaacacctgggttctgcgaaaggaagagccggttccttcaagcccctggcaaagccgatcaaagtcagtcagtcccgcctcactacaacccttccacacccttaaacccttccacactccaagccactcccggcctgcgttcggtgtgcagattaatctaaaggcaaatttgctgggagggacggggtaatgtaaatatttgtacagacattctgtaaacgagtgactgcggacatgtcaatatttcaagacatttgtgtcatcatcatctgggggtgggaggcggagggggagtccagaggacatcgactggacttaatgggagctattacagaacatgctggggtgccttcaaaaatggaagatattgcttactaatgaggcaactgtgatggcatttcattgtgccctgtgctgacaaaatgatttgctatgaaacatagtcgactttatgcactccttcccacatgcagtttctcttgaatctccaatctcacctgttggattagctttttccatctagactagcaatgttctcatgtcctctggtcacaaaataatagatgcgggaccctgcgacaatggcagtttgtccttcattcctttgctgtgaagacaggctcctcaag

SEQ ID NO: 5490 - DNA, 1378 bp, Artificial sequence
  DNA replication origin
gggaggggcgcccggtagggcgggtgcgcagcatgagccccagccgcttgccgctccactccagccgggcggacgggcgggagccgggggcggggaacccggagcgccgccccgccagcgcgccccgcccgtgggagaggaggggctgcagcgcagcggaccactggaggcgcagcacggtcgccgccgccgctgtcggtgctggagatcgcggctcggtgcaggcggcgcccatgcctcctctcctccactagcccgcgcgccagtccgcctgccggggccggctctccgcctcctgcctcccgtcgcagccgcgcagccgccgcagagtccgcggcgccaccgctcgccctccaggtaggtgtcctagctgcaaagggattgcttggggcgggcgccaaggtgcccgcatcgcggcccgggggcattgtgcgcctccggcgggccgaggaccccgagggacgcgtgggtgggcagccgcagcttcgggtccccaggacatcgccgtccccctggaggcgcccccggccgatagcccgggctacagggaagtgggggcggcggtgtcagcccattctcgcggccgggatgggagggggcgtctgtatcgcggtcccggtttgccgccctccctccccctcgttgccagggaattccggccgcctgccactagcgctcgcattccctcgcgcgggccggcgcccctgctccccgcaggctgcctggggattgaagcaggggcagggagaaggactgatgtaattgtcagcggaaaaccgaaccggcgcgggtgagagcgcccgcgcccgcgagagctaacgcctacgccgcacctttcagggaatcggggaagccgagaggagcggctggggaagttgtgcattgggttttattgtgcgcgtgcactgcggactgccctcgcggggcacccctgcccacccgctgctggcgcccctgcagccctcccggcagcctccgtccactcccccggccagggccaagtctgccttccctggttcagaccgggacagcgtttgcattgcagtcaagacgtgcttcccctgcatcaagccgggagctgcccgcagatcgtgtcgccggggatgctgggggaggagggaatgggagacctgaggagaaagcctggagaagtaatgacacaagcggattttctccccaaagcttctgctgcgtatagacacatctgcaaggcaccttttaagctgtttttgaaagttataaccagatactgattttgtgacaattctatgatatacctgaacggttgcttaaacatagagacctaaagctaggggaagcattacataatggacatgaagcaaatgacacgaaactaagtgaacccactgggttgcca

SEQ ID NO: 5491 - DNA, 1119 bp, Artificial sequence
  DNA replication origin
cggctttacccagaatgcctctggagggccggctccccgcgccccggccctgccgcccaacgctcccggccctggggccctgactgcccgcacgctgacctgaaggtcccactgtcctcgcgctccagcggcggggcctcggcgcggtgcctgctctgggacatggcgagaagggacggctcagcggctggaggaagagcggtgcggagcgacgtgctcgctccccgggtcgctggtccccgggaggagctccagcgccgccacctcctccgactcccccgcctcctgcttgcgttgctccagcgagggggcaggcagggtgggggcggagccttggtgccgtagctccggctacgccccctcgctgctcctctgcgggcctccgtcccggcccaactccgcccctgtcccttccagggtccgcccccttcccgcccggctccgccccgctcccgcgtgggcacaggcattgggctcccgggggttctccgcgcccgcccctgccggccctgaccagcctgtagtaactggcccctaggccgcagttctttgtccttagcaggaggccgtttcttgccgggagagagggattagagggattgtccggcgtgggtctagggtcgttgaggcctaaagttaagcctttgtggggaggacggattgggggctgggtcactttaagaaaaagattctaaaattacgaaggcagaattccagggagtctcccgggcctggtcctgaagcttgagaccccggatatatacgctccagggggctgcggtgcgctcttcgggtccccgagccctgtgtttaggaacacgcggggacgtccaaacacccgctcctctcccgccgggcgggctcctttgtcttctgggctttcgtcgcgagatggaacgctgggtcagtgcatcccagcaaaacacgttaggagtaaacgaaggcctttccggggacctgggtagtcggttgtaatggcgtttgcctgggatgcagcacctttggtgggccattagatgacgtgtcgcttctccaggggcttgctaggcactagcagaaatgctcccctgtgcttactcggtgttatggaagattgcttgcacaatgctattcgtacga

SEQ ID NO: 5492 - DNA, 957 bp, Artificial sequence
  DNA replication origin
ggccggcttgggccggtgcagtcggcggcggcggcggtagcgggcccggctttcttcccctgcgcgggccgcggggcggaggggctacgcagtgaaggaggggcgcccccgccccgccaccgcctctgctcccaacgccccgaccgcccccaccgccttgccgccacagacaaagcgccggaggtgggagccctgcgggccgcctttgcctccgcgccgtctgccgggtgcggccgcggcccgcagagaccgggccgcgcgcttttccgttcctgagcgcccttgttcatttctgggtgaaagggacccgaattgtgcaacaggtttgggcgttagtccttattttccagcgggtctcttttgccagcgtgcaggaaccagatgtggctccctgctctcgggcgagtcccgcgtccagcgcccgcgactggctcctttgtgtgaccggtgaccggccctgtcgggtgggtggaggacacgggctcgaggccccagggctgcgccgaggctcctggacgcctcctcaggtcgcggggcttggcttccacgggcctgccagaggttaacatccctccagcgtttgggagagtcacaaaggggaggagagagagggttggccagggtctgtggttgtgtttatttttctattttaggtagactcatattagaaaagagccgcagtctgaccagctcttgagggtacgggtgggatttcaccctgggatgcacggtttggacttggctgttgctctgacagcccccgtggttttcttggtgctttgacatctttctcttacacacagacatcgcgggagaagttgggagtgctgccgagggagtaactagatagcagctgtttgacaggtcgtctcttacttcacgttttgcttgtgtcaagcatgcccactatgtatcccagcatagcttggcaaaccgtcaaatttaaattgccactca

SEQ ID NO: 5493 - DNA, 1351 bp, Artificial sequence
  DNA replication origin
ccgactgcaccggcccaagccggccacccggccgcggggcctgcgcgcttctcccgcccgggccgagcggcggccacactcacctggctggcgctgacgctagcggccggcggctccggggcgttggggaagacaggggaacgctagcgaggtgcgggcggaggcggagggcgcggcgggaggaaggcgggctgggggcggagcgggcccgggcggcggcggcagcagcggcgacggctgcggctccagtcactcgcggcaaatcgcgtcccggcccctccgtgcgtcaggcggggagcgggggtgcgggtggcccggcgacctctcggcacccgcggcccgagccgcgtccgcgcgaccccgcgcgcgcccgggtgacggcggtacagcaacccgcccggcgcgggaaggaggaaggaggcggggcggggcggggcgtccaaccgggcctggggctgagggctgggcgcgagtgggactctggcgctccggacggaccctgccgtccccacccctagccgaggcccaggctccccaggcgggaggcagtcttggagagtggaagggtacctagatctggagtcagaagtctgggcttaagagagggtccgttacttgacaccctggcaggtcatttatttcctctggcctcatgctggagttcgaaggttcgagtacaaagtctccaagagctgctcccaagtactcactgccaagcggtggtgtggctgaaggatgaaggcagatgaaagggaaagggttgcggtgaggaagggctggattcagggcatttgttttgctttgaggatctttccactggacagtccaaaattaatccacaatggggctccctgataatggctacttccccatttttaccaacctagttatttttctccaagtatactgacttaagagtccttgttttcattttattgcgcaaatcatttgtatgtcatttcctgaattcagttcaaaagagtcatcagcaaattcacaccagatcagagcagctgtgtggtcccaatttcaagacttccatattattcactcagccactcacttcagtatcacctaattccgttgataaaatcttcctattccaacaactaagcaaccaaatttctctccactaaagttttctgacttaaaatcccgtggattaattcttcctcttaattctgtgaatatcagtctgtctccatgacttccacctctttgccactctaggtcaagcctttaacttcactgctgcttcagttccatataactgccagagagaatgctccaaaaagacagagctaagcatgaaacgtccctctttaaaatcattcaaagtctctccacctgg

SEQ ID NO: 5494 - DNA, 951 bp, Artificial sequence
  DNA replication origin
cttgatggggatggcattgaatctataaattaccttgggcagtatggccattttcatgatattgattcttcctatccatgagcatggaatgttcttccatttgtttgtgtcctcttttatttcgttgagcagtggtttgtagttctccttgaagaggtccttcacggaggtggggggtcagccccccgcccggccagccgccccgtcggggagggaggtggggggatcagccccccgcctggccagccgccccgtccgggaggtgaggggcgcctctgcccggccgcccctactgggaagtgaggagcccctctgcccggccagccgccccgtccgggagggaggtgggggggtcagccccccgcctggccagccgccccatccgggagggaggtgggggggtcagccccccgcccggccagccaccccgtccgggaggtgaggggcgcttctgcccggccgcccctactgggaagtgaggagcccctctgcccggccatgaccccgtctgggaggtgtgcccagcggctcattggggatgggccatgatgacaatggtggttttgtggaatagcaaggcgggaagggtggggaaaaaattgagaaatcggatggttgcggggtctgtgtggatagaagtagacatgggagacttttcattttgttctgtactaagaaaaattcttctgccttgggatcctgttgatctgtgaccttatccccaaccctgtgctctctgaaacatgtgctgtgtccactcagggttaaatggattaagggcggtgcaagatgtgctttgttaaacagatgcttgaaggcagcatgctcgttaagagtcatcaccactccctaatcttaagtacccagggacacaaacactgcggaaggccgcagggtcctctgcctaggaaaaccagagacctttgttcacttgtttatctgctgaccttc

SEQ ID NO: 5495 - DNA, 1110 bp, Artificial sequence
  DNA replication origin
acagttcaggggccgcgccgggccgagctgtcgcccgcgccacctccaccgccgccgctgctaccgccaccgccaccgcctgggctgcagcagatcgcgggagaacgtctgcgcgaagccccggtgcagccctggcgggaccgcagcaaccaccggagcgtgagcaacagcttcccggctggaggagccactgccccacgcgcccgcggcccgcgcgccgaggtaagctctgggcgcccagcccagaccggcgcccccggactgggcgccctctgcttgcccggcccccgccctcctccgcagagcgagcctgcacctgggcgcgccgcccgagggaatggccaggagcccccctcccggtagagtttgcactttgtctcaaggtcccacttgtagaggagggcgcccaggcgcctgtggcttccacgacctaatcctaactcctgcgagtccctggagttaggattaggtcgtggaagccacaggagcatactcctctgttccccagggtaggctccaattcccaaggacggatggagaggggaaaggacgaggagagtgccccgctatgtttagccgcagcgcctcgtcacctgggctggaagtttggggtttgtctttctctcaatgaccgggaaatgggtagttaggggaccgaggtgtgtgaggagggtagcggtcgaagcttggggtcgtgggagagttctgcagcagaacccagatgagatgggggcagaggagcagagagaaggtccccgaagtttgcacttgttgggagccctgacgggcggcctcggccactaagcgctggtgaaggtgtcagggaagggtgggaggacactgtgggactgcggaagggacgaggagaaggggagggggaggaccatctgtttcgccactgttatgtgcgggggcctgtggggagaagggagagctggcaggacgatgcttccctagactctggaggacacacagtttttatggtgaacctggatagggagtgctgttcttcaggggaaataaattgccaagaagtatcccccctctccccacgcccatgaatacaaaataacgcagttttggaatgctctcaaaagttcttgggttggg

SEQ ID NO: 5496 - DNA, 1607 bp, Artificial sequence
  DNA replication origin
gcgcgcccaggtgcaggctcgctctgcggaggagggcgggggccgggcaagcagagggcgcccagtccgggggcgccggtctgggctgggcgcccagagcttacctcggcgcgcgggccgcgggcgcgtggggcagtggctcctccagccgggaagctgttgctcacgctccggtggttgctgcggtcccgccagggctgcaccggggcttcgcgcagacgttctcccgcgatctgctgcagcccaggcggtggcggtggcggtagcagcggcggcggtggaggtggcgcgggcgacagctcggcccggcgcggcccctgaactgtccaactcttgcccgcgccgggcttaagcgcccggccgctgcccccgcgctgagcgcctgcgcaccgggcctcgcccaggtgaggggcgtgtgcccggagcccgctgggcgcgcccggcccggcccggccccgccgcacgcccgcccccctggcctggccgaggaccccggggtttggacgtgccaacgccactctcgcgcgccgaagctgtgacggtttactaagcagagacttgcgaggcacacagagagggaatgaggcggaaccgttcgggggctcgttgacactgcagagcctcccgcagcatcgctgccttaaatcccgcctttccaggcgtgcgcgcacagcgagccagaggaggctccgtcccgacctggggtcccccgcggtcctcagcccgggggctcgggtccccgaagagatccttggcaatggcagaggtcccaaagcctagatgccaagccccgcgatggggcggatgcttccaatattagtcaacccagagtgaaactctcttcttggagatcgtcagaccaactatttgtttttcctctttgaccacccctgggctagcagagcacagctagcagcttcggcatatttggcggagccgggaaggcccggagcgcaagaaggcatcgcagcctcgcagcagatctgaaagggttgtgggcggggggctcattttcgccggatttcttttccgtgtttaagttttcaaaactaaaacctgtcatcggttaccctgatgtagagggcatcttctgaaaattagtgcaaacatggccaaggtgcttggttctgaaagggaaagcacttagaacacttaagaaagggaaaataattttaaaagagcagttttctgagattacttctttggggagaagttcaatagtcataaatgacaagagagttgtgttatatagcagggatttttttttaaccagatgatcttaaaatatttttctttggttcttgtctcagatgattgacactacgtaaataatcctgcagctgttaatgtcttggcataatcgtctagaataaatatcttaacgtccagccaaagccaatgttgttctcccagggtgggcttcagatgtgacaaacaatcacaccatcctagagctttctaagggagcaggctgtgtttttaagcaccttggaatgtagagttattgcaagcaccagcacatttgaggtaccagcgtgagaaagggcataaatctgacttacagtttttgtatttttagaatccaaatatcttcacatccaggtcgg

SEQ ID NO: 5497 - DNA, 1043 bp, Artificial sequence
  DNA replication origin
gagacgggagactaatgggtgttgttgacgaggccaggcacgcaggcggagaagagctgccacttgcccctcgcgtaagctggaggaagggacaagttggggtcctgggaattgaagagggtagaatgtatttggagattaggggaacaacctctatttctttttggctcatagcttgcaactgtcgctgccaaagggaagtgtccttcggattatttgaaaccttaaaaatccaaaacagtgtttaaaatgtcccgctcaacattcttaaaagtgaaggagaagagtttggggttggggggtggcgatgagagctaaaacatgacacttttctgcgggactcttctgtcttgcacatgaggagccagttctggaaagaaaagttctgagtgatgttgagtcagaatgtccacccagaaaagctttaggtggagatagtgacagttttgtttgttctaccattctttttgcagtctccaggtggactctgcggtttttaccccacggcacaaagtagccagaatacaaaaacttcctgtttgccacccaggccttctccagctactgagaacttgttccggtgatggagcctcaaaggaatttgtggattcctctcccacaagtgtccaggggcaggggtgctgtgagaatgtgcagttcacaaagggagtgagaatggcagtcaaaagatgtatagagttaagggaaagaagaaaagactgagtgagccaacgtatttgcttactatttctcctaatagaaaacttttggtaaaggcttgatagcaactctaaagagtaagttacatttccataattttccaaagacacagtcattcagttaactttattgagggctatatgttgctaggtgctggacatacactcattcaattgctgtgtgactaaagccaggtctctactctgtgctaagagctcctagtccagaaggggaacagttcattaaagttcgctaggttcataagtagtaaggatattccactcagaatgaacagatagaatatctcatgcctcaaaaaagat

SEQ ID NO: 5498 - DNA, 978 bp, Artificial sequence
  DNA replication origin
tcggctcctcccggccgcgcagtcagcaagttccgaggcgagcgcgggggggaggggcgggcgcggcggcgacgcgcgtgctcgctgcttgcctggcggaggggcgcgcgccgccgacgcccggcgggcgcgagctgttcccgcgcgctcccgtgcgcgctctccacacctcccctcaccctgggggtgcacgcgtccgcccgcgcgcggccaggacaaagagcgcggcggggacccggcgggctggcccctgccgcccttggccgcggagcctgtgccagagaaggcgggggcgcgggcaccgtatcgcggggccgctgtgccgcggggtggcttccggcctgggcccgcctccggggcgaggctgcccattgggctacccgcgtccccagggctggttccatcccatccgcctgcgcgggggccgtcgtggctcccggggccccagtacctgggcaagggccctgggcgcgtggttgggagtcccccgccgccccgggagacgggagactaatgggtgttgttgacgaggccaggcacgcaggcggagaagagctgccacttgcccctcgcgtaagctggaggaagggacaagttggggtcctgggaattgaagagggtagaatgtatttggagattaggggaacaacctctatttctttttggctcatagcttgcaactgtcgctgccaaagggaagtgtccttcggattatttgaaaccttaaaaatccaaaacagtgtttaaaatgtcccgctcaacattcttaaaagtgaaggagaagagtttggggttggggggtggcgatgagagctaaaacatgacacttttctgcgggactcttctgtcttgcacatgaggagccagttctggaaagaaaagttctgagtgatgttgagtcagaatgtccacccagaaaagctttaggtggagatagtgacagttttgtttgttctaccattctttttgcagtctcca

SEQ ID NO: 5499 - DNA, 980 bp, Artificial sequence
  DNA replication origin
gctcccagccgcgctccctcgggccactagcgctcccgcgcgcgcccggccgccttcatgtgaagcgccggccctccgccccttccctccccttccttccctccctccctccctgtcccctcctcctcctcctcctcctccggcgcccgcttcagctccccggggccccctgcccggccgggcgctgacagcaagggcgggggtccctgccgccgccttgtctcgcgcagggtccggctggggtagcggagcccccagtgcggccatggaccggcccctgtcgtcgtcggcggaggcggaggaggaactggagtggcaagtggcgagtcgcaggaggaaggcctgggccaagtgccgcagctcctggcaagcgtcggagacggaggatctgtccacagaagcgacgacgcaggacgaggaggaggacgaggaggaggacctccccggcgcgcagctgccggcagcggggggaagaggtcggtgctcccggccgggctccggggggaggctggtgggctggggagagtctcgtgcgccctgggcgcctgccacgagttctgggagagcctcgggcacggtaggccgaggggagaggggacacttccgaccttcaaacgcgcgcgctgaacgaggcgcccccagcgtcaacacagacaactgggtgccatccgatttccctgccaagggacactgagacgtgtcgcttaggctgcatttgccgtggtagattttcctacttgggagggtccagggtgactccgccgtcgtagtgctcctgggtggtaacgtgctgtcccctctctctacccccaggaaacgtgcccaacgagaagatcgcgatatggctcaaggactgccggtgagtgctccctggtccgcccgcgtcccgggggagatccgtgcggacgggacgccggagcagagccactcgggccgcgtccctgtgggtcccgcgaccgttgtaagctacaaaccggaaa

SEQ ID NO: 5500 - DNA, 1234 bp, Artificial sequence
  DNA replication origin
aggtcatagatcaacagcatcccaaggcagaagaatttttcttagtacagaacaaaatgaagtctcccatgtctacttctttccacacagacacagcaataatccgatctctctatcttttccccacctttcccccttttctatttcacaaaaccgccgtcgtcatcatggcccattctcagtgagctgttgggtgcgcctcccagaccgggtggtggccgggcagaggggctcctcacctcccagaaggggcggccgggcagaggcgccccccacctcccagacggggcggcggccgggtggaggtgccccccacctccctcccagacagggcggctggccgggtgggggctggccctccacctccctcctggacgaggtggctgccgggcggagacgctcctcacttcccagacggggcagctgccgggcggaggggctcctcacttctcagatggggcggctgccgggcggaggggctcctcgcttctcagatggggcggctgctgggcggaggggctcctcacttctcagacggggtggctgctgggcggaggggctcctcacttcttggacggagcggccgggcagagacgttcctcacctcccagatggggtcgcggccgggcagaggcgctcctcacatcccagacagggcgccggggcagaggtgctccccacatctcagacgatgggcagccgggcagagacactcctcacttcttagatgggatggcggccaggaagaggcgctcctcacttcccagactgggcagccgggcagaggggatcctcacatcccagatgatgggcggccaagcagagacgctcctcacttcccagacggggtggcggctgggcagaggctgtaatctcggcactttgggaggccaaggcaggcggctgggaggtggaggttgtagctagccaagatcacgccactgcactccagcctgggcaacattgagcactgagtgaacgagactccgtccgcaatcccggcacctcaggaggccgaggctggcggatcactcgcggttaggaccagcccggccaacacagcgaaaccccgtctccaccaaaaaaacacagtcaggcgtggcggcacacgcccgcaatcacaggcactcggcaggctgaggcagaagaatcaggcagggaggttgcagtgagccgagatggcagcagtacagtccagcttcggccgggcatcagagggagaccgtggagagag

SEQ ID NO: 5501 - DNA, 830 bp, Artificial sequence
  DNA replication origin
cgccctgtctgggatgtgaggagcgcctctgcccggccgcgaccccatctgggaggtgaggaacgtctctgcccggccgctccgtccaagaagtgaggagcccctccgcccagcagccaccccgtctgagaagtgaggagcccctccgcccagcagccgccccatctgagaagcgaggagcccctccgcccggcagccgccccatctgagaagtgaggagcccctccgcccggcagctgccccgtctgggaagtgaggagcgtctccgcccggcagccacctcgtccaggagggaggtggagggccagcccccacccggccagccgccctgtctgggagggaggtggggggcacctccacccggccgccgccccgtctgggaggtggggggcgcctctgcccggccgccccttctgggaggtgaggagcccctctgcccggccaccacccggtctgggaggcgcacccaacagctcactgagaatgggccatgatgacgacggcggttttgtgaaatagaaaagggggaaaggtggggaaaagatagagagatcggattattgctgtgtctgtgtggaaagaagtagacatgggagacttcattttgttctgtactaagaaaaattcttctgccttgggatgctgttgatctatgaccttacccccaaccctgtgctctctgaaacatgtgctgtgtccactcagggttaaatggattaagggcagtgcaagatgtgctttgttaagcagatgcttgaaggcagcatactcgttaagagtcatcaccactccctaatctcaagtacgcagggacacaaacactgcggaag

SEQ ID NO: 5502 - DNA, 1035 bp, Artificial sequence
  DNA replication origin
aggcggccggcggcggcggcggcaccagcaccaccatgtcgcgctcagtgctgcagcccagtcagcagaagctggcggagaagctcaccatcctcaacgaccggggcgtcggcatgctcacccgcctctacaacatcaagaaggtgcgcacgggccggggaggccgcggcggaggcgggcgggcccgggagggatgaagggcaagggaggccgtggggtgggggcggcaggaggcgccgggtgtagaaatctcggcgtcgccgcccgaggcccggcccggggtcgcctggatgcgccgcggcctaatgcggagtcccgggcgcctctccctgtggttcgccggccggccgaaggcagagaagccatttcccggctcccggcggcgggatcgggcgctgggcctcgcacggggtgggggcgccgctgggagccgggagctgtcccctcctcggcgcccccgcccccatgatggggcccataggaaagggagggtggtgggtgggcgaaattctaggtgggtaggaaaacttgagtgttccatattcttacggagatggcagcagtgaacagggattacaccccacatccccattttttggtgtgggaatgtgggtagagaagggctgattggatgaatcccgtatcccctccactttgccactttattttagattgctaaataaaaagccattgagagtgtgttgacgatttgggattatttcattttgaaggtggagaggagggggaagtgagggtggaaccaattttctgaaatacttctaggctgtgagtcactagaactggaataacaaccttctactctttcccctgtactcctcctcatgttagattttccaataccatttcttaaagttcggtgtctgtacaaaataaaaaccgtaaaaatgttgcaattgctgctgatttatagcatagtctgataatttgagcaactatagctaataggcccatttaaaggcttttacatgtcctcagtacagtaaggagtggaagaccactggaagtttagaaaag

SEQ ID NO: 5503 - DNA, 1129 bp, Artificial sequence
  DNA replication origin
gccgccggccgcctcgcgcccagtcacgggcccgcggccttcgcagcagcctctctcgggcctcctcccctcccgcccgcgacctccgccttaggagagcgcgcccatggccctcgcgccccaatcccgcgccggcgacagagcgagccgcggcggactcctcggagccccttctcccgcagcagcccgcgccccggcagcctcctgccttccgcccgccgcccttccgcccccacccccggcgctctccgccccagcccccaacgagccgccttccccggctgctccactaggtgtggcggcggcggcggcggcggcggcgtctccggcggctgagaacgaggccgcttcccgcagccccggacgggccctcggtcacctgatcggcagcgccggcgcccccgcgaggccggacggggaactgcggccgacgggccctcggcatggcctcgccgccgccgctctggccctggccctggcccggaccgcccactacgcctgatgccgggatgggagtcccaagcggggactgagtggggtcgcgttgtgtgctctttccacttcgccccacaccccactccttcaagttcccaaaagttgcttttccgcaccacccttctaaagaaaccggcagaaactctgctgggaggcggggtgttttccaggcgagtttcgcttaagagtgggctggtggctccaagcgctttttcctcccactgcttgacaggcgctcgccgcagaacacagcagatgttgtgctccgcgaggtggggatcgcctctgccagcctccccagcccatcctcagtctccccgcctggaaccagtttgtgagagaggaggtcggaagtgagggtaactcaagtccttgagataatcacaatctagactttgtcggcgaggagcacccatccggaggagacgcagtaggtcctggcatgtggaaggcaaaaaataaatgtttgttcaatgcctaaaggaaccgctcccatttttttacagcctccaccctaaatcccacttcttcttggaaacattcttctttgccatctcatttttcctgatcaatttcttcttagcgacactccaaggctactcccttgtcaaatgtattagacatgattccaaaa

SEQ ID NO: 5504 - DNA, 990 bp, Artificial sequence
  DNA replication origin
tcttttccccacacttccccccttttctattcgacaaaactgccatcgtcatcatggtacattctcaatgagctgttgggtacacctcccagacggggtggcggccgggcagaggggctcctcacttcccagatggggcggccaggcagaggcgccccccacctcccggacagggcggctgccgggcgggggctgccccctacctccctcctgggcggggcggctggccgggcgggggctgccccccatctcctggacggggcggctgccaggcagagacactcctcactttccagatggggcgactgcctggcagaggggctcctcacttctcagacggggcggctgggcagagacactcctcacctcccagatggggtggcggtcaggcagagacactcctcagttcccagacggggtcgcagccaggcagaggcactcctcacatcccagacggggcggcggggcagaggcgttccccacatctcagaggacggtcggccgggcagagatgctcctcacttcccagacgggatggcggctgggaagaggcgctcctcacttcccagactgggcagccgggcagaggggctcctcacttcccagacggggtggcggccgggcagaggctgcaatctcggcactttgggaggccaaggcaggtggctgggaggtggaggttgtagcgagctgagatcacaccactgcactccagcctgggcaacattgagcactgagtgagcaagactccgtctacaatcccagcacctcgggaggccaaggcgggcagatcacttgcggtcaggagctggagaccagtccggccaacacggcgaaaccccgtctccaccaaaaaatacaaaaaccagtcaggcatggcggcgcgggcctgcaatcccaggcactgggcaggctgaggcaggagaatcaggcagggaggttgcagtgagccgagatggcggcagcacagtccagcctccactcggcatc

SEQ ID NO: 5505 - DNA, 800 bp, Artificial sequence
  DNA replication origin
aagtgaggagcatctctgcccggccgaccgtcctctgagatgtggggaacgcctctgccccgccgccccgtctgggatgtgaggagtgcctctgcctggctgcgaccccgtctgggaactgaggagtgtctctgcctgaccgccaccccatctgggaggtgaggagtgtctctgcccagccgccccgtctgagaagtgaggagcccctctgccaggcagtcgccccatctggaaagtgaggagtgtctctgcctggcagccgccccgtccaggagatggggggcagcccccgcccggccagccgccccgcccaggagggaggtagggggcagcccccgcccggcagccgccctgtccgggaggtggggggcgcctctgcctggccgccccatctgggaagtgaggagcccctctgcccggccgccaccccgtctgggaggtgtacccaacagctcattgagaatgtaccatgatgacgatggcagttttgtcgaatagaaaaggggggaagtgtggggaaaagaaagagaaatcggattgttacggtgtctgtgtggaaagaagtagacataggagactccattttgttctgtactaagaaaaattcttctgccttgggatgctgttaatctataaccttacccccaaccccatgctctctgaaacatgtgctgtgtccactcagggttaaatggattaagggcggtgcaagatgttctttgttaaacagatgcttgaaggcagcatgctcgttaagagtcatcaccaccccctaatctcaagtacccagggacacaaac

SEQ ID NO: 5506 - DNA, 1157 bp, Artificial sequence
  DNA replication origin
gctagacataaaagttctccaagtccccacccaactcaggagaccagctggcttcacctaatggatcctgcaccagggccatgggcagagctgcccgccagtcccacgccgcatgcctgcactcctcagcccttgggcagtcgatgggactgggtgccatggagcaggaggcagcacctgttcgggaggctcgggccgtgcgggagcccacgcccatgggtggggggctcaggcatggtgggctgctggtcctgagccctgccccatggggaggtggctgaggcccggcgagaattcgagcatggcacaggcgggccagcagtgctgggggacccggcgtaccctctgcagctgctggcccaggtgctaagaccctcactgcctggggccagtggtgccggccggccactccaagtgtggggcccggcaagcctgcgcccacccggaactcacactggcccgtgagtgctgcgcacagccccgattccctcccacgcctctccctccacacctccccgcaagcagagggagtcggctccagcctcggccagcccagagagtggctcccacagggaagcggcaggctgaagggctcctcaagcacagccagagtggatgccaaggccgaggaggtgccgagagtaagtgaggactgctagccgttgtcacctctcaatcccccctctaaacaggacaccccaactgctattgggaatttggccaatgaccactctagctacttcctgctggataggggtgaagaaggggccctgcagttgtagtgttctccagaggggaatgatttaggccagtggaagggccagtgggtcagtccaggggtccttggtagaagttgttagttgaggtcatttgaggttccatttgtaagatcatctgtagcttgatggcctcgattctagaggaaacaaattcgacaaggagattaaaaatacagggtccaaagaggaataacagcaagatggctgccacgggacctagaaaggggaaaagccatgttgcccaactccagaggttggtaaaagagtttgaaagacattgtctgatttcagaagccttttcctgtaaatactgggcagcatctcatactatccctgactgtttagtgtaaaaacaacactcttcccctaagaagttgc

SEQ ID NO: 5507 - DNA, 907 bp, Artificial sequence
  DNA replication origin
gagagtctctgcccggccgccccgtctgagaagtgaggagaccctctgcctggcaaccaccccgtctgagaagtgaggagcccctccgcctggcagctgccccgtgtgagaagtgaggagcctctccgcccggcagccaccccatctgggaagtgaggagcgtctccgcccggcagccaccccgtccgggagggaggtggggggggtcagccccccgcccggccagccgccccttccgggagggaggtggggggatcagccccccgcccggccagccgcgccgtctgggagggaggtggggggatcagccccccgcccggccagccgccccgtctgggagggaggtggggggggtcagccccccgcccggccagccgccccgtccgggaggtgaggggcgcctctgcccggccgcccctactgggaagtgaggagcccctctgcccggccaccaccccgtctgggaggtgtgcccaacagctcactgagaacgggccaggatgacaatggcagctttgtggaatagaaaggcgggaaaggtggggaaaagattgagaaatcggatggttgccgtgtctgtgtagaaagaagtagacatgggagacttttcattttgttaggcactaagaaaaattcttctgccttgggatcctgttgatctgtgaccttacccccaaccctgtgctctctgaaacatgtgctgtgtccactcagggttaaatggattaagggcggtgtaagatgtgctttgttaaacagatgcttgaaggcagcatgctcgttaagagtcatcaccactccctaatctcaagtaatcagggacacaaacactgcggaaggccgcagggtcctctgcctaggaaaaccagagacctttgttcacttgtttatctgctgaccttccctc

SEQ ID NO: 5508 - DNA, 1355 bp, Artificial sequence
  DNA replication origin
aagaatttttcttagtgcctaacaaaatgaaaagtctcccatgtctacttctttctacacagacacggcaaccatccgatttctcaatcttttccccacctttcccgcctttctattccacaaagctgccattgtcatcctggcccgttctcagtgagctgttgggcacacctcccagacggggtggtggccgggcagaggggctcctcacttcccagtaggggcggccgggcagaggcgcccctcacctcccggacggggcggctggccgggcggggggctgaccccccccacctccctcccagacggggcggctggccgggcggggggctgatccccccacctccctcccagacggcgcggctggccgggcggggggctgatccccccacctccctcccggaaggggcggctggccgggcggggggctgaccccccccacctccctcccggacggggtggctgccgggcggagacgctcctcacttcccagatggggtggctgccgggcggagaggctcctcacttctcacacggggcagctgccaggcggaggggctcctcacttctcagacggggtggttgccaggcagagggtctcctcacttctcagacggggcggccgggcagagactctcctcacctcccagacggggtcgcggccgggcagaggcgctcctcacatcccagatggggcggcggggcagaggcgctccccacatctcagacgatgggtggccgggcagagacactcctcacttcctagatgtgatggcggctgggaagaggcgctcctcacttcctagatgggatggcggccgggcggagacgctcctcactttccagactgggcagccaggcagaggggctcctcacattccagacgatgggtggccaggcagagacattcctcacttcccagacggggtggcggccaggcagaggctgcaatctcggcactttgggaggccaaggcaggcagctgggaggtgtaggttgtagcgagccaagatcacgccactgcactccagcctgggcaccattgagcactgagtgaacgagactccgtctgcaatcccggcacctcaggaggccgaggctggcggatcactcgcggttaggggctggagaccggccggccaacacagcgaaaccccgtctccaccaaaaccagtcaggcgtggcggcgcgtgcctgcaatcgcaggcactcagcaggctgaggcaggagaatcaggcagggaggttgcagtgagcccagatggcagcagtacagtccagcttcggctccgcatgagagggagaccatggaaagagagggagaccatggggagagggagagggagagggagaagg

SEQ ID NO: 5509 - DNA, 1250 bp, Artificial sequence
  DNA replication origin
ccctcctggacggggcggctggccgggcagaggggctcctcacttcccagtaggggcggccgggcagaggcgcccctcacctcctggacggggcggctggccgggcggggggctgacacccccacctccctcccggacggggcggctggccgggtggggggctgacccccccacctcccttcaggatggggcagctggccgggcggggggctgacccccccacctccctcccatacggggcgactggccgggcagaggggctcctcacttcccagtaggggcggccaggtagaggcgcccctcacctcccggacggggcggctggccgggtggggggctgacccccccccacctccctcccggacggggcggctggcctggcagggggctgaccccccccacctccctcccggatggggtggctgccgggcggagacgctcctcacttcccagacggggtggctgccgggcacagaggctcctcacttctcagacggggcggctgccgggcggagaggctcctcacttctcatacggggcggccaggcagagacgctcctcacctcccagatggggtggcggccgggcagaggtgctcctcacatcccagacagggcggtggggcagaggcgctccccacatcccagatgatgggcagccgggcagagacgctcctcacttcctagatgtgatggtggccgggaagaggcgctcctcacttcccagatgggatggcggccgggcagagacgctcctcactttccagactgggcagccaggcagaggggctcctcacatcccagacgatgggcggccaggcagagacgctccccacttcccagacggggtggcggccgggcagaggctgcaatctcggcactttgggaggccaaggcaggcggctgggaggtggaggttgtagtgagccaagatcacgccactgcactccagcctgggcgccattgagcactgagtgaacgagactccgtctgcaatcccagcacctcgggaggccgaggctggcggatcacttgcggttaggagctggagaccagcccggccaacacagcaaaaccccgtctccaccaaaaaaatacgaaaaccagtcaggcgtggtggcgtgcgcctgcaattgcaggcactctgcagtctgaggcaggagaatcaggcagggaggttgcagtgagccgaggtggcagcagtatagtccagcttcggctcggcatgagagggagaccgtggaaagaggg

SEQ ID NO: 5510 - DNA, 916 bp, Artificial sequence
  DNA replication origin
tgaggggcgcctctacctggccgcccctactgggaagtgaggagcccctctgcccggccagtcgccccgtatgggagggaggtgggggggtcagccccccgcccggccagctgccccatcctgaagggaggtgggggggtcagccccccacccggccagccgccccgtccgggagggaggtgggggtgtcagccccccgcccggccagccgccccgtccaggaggtgaggggcgcctctgcccggccgcccctactgggaagtgaggagcccctctgcccggccagccgccccgtccaggagggaggtgggggggtcagccccccgcccggccagccgcccagtccgggagggaggtgggggggatcagccccctgcccggccagctgccccgtccgggaggtgagggatgcctctgcccagccgcccctactgggaagtgaggagcccctctgcccggccaccaccccgtctgggaggtgtacccaacagctcattgagaacgggccatgatgacaatggcagttttgtggaatagaaaggggggaaaggtggggaaaagattgagaaatcggatggttgccgtgtctgtgtagaaagaagtagacatgggagacttttcattttgttctgtactaagaaaaattcttctgccttgggatcttgttgatctgtgaccttacccccaaccctgtgctctctgaaacatgtgctgtgtccactcagagttaaatggattaagggcggtgcaagatgtgctttgttaaacagatgcttgaaggcagcatgctcattaagagtcatcaccactccctaatctcaagtacccagggacacaaatgctgcggaaggccgcagggtcctctgcctaggaaaaccagagatctttgttcacttgtttatctgctgaccttccc

SEQ ID NO: 5511 - DNA, 1459 bp, Artificial sequence
  DNA replication origin
aaatccacggcgaagccgaagtaacttccctcggggccagagtactcggcaggactgtccacgtctaggttgaaggcgcggcacagaggtagcaggagtcccgagagaagaagcgggaggccgcggggaccgaggcgcagccgtcgccgcggcggaaaagccatcgccgaagtgcgcgcgggacgccaagccgggagcggtagccacctccccccgccccagcgaggcgcccagtgcccgcggcccgccgcctgcgcgcgcccaaacttgccggccgctctcttctcggctagcccgggacagctccggggcaggcaagagggctgagcttcggagcgaccgccagggacgaggggcgcagagcgcgcggggcggggacagcagcgcagacggtcctttgcttccctccggctccgccgctccacgcagcgtctgaggctggggactgccggggtgagcgccgcacctcaggcctgagagccgcggcggcactgggaggagacctggaaggaggaggagccggcccgggaggctgctgtggagctggaggaggaagtgggggaggagaggcgcccttctacaggggagagctcagcgtacttccgtgagtgcagtcgccgcctgtcccgagacctgggcgtctgtgcaggggcccccagctcctgagcctgggtcagcggcagcgctcctggacgaaggcctcaggctgagcacctgaggaggcgtgggggcgggggcggggagatacggtccagcgtcccaatctacccgcgtccacgggagtagcaagggcacccacgttcccttgtcccgccgggaacttccgtgcgactgttgtttaaaaatgaggaaagctttttatcagtttctcgtgtttctgctgcttagcctggcaggctctcacgaacgaaaccctgttaattaatggtcgttaattacactccattccacaaacactgaacttaattacggatttccagaaagccagcatagcctcttgcaagtgaggtatgtaaagcttaacttagtagtcaaagaaaggattcgcagggcaaagaattggcagtgatcgttttaaatcaagtcagaataatcgaagccttattcccagtttgttagctgcggttgtatgatttagaaacactgatttgttgatttaggatgtttggatagacataatttcagagctggaagaaggaccgcacaccggtgaaataaggccccgcgtgcttgtttgccactggtgtgtttcatcaagccttgacaacactggactgagagagagggccttgaggacaggaaccttgacctttttcttagtgttcttatttctagcaccttgccaagcagatagtagtcgatcaataaaatgtccaatcagtgaatgaatagcagacgaaatgagcaaagtgcccagagaagtgactcttccatatttcaagtgtttcatgtgctacag

SEQ ID NO: 5512 - DNA, 1057 bp, Artificial sequence
  DNA replication origin
ctcacctcccggacggggcggctggccgggcggggggctgacccccccacctccctcccggactgggcggctggccgggcggggggctgatccccccacctccctcccggacggggtggctgctgggcggagacgctcctcacttcccagacggggcggctggccgggcagaggggctcctcacttcccagtaggggccgccgggcagaggcgcccctcacctcccggacggggcggctggccgggcggggggctgaccccccacctccctcccagacggggtggctgctgggcagagacgctcctcacttcccagacagggtggctgctgggcagaggggctcctcacttctcagatggggcggctgccgggcggagggtctcctcacttcccagacggggccgccgggcagagacgctcctcacctcccagacggggtcgcggcggggtagaggcgctcctcacatcccagacggggcggcggggcagaggcgctccccacatctcagacgatgggcggctgggcagagaggctcctcacttcctagatgggatggcggccgggaagaggcgctcctcacttcctagatgggatggcggccaggcagagacactcctcactttccagactgggcagccaggcagaggggctcctcacatcccagacaatgggcggccaggcagagacgctcctcacttcccaggcggggtggcggccgggcagaggctgcaatctctgcactttgggaggccaagggaggcggctgggaggtggaggttgtagcgagctgagatcacgccactgcactccagtctgggcgccattgagcactgagtgaaccagactccgtctgcaatcccggcacctcaggaggccgaggctggtggatcactcgcggttaggagctggagaccagcccggccaacacagcgaatccccgtctccaccaaaaaaatacgaaaaccagtcaggcgtggcggcgcgcctgcaattgcaggcactcagcaggctgaggcaggagaatcaggcagggaggttgcagtgagctgagatgg

SEQ ID NO: 5513 - DNA, 787 bp, Artificial sequence
  DNA replication origin
cagccgcccagtccgggagggaggtgggggggtcagccccccgcccggccagccgccccgtccgggaggtgaggggtgcctctgcccggccgcccctactgggaagtgaggagcccctctgcccggccagccgcccggtccgggagggaggtgggggggtcagccccctgcctggcaagccgccccgtctgggagggaggtggggggatcagccccccgccgggccagccaccccgtccgggaggtgaggggtgcctctgcccggccgcccctactgggaagtgaggagcccctctgcccggccagccgccccatccgggagtgaggtgggggggtcagccccctgcccggccagccgccccgtccgggaggtgaggggcgcctctgcccggccgcccctactgggaagtgaggagcccctctgcccggccaccaccccgtctgggaggtgtacccaacagctcattgagaacgggccatgatgacaatggcggttttgtggaatagaaagcggggaaaggtggggaaaagattgagaaatcggatggttgccgtgtctgtgtagaaagaggtagacatgggagacttttcattttgttctgtactaagaaaaattcttatcctgttgatctgtgaccttacccccaaccccgtgctctctgaaacatgtgctgtgtccactcagggctaaatggattaagggcggtgcaagatgtgctttgttaaacagatgcttgaaggcagcatgctcgttgagagtcatcaccactccctaatctcaagtaac

SEQ ID NO: 5514 - DNA, 802 bp, Artificial sequence
  DNA replication origin
gctgtgtccactcagggctaaatggattaagggcggtgcaagatgtgctttgttaaacagatgcttgaaggcagcatgctcgttgagagtcatcaccactccctaatctcaagtaaccagggacacaaacactgtggaaggccgcagggtcctctgcctaggaaaaccagagacctttgttcacttgtttatctgctgaccttccctccactattgtcctatgaccctgccaaatccccctctgcgagaaacacccaagaatgatcaataaaaaaataaaataaaataaaataaaataaaataaataaagtttcatgcgcatccgtgtgaagagaccaccaaacaggctttgtgtgagcagcatggctgtttatttcacctgggtgcaggcgggctgagtccgaaaagagagtcagccaagggagataagggtggggctgttttataggatttgggtaggtaaaggaaaattacagtcaaagggggtttgttctctggcgggcaggagtgggggccgcaaggtgctcagtgggggtgctttgagccaggatgagccaggaaaaggagtttcacaaggtaatgtcatcagttaaggcaaggaccggccatttacacttcttttgtggtggaatgtcatcattaaggtggtgcagggcatattcacttcttttgtgattcttcagttacttcaggccatctgggcatatacgtgcaggtcacaggggatgcatggcttggcttgggctcagaggcctgacactcctgccttcttatattaataagaaaaataaaacaaaatagt

SEQ ID NO: 5515 - DNA, 1943 bp, Artificial sequence
  DNA replication origin
gctggggtttgtctcacagtggaggcaaagaattgcaacttttttctattattgtacaccttgaaggcgaggttaattaaatcctgttgtggggtttgagggccggaatttaatttttggagttttatttaatgtcgggagcagattgggtaataaaatgtattttgagaataagacggccttttgaccttttagggtctagggctgtaaagtgtctcatggttgctgccaaacaaatcatgaactgggctggatttttatatttgatgaaaaagagcctaaatgctatctgatttgggataaagaaaaagagcattaaccttgactatgcctttagctccagccacctttttaagagtaaattgctgggcaggagggggagggctagtcagggaatgaaacggtaagccagaccaggtgtgaggagggggggtgataaaaagattacagggtggaggagcagaggctgaggaagaattgggacctagctcggcctggtgaggagcagcctggggaggaagggaaaggtcagatgggtctgtagaaaaggaagattagaaagactcagcgatgcttggggttggtactgaggggagaggcgggagggaaagaaggaagatttaggacgagttgcactgggcacagagactaggaagggactgatgtgtaaaagaatgcctagacgtcaggcacctcagaccatttgcctattctacgacaagaattatttagatcttgcaggatggaaaaattcaaagtgccattttctggctatttggaactactgtcaaatttatattggggtcaagcggcattgcagaagaaaataaggcatttaggttttaggtcaggtgtgagttgaagaggttttaagtttttgagaacacaggacaaaggagtagaaggaggaatggagggtggaaggttgcccatagtgaaggaagcctagagaaaagagagagtagagaaaaggagggaaggggttcggaggttcttaccttccagaaaagtgggaaaaggggttggggcacagagattagaggtcggggcacggaaataagggatggggtgcagaaataaggggtcggggcaaggaaataaggggtcggggcatggaaataaggggtcggggcacggaaataaggggtcggggcacggaaataaggggtcggggcacggaaataagggattggggcgcagagataagaggtcggggtgcggaaataagggattggggcgcagagatataagaggttggggcacggaaataagggattggggcgtggaaataagggattggggcacagagataagaggttggggtgcagaaataagggattgggggttcttgccctgtagagttttgggtccaccgataaaacgtgtctcctttgtctctaccagaaaatgaaaggaattgaaattaagagaagggggagattgaagtgtggcgccaagattgaaaggagaaagaggttgagggatagtgagggaggttggagaagagagtaaaaagaggccgcttaccggatttgaaattggtgagatgtttcttgggctggttggtctgaggacctgaggtcgtaggtggatctttctcacggagcaaagaacaagaggacaggggattgatctcccaagggaggtcccccgatccgagtcacggcaccaaatttcacgcgcgtccatgtgaagagaccaccaaacaggctttgtgttagcgacatgactgtttatttcacctgggtgcaggtgggctgagttggaaaagagagtcagccaagggagataagggtggggccgttttataggatttgggtaggtaaaggaaaattacagtcaaagggggtttgttctctggcgggcaggagtgggggctgcaaggtgctcagtgggggtgctttttgagccaggatgagccaggaaaaggactttcacaaggt

SEQ ID NO: 5516 - DNA, 1238 bp, Artificial sequence
  DNA replication origin
tcccagccccacggccgccccccgaggttgccctcgcggcttcccggagagcaggaaaacccggggagtggaacgcgtcgaggcgaaggtccccgcaagccgcgcagggtgtctgcggccggttggacgcttgcgcccggggtgggcgactcctccgggcaagggcgcggggacggcccggcgcgcaaggttgacgggagctcgtctcgcgccgcggggacgcccgggcggccctgaaggggacggggcggccccagtcggaggtcgcagggagctccgcccccgactcggtataagagctgggcccggcccacggcggcggcggcggcggcggagagagctggctcagggcgtccgctaggctcggacgacctgctgagcctcccaaaccgcttccataaggctttgcctttccaacttcagctacagtgttagctaagtttggaaagaaggaaaaaagaaaatccctgggccccttttcttttgttctttgccaaagtcgtcgttgtagtctttttgcccaaggctgttgtgtttttagaggtgctatctccagttccttgcactcctgttaacaagcacctcagcgagagcagcagcagcgatagcagccgcagaagagccagcggggtcgcctagtgtcatgaccagggcgggagatcacaaccgccagagaggatgctgtggtgagtgtcgttgaccgaaagcatatggtggaaacccaggtggggctttggagacaagcaactctacacgagttctggaggaatgtggctctgctgtgaaccatagctttgtaaaaagatcctttgactcatatttggtggacgttaaggaagaaaggaaattcagggtgtgggaaaaggggtttgcacacaggcacggatggagtagattgggcagtttggattgccttgtgtaaaaaagaaacaaaacaaacaaaccaaccaacccaaaaaagaatgctgaaacaagagtttcttcactgtatgtgaaatgtgaagttgggcagttattgactaggtcaataactgaatttagtgaatggtattaagtgaacgaaatacatcggttcataggtaacttgataaaatgtacgtggtttgtcctgcaaagtagtttttaataatcatgttctaatgagatcaaatggataagcattctgccctcagctcattaagtgactaccatcgctttttgtcaccccgcctgtgtctttgcaggatccttggccgact

SEQ ID NO: 5517 - DNA, 880 bp, Artificial sequence
  DNA replication origin
aggcgccccccacctcccggacggggcggctgccgggcgggggctgccccccacctccctcccggacggggcggctgaccgggcgggggctgccccccacctccctcccggacggggtggctggctgggcgggggctgccccccacctctctcccggacagggcggctggccgggcgggggctgtcccccacctcttggacggggcggctgcctggcggagatgctcctctcttcccagacggggcagctgccgggtggaggggctcctcacatcccagatggggcagcggggcagaggcgctccccacatctcagacgatgggcagcggggcagaggcgctggggagcgcctctcagacgatgggcctctcatctcagaggatgggcggccgggcagagacgctcctcacttcctagacaggatggcggctgggaagaggcgctcctcacttcccagactgggcggccgggcagaggggctcctcacatcccagacgatgggcggccaaggagagacgctcctcgcttcccagacggggtggcggctgggcagaggctgcagtctgggcactttgggaggccaaggcaggcggctgggaggtggaggttgtagcgaggcgagatcacgccactgcactccagcctgggcaacattgagctctgagtgagtgagactccgtctgcaatcctggcacctcgggaggccgaggctagcagatcactcgcggttaggagctggagaccagcccggccaacagggtgaaaccccgtctccaccaaaaaaataccaaaaccagtcaggcctggtggcgtgcgcctgcaatcacaggcactcggcaggttgaagcaggagaatcaggcaggaggttgcagtgagcc

SEQ ID NO: 5518 - DNA, 757 bp, Artificial sequence
  DNA replication origin
ggcgctccccagcgcctctgccccgctgcccatcgtctgagatgtggggagcgcctctgccccgctgccccatctgggatgtgaggagcccctccacccggcagctgccccgtctgggaagagaggagcatctccgccaggcagccgccccgtccaagaggtgggggacagcccccgcccggccagccgccctgtccgggagagaggtggggggcagcccccgcccagccagccaccccgtccgggagggaggtggggggcagcccccgcccggtcagccgccccgtccgggagggaggtggggggcagcccccgcccggcagccgccccgtccgggaggtggggggcgcctctgcccggccgccctgtctgggaggtgggggggcccctctgcccggccgccaccccgtctgggaggtgtacccagcagctcattgagaacgggccatgatgacgatggcggttttgtcaagtggaagagggggaagtgtggggaaaggaaagagaaatcagattgttgctgtgtctgtgtagaaagaagtagacatgggagactccattttgttctgtactaagaaaaattcttctgccttgggatgctgttaatctatggccttacccccaaccccttgctctctgaaacatgtgctgtgtccactcagggctaaatggattaagggcggtgcaagatgtgctttgttaaacagatgcttgaaggcagcatactcgttaagagtcatcaccaccactccctaat

SEQ ID NO: 5519 - DNA, 1477 bp, Artificial sequence
  DNA replication origin
tcagccatgggcacgggaaaggggaaaaaacaaggaaaggggaggaacctactctagaatggctgttttcttgtccgggagagggacgctgcgtccgcggcgttcccgtggggctgagaacagtcgtcgccgcctcagatggcttctcgcggggccttgaatccgccctcagggcctccgcaagggcgagcgggaggcgcaccggaaggaactgagaggaactttcagggcttttcgccccaccgtggcggcccggccctcctcgcctcgccggccaacactgccgccgcccgggcgcgggtcgaagcggttggtcctccgggccctggggtggctgggctgctcctcgggcggagcctgcgggcgactaggcctggtgcgtcccgcagcagccgcagcgcccccaggcggcgcccggccccttggctggctcagaccccccgcgtgcgcatcatcccaagcccgcttagcgcttagtccagcggcatgccgtgggcactgtgccgccctcactatctgcctctgctaaaacaccgaaacagagtagcagaggagacagcgccgggcgttgaggcagtcccgagttggaataccacctccatcatcattctttcattcaacaagcatttatggaacacctattatgagtcaggcacccagctacaagctggaaaccctagaaaacagggcagacacgaaaccccaaggagcttacagttgaacagatcatctcacagctatatttaacagtgtgccaatattagatggaatgacagcactcgaatgaaagctaacctagcccagggctaggaaaggctgcctaaggaagtgcccttttcccctccgagcctagaagatggaaaagagctacccaagcaaaggactggacaagtagcttttcaggaacagggaacagcaggagagaaagaattgaagtgagaacaaagttgaaatggttgagaaaccgcaaaaccctgcttagagaacaagagagatgtgggcacaaaccgagctgctgaggtgcgcgatggacagatcatgcaggctgctgagtaatgattttgaatttcatcccaaaggattagcctacagtagtggcagtggaggtggggctcagggactgtggacagatttgaaaaataatgaggttgcctgttggtgacagattggggatatgttgaaaaagaaggttgtgtccaagtcagaaccacatttctgtcaggagcaacaggatatcagggcaagattaagagttcagttatgtactaattgaccttgaagtacctgtgagagaaattgagatgtgagatatgctttagataaacagttctgggctaagaatggcagtaggggttagatgtataaattttggcagatttatagtaattgaagccaggagtggggttgaaatcaccaagggagagcgtgcagaatgaggagttgagaaccaaggattagagacctgagaaatttaaca

SEQ ID NO: 5520 - DNA, 1379 bp, Artificial sequence
  DNA replication origin
cacgcgagcgaaggcgaagccccggcgacgcacggccccgcttggctcggcaccggatccgagcttggcctcagccaggccgccgcccccggctttcccgcgggaccgcggcgtggaaacgcgcgctgccgcctcggggctcccgggacgcgcgggccccccacgcctgcccgagccgggcgtccgcgacgtcacaagtggagcgcgatgattcagagggagggccaggaagggaagggctctggggtcagcttggccacggctgctgtttccttgtcgccgcccacgaattcacttttaaatcttcctcctccattcatctgtactctcataggggactgcgggtttgacagatgggttggcagctgtgaagatggacttcctgccagtggtatccgggtcccactgttctaatggaaatgtcaggtgtactggatgttcctcaagacacagcagtgtctctgggccttgcctcttaaggagtgggcctcgggccacctggacaggaagcgcatcaagggtggggaacttatctctctccagcctttggtgctgtgatactcagtgtaccttaaggatggtttgggttgaacctaggtaggaatgggtgttggtgggcggggtgggggtggggggaatagaaaccttaaaagggcaacacaaagttttgaatagaagaggccaagcagcctcgcccagaagctgatgtttgtgaatgtactgggccttctaaagcggcgcttcacacaccttttcacttcttggcacaggtaggaaaggatgatattacaagggtcaaaatgggggtaaacagaagaggctgctcctgcagaaggcttcctgcagaagcccttgcacttggagggctgggaagacccatgctgtatctgcatccctgtcattcgtttcacggcatccagttgggaagctctgcttaaagctttgtctggcacgttttcttagctacatttttccactccagctgagactgcctcactgagttgtcaacacttggtcttcttcagcagtgaggaaccaacaagacaggaggctgggtcaatactcaacttggcaaactccaggaaatggtgcttaaaacgtttggcttcttgaatggaattcatggtactgctcccagcctgcacctgggttctccaacttgagacaatttctccccgcatccccccacccttccctggctttcactcactagcaagtgggctgcttctactttctttctcacattcatttcttaggtccattctcagagcggttaggattactgtttaattagcctcataatcatatctatgatggcaaaatcaagaaacaatttaaacatgattcttaaaagtaaggagataaataccagagacata

SEQ ID NO: 5521 - DNA, 1300 bp, Artificial sequence
  DNA replication origin
tgcggcggcggcagcgctcagctgcgcggggcgcggggagccctgtccccggagcacggggcggcggctcggggcgccggggcggcggctgtcggggcagcgcgcaccatcccgggctgctcgcgcgctcctccggggctgcgacgggctgggcggggcgcggcgaggcgaggcgagggatgcggaccgggtggggccacggaggacggaggcggagggcccagcgctcccgccggcgcgaccttctctcccgctgcggctcctcctcctccccggccccggcctcacagtcgccgccgccggtcactaccggctggacccgtttcagggccgggcgctgaggaccggccgccaggtgcagcgctccgcctcctgcggcggcggcggatgcgtcgactgcccgctcccggcctccagcccgccccggcggcccggagggacacctgaacccagccgggcccggggagcacgctgaggaggcgaaagcactgggcgaggctccatccctaccgcaccctccacccccccgcacccccaagcgacttccgctgagcccccaggcaatgagtgcgggccaggaaatgtgggggaaaatgtactaacatcccttattccttgagcgccttttaagtggcacacacaatgctaatgctgtcagtgcgttatctccgcgtctgtcccaggttgacccgggagggaggagccggcggggtgcgggagacaaacgatctgtgagtttcggggctcaccaagaagggggaacactgagacgaaggcaccctttttcaggaagctgctactggcatcttgctgaaaagccaaccgtgtgtgtcgcactaagaatataattaaagttgtatttctagttaaacacgcagagagttgggggagagtggagtattcacttggcaagtatgtctgtgtgcctgtgatgggctttgggggatgccacatcctgttcttaaggagtttattgtcttgttctggcaacaacgacaagagtgacaatggtagctaacggcaacaacgacaagagtgacaatggtagctaacgcttataaacatcgattatgtacggggcactgtgtaggtactctttgagccttataaccctataggtgtaggaaacgttattcccattttacaactgaggaaagccgaggctgaaagttaatgtgacccatccaaagttactaaacagcgaaagggaaagcaggcttcttttgtctccaggctttaagctcttaaccgtgaaatcatactggtaagaatttgataggccctgaagtttctgaatttt

SEQ ID NO: 5522 - DNA, 817 bp, Artificial sequence
  DNA replication origin
agctgagcgctgccgccgccgcagcaggtgagtcgggcccggcttgcggagaaggggctcgcagacccgccctggcctcccccgccccgcacgggcccagccggagggcgggtaggcacctcagccgcgcacacctgctgccgggaaaggggcttcggggccggggctcggagcccagcgtgcgccgctgtctccgctcgggcctcgctcgcccgccgctccctccctccctccctcccccggcttccgtgtcgggtgtcatctttgtggggtgctgggggaggctgccgcctgcgcccccagcgcgccccgtgctggcagcacttccgcaaacgtaactggagtcgggaaaacaaaggcgctgcccagggagccctcgccgggcgcccacagctgctgccgcgggtggggacggagggtgagcgccgatgcccgggtcctcctccgcccgggccgacccgcgccctcgccataaacatccctgggaaaaaggaggaggtgagaacctccacacagccccagtgacaaggacgcggccacttgtgtggcaggaggaggaaattgacaacgtctgccctcccaggttaataaatacggaaaaaaaaatacctctgctctgccagccaccatcctagcagacatcccccacctcgtgctttacttccacttggtctaacatgtctctggagcccttttgagatactactgggggttgctagtctttctgggtcatatttattgcccatagagcaattttcctgcaaatttaggtaagatggtggaaaaatacaaacgcaactttccccctcgttaatcc

SEQ ID NO: 5523 - DNA, 940 bp, Artificial sequence
  DNA replication origin
tgcctggctgcccagtctgggaagtgaggagcgcctcttcccggccaccatcccatctgggaagtgaggagcgtctctgcctggctgcccatcgtctgagatgtggggagcgcctctgccccgccgccctgtctgggatgtgaggagcgcctctgcccggctgcgaccccgtctgggaggtgaggagcgcctctgcccggccgcgaccccgtctgggaggtgaggagcgtctctgcccagctgccccatctgagaagtgaggagccccttcacccagcagccgccccgtctgagaagtgaggagcccctccgcccggcagccaccccatctgggaagtgaggagcgtctccgcccggcagccgccccgtccgggagggaggtggggggtcagcccccgcccggccggccgccccgtccgggagggaggtggggggggcgcctctgcccgcccggccgccccttctgggaagtgaggagcccctctgcctggccaccaccccgtctgggaagtgtacccaacagctcattgagaacgggccatgatgacaatggcggttttgtggaatagaaaagggggaaaggtggggaaaagattgagaaatcggatggttgctgtgtctgtgtagaaagaagcagacatgggagacttttcattttgttctgtactaagaaaaattcttctgccttgggatcctgttgatctgtgaccttacccccaaccctgtgctctctgaaacatgtgctgtgtccactcagggttaaatggattaagggcggtgcaagatgtgctttgttaaacagatgcttgaaggcagcatgctccttaagagtcatcaccactccctaatctcaagtacccagggacacaaacactgcggaaggccgcagggtcctctgcctaggaaaaccagagatctttgttcacttgtttatctgctg

SEQ ID NO: 5524 - DNA, 1229 bp, Artificial sequence
  DNA replication origin
atttaaccctgagtggacacagcacatgtttcagagagcacagggttgggggtaaggtcacagatcaacaggatcccaaggcagaagaatttttcttagtacagaacaaaatgaaaagtctcccatgtctgcttctttctacacagacacagcaaccatccgatttctcaatcttttccccacctttcccccttttctattccacaaaaccgccattgtcatcatggcccgttctcaatgagctgttgggtacacttcccagacggggtggtggccaggcagaggggctcctcacttcccagaaggggcggccgggcgggcagaggcgccccccccacctccctcccggacggggcggccggccgggcgggggctgaccccccacctccctcccggacggggcggctgccgggcggagacgctcctcacttcccagatggggtggctgccgggcggaggggctcctcacttctcagacggggcggctgctgggtgaaggggctcctcacttctcagatggggcagctgggcagagacgctcctcacctcccagacggggtcgcggccgggcagaggcgctcctcacctcccagacggggtcgcagccgggcagaggcgctcctcacatcccagacagggcggcggggcagaggcgctccccacatctcagacgatgggcagccaggcagagacgctcctcacttcccagatgggatggtggccgggaagaggcgctcctcacttcccagactgggcagccaggcagaggggctcctcacctcccagaggatgggcggccaggcagagacgctcctcacttcccagacggggtggcggccgggcagaggctgcaatctcggcactttgggaggccaaggcaggcagctgggaggtggaggttgtagcgagccgagatcaccccactgcactccagcctgggcaccattgatcactgagtgaacgagactccgtctgcaatcccggcacctctggaggccgaggctggcggatcactcgcgattaggagctggagactagcccggccaacacagcgaaaccccgtctccaccaaaaaaatacgaaaaccagtcaggtgtggcggcgcgcgcctgcaatcgcaggcacttggcaggctgaggcaggggaatcaggcagggaggttgcagtgagccgagatggcagcagtacagtccagcttcggctcagcatcagggagaccgtggaaagag

SEQ ID NO: 5525 - DNA, 927 bp, Artificial sequence
  DNA replication origin
gacgcagatcccggcgtgggccgccgccgggcgggggcgggggcggccgctgggcccggggctcggccccttcccgccgccccctccgcggaatccggaggacggcccattcacacggcagctgggaggaaccaagtgggcgccgggagtgggcggctcccgcgagtcccgctccgggcgcggggaggggacgacaaagagggagacgggtggggaacgccgcctccggcctgctctccagctgcggagtgaactgggaaggtttgcaattaaaaaaaaaaaattatgtgtgaggttcccgatatagtatttcaaagagcacacccgccaaatccaacatcctctaggaggctgactttaaaaaaaaaaaaaaaaaaaaaacaacagcgcgccgggctcccctggcccccgcaggctcggggcagaggcggggaggcaggtggtccaggtgcgcccctgcccgggggggcgaggcgtccggcgggaaggctgcagcgaccgcatggaggaaggggcggcaggtgcgcggcgctggaagaaccggcggctgggagagcatctctgcctcgcccatcttgccccctccccacctccgctctggcgttgggacgggaggaggagggaggaatggaaccagggagtccgaagtacagctttgacaactgtcgcgctggccgggtaatttaattccaacctttttaacctcctgaaaatctgccttttattttactgtttaatgttttttgtgtccatggtgtagaaaaactacggcgctagtatagtgctggtgtgtgctaaattagagttcccaaggcacaatatagaattttttggtttgcataaactttgctaaccaaagtattaaagcaccttcaaaaatgtacttaggctggccagggctcacgcctgtaatgccagcactgtggg

SEQ ID NO: 5526 - DNA, 1569 bp, Artificial sequence
  DNA replication origin
ccgtctccctctttgtcgtcccctccccgcgcccggagcgggactcgcgggagccgcccactcccggcgcccacttggttcctcccagctgccgtgtgaatgggccgtcctccggattccgcggagggggcggcgggaaggggccgagccccgggcccagcggccgcccccgcccccgcccggcggcggcccacgccgggatctgcgtcactcggccgcgcgtgggcgggagccggagcggcgaatgtagcaagagcggaatctcccaatgtgacagcgcggggtgggggagtggaggcggcggaggcgggcgggggagggggaggagggtgtagcgcgcgcggggaaggcaggggaggggagggcaaggcgcggcgggggaggcgctgccgccgccgccgccgcccgcgcgccgcagcctggaggagccgccgccgccgccgcggccaagcgagcgccgtcggggcgggtgggcgggaagaagcggcgggcccgaggtgggggggagcagagagagcgcgcccaccaccttcccttcccccctcgatgggagcgggggcgtcccggctcctgcagccgccagaggagggagagccgggggccgtcgcttcggagttggggctgagcagtcctcggggagagcgcgccaagaccgctgcagccgctggctgagtacgtaccggagcggacggtcgccactcccggtccgccaagtgcgggacactttcgcggctgagcggccacgggcgaacttggggcggctgagtcgcggggccacgcgggcactttgggggcggtgtccgggggaagcgggctccgcgcggccgccgccggaaggagagggcggccccgggctcgtgtgggcgattcccggagacattctgtgtgccagggcggcggggagcgcggccctgactcgtgcattttccctccgagaaaggttggggtgccgagtccgttttgctaacggggctgggggcgtcacacggcgctctgggggtgtgcgatgtgggttgtgcgcgccggccccagagttttgcagccaccttcgtcagggcagtctttttgtttgtttactttataaaagtgctgcacttaccgtctcgattttcttcttgggtatcttccctttccgaatgtagttttctttttaaaagcggaaggagagttttacatggaagtggcttacagaaacttggcgctgaggtgcagggaagccagaaactctttgtgtctctaaggccgatgaggaatttggaaacacatgtgggacatacaagcgttggatatagaggtgtgtgtgtgtgaccttatcatggagaaacactgaaaatactatcaaatctttgtggtctgcaaactcagagcttccaaagcttgagataggaaatgacacttctgttaagcctgaatgttgcaggatctcggggaaagggatagttgagatggaatatacatttgtcgattctgcagaccaagctttgcagcgagtgatcgggaggaatcgtagacttgcatgtacttacacctcgctccctgagattcgggaggcacggaaaattttgggat

SEQ ID NO: 5527 - DNA, 1309 bp, Artificial sequence
  DNA replication origin
gctcctatcccgccccaccgcagggccccacacagcctgagcccgggccccgaaaggaacgaggcctcctgcgcctcgcggagacactcacttttcacctgaggccaccagctctttgccctcgctgttgccaaacgcgtccgtctccccggggccgtccttggggccgggcgccgccggggcagcgggtggcgacaccccgggctgcggatgcgtgctccccttgcccagctcctgcaagatctccgaaggagagctggacaggccccgcgcgaggggctccgccggccagccgcccccgccccaccacgggtggagtcgcgcggcggcagccgggcccgcggccggccgtcccccgcctcggggacgccggcacagggtgaccaagggctgtgcccgccgcagagtcgcgctcacgccggcgggcgaccgcaggagcaggtcccgcagcatccccgagcctcgcagccgcatcatgccgccgggtccgtcagcgcccgctcaacaggggaggatgctccgggcgtgggcggccggtttcctcggggaacgcggtctgtggtggggcggtgagatgacagaagaggaaagggcagctacttgggtgtggttccggctcggactcccgcagcggatgcgggtgctgctgctgctgctgctgctgctgctgctgctgctgctgctgctgcgcgctaggattgccgcgaccggttctcttcgctccgcctaaggctccgcactgaggctaaagcgcaggggagggctagagaccttcagcgctcgccgacggcccgcccctttcgcccgctgcgattggctcaaatcctcgacctctcttttgattggcgattagggcagtcaaatttctctcggctctgggtgcgcggagagtagggcgggggattggtggggggcggggagaggagtcaaactgacgtgtgaagcgggtgagccaggcccggctgctcagtagccactttctgcacgccgtgccaactccgaggctagcctagttgggtactaggggctctgggttctcgcatttatgaagcagtgggctcctccactctgggaattcgagctgttggggagactcatgggcgagatcccccgcagccgagggcagtgaggtcagcaggtttggcagggctgagtctggccgagctgtcggaactcagccgatcccagctcgcatctggcccccaggtcagggcgtctggcgactcctccgagagcagccccggacaagcttcatccctctcccaaatgtaacatttgcttgaaactttccatgattggctactaccca

SEQ ID NO: 5528 - DNA, 1419 bp, Artificial sequence
  DNA replication origin
aagatgccttctcttgagggaccatagatggccccctggtagaagtatgcctgagttgaggcttcatggatgagtaggaaagaggagataaatggtcgtaaaaaggttccaggcagaagaaacaacacatacaaatggagaggtgaatatggtgtataggttcaaatgccttcaagcaaataaagcctcactcaagctggctaagccatgagccaatttaggatcttacataacaagaggtcctctgcagtgtggcctcaggcagagtccacatggctgagctcctctgctctgtgttgtcctggctcttccctcctccctgtgttctgctccatcctcggcataagaagatatattgtctttcccacatgaccctttaggaataataataataaaaaaatctcttttgatcccaagcagacaacttctcatgtcttattggccaggcttgggtcacatacttcttccggatcaaattgctagctaggggagtgagatcactatgtttggtttagactaatcactcggagagttgaggagtcaacaccccatccaccacatgaggaagtgtcaagagctgaataaggctgcagcacagacaggaggtggtgagtggcaagagatgaggcgccagaagctaaaggaacaaaaggccgtttcatgaaggaggatggaagagtgtccaatgctgcagcgaggtcaagtggcagaaggttgacagtaattactgtcagcttactgggtgcatacgagagcaagtttaattgtgatggttgaagtcagacttcagaggtttggagactaatgtgagatggggtggaataatcacggcgtggattctctcacaggaagtgaggccgtgaacagggcgagaggcgagagagtgacaggaagaggtagagcagagtcaagagagaggctttttagatgacagaggctagaagaggcttaaatgataagggaaaggagaagggagagaggaagagtggaggagagggggaagaaaaatgggattatcatttccccgaggaagctggaagggtggctatccgttggtggggagggagttccgaggagaatggaaagctttgaaaactcttccggggaagggagcattgatcacaaggagcagtgcggagggcccaggtgaggttggggaatatgaatttggagcagcccaggtggagtaatttctctctaggagcacttggtagctaggatgttggcttggaggtggcaatggttggcctgattcaggatgaagtgacagatcacagagctaggtgtgatgggaagaggaagggaatgcagcaaccaactactggggaaggcgtgggggtgtaatgggagtagttggataaaagttatggacgaggtgtacgtttgaattttgcatttcagaagctgaacagtttgggg

SEQ ID NO: 5529 - DNA, 881 bp, Artificial sequence
  DNA replication origin
ctttgtgcccgcggtccctggccccgtcgcaccctgcgggcgggggtcagcgggctctgccgctctcttgggagacgcggcgctgcggcgggaacggcgcacgctgtaggttgcggagggtggtcgtgactccgcagtggcttcgggggtggcgggagggaagaagggcttgtaaactaagttgctcttactttgccccatgcctctcgtacctgtgggcagagtcgaatctcggctgtcctcgtgttcacccacagcccctccattcctctggcccacagctgtttcctggccccctggaaagacacggtgtggcttcctccgggcaggaaagcggagggagaacaatggggcgtcctggggagtggggttcaggtgcggtgtgccccggcggcggcgggggaggaggggcccgggacgctgtgggcctccctgcgcgtgcagctgcgctcgcctcctttgttccgccgcagcggagggggttgccctgggtctcgtttcctgcccgggatgggattgattcacggtcccagagagggaaggggaagggggcggggctggaatggaaaccagattagagacgggagctacgaagggtggtggggccgggaagagagttggggagagggttgggagagggtgatgagagcgcgctggagaggtaactacaaacacacaacattttgttcaagggccatgtgagtttctagagcttatttgtagtgctttgttcaggcttcggcccagcgtttattgctgcaacaagttgtgtgcttcttgagtttctaggcgttcccaatgttagattgctcaaagcaaatcttcttagttacagtgaaagaagcccccccccctttttttttgagatttgaaaaaatttt

SEQ ID NO: 5530 - DNA, 1060 bp, Artificial sequence
  DNA replication origin
agagttggggagagggttgggagagggtgatgagagcgcgctggagaggtaactacaaacacacaacattttgttcaagggccatgtgagtttctagagcttatttgtagtgctttgttcaggcttcggcccagcgtttattgctgcaacaagttgtgtgcttcttgagtttctaggcgttcccaatgttagattgctcaaagcaaatcttcttagttacagtgaaagaagcccccccccctttttttttgagatttgaaaaaattttgctatgaactatggtattggtgtgtatgtgtgtgcctctgggtctgtgtgtgtagctagtggatattggctggaatgggtaggagacaaattttatagaatcaattttgacgtaaaattgttttatagtataatatagtacaacagttttccaggactgtttgagggcagaaaccaccagaaaattagacattgctataaataaatgaatcagactatgtaacacaattgaaaaacccttttacagtctgtcccaggaaacacaccacacacaccagcgtttggggtttgaactgaggagccctggcattgaagtgttctgtgctttcactctctgtgtgaggatcgtttagaggtggtagaattaaatgtaatgtgtcagacatttgttaagtgacctttcctagattggaatcgagactcgccaaaggattggctgacctagggagggagctatgggggattgaatgatgtgtgttttttgaatggggtattccaagcaaaactgttttgggaggaggctgacatttccaggcattcatggtttgtgcctgtgggacactggtgggaggattcccaaagtcggactgaaggttagcattactgtggtgataatttaggagacattctgttgtagtagtctggctgcagacagggctgggaagtggcccagagctgcctctttgacaagctgagggtccgccattaaaccacccctttggccatttattttgagatgaaccaagtttgaaagcctcttaaccttagaaggctaattaggagcttgctgtgg

SEQ ID NO: 5531 - DNA, 942 bp, Artificial sequence
  DNA replication origin
gccgccccatccgggaggatggtggggggatcagccccccgcctggccagccgccccgtccggaggtgaggggcgcctctgcccggccgcccctactgggaagtgaggagcccctctgcccggccatccgccccgtccgtgagggagatgggggggttagccgtctccagccggccgccccgtccgggaggtgaggggcgcctctgcccggccgcccctactgggaagtgaggacccctctgcccggccagccgccccgtccgggagggaggtgggggggtcggcccgcccggccagccgccctgtccgggaggtgaggggcgcctctgcccggccgcccctactgggaagtgaggagcccctctgcctggccagccgccccgtctgggagggtggtggggtggtcagccccccgcccggccagacgccccatccgggaggtgaggggcgcttctgcccggccgcccctactgggaagtgaggagcccctctgcccggccacgaccccgtctgggaggtgtgcccagcggctcattggggatgggccatgatgacaatggcggttttgtggaatagaaaggcgggaagggtggggaaaaaattgagaaatcggatggttgccgggtctgtgtggatagaagtagacatgggagacttttcattttgttctgtactaagaaaaattcttctgccttgggatcctgttgatctgtgaccttatccctaaccctgtgctctctgaaacgtgtgctgtgtccactcagggttaaatggattaagggcggtgcaagatgtgctttgttaaacagatgcttgaagtcagcatgctcgttaagagtcatcaccactccctaatcttaagtacccagggacacaaacactgcggaaggccgcagggtcctctgcctaggaaaaccagagacctttgttcacttgtttatc

SEQ ID NO: 5532 - DNA, 1352 bp, Artificial sequence
  DNA replication origin
ccgacccccccacctccctcccggacggggcggctggccgggcagaggggtcctcacttcccagtaggggcggccgggcagaggcgcccctcacctcccggacggggcggccggctggagacggctaacccccccatctccctcacggacggggcggatggccgggcagaggggctcctcacttcccagtaggggcggccgggcagaggcgcccctcacctccggacggggcggctggccaggcggggggctgatccccccaccatcctcccggatggggcggctggccgggcagggggctgaccccccctcccccctcccggacggggcggctggccgggcggggggctgaccccccacctccctcctgggctgggcggctggccgggcaggggggctcctcacttcccagtaggggcggctgggcagaggagcccctcacctcccggacggggcggctggccgggcggggggctgacccccccccacctccctcccggacggagacgctcctcacttcccagacggggtggctgccggacggaggggctcctcacttctcagacggggcggttgccaggcagagggtttcctcacttctcagacggggcggccgggcagagacgctcctcacctcccagacagggttgcggcccagcagaggcgctcctcacatcccagacagggcggcggggcagaggcgctccccactcagatgatgggcgggtcaggcagagatgctcctcacttcctagatgggatggcggcggggaagaggcgctcctcgcttcctagatgggatggcggccgggcagagacgctcctcactttccagactgggcagccaggcagaggggctcctcacctcccagacgatgggcggccaggcagagacgctcctcacttcccagacggggtggcggccgggcagaggctgtaatctcggctctttgggaggccaaggcaggcggctgggaggtgtaggttgtagtgagctgagatcacgccactgcactccagcctgggcaccattgagcactgagtgaacgagactccgtctgcaatcccggcacctcgggaggccgaggctggcggatcactcgcggttaggagctggagaccagcccggccaacacagcaaaaccccgtctccaccaaaaaaaaacgaaaaccagtcaggcgtggcggcacgcacctgcaatcgcaggcactcggcaggctgaggcaggagaatcaggcagggaggttgcagtgagctgagatggcagcagtaccatccagctttggctcggcatcagagggagaccgtggaaggagaccgtggggagagggagagggagagggagagggag

SEQ ID NO: 5533 - DNA, 1187 bp, Artificial sequence
  DNA replication origin
ggcggggggctgacccccccacctccctcccggacggggctgctggccgggtggggggctgactcccccacctccctcccggacggggcggctggccgggcagaggggctcctcacttcccagtaggggcggccaggcagaggcgcccctcacctcccggacggggcggctggccgggcggggggctgagccccccacctccctcccggacggggcggctggctgggcaggggggctgacccccccacctccctcccggacggagcggctggccgggtggggggctgacccccccacctccctcccggacggggcggctggcggggggctgagccccccacctccctcccggacggggcggctggctgggcaggggggctgacccccccacctccctcccggacggagcggctggccgggcggggggctgacccccacctccctcccggccggggtggctgccgggcggagacgctcctcacttcccagacggggtggcagccaggcggaggggctcctcacttctcagacggggcggttgccaggcggagggtctcctcacttctcagacggggcggcccggcagagacgctcctcacctcccagacggggcggcggggcagaggcgctccccacatctcagacgatgggctgctgggcagagacgctcctcacttcctagatgggatggcggccgggacgaggcgctcctcacttcccaggtgggatggcggccgggcagagacgctcctcactttccagactgggcagccaggcagaggggctcctcacatcccagacgatgggcagccaggcagagacactcctcacttcccagacggggtggcggccgggcagaggctgcaatctccgcactttgggggggccaaggcaggcggctgggaggtggaggccatagcgagccgagatcacgccactgcactccagcctgggcaccattgagcactgagtgaatgagactccgtctgcaatcccggcacctcgggaggccgaggctggcggatcactcgcggctaggagctggagaccagtccggccaacacagcgaaaccccgtccccaccaaaaaaacacgaaaaccagtcaggcgtggcggcgcgcgcctgcaatcgcaggcactcggcaggctgaggcaggagaatcaggcagggaggctgcagcgagcca

SEQ ID NO: 5534 - DNA, 1002 bp, Artificial sequence
  DNA replication origin
gccagcagccccgtccgggagggaggtgggggggtcagccccccgcccggccagccgccccgtccgggaggtgaggggtgcctctgcccggccgccctactgggaagtgaggagcccctctgcccggccagccgccccgtccgggagggaggtggggggctcagccccccgctgggccagccgctccgtccgggagggaggtggggggggtcagcgccccctcccggccagccgccccgtccgggagggaggtgggggggtcagccccacgcccggccagccgccccgtccgggagggaggtgggggggtcagccccccgccaggccagccaccccgtccgggagggaggtgggggggtcagccccccgcctggccagccacccggtccgggagctgaggggcgcctctgcccggccgcccctactgggaagtgaggagcccctctgcccggccaccaccctgtctgggaggtgtacccaacagctcattgagaatgggccatgatgacgatggcggttttctggaatagaaaagggggcaaggtggggaaaagattgagaaatcggatggttgccgtgtctgtgtagaaagaagtagacatgggagacttttcattttgttctgtactaagaaaaattcttctgccttgggatcctgttgatctatgaccttacccccaaccctgtgctctctgaaatatgtgctgtgtccactcaggggtaaatggattaagggcggtgcaagatgtgctttgttaaacagatgcttgaaggcagcatgcttgttaagagtcattaccactccctaatctcaagtacccagggacacaaacactctgcctaggaaaaccagagacctttgttcacttgtttgtctgctgaccttccctccactagtgtcctatgaccctgccaaatccccctcgtgagaaacacccaagaatgatcaataaaacaaaaacaaaacaaaacaaacaaacaaacaaaaacaaaacaaaacaa

SEQ ID NO: 5535 - DNA, 1251 bp, Artificial sequence
  DNA replication origin
gaagagcatatattattagaaagtatgccaaaaatttacttagcagaaaattcaaaaacagttttcctctgctaagaggttctctaaaattctacttacatagccaaactctgaaatcctagcaggtcctgtttcattatcataattactgcataaacacttttaaggactttgcctttagtttcaagcatgacttattttcataagcctgattagttaccacaccagccttgctatggaaaatgacatgttctcattctctgctgtagagttgttaaatcttgatctatatttatgttgccttctctgctgaaagcctgtagcgaaagaaatttctaattccttgttttgcaatattagttggcagctctatctaatgggtattctgtttccttaaagaatttagctgctctgtctagaagccgattttctgatgcctccaacgtctggtctaattgatctgttttaatggagtcttcgtcggtgaggagcgagatgccaccgactagaatgctgggatctgctgcttaattgccaggagtgagagacactgagattcagaaatctttggaggtgggaggggagagggacagtctcggacggaggcggagatgtaagataaagggatggatttcacacaggaaaaaaaaaaagatttcgttgaggcactgaggtgctgcacgatcacatctctcaaaggagaagttaaaaagcaaggaagtgggaggaggttggaggttaaagtacttaaaaggattactcgggtacaatttgtttttctgctggtgtctgcaaaggatagatagtcccgttttcaaagtatatgaatgcctcttttaagtgattgggaatggacactaattgcctgttaaatgttatcaaatgctctcctaaattcaggggacacagaaagaggggcacaaaaggagaatttaaatagaaaaagggaggatccggaggcttttgaaagcggggggagaagaaggaggagggataacagagaggaatagagaaggagagcggagagaagataaacaaaaacaaaaacaggaatcactgaataatcacacaccaaaaagaaagctcttccctatggggcatccaaaacactgagactgcaatagtgaccccggtcatggaagaaagatgttcctctccacccttgtccccgaaagctcttggtcccgttactggcgactaaaattccattaggctaaagagtgtgtctaactgcctgaagaatgcagcaga

SEQ ID NO: 5536 - DNA, 1095 bp, Artificial sequence
  DNA replication origin
aataaaatctccaaacgaatgataatgttatggaatctttggggtgctgcttttctcggaaacttgtggctagtggcgccttgccctagttttgcttaggtgtgctgggcttgttccatccactcggcctggcagtctgtgctcagctcacactagcagcctggatcctgtgcctctaagggagactgcgaaacaggtgtggagtggccagaggtgtgtgagcaagcgtggggtccggctacttcgcagtcacaaatgccagctgctgtcctagcgtgggcagccccaggtgctggcatggttgctggatgtggcgcatcacaagcagcttccctggctggactggggaatgctgtggtgcccggaagcttggagatgccaggaaccacagggccccaaagagggagtcacagccctgtctcagggatctccctggtctgggctccccaaagggctgcagctcttctctcctcttctcttccaaggtggttaacaaggggcatgttagcctcgccattcagtgggtcccaagtgcttgctctgcgaccagaaagaatgaagtatgtagacaagtgaaggccgagcaagatgaagagaagctttattaagcaatgggacagcttagagaagacacacaatggccggctcttctccacagccagggtatcccgatgagtgtttagctcctagcagagacggtagctccccattaggcaggtcgtcccagtaagtgttcagttctcaaaagagagggtagctcctctctccagctgttcttcccgacaagtgttcagctatcagcagagagagtaggtcctctatgtagctggtcattccattctctggagctcttggcagagaggaggccatggagtgagcggctcctccatgcaggcaggttgtcccatcgtctgcagctctcggcatggggggtagctcctctcctcctctctgcagctggttgtcctgttgtctctctgtcctctgctctgctttgtctcagcctgggacttttctggccctcagaagggaggaagtgtctgccaatttgtccatgggtagccatgggcaggcggaagaagccatgggcccagg

SEQ ID NO: 5537 - DNA, 850 bp, Artificial sequence
  DNA replication origin
ctttctacacagacacagtaacaatctgatctctctttcttttccccacatttcccccttttctattcgacaaaaccgccatcatcatcatggcgggttctcaatgagctgttgggtacacctcccagacgggttggctgccgggcagaggggctcctcacttcccagactgggcagccgggcagaggtgccccccacctcccggacggggcagctggccaggtgggggctgccccccactcccggatggcagctgccgggcggagatgctcctcacttcccggaccgggcggctgctgggcggaggggctcctcacttcccagagggggccgccggtcagagacgctcctcacctcccaacctcccagacggggtggcggcggggcagagacactcctcagttcccagacggggtcgcggccgggcagaggcgctcttcacatctcagacggggcggcggggcagaggccctccccacatcccagaccatgggcagccgggcagagacgctccttacttcctagacggggtggcagccgggcagaggctgcaatctcggcactttgggaggccaaggcaggcggctgggaggtaggtggaggttgtagcgagccgagatcacgccactgcactccagcctgggcaacattgagctctgagtgagcgagactccgtctgcaatcccggcacctcgggaggccaaggcaggcggctgggaggtggaggttgtagcgagctgagatcacgccactgcactccagcctgggcaacattgagctctgagcgagcgagactccgtctgcaatcccggcacctcgggaggccgaggctggcagatcactcgtggtc

SEQ ID NO: 5538 - DNA, 1097 bp, Artificial sequence
  DNA replication origin
cacacagtagattagcagggatgtttgatacaaagcactattaagtatggttaaaaaaaaaaaaagaaaagaaagaaaaatggagtacgaatccgtcaggtcagaaccatggcagtgaccaaggagcaagatcttacagatggacctgtacgcgctgctagacattgaggagaaggtggcagacaaagaggtggagaaggcatataggcagaaggcctcctcctgctaccctgaactcttccactggcagctgaactcttccaccagcattctcaggccttggaggtgctgaccgatgctgcagccggggctgcgtatgacaaggtcaggaaagccaagaagcaggcagcagagaggactcagaaactagatgaaaaaaggaataaagtgaagcttgatctggaggcccggaagcgggagcggcagcaccaggcggagggggagggagagggggaggaggaggaggaaggggaggggggaggaggaggaggaagaggaggaggagctggaggagagcctgagcaccaggacactagagcgagagatcaaacgcctgagtgaagagggttcccggcagctggaggaagagcagaggctgatctgggagcagatacaccaggagcgtgaccagaggttgagaggaaagacaaaatactaaaggccaaggaacccccaaactaaagctaaaatggaagcgcaagaaggctcggggggagtcaaaaggtggctactccaaagacgtcctcctatggcttttgcaaaagtatggtgaggttctcaacctggtgctttccagtaagaaggtaggcactgctgtggtggagtttgcgactgccaaggctgcggagctggctgtccagaatgaagttggcctggtggataaccctctgaagatttcctggttggagggacagccccagagcaccgtgggccccagccgcccagcactgtcaaagggctcagtgctgtcggtgagggaatacgagagcgtcatcgtgatgcacatgcgccatgcggccgagctgcaatggctgatctcagacatgcaccagcaagaccgagaggggcagcccacgtaaccctggctccagccaccc

SEQ ID NO: 5539 - DNA, 960 bp, Artificial sequence
  DNA replication origin
acagtcagattgtgtccagaattggtgggttcttgatctcactgacttcaagaacgaagccgcagaccctcgcggtgagtgttacagttcttaaaggtggcgtgttcggagtttgctccttctgatgtttggatgtgttcggagtttcttccttctggtaggttcatggtctcgctggctcaggagtgaagctgcaggccttcgcggtgagtgttacagctcttaaggcggtgcatctggaggtgttcgttcctcccggtgggttcgtggtctcgctggcttcaggagtgaagctgcagaccttcctggtgagtgttgcagctcataaaggcagtgtggacccaaagagtgagcagcagcaagatttatggcaaacagcagaagaacaaagcttccacagtgtggaaggggaccccagcgggttgccactgctggctcgggcagcctgcttttattcgcttatctggcccacccacatcctgctgattggtccattttacagagccaattggtctgttttgacagggtgctgactggtgcgtttacaatccctgagctagacacaaaagttctccacctccccactagattagctagatgcagggtgtccacacaaagattctccacatccccaccagagtagctagatacagggtgtcaattggtgcattcacaaaccctgagctagacacatggtgctgactggtgtgtttacaaaccttgagctagatacagagtgccagttggtgtatttataatcccttagctagacataaaggttctccaagtccccaccagagtagctagatacagagtgtccattggtgtgtttacataccttgagctagatacagagggctgactggtgcatttacaatcccttagctagacataaagattctccaagcccccaccagactcaggagcccagctggcttcacccagtggatcctgcacccg

SEQ ID NO: 5540 - DNA, 1720 bp, Artificial sequence
  DNA replication origin
gccagtcccgcgctgccatgggcccgcactcctcagctcttgggcggttgatgggacggggcgccctggagcagggggtggcgcttggtcggggaggctcctgcccggcaggagcccacggcacgcgggggttgggggaggctcaggcatgacgggctgcaggtccccagccctgccccgcgaggaggcagctaaggccggcgagaaatcgagcgcagcagctgctgacccaggtgctaaagcccgaactgaccggggagccccgccggccgcgcctagtgcgggcccgccgagcccacgcccacccggagctggcgctggcctgcaagcacagtgcgcagccccggttgcctcccgcgcctctccctccacacctccccgcaagctgagggagccggctccggccttggccagcccagaaaggagctcccacagtgcagcagcgggctgaagggctcctcaagcgcggccagagtgggcgccaagggcgaggaggcaccgagagcgagcgagagctgccagcaggctgtcacctctcaatcccagcactttgggaggccgaggcaagtatgtcacttgagctcaggagttcaagactagcctggctaacgtggtgaaaccgcgtctctactaaaaatacaaaaattagccaggcgtggtggtgcatgcctgtaatcccagctactcgggaaggttaggaacaagaatcgcttgaacccgggaggcagaggttgcagagagccaagatcacatcactgcactccagcctgagtgacagagtgaaactgtgtcaataaataaataaataaataaataaagcaggataagacagagaaggttgggggctcacagatacattatcacatgagtaaaacctgcaggaagtaaagaaacaatccaagtagatcttccaggagaaggaacagctattgctaaagctctgaggcaagagcattcctatcctgaagaaagaggaaaggaaaggaagaaggaagagggatggagggagggaaggcaggcaggaaggagaaaggaaaatggcttgggacttgcaacaggggtgtggcttgtttgctttcttataggagagggagcacacagatggccaggtgcaggagccagggcaagctcttttgggctctggcctcacagtaacgtttaggggtgtgttacaattaatgctcttttagccactgccatccacagacagctgagtgtttaaaccagctcagtggagagttagggtggcagccttttatgccttacacttttggtaccagagcccttgtccagaatcaggtcacacggacttgaggaatggtgaatgtggggattttactgagtggtggaggtggctctaagtgggatggatggggagctggaaaggggatggaataggagaatgatcttcccctggagttcagccttcctacagccaatctcctcttcgagcatccccagctgaattcctctcagtgttcagatgctccttctattctctccttctctgctgcaccagtctgccactctgctgctcttctgctcctctgctcatctgctcgtggagcctagggtttggagtttatatgggtatgggatagaggggcatggcaggccaaaaggcaacagttgggcacaaaaacaggtatcctgttttcatttagggccatgggttcaggcttgaggttggagccctcgccagggaccctgccctcctgcc

SEQ ID NO: 5541 - DNA, 1324 bp, Artificial sequence
  DNA replication origin
gcagaggggctcctcacttcccagtaggggcggccgggcagaggcgcccctcacctcccggacggggcggctggccgggcgggggggctgacccccccacctccctcccggacgggcggctggcgggcggggggctgacccccccacctccttcccggacgggcggctggcgggcagaggggctcctcacttcccagtaggggcggctgggcagaggcgcccctcacctcccggacggggtggctggccgggcaggggggctgacccccccacctccctcccggacggggcggctggcgggcggggggctgaccgccccacctccctcccggacggggcggctggccgggcgggggggctgaccccccacctccctcccggatggggcggctggccgggcgggggctgaccccccccccacctccctcccggacggggtggctgccgggcggagacgctcctcacttcccagatggggtggctgctgggcggagaggctcctcacttctcagacggggcagctgccgggcggaggggctcctcacttctcagacggggcggccgggcagagactctcttcacctcccagacggggtctcggccgggcagaggcgctcctcacatcccagatggggcggcggggcagaggcgctccccacatctcagacgatgggcggccgggcagagacgctcctcacttcctagatgtgatggcggctgggaagaggcgctcctcacttcctagatgggatggcggccgggcggagacgctcctcactttccagactgggcagccaggcagaggggctcctcacatcccagacgatgggcggccaggcagagacactcctcacttcccagacggggtggcggccgggcagaggctgcaatctcggcactttgggaggccaaggcaggcggctgggaggtgtaggttgtagtgagccgagatcacgccactgcactccagcctgggcaccattgagcactgagtgaacgagactccgtctgcaatcccggcacctcgggaggccgaggttggcggatcactcgcggttaggggctggagaccggcccggccaacacagcgaaaccccgtctccaccaaaaccaatcaggcgtggcggtgcgtgcctgcaatcgcaggcattcggcagactgaggcaggagaatcaggcagggaggttgcagtgagccgagatggcagcagtacagtccagcttcggctccgcatgagagggagaccatggggagacggagacgggagacgggagacgggagacgggagacgggagacagagggagagggagagggagagggaga

SEQ ID NO: 5542 - DNA, 951 bp, Artificial sequence
  DNA replication origin
ccccgtccgggagggaggtgggggggtcagcccccctgcccggccagccaccccgtccgggaggtgaggggcgcctctgcccagccgcccctactgggaagtgaggagcccctctgcccgccagccgcccgtccgggaaggaggtgggggggtcagccccccgcccgccagccgcccgtccgggagggaggtgggggggtcagcccccccgcccggccagccgccccgtccgggaggtgaggggcgcctctgcccggccgcccctactgggaagtgaggagcccctctgcccggccagctgccccgtccgggagggaggtggggggttcagccccccgcccggccagccgccccgtccgggagggaggtggggggggtcagcccccctgcccggccagccgccccgtccgggaggtgaggggcacctctgcccggccgcccctactgggaagtgaggagcccctctgcccggccaccgccccttctgggaggtgtgcccagtagctcattgagaacgggccaggatgacaatggcggctttgtggaatagaaaggcgggaaaggtggggaaaagattgagagatcggatggttgccgtgtctgtgtggaaggaagtagacatgggagacttttcattttgttctgcactaagaaaaattcctctgccttgggatcctgttgatctgtgaccttacccccaaccctgtgctctctgaaacatgtgctgtgtccactcagggttaaatggattaagggcagtgcaagatgtgctttgttaaacagatgcttgaaggcagcatgctcgttaagagtcatcaccaatccctaatctcaagtaaccagggacacaaacactgcggaaggccgcagggtcctctgcctaggaaaaccagagacctttgttcacttgtttatctgctgaccttccctccactattgtcccatgaccct

SEQ ID NO: 5543 - DNA, 850 bp, Artificial sequence
  DNA replication origin
gctccggccgccgcaggttctcccgggactgccccctccagggggccgctgtcccgccccacgccgggggccgccacaggacgagttctctagctccagccgggcgaggcgccagggagctccgaacgtggcaggatccacttttacttttccagacaagggccgacggttgtgacctggcttctcgtgaagtgactcctggcgacagcagcggagaggactaccgaagcttgcagtcgcggtttgaaaactgcagccgcgtctggggcatcgccgttcgccagatccctccccctaggtcgggagagccaatcggaacgggtgcggagggtgggtctgtcacgtgacgggaggggcggggcaccggccgggggcgcgtgtgcggggcggggcccggcggtgagagggtgcggcgcctggctggcccgaggcggggcggggaggcgcggcggcgtggcggcgcaggtggggcgcactcgggctgccgcgagggaggggcggagggggcggcgctgcagagggggcgcgcggggctggaactactgctctgtgtactccttcccaccttcagagaggtcagttcgagaggtgtgaatatccggagaccggggagaaggaagccgcaaaattcgtcccagctgcctgcgactagttaccaaacttcagtgcctaccaaagacctattttctgactcttcttgagagtcttccttaggaccggaacgtaccctgtaagtggagaacccagtttgctacaacttggcagaggttcctcggagtgtcaacatcagttggggatttatggaacctagaccccactgctaacgtccgctgtcgcgaatggtgtccct

SEQ ID NO: 5544 - DNA, 1071 bp, Artificial sequence
  DNA replication origin
gggtcgcgcgggggccgtggcgtaacccgggggtgggtggcggcgcggagccgcctcgagagctctgggtgtcgctgggagctaggaagatgccagcacaaaggcgagccgagacccagcccgctgcggagggcggcgggaagagccgctgaggggcgcgccgagcgcgctctgcccctgcgccgcgtctctccgggcgcttctcgcggtctcggggtcggggactgcagcgcagagactctcggctccgtggcagcggccgcagcagccgtgagctgcatgcaacgcgcggcggcgcccccggccgcctgctttctcctcggcgcgcacggaccggccgcagggcgccggggccgcgggtccgggcgactttgggggcgccctcccgccccgcggccgggtccccacccgcagcttgtggcgacgggcgcaaagcccaggtgagcgcgcggccctcgccgcaggtagcggacggcgggaggtggctttgtttttcctcccttgcgccccggcgcggtcattcatttgccatttcggtttccgctgcccaggatgtgttggatggtttggttctccagggaaactgggactttggggtctatttgagcatcagttgagggagaggacgcttcatttcctttttggttgggaatgtgccgtgaacatcctctgctggagcttggggcctggagcaaactggggctgcagatttagacgtagacgtttccgaggacgcgagactgcagaggtctgactctctcatgccttgtcttcactattagcagcgctcgggtgcttttcgtcgtttattattattaatttagagaacatctttacaggcacatttcttttagagttagaagtctttggagtcagtacagagagctcacaattagagttacaagggttcaatcgatattaaacttcaggaaggaaaacatttgtgatcattacagatagaggtggacagcatgcaaacttcgggggcctttagcttttgggttatgatttctgctttcactgtcctagactcacgcaaactgttttcgtatatatatacctttgtgaaag

SEQ ID NO: 5545 - DNA, 1047 bp, Artificial sequence
  DNA replication origin
tactatgccgaactaacgaagccattgattgaaaacattcaaaatggcatggaagcggtaggggtggagagagaagggttggctctctcttaaactccgaacccagcgagaaaacaaaaatagcaccatgaaatagattttgtatgcaactattaagaggctcggctgctgagagacatgcataaacacaggtatgcacacacacaggcaagcccacacacgcacggccccttaacctgcaaaataagaggatctgcaacatctttccaagaggggatctagtttccaattcaatgactcgccagtttacccataggcaaaaccctggagtctctaaaaacagccttgggaactatctagccaatatacactctgcagacgctcggtccctttctagaaatgcgaaatctgacgagcagatcaccgggcgcgaggggaatttaggcgcgtgggaagcaaaggaaggtcctggggcacgggttaaggcaagaacgcgagagggatggagcttcggtttagggagaagggttgaggctgcctctctgggcatgaggggggctgggcccggccagtcagaagagcttgtgcccaggatttggggctggggaggaggcggagggacagcggagtaactacgaggacgaccacgaggatgctctcgggaaatcgtctaacaaacaccccaccgtgaagaagggacacaaaggggaggtgaggggggcagaagggggatgcagagtctccccgggcggagaaaacagaggcgaggacgggacagggggcccgagaggcgcagagagccaaggcaggacgaacccacagaaggaaaaaggcaccaggggccagagtcttggagcgcccggctgaggagagggcagaaccttacctgatactccgggtactcaaacatgtagctcatactgcacttattctcctcgaagccgaagaagacatcccacagccccagggttgccagaaagaccatgaagacataaaacgccaggttccagagattaactgagtgaagaaacatggtgccgccaccac

SEQ ID NO: 5546 - DNA, 1008 bp, Artificial sequence
  DNA replication origin
gagagccaaggcaggacgaacccacagaaggaaaaaggcaccaggggccagagtcttggagcgcccggctgaggagagggcagaaccttacctgatactccgggtactcaaacatgtagctcatactgcacttattctcctcgaagccgaagaagacatcccacagccccagggttgccagaaagaccatgaagacataaaacgccaggttccagagattaactgagtgaagaaacatggtgccgccaccaccgccgccgccgccgccgccccctctacctccttctccgccgcggggccccaagcccggactgagcgtgctagacactgtccgaccgccacccccggagccgagccccagccgcgcgcgcctgcgctgatgcccggcctgcccgttcgccagccgcgcagtgcgcctgcgcgcaccaggtccgcggcgcctctggcctggcgactcccagagccgagggaggagtaggtgttgcagcgcgagcgcggatctacgggaaagagaaagagggagaaagcagggtgggctgggctggagggtgaggggaaagaagggaagtggggagagaaagacgcgaggagtggctggcgggagggaaagaagagagagagaggaagcatccagagggggatgggcggagcgcgggagccctggagacgagccgggggattgggcaggaggcgggtgtcagatgggtgaatctggggaggggactagagcccagagtccagaggcgattaaggaccgagagcggaccgagagaggggaggaggacttaaaagcccaggggtcatcagctgtcacctcgcaaacgcctctccctgcggcagtttaaaaacgcttcccgttcaattttgaaaagactcaggcctccgcaatttcggttttcccaacggtagtagagcacactcacagctctctggagcagttagcttgaagagggaacaaatggctttattttccctcttctaccgcctacttgggcccagtaggtaaca

SEQ ID NO: 5547 - DNA, 1262 bp, Artificial sequence
  DNA replication origin
ccttctcctggcaatcccttccgcttccccggctcccggcgtgacatctgcgggccggggacctgcatgtgtgtgcgcgcgaaggagcggaagaatggcagtgctcaaactcaccgaccaggtagcgggcggcggcgccggcgggcgggacgcgcgggcgcggggcggcgcggagcccggcggggggatgggggcgcggctggagcgcgcccgcgagctgtttactcgcggcgaaggggaggactgtgtgcggccgccggtgcctccgagagcccgcggcggcagctcccctccgccgcgccgtccccgccctgggccgtcggaactgcgcgcccgagtctggggcagggcccgtgggcgctgggcagccggcgtgcgggagtgcggcggccgcgggcccggcggggctggggagggggccgggggctcgaggtgctctcgggactcgcaccgcgccgcgttgcgtgggcgccgccggcccgggccccggggaggaggacgctgcacgaagagggagaaaggatcgcagactgggacccctccccaaacctagcaggagtcctgcccagaatgcggctcttgtgtggccgggctgtctttatttatccgttggatgtgacatccgacttcctctttagttgcgccaggctgtgtgcgtggtgcgggatggggacccctggagaccgccctttcggatcgggccggtccctctgaggaggaggtgaagtcggctcggagcctccactcacaggcggtgggctacggtctgcctgtgtctaccagctttgttggctttccttgctgagacaccacacagggcagctctggagtcctggcttggagaggtggggttatttgctgaatcggattgacagtcctcgccgcaggtctgtggaatggtaacagccaccttcgcggactctgctgctcttacattgacactaacaggcaccaaaccaagttgcatgacaaaactctttgcagctctttccacgaaaaaaggaaacggcttgctacccccacccccgtttattcgtgggtagtgaaaggaactttgttttggggtcctggtaggcagagaggcaatcttgactttgactacagggtcagacttgccagcccttggtattaaatacctcaaacttgtccatgggttgcatctgctgccttgcgttctccagttagtatccagccagaacatcttgcaactgaagtgcagtccgtcaccacaatgatttgcaatgatttgttctcctgccttt

SEQ ID NO: 5548 - DNA, 1398 bp, Artificial sequence
  DNA replication origin
agcactgccattcttccgctccttcgcgcgcacacacatgcaggtccccggcccgcagatgtcacgccgggagccggggaagcggaagggattgccaggagaagggaaaaaatctggctcccgaatttgacagccctccccctgctcctcctccgccgccgcctcctcccgccgagaggctgacactggctagtggggtttgcagccgagcccgcccgcctttccacaggaagtaccggctgctgccagccgggccgccactgacatcaccgcgcgctggctcgctcgccgcccgccgcctgggccgacgctgcctcctgccgcccgcagccgagccgcgcagcccggcccccggcgctgcccccgcgcccgcaccgggccgccgcctgccttccgcacctgcacgcggcgcccggccgggccggccccgggccctgggcggatcgcgggcctccctgacgggtctcacacatatgggtggggaagcccgcggggacacaccccgagggggcaggaaaggctctcactcacatgccgtccactttaaccggggagatggggttacgcccccttcccctaacccagaatcaggtggtggcagcgccccgaagatcccagggaccgcaattatgatgctccctttgtttaatgccaggaggcagcggacacattgtgattctttacagggtgtttgccaaacatttatgggtggagggaacagaagctctggcccttccaccttgttctccagccactttccagctaaacacacacacacatatgcacacacacatactattgttaaattcaaacaccctgggtttggtttttgctggtgggggtggagtggagttcctggagaagcaaagcagtcctaaatcaccgagttgatgggtcttttgggtgttcccaccagtccttactgatctctacaaaatcccaagttaccaagctcttcaacaaatagaagacagctgtcaaacaccatgggctacagatacaacgggcatattcgtaagcatagtagctgttgatagttctggaatttggagcaaacacttattcattgaacagctatgtactgagtccctaccttgtcaggcactggctaggcacgggaataaacggagagcataaataagataacctgctctcagaagatgccaacataaaccgcatagtctctgctaatgaatgtaattacaaactgagataagggatctcaagggaaaacatgcttctgaagtgaacccacaacaaaggaatcagaccagactggtgggtgagggcaggcttccctgagaaagtgacaggagttgagatctggagaagggagaattaagtaagcaagtggagaggaagtgctcccaggcagccccatgtgcccctggcaggcca

SEQ ID NO: 5549 - DNA, 1285 bp, Artificial sequence
  DNA replication origin
cttcacccagtggatacggcaccgggccgcaggtggagctgcctgtcagtcccgcgccctgtgcctgcactcctcagcccttgggtggtagatgggactgggcgccgtggagcgggggcggtgctcgtcggggaggctcgggccgcacaggagtccacggagtcggggaggctcaggcatggcgggctgcaggtcccgagccctgccccccgggaaggtggctaaggcccggcgagaaatcgagtgcagcgccggtgggccggcactgctgggggacccagtacaccctccgcagccgctggccggggtgcttagcccctcattgcccaggccggcagggccggctggccgctccgagtgcggggccgccaagcccacgcccacccggaactccagctggcccgcaagcgtcgtgtgcagccctggttcccgctcgcgcctctccctccacacctccctgcaagctgagggagccagctccggccttggccagcccagaaaggggctcccacagtgcagcgatgggctgaaggacttctcaagtgccgccaaagtgggagcccaggcagaggaggcgccgagagtgagcgagggctgccagcatgctgtcacctctcaataagatctcaggagttgggcaagtgagctcacacatgcacattaaggcaaaatggtggagtttaatggtatacgacctcctggggacattggtctggtaagggagaatgcctccagtgagcatgcatacaattccagtaaacacactgggcatgctcacctcccaagtgctggcaggccactgtgcatgcggaaacccaccctgaggaagaatctggggaagagatacagaccccagaagtatgccaacatataaaaccccaagtcaaaaggtcaaaccacacacttggctctctcgtctcccgcttggcctacttccaagtgtactttacttccttttgctcctgctctaaagctttttaataaactttcactcctgctctaaaacttgcctcagtgtcttctgccttatgccccttggtcgaattctttcttctgaggaggcaagaactgaggttgctgcagacctatgcagattcgtgaacagtaacatattttggtgccttatgacccggataacttccaccgctaacagtgttggtttggtggctaatgacattaggaccagcatcctggtaaatctcttggctttttccccattgttgcagcatgcctgagtagtagcccacacgcccacaaacaaggcaggaagagaggaggaagggga

SEQ ID NO: 5550 - DNA, 836 bp, Artificial sequence
  DNA replication origin
cgagcgcacgccttgccgccgccccgcaggtacgcggccttcccgcaccacctccccccggctcctgcgacccccgagtgggccttcctcctctgcggtccagctggagggtgcgggcggcgacaacctggagttccgcaccgcgccgcaccgcaggcccaggcctgcgggtccaggcctcgcgggtccatgcgggttccatcacgtgcgacgcggatcctggacctcggctgggcgcgggagggacaactcgtggggtttgaatttgggggattgtaaccacttaggcccgctggtgcaacctgcgcctggccgacttcagggaaccggggagggtggtgtacgtgagggaaccgcttttttcccccgcaggcagctgggataccgcgcctccagtcttgaccttgctgggggcgttcggaaagaaggacacgtgggctcgcgccgagtgggccgggccgccgcccccagcatcgcggccttgctggttgctctgatacagtagccttgggtggatccatggagacactttgctgagcggctttttgcaccgtcaggaatacttttaacttccctggtcacttggatttgtaacttgcctctctccggctgacttggtttctcaggggccacagttggagtgggtctgcccacaaggccgttttcgcggtgaaagattaactcgtttttggcggcagggataggtggccgtggggaaggagccgcatgtgctttgtgctggtgctataggtcaggcgccggccggggcggcctctttagcttgcgctagtggctgatgttccgaagctgcggcgccttccgtcattcaggcgtag

SEQ ID NO: 5551 - DNA, 1318 bp, Artificial sequence
  DNA replication origin
tttctcttagtacagaacaaaatgaaaagtctcccatgtctacctctttctacacagacacggcaaccatccgatttctcaatcttttccccacctttcccccctttctattctacaaaaccgccattgtcatcatggcccgttctcaatgagctgttgggtacacctcccagacggggtggtggccgggcagaggggctcctcacttcccagtaggcgcagccgggcagaggcgcccctcacctcccggatggggggctgaccccccccacctccctcccggacggggcggctggccgggcagaggggctcctcacttcccagtaggggcggccgggcagaggcacccctcacctcccggacagggcggctggccgggcagggggctgacccccccacctccctccctcccggatggggcggctggccgggcggggggctgacccccccacctccctcccggacgaggtggctgccgggcagagacgctcctcacttcccagacggggtggctgctgggcggaggggctcctcacttctcagacggggcggctgccgggcggaggggctcctcacttctcagacggggcggttgccaggcagaaggtctcctcacttctcagacggggcgtccgggcagagacgctcctcacatcccggacggggcggcagggcagaggtgctccccacatctcagacgatgggcggccgggcagagacgctcctcacttcccagatgtgatggcggccgggaagaggcgctcctcacttcctagatgggatggtggccgggcagagacactcctcactttccagactgggcagccaggcagaggggctcctcacatcccagacgatgggcggccaggcggagacgctcctcacttcccagacggggtggcggccgggcagaggctgcaatctcggcactttgggaggccaaggcaggctgctgggaggtggaggttgtagcgagccgagatcatgccactgcactccagcctgggcaccattgagcactgagtgaacgagactccgtctgcaatcccggcacctcgggaggccgaggctggcggatcactcgcggttaggagctggagaccagcccggccaacacagcgaatccccgtctccaccaaaaaaatacgaaaaccagtcaggcgtggcggcgcgcgcctgcaatcgcaggcactcggcaagctgaggcaggagaatcaggcagggaggttgcagtgagccgagatggcagcagtaccgtccagcttcggctgggcatcagagggagaccgtggaaagagagggagagggagaccgtggg

SEQ ID NO: 5552 - DNA, 975 bp, Artificial sequence
  DNA replication origin
ctctgccctgccgccccgtccgggatgtgaggagcgtctctgcccggacgccccgtctgagaagtgaggagaccttctgcctggcaaccgccccgtctgagaagtgaggagcccctccgcccggcagccgccccgtctgagaagtgaggagcccctccgcccagcagccaccccgtctgggaagtgaggagcgtctctgcccggcagccacctcgtccgggagggaggtgggggggtcagccccccgcccggccagccgccccatccgggagggagggaggtgggggggtcagccccctgcccggccagccgccctgtccgggaggtgaggggtgcctctgcccggccgcccctactgggaagtgaggagcccctctgcccggccagccgccccgtccgggagggaggtggggggggtcagccccccatccgggaggtgaggggcgcctctgcccggctgcgcctactgggaagtgaggagcccctctgcccggccaccaccccgtctgggaggtgtacccaacagctcattgagaacgggccatgatgacaatggcggttttgtagaatagaaaggggggaaaggtggggaaaagattgagaaatcggatggttgccgtgtctgtgtagaaagaggtagacatgggagacttttcattttgttctgtactaagagaaattcttctgccttgggatcctgttgattggtgaccttacccccaaccctgtgctctctgaaacatgtgctgtatccactcagggttgaatggattaagggcggtgcaagatgtgctttgttaaacagatgcttgaaggcagcatgctccttaagagtcatcaccactccctaatctcaagtacccagggacacaaacactgcggaaggccgcagggtcctctgcctaggaaaaccagagacctttgttcacttgtttatctgctgaccttccctccactattgtcctgtgaccctgc

SEQ ID NO: 5553 - DNA, 986 bp, Artificial sequence
  DNA replication origin
cagccccccacccagccagccgcccggtctgggagggaggtgggggagtcagccccccgccggccagctgccccgtccgggaggtgaggggcgcctctgcccggccgcccctactgggaagtgaggagcccctctgcccggccagccgcctcgtctgggagggaggtgggggggtcagccccccggccggccagccgcccgtccgggagggaggtggggggggtcagccccccgcccggccagccgccccatccgggagggaggtgggggggtcagccccccgcccagccagctgccccatccaggaggtgagggtcgcctctgcccagccgcccctactgggaagtgaggagcccctctgcccggccagccgccccgtccgggagggaggtggggggtcagccccccgcccggccagccgccccgtctgggaggtgaggggcgcctctgcccggccgcgcctactgggaagtgaggagcccctctgcccggccaccaccccgtctgggaggtatgcccaacagctcattgagaacgggccatgatgacaatggcggttttgtagaatagaaaggggggaaaggtggggaaaagattgagaaatcggatggttgccgtgtctgtgtagaaagaagtagacatgggagacttttcattttgttctgcactaagaaaaattcttctgccttgggatcctgttgatctgtgaccttacccccaaccctgtgctctctgaaacatgtgctgtgtccactcagggttaaatggattaagggcggtgcaagatgtgctttgttaaacagatgcttgaaggcagcatgctcgttaagagtcgtcaccactccctaatctcaagtacccagggacacaaacactgcggaaggccgcagggtcctctgcctaggaaaaccagagacctttgttcacttgtttatctgctgaccttccctccactattgtcctatgaccctgccaaatccccctct

SEQ ID NO: 5554 - DNA, 1350 bp, Artificial sequence
  DNA replication origin
acctccctcccggacggggcggctggccgggcagaggggctcctcacttcccagtaggggcggctgggcagaggcgaccctcacctcctggatggggcagctggctgggcggggggctgacccccccacctccctcccggatggggcggctggccgggcggggggctgaccccccccacctccctcccggacgggcggctggccggccggggggctgacccccccacctccctcccagacgaggcggctggccgggcagaggggctcctcacttcccagtaggggcggccgggcagaggcgcccctcacctcccggacggggcagctggccggcggggggctgactcccccacctccctcccagaccgggcggctggctgggtggggggctgacccccccacctccctcccggacggggcggctggccgggcgggggctgaccccccccacctccctcccggagggggtggctgccgggcggagacgctcctcacttcccagacggggtggctgccgggcggagaggctcctcacttctcagacggggcggctgctgggcggaggggctcctcacttctcagacggggcggttgccaggcagagggtctcctcacttctcagacggggtggctgggcagagacgctcctcacctcccagacggggtcgcggccgggcagaggtgctcctcacttcccagacggggtggcggggcagaggcgctccccacatctcagacgatgggcggccgggcagagacgctcctcacttcccagatgggatggctgccgggaagaggcgctcctcacttcctagatgggatggcggccggacggagacgctcctcacttcccagactgggcagccaggcagaggggctcctcacgtcccagacgatgggcggccaggcagagacgctcctcacttcccagacggggtggcggccgggcagaggatgcaatctcggcactttgggaggccaaggcaggcggctgggaggtggaggttgtagcgagccgagatcacgccaccgcactccagccggggcaccattgagcactgagtgaacgagactccgtctgcaatcccggcacctcgggaggcccaggctggcggatcactcgcggttaggagctggagaccggccatgccaacacagcgaaaccccgtctccaccaaaaaaaatacgaaaaccagtcaggcgtggcagcgcgtgcctgcaatcgcaggcactcggcaggctgaggcaggagaatcaggcagggaggttgcagtgagccgagatggcagcagtacagtccagcttcggctcggcatgagagggagaccgtggaaacagagggagagggag

SEQ ID NO: 5555 - DNA, 1079 bp, Artificial sequence
  DNA replication origin
ccacggggcctggactgggtgtagacgggccaggggacctcaggcgtggatgtttcgggaggcggcgggctgccaggcacccagcgaagtccgagcaggtaaaccgctttcccgccgaaattgggctaggcagcgtctttgacgctccctgcggccgaactcgacccagccgcccaaggcgaggagttgccagggcggtcgacgcctccactccccgactggtcagcgaggaccggaaggtctgagagacctggcagggcccgcctgtggcccaggcgggacccggacactctagccctggctgtgcacccaagccagtcagggtggacttggggaagtgaaggaggactgcccgcacaggcccgaggcgcagcggcaacgtgccatcccgccccgccccgtcccgccgccagcagccaatcagggagcgccgcgcgagggtggggaccagctgcgcacgaggccagcggcggggtcgctgccgttgaggcttcccgccactgctgctggcggatttgtggggcaaaatttctcgctggctagccttcttttccctcccgcactttggtggggagggggtggatcctcgtttcggtgcccaagttcacgatgacccgagagaactcgaggaagttgtcgccgcggccatttcccccagtgccgcaacttgctggccttggagggggaggagcgccgaggcagtgactgcgacggttagcccgcccgttcctgctgtcttcgtttgcaaaatagatgctagatctcgaggttgattctcaaggggaggggccagtgagggcacattgctttggaggagtagtttaataaactctctagtgctggaagttttagcaaacggaggagccttcaaacccggcaacagtccccatctaggtgtttccgtaacacatgcggaattattgctagtggaatttcaggctttctttgttgtttaactcaatgcatcgctaattgtttataatgaacttagatgttgcctccacctgagccttgctattgctaacattaaaatattttgtaggcctggcgcgatggctcccgcctgtaatcccagcact

SEQ ID NO: 5556 - DNA, 1119 bp, Artificial sequence
  DNA replication origin
gtcagagtttgactctagaaccttcttcgctttacaccagtcttcggaagtcgcccgtcaaccggcttcttctacctcagtaaagccttaaggtcacctcaacctctcgaaacccaccagtcccagaggccgactcttctcaagtggaggagaggggaaggcgtgcatggagctttgcctgaccgctcgctctctcctccccagccgtctgagagaaggcgagaggggtcccagaaccgagccctcgctccgcacgccccacgcccgccccgctgtgccgtgcgctctgcccctgagacgccccggctcggagtcccagggccacagccgaaactcgccctcccgcgcccctctccggcttgcagcgcccgcccgcaccgccacctgccacccgaggcgacgcagtccgcttctccccacccgccaggtggcaggttcagggccggggtccgagcctgcttccctgcagctgccacagccaccctcgccgccagggggcgagagtcccaggcaggacaagcagcgctgctgccttggcgtgaaggtggtttcaaactttaggcttcttttccctaccccgcgtctctgaagagcagagaggaagatggaaaccgagtccgggccggtgagtacggcgatcagggccccagggcgcgggatagcggggagaaggagcagcgtggagcctgtccctgagggcttggaggggcgaggtgaaggccccaaacgctcgctatctggttgggaagaaacgtggccaggtgccccatcgaccgctgccaggagccacccgcccgcagacctcgtctggctgtgtcatgggggtcagaaaggcgccgccacggggcctggactgggtgtagacgggccaggggacctcaggcgtggatgtttcgggaggcggcgggctgccaggcacccagcgaagtccgagcaggtaaaccgctttcccgccgaaattgggctaggcagcgtctttgacgctccctgcggccgaactcgacccagccgcccaaggcgaggagttgccagggcggtcgacgcctccactccccgactggtcagcgaggaccggaaggtctgagagacctggcagggcccgcctgtggcccaggcggg

SEQ ID NO: 5557 - DNA, 868 bp, Artificial sequence
  DNA replication origin
atccgaaatgtgatgcaaacgccggccctgcgccagacaaaaggcaccgggcgcccagccaggcggcctctggagcccggacgccggcggcccgataggggccagagccgggcgactgcggccgggcgcacccgccacctgcccgcggactgcggcgcagcggtcccaggaagtgcggcggcggcggcggcctccactcagctctgttgtgacagggagggagacttgttttgacagcccttggggattggcaggcgtctgggcctcttaggagcctcgcctcgccgagggggctcggcccgaccaatcctcactgcggaggggtgtgcccgagcgcgaagaatggaatgtgttctgcaactgggagccggcccagcggggctaatgtactcgagccagggtgtacccgcgcgcgcgcgtgtgcaaacccggaggcgctccgtgtatattttaggaagtttagatttgcgaaatgagcctgagatgcaacaaaaatccaggttgggtgaaggagaggggagaaagaaaccttcttctgccaaacaaagcaatttggaggaaagtgggtattgagtatgaatgtctaagcgtttggggtgacggggtgaagctttgcgtggtcacaggttaattgcaggctctcaggccaattcttagaagtcaagtccatgcagagataaactagggtttactgggatcttggggttccataatttgcttcaggttccaggaaaggattctaaggtcattctgcagtgtgagtaaatataacaaggaaagggagtcagtgaaagagatgagggtgaaaggaaactgaaccaactaaatccctccgaagactgactcttaaaaagcacagatataatcc

SEQ ID NO: 5558 - DNA, 1323 bp, Artificial sequence
  DNA replication origin
ctccctctctttttcgcctctccttctgcctcccgctcacatcgcctccccactcccgccaccgtcccccgccggactgctagcctcctagaccgaagcccgaggacgtctctgcccgagcgatgtcccctctccagaaagttgccgccgccgccgccgccgccgccactgccgccgctgggcggtgaaacaaagtctggcggggccgcctcccggtgcaggagcgcaccggtgcctagcggctggactccgctgccgggcgtcccgctttcccccggggagccctaaacgctccaggccatggccgagggcgcggccggcagggaggatccggcgccgcccgacgcggcggggggcgaagacgacccccgagtgggcccggatgccgccggggactgcgtgacggcggcctctgggggccggatgagggaccgtcgcagcggggtcgcactgccaggcgccgcggggaccccagcggacagcgaggcgggcctcctggaggcagcacgggcgaccccccggcgcagcagcatcatcaaggtaagcaaagccgcgccgcaccgggagcgtggctgtgggtgatgggtgggtcagggacccgggcaggatgtgcggtgtccggaggcatccgggctcagcattgttttctcccacctccttcaacgccaaaccttccttccttatccggaggttcccagactcagctgtcagccacgagacgcacaagtgactttttctccccactgacggcagaggaaaagttccgctctgcgtctttgcgttctgatggatgctttccctcattttctctgcaagcttcactaaaccgttgatggagggaggaagggagaactctggataaatgcagacccaccggatggttgtgcattgctttccaatgaagggttagcttttcccatacaatgaagaaaatgcacagcttactctcaagtgtaaaaaaagaatccctctagacttaaatgatcccgaaatcccaagatgtgtgaactttcccggtagggaggcagagttttaagtggaccctgcatcacagtaaagagcaatgcaagagcccagagtttttgcgctgcagaaagcacaaccggaaagcaatcaatcccccaagcattatcactggtccttgtggttaccaccacatccagggaaaacgcttcctgacccgctaatcacctcacagaatttctctccatccatttggcaaggaatttgtaaacctctttcctcccctttctctttccatcttccttccacttggggcttgtttcttctgttcgagatttcctcttttgggagcatgacttt

SEQ ID NO: 5559 - DNA, 928 bp, Artificial sequence
  DNA replication origin
cctctgcccggccgcccctactgggaagtgaggagcccctctgcccggccagccgcccggtccgggagggaggtgggggggtcagccccccgcccggccagccgccccatctgggagggaggtgggggggtcagccccccgcccggccagccgccccgtctgggaggtgaggggcgcctctgcccggccgcccctactgggaagtgaggagcccctctgcccggccagccgccccgtccgggagggaggtgggggggtcagccccctgcccggccagccaccccgtccgggaggtgaggggcgcctctgcccggccgcccctactgggaagtgaggagcccctctgcccagccagccgccccgtccgggagggaggtgggggggtgggggggtcagccccctgcccggccagccgccccgtccgggaggtgaggggcgcctctgcccggctgcccctactgggaagtaaggagcccctctgcccggccaccaccccgtctgggaggtgtgcccaacagctcattgagaacgggccaggatgacaatggcggctttgtggaatagaaaggcgggaaaggtggggaaaagattgagaaatcggatggttgccgtgtctgtgtagaaagaagtagacatgggagacttttcattttgttctgcactaagaaaaattcttctgccttgggatcctgttgatctgtgaccttacccccaaccctgtgctctctgaaacatgtgctgtgtccactcagggttaaatggattaagggcggtgcaagatgtgctttgttaaacagatgcttgaaggcagcatgctcgttaagagtcatcaccaatccctaatctcaagtaatcagggacacaaacactgcggaaggccgcagggtcctctgcctaggaaaaccagagacctttgttcacttgttta

SEQ ID NO: 5560 - DNA, 1330 bp, Artificial sequence
  DNA replication origin
cggacggggcggctggccgggcagaggggctcctcacttcccagtaggggcggccgggcagaggcgcccctcacctcccagacggggcggctggccgggcggggggctgacccccccacctccctcccagatggggcggctggccgggcggggggctgacccccccacctccctcccggaccgggcggctggccgggcagaggggctcctcacttcccagtaggggcggccgggcagaggcgcccctcacctcccagacggggcggctggccgggcggagggctgacccccccacctccctaccggacggggcggctggccaggctgaggggctcctcacttcccagtaggggcggccgggcagaggcgcccctcacctcccggacggggcggctggccgggcggggggctgaccccccacctccctcccggatggggcggctggccgggcggggggctgaccccccccacctccctcccggacggggtggctgccgggcggagacgctcctcacttcccagatggggtggctgccgggtggagaggctcctcacttctcagacggggcagctgccggtcggagggtctcctcacttctcagacggggtggttgccaggcagagggtctcctcacttctcagacggggcggccgggcagagacgctcctcacctcccagacggggtctcggccgggcagaggcgctcctcacatcccagatggggcggcggggcagagtcgctccccacatctcagacgatgggcggccgggcagagacgctcctcacttcctagatgtgatggcggctgggaagaggcgctcctcacttcctagatgggatggcggccgggcgcagacgctcctcactttccagactgggcagccaggcagagaggctcctcacatcccagacgatgggcggccaggcagagatgctcctcacttcccagacggggtggcggccgggcagaggctgcaatcttggcaccctgggaggccaaggcaggcggctgggaggtgtaggttgtagcgagccgagatcacgccattgcactccagcctgggcaccattgagcactgagtgaacgagactccgtctgcaatcccggcacctcgggaggccaaggctggcggatcactcgcggttaggggctggagaccggcccggccaacacagcgaaaccccgtctccaccaagaccagtcaggcgtggcggcgcgtgcctgcaatcgcaggcactcggcaggctgaggcaggagaatcaggcagggaggttgcagtgagccgagatggcagcagtacagtccagcttcggctccgcatgagagg

SEQ ID NO: 5561 - DNA, 830 bp, Artificial sequence
  DNA replication origin
cacagatgggacgcggcttaggaggaatccagggctgcgggcattccttggcccagtggccagatttccagcacgtgtagccagctcctgggggaggaggttctggaggaatgcctggccgttgcggttcaggcgtttggaagttcttgtgtgctggagatgtggctggggtttgtctcacagtggaggcaaagaattgcaacttttttctgttattgtacaccttgaaggtgaggttaattaagtcctgttgtggggtttgagggccagattccagtttttggagttttatttaatgtcgggagcagattgggtaataaaatgtatattgagaataagacggccttttgaccttttagggtctagggctgtaaagcgtctcagggttgctgccaaaggagtcatgaactgggctggatttttatatttgatgaaaaagagcctaaacgcttctgatttgggataaagaaaaaggagcattaaccttgactatgcctttggctccagccacctttttaagagtaaattgctgggcaggtgggggagggctagtcatggaatgaaactgtaagccggaccaggtgtgaggaggggaggtgataaaaggattatagggtggaggagcagaggctgaggaagaattgggacctagctcggccttgcaaggagcagcctggggaggaagggagaggtcagatgggtctgtagaaaaggaagattagaaagactcagcgatgcttggggttggtactgaggggacaggcgggagggaaagaaggaagatttgggacgagttgcactgggcacagagactaggaagggactgatgt

SEQ ID NO: 5562 - DNA, 768 bp, Artificial sequence
  DNA replication origin
ttgaattcttagtgcaagagcagccttcatccgccccaattttaacatcgctccagaaagttttcctctgggtcactaggttggcagtgcgctccccacggaagccgcaggtctcgacacccctggattgggggggtgggggggggcggggaaggaggggaaacacctgatgaaacggcgctcgcgttgtcactgacacccgcaagaagcaagaccccggcaccgtactgcgtgcgcgctgggaatcctcgtgggcgctctggccgcgcgagcagtgtcggcgccacgggtcaaggagacaaggtgggggtggcagggggaggtgaaaggaaggatgcgagatgaagacacggagcaggagggctgagggcgaggcttccgcctgcattccccgacttcgcggtccgagaggccgagagcggcggggaggggacttcgttggccctgggcttccccgaactcccgagcgcggcgcgggagccctcgccctgcgtacttactgctcacggtctgtctgaaacttggctgactggggctctgtccatggagcaaaagtagagaatccagggtggaaagtttctggtgcttggctttgcagtgttctcctagtcttcctctttactccttccccttccctcttccccaggtcctaatgtttaaggtcctgggtcagggtgtcttcttctggtgcggagatggttgttatgatgatgatggggggagggaggagggggaggaggaggagagggaaaggactcctccaaaggg

SEQ ID NO: 5563 - DNA, 794 bp, Artificial sequence
  DNA replication origin
gtctgtctgaaacttggctgactggggctctgtccatggagcaaaagtagagaatccagggtggaaagtttctggtgcttggctttgcagtgttctcctagtcttcctctttactccttccccttccctcttccccaggtcctaatgtttaaggtcctgggtcagggtgtcttcttctggtgcggagatggttgttatgatgatgatggggggagggaggagggggaggaggaggagagggaaaggactcctccaaagggacacccgagcgagcgggggaggggacggcggaggaggggggaagagaaggaggctgaaagagccttttcacaccttcgggaaggagacccgttctggagagaaagggctgagaacccggaggcggcggcggcggcggcgagccggggctgctggttcgcagggcggctagctcgcgaggaggcgcggccagagcggtgggaccggtaacaccaagagccgagaagacgcagggacccgggaccgcgcgcgggaggaaacgcggcggccgcccaagctgtcacctccagcctctcccctctcggccgcctctgccagcagccagagccggactcactgacaagccgcagagagagacacactgagagggagatgattattagttgcgttgagtcatcaggcaaagtgagtccttttgggttgtcctcggtttccgatttctccccctccccctttcggtccccagatctagcgccttcaaaataataatttggggtgggggtaggggaagtctctggattatttcgggatggggg

SEQ ID NO: 5564 - DNA, 1316 bp, Artificial sequence
  DNA replication origin
cccgccgggctgtgggtggcacaggaatgggggttgcgtggtggatgcagagcggggtgcatccctggatggcatcgctggagcgctcgccgctccggcgacatcgcgagcggtgcaaaccgggccgcctggagcccgtgacgcggtggcggcgagggcggtggggctgcctgtcctcgggctacaggactggggctcctggggaccccaagctgctcgagcccagggctgctggcgccaacagagctgtgccctgaggacccggcctccccgcccggggggaggccgcacaggagcgtccccagcaggtcccgcgaaggcgtaacagagccacaaacttttgccgactcccgcggccgcggccgccggcagcccgactccggccgcggtgctcatttaaggtggcgcgggcactagccgagcaggctggcctctggccgcgcttttgtccctgcgattccgcttgggcgcgctgcctccttaaggaaaagcacgtgggcaggggccgcagcccccgcgagatacccggggcgtcggcggacattagccgctaggaccttaggcgagaaaatgtggacgcatccccgccggccctgaggccagagaatcccccctcaactggttgcacctcatgtccctcccgcacacgttgactctccctcctaatccccaggaccccgagggctctcccacatctcccgcagcaagagccaccgatcccccttaagaagcgttgactgtacggcggcgccagagggccaaactaagttcggtttcgggaaacgctctcgggagcagttctgtaaatccctgctgggagcagagactgcgaaaagctgagtccgccgatcgtgcccgggacaaggctgccttccactcgccctcgccgcatctacctggtaggcggcatgcgcacgggcttagaggcttgagagcctctggaagagaaagggtcccaggaaggaaacctgcccccggcctaagtgtcggcgcccagatcaccacgaaccccgcacctaggcgccgcccaccaagttccaaagaagtccgaggcgacctgggagtcggtcggatcccagccgagaaaagaaacaagcaggatagcaattcttaggggagccaccctgggagttttaggcagcgtttgcctttccctggttttcttcaccaagccccatcctccccccgcataccacccccagtcaaaagagtgggagaaaatgcacagttcgaagtcggtgagagcaaaaatgggtctagtaaatcaacccgtggtggtagctaaaaggtttggggctgcaaagaaacaaactgta

SEQ ID NO: 5565 - DNA, 1422 bp, Artificial sequence
  DNA replication origin
cgagcttaggtaaccaacaaacccaattactaggctttattgatactaaaaggaaaagttcccctcgtaaaatttctctgagcttattagttatttaaatcagccccagggttggacgcgtgacgccgaaggcaccttctgtcggctcctggaggtgagcagccagcgtccctgcgccgacccacagcccctcgctccgtcctgggcacttggggcgaaggcgggcgcagcgagccgaggtgagccactgggcaggggcgcagggcccgacacgccgggagagagctccgcgtggcctagggtaggacaccgggcatcacactttggaaaggaacaggtcccagccaataataagggagtaggcgagtaggccacgcgaccgcggggcgcaggagctcagccggcccgctgcctggctcgccagaccccggcccgctgggcaccggcccctgcgacccggccggagcgctggtgttcgcgccgtgagtcgggcgcggggcgtctcagacctccagggctcgctagtgttttgtgtgggtctgggagctttgcaattgggtgggcaccaggtgaatttacacctttctgggtcgctgtctcaatagttgacaagtccctctgtgtgtgtgtgtgtgtgtgtgcgcgcgcgcgcgtggaaatggtggtgggggtgtatgtgaacagctgaatttattgaaaataaaccccaacccgcccagtgaagtcctctaagcccgacacggggttcccaagtccggatgtggctccgggaccgcgcgaggcgatgccctgttcctctgggcttggctgtagggcggggagggaaggcaccacggggtgggggagaactgagcccgagtcgccgccgtcacagtcacttgggcctttcccggaggccaaggtcttgacggactgaaacggtgtccgaggggattcgtgataccgagaaaacaggcgaggcgccagctcgggaagccctctaagttggcccccactccttacgagtttgggccgccggatacactgcccccctcgtccctggctccagtaggtgtctgggaccgtgggtcccgcagcgggctttttcgccctctccgcttggttcaagaccggcgtgggcccatagcctcaaagcgttcgggaggcaactgcggtttgggcccccttgcacccggctgcctgagcttgcctgcccctacgaggggtgggagcggatttctggacgcctgctggcctgcctgaaatttggggtgcggaccgggtgctatcttgggctttccaggtgtacttttcatttcaaggggttgggacaaactgtgggcgttcgtattttgcacgcgccagggcgtttttgtgttgagtggcccggtggtaccctgggccagggacctgcccatcccccgccacatccttaacccgtgg

SEQ ID NO: 5566 - DNA, 1000 bp, Artificial sequence
  DNA replication origin
gaaggacggcgaccttcgcgtccggtccgcgccaccagcccgcctcggcgccgagcgcgggccacacccagcgctccgggaggcggcggaggctgggcggcccgggctgcggaatgctcggcccagccgagtctccgtcccggccgcgcaggcccctccgcgtccgcccgcgccctgcatccccagccggcccggcgtggagggggtcctgggcttacctctgtgtcgagcgccggctcctccgtcccgggccggagccggggcccgggggcgcggtcgccaggggaggcgccgcggcggtggcggcccctgcggctcggagggcgggccgagcgggagccgctgcctgggccgcgcgccgtccggagctcgccccgcgctgccggcgcttgcagcggagggcgcagccagctcggcccccggactggattccttcactgacacaactccggctcggccgccccacgcagggacactcccgcccctcgcaggctgcccccgcccgccgacccgcccgccttcccctcggtgtcactcaccaggagcacacaccccagccggcgcccctcgctcccgctcgcaaacacagcgctgctcacgcctctctcgggttttgtatccgctcacacgcacgttctgacacagatctcgtccctccacacgccctccctagctcctttcccaccccactttctagaagaatcccagtacagcttccgcactttgcttgcttgctccagaccgacttcctcgcctttccccaaacctccacttcaccgaaactccccttgttaatgaaagattttgtcacaatccgcacgtgttgcaagagaatcatcttctcctacccgagaaaatgaactttgctccctcagcactgtctgcaaatacgagatgtttttccttttagaaggtagtaatgctttctggagaggatccaagctcaaaatgtaagcaaagatagcccattcgaaaatgacctgaaaaatcaggcgcggaa

SEQ ID NO: 5567 - DNA, 926 bp, Artificial sequence
  DNA replication origin
tgcctcagagccgggccgcacgggggcgccgctggggccgctctgctcccgagttgccgagcagctgagaaggcgttcacttccgcgtccgccccgcggcgtccggcggccgcgccgagggtctggcgggccgcaggtcagtctgggaagctgccgacccgccccacccccccggtgcggaagagccgggcgcgggatgggccgcgggcccggaaggcggcggggcgccctgaggaagggcacgggccgcgctggtaacgcgcgcgccccgggctgcaggctcgggcttcgggccgatttggggtctccaggccgcggaagaccgtggcggggctttctggctccccagctcctcccggctcttcccgcttcggaagaggagtgtgagccccttgagcgatgtttttcaaagtggggttcgcgggcagatcccgacccctcctcagactttctgaggaactgtgtgctgtggccggagtgtcttcgttttcccaagcgtccctgatggttttgatgcaggtgatcataggaatgcactctgggggacattgtccccgagggctggacactttccacatagcagggagcctaactgggtgcttttgaggatggggcctgcggagtgcccccctggtgtggccttggaatgatgatgttcctatccttaggagagactgcctggggttggggtaggaggagtagctcttaaatcctcgggatcggggtgctgctgtgttatcgtagccaagtcttgagatggacagatgcttagagagtgaaagggctgggtcaggatccataggggtgaaacagtgctggaggaggcggtgtggggtgaagcaggaagaacttggggttcgtcctgccgttctggattggggctggctccacaacctactagcagtcagtccttgtgtggcccctgt

SEQ ID NO: 5568 - DNA, 886 bp, Artificial sequence
  DNA replication origin
cagtccgggagggaggtggggggtcagccccccgcctggccagccgccccgtccgggaggtgaggggcgcctctgcccggccgcccctactgggaagtgaggagcccctctgcccggccagccgccccgcccgggagggaggtggggggtcagccccccgcctggccagccgccccgtccgggaggtgaggggcgcctctgcccggccgcccctactgggaagtgaggacccctctgcccggccagccgccccgtccgggagggaggtgggggggacagccccccgcccggccagccgccctatccaggaggtgaggggcgcctctgcccggccgcccctactgggaagtgaggagcccctctgcctggccagccgccccgtccgggagagtggtgggggggtcagccccccgcccggccagccgccccatccgggaggtgaggggcgcttctgcccggccgcccctactgggaagtgaggagcccctctgcccggccaccaccccgtctgggaggtgtgcccagcggctcattggggatgggccatgatgacaatggcggttttgtggaatagaaaggcgggaagggtggggaaaaaattgagaaatcgcatggttgccgggtctgtgtggatagaagtagacatgggagacttttcattttgttctgtactaagaaaaattcttctgccttgggatcctgttgatctgtgaccttatccccaaccctgtgctctctgaaacatgtgctgtgtccactcagggttaaatggattaagggcggtgcaagatgtgctttgttaaacagatgcttgaaggcagcatgctcgttaagagtcatcaccactccctaatcttaagtacccagggacacaaacactgcggaa

SEQ ID NO: 5569 - DNA, 1258 bp, Artificial sequence
  DNA replication origin
ggcgcccctcacctcccggacggggcggctggccaggcggggggctgaccccccacctccctcccgggcggggcggctggccgggcagaggggctcctcacttcccagtaggggcggccgggcagaggcgcccctcacctcccggacggggcggctggccaggcggggggctgaccccccacctccctcccggactgggcggctggccgggcggggggctgacccccccacctccctcctggacggggcgactggccgggcagaggggctcctcacttcccagtaggggcggccgggcagaggagcccctcacctcccggacggggcggctggccgggcggggggctgacccccccacctccctcccggacggggcggctggccgggcagaggggtcctcacttcccagtaggggcggccgggcagaggagcccctcacctcccggggcggctggccgggcggggggctgaccccccccacctccctcccggacggggcggctgccgggcggagacgctcctcacttcccagacggggtggttgccggacggaggggctcctcacttctcagacggggcggttgccaggcagagggtttcctcacttctcagacggagcggccgggcagagacgctcctcacatcccagacagggcggcagggcagaggtgcttcccacatctcagacgatgggcggccgggcagagacgctcctcacttcctagatgtgatggcggcggggaagaggcgctcctcgcttcctagatgggatggcggccgggcagagacgctcctcactttccagactggacagccaggcagaggggctcctcatatcccagacgatgggtggccaagcagagacgctcctcacttcccagacggggtggcggccgggcagaggctgcaatctcggctctttgggaggccaaggcaggcggctgggaggtggttgtagcgagccgagatcacgccactgcactccagcctgggcaccattgagcactgagtgaacgagactccgtctgcaatcccggcacctcgggaggccgaggctggcggatcactcgcggttaggagctggagaccagcccggccaacacagcgaaaccccgtctccaccaaaaaaaaacgaaaaccagtcaggcgtggcggcactcggcaggctgaggcaggagaatcaggcagggaggttgcagtgagccgagatggcagcagtaccgtccagctttggctcggcatcagagggagaccgtga

SEQ ID NO: 5570 - DNA, 1634 bp, Artificial sequence
  DNA replication origin
catacttttatttataagtggaaatccaggaaatttacaggaaagaaggaggtagagatcatttgggtaagagcctaaagagaaacaaacagccagaaatttgcctaaggctctcttgtgcacacattctgggccacaatgcttgctgaaggtaattgtccagacatactattccttttctaactttttttttttttgagacagagtatttctctgtcacccaggctggtgtgcagtggtgtgatctcagctcactgcaaccttcgcctcccgcgttcaagttattcttgtgcctcagccttccaagtagctgggattacaggtgcgcaccgccatgcctggctaatttttgtattttttgtatagatggagtttcaccatgttggctaggctggtggtcttgaattcctgacctcaagcgatctgcctgccttggcctccaaagcgctaggattacaggcgtgagccacagtgcccagccttccttggcttttgatatctgcctcagtttttagcaaaatgctgagattttcttcttgtttattgaacccagcttcctctttgactcttggatctgtttgaacacctagtttcaaagcatctcctgcagccctagtgtgggactccttcatacttccatctccatcttacccattgaaccaatctttaactcccagtgggggttggacaacacaggctatcaggtccaataaaaggtatgggtggggtatctctgaagcaaattacaaaattggaacagaaggatacagctggaaaaggatccttcaaccacccttcttgaaaaagaggggctaaaaaattcttttatgtctcaaaagtcaggggaatcaatgagaggaatggctgccaagttaaccgcaaactctgtgatgtgaaagtgacagaaagttggggtacggggtcctcggttttgctctacagggctgtgggctgtgaaaagccaattttggaaggtacatagcagcaatgggacctctcccattggccagaaactacaaaaagagaatatagcacaaaaggcataagaagcactcagaaatgaaatttggaggatacaagtgtaaatgaagaagaaataagaaggctatactcagattggtctctgattagtaaaaacaaagaaagatgaataaatgatgaaagccatgggacaaaactggagatgaagggaaacgtgtgacacagagcagtgtcaagaggctaaacatcaaattgagatagattttgtggaaaatactatcaacaacaaaatgcatcaaacagagaacacatacacagctcaaggaagatggaataatgttaatagatgtcagagggaagacgaaactcattcctatttttgcctctgtatttctcacaaatgaatgcttggtgaacctaaagcatcagacaagcacagttaaaagagacttgaagccgaagatatgtggagattttaagagagcatttagcctctttaaatttgctcaaggggtcagagtaacaagatgaactatgtccaatgactgtgaaataatttgtaagtgggactgtgaaaccatggtcagtaagctttttgagatatcatgataaaccaaagtgatgccagaacactggagacaggcaaccattga

SEQ ID NO: 5571 - DNA, 756 bp, Artificial sequence
  DNA replication origin
ttctattgcgcgcggattagggtgagggactgggataggggaggggagagacgtttccagtcttctttattcccttactgggttccacgtcgcctggacacttgtcctagactagcttatttttcttcccccgctgcgtcgtccgccctcttcacacatggaggggttggaagagcggagccggcccccgccggtctcgaagttggacgcgtcctcctggagtccctcgccgccggccccctcctccagcaccggaagtcgaagcccgagggcggggggccctcgggtcgtgcgggggcggaggctgggggcgggcatgggggcgtggtttggggaaggaatccgcacctcgcctccgccctggccgggatgggcggagttcgctccagctgagtcccctgcctggcgacttttctctgaggggctgtctcattgttcactacctcccttaagagcgaagaggacacaggccgaagattgagaaggggaaattctgtcctccaaccgcggtccctgcgcgctgcagcggttgtctcccgagtgtggtggctatggggacttggagagcatcagaatcccttggaggacttgttataacagactgctgggccccacccgtagtttctcattctgtaggcctggtgtggaacccatgaatgtgcatttccaacaagttatctgtgatgctgctgctggtccgcaccttgagaacccctcagttagaggctatatcatcagggagctggggtacgatca

SEQ ID NO: 5572 - DNA, 1034 bp, Artificial sequence
  DNA replication origin
gtggacgccgggcagagggagagggaggcggcgggctggatgcggcccggcttggatgggcccgaacggaggtcgcctcttgaggccgggccggatctagggcctgaaaggccgccgcttcggcagggaggccgaggggtagcggcggcccgggtggggaggtggggtccgggtgtgcgccgcggcgctggctgcgaaggcagtggccgaggcgggctccctctgggccgtgcccggcctggctaacaaagccgccgcggcctctgttgtgtgatgtacgcgtgggggcttccggcgggcggggcggaggggctgccacccaccaccgctgcggccgccgcctccgccgctgctttcgctggagggcgggcggatgtacggggcgcctggggccccggcgcaaagcgcctcagtgactgtggtccgctcgttgcggcggccgccaccgcaggcgacagggtcagtggagaaagagccgcgggaccctacggcgccccgctgtggccgatggggtcctgggcgggaagcgggtgatctgtggctcgggcgggaggcatgggaagggtgtggattgggagacacgttaccggggaggaggctaggactgtgggatatgggcgaaggaggctgggctggctgttagttttgcaggcctgagtggtgcaaggcggccgctgttgcggtcacaggcatgacctagggtaggatggtgctgcccgtaaccaggcttgtcagaagaaggggttcaccttttgacagtgttttagaattggcatacacattttggatgcctgctgactatggtgataatctctctttgcgttctgcgatgcttagtggtcgtggaagatgtaagtgaatgtaaagaggaatgtggagaaaactgaacaattaggtttatgacgggtgatcactgtagcactacaatgtcgcttaaaagtagttcacagcactaatttgaagggtttcttgtagagagaaatgcacattttgacgtacatttgattcaagtgcaggtaattctttgtgcctgt

SEQ ID NO: 5573 - DNA, 953 bp, Artificial sequence
  DNA replication origin
ccactgcactccagcctgggcaacattgagcattgagtgagcgagactccgtctgcaatcccggcacctcgggaggccgaggctggcagaccactcgcggtcaggagctggagaccagcccggccaacacggcgaaaccctgtctccaccaaaaaatacgaaaaccagtcaggtgtggcggcatgtgcctgcaatcccaggcacttggcagtctgaggcaggagaatcaggcagggaggctgcagtgagccgagatggcggcagtacagtccagcctcggctcggcatcagagggagactgtgcaaaggggagaggaggaccgtgcaaaggggagggggagggggagagagactattctatttttcaaatgaaggtactaaaatatatttttaggattttagagttggaaaataactaatcattgtaggaaactgaagcccaaagggtttaaatgagttgtctgaggacatataaacagtatggttcattgactatatatatgttttttaagtacccgtcttacatccagaaatcatagtatctttgttagctttgaatgcatagtagtgagcaatgcaaaaatgtaccctgttctcttggaatttacaatccagtggggagatggacaattagtaagtaatgaggtctgataaagaagttacaaaccccgaagttctaggcaggaaataaatcttgtgttggaatggaaaatactggggaatggaagaagagctgctatttacataaagtggttcagaaaggctgctgagacttacaagatcagaaggagccagccacttaagtagcaggagcaggacagcattctaggctggaacagcctgcacagatgtgctggagttaaggtgcacgtaaagctgtagagaaactcaaaggagagtatggccagaacatagaaagctgtggggagagtagtatgaaccataagacaggg

SEQ ID NO: 5574 - DNA, 907 bp, Artificial sequence
  DNA replication origin
gaagtgaggagcgtctctgcccggccgcccatcgtctgagatgtggggagcgcctctgccccgcccccccgtctgggatgtgaggagcttctctgcccggccaccccgtctgagaagtgaggagcccctccgcccgcagctgccccgtctgagaagtgaggagcccctccgcccgacagccaccctgtctgggaagtgaggagcgtctccgcccagcagccaccccgtctgagaagtgaggagcccctccgcctggcagccgccccgtccgggagggaggcgtgggggtcagcccccgcccggccagccgccccgtcggggagggaggtggggggtcagcccccgcccggccagctatcccgtccgggagggaggtggggggcgcgtccgcctggccgccccatctgggaagtgaggagcccctctgcccagccgccaccccgtctgggaggtgtacccaacagctcattgagaacaggccatgatgacgatggcggttttgtggaatagaaaagggggaaaggtggggaaaagatagagaaatcagattgttgctgtgtctgtgtagaaagaagtagacatgggagacttcattttgttctgtactaagaaaaattcttctgccttaggatgctgttgatctatgaccttacccccaaccctgtgctctctgaaacatgtgctgtgtccactcagggttaaatggattaagggcagtgcaagatgtgctttgttaaacagatgcttgaaggcagcatgctccttaagagtcatcaccactccctaatctcaagtacccagggacacaaacactgcggaaggccgcagggtcctctgcctaggaaaaccagagacctttgttcacttgtttatctgctgaccttccctccactattgtcctgtgacc

SEQ ID NO: 5575 - DNA, 948 bp, Artificial sequence
  DNA replication origin
cccggccagccgccccgtccgggagggaggtggggggatcagccccctgcctggccagccgccccgtccgggaggtgaggggcgcctctgcccggccgcccctactgggaagtgaggagcccctctgcccggccagccgccccgtccgggagggaggtgggggggtcagccccccttccggccggctgccccgtccgggaggtgaggggcgcctctgccgggccgcccctactgggaagtgaggacccctctgcccggccagccgccccatccgggagggaggtggggggaacagccccccgcccggccagccgccctatccaggaggtgaggggcgcctctgcccggccgcccctactgggaagtgaggagcccctctgcctggccagccgccccgtccgggagggcggtgggggggtcagccccccgcccggccagccgccccatctgggaggtgaggggcgcttctgccgggccgcccctactgggaagtgaggagcccctctgcccggccacgaccccgtctgggaggtgtgcccagcggctcattggggatgggccatgatgacaatggcggttttgtggaatagaaaggcgggaagggtggggaaaaaattgagaaatcggatggttgccgggtctgtgtggatagaagtagacatgggagacttttcattttgttctgtactaagaaaaattcttctgccttgggatcctgttgatctgtgaccttatccccaaccctgtgctctctgaaacatgtgctgtgtccactcagggttaaatggattaagggcggtgcaagatgtgctttgttaaacagatgcttgaaggcagcatgctcgttaagagtcatcaccactccctaatcttaagtacccagggacacaaacactgcggaaggccgcagggtcctctgcctaggaaaaccagagacctttgttcact

SEQ ID NO: 5576 - DNA, 1296 bp, Artificial sequence
  DNA replication origin
acggggcggctggccaggcggggggctgaccccccacctccctcccggactgggcggctggccgggcggggggttgacccccccacctccctcctggacggggcgactggccgggcagaggggctcctcacttcccagtaggggcggccgggcagaggagcccctcacctcccggacggggcggctggccgggcggggggctgacccccccacctccctcccggacggggcggctggccgggcagaggggtcctcacttcccagtaggggcggccgggcagaggcgcccctcacctcccggacggggcggatggccgaccacccccccccgcctccctcccggacggggcggctggccgggcagaggggctcctcacttcccagtaggggcggccgggcagaggagcccctcacctcccggacggggcggctggccgggcggggggctgaccccccccacctccctcccggacggggtggctgccgggcggagacgctcctcacttcccagacggggtggttgccagacggaggggctcctcacttctcagacggggcggttgccaggcagagggtttcctcacttctcagacggagcggccgggcagagacactcctcacctcccagacagggttgcggcccagcagaggcgctcctcacatcccagacagggcggtggggcagaggtgctccccacatctcagacgatgggcggccgggcagagacgctcctcacttcctagatgggatggcggcggggaagaggcgcttctcgcttcctagatgggatggcggccgggcagagacgctcctcactttccacactgggcagccaggcagaggggctcctcatatcccagacgatgggtggccaagcagagacgctcctcacttcccagacggcgtggcggccgggcagaggctgcaatctcggctctttgggaggccaaggcaggcggctgggaggtggttgtagcaagccgagatcacgccactgcactccagcctgggcaccattgagcactgagtgaacgagactccatctgcaatcccggcacctcgggaggccgaggctggcggatcactcgcggttaggagctggagaccagcccggccaacacagcgaaaccccatctccaccaaaaaaaaaacgaaaaccagtcaggcgtggcggcgcgcgcctgcaatcgcaggcactcggcaggctgaggcaggagaatcaggcagggaggttgcagtgagccgagatggcagcagtaccgtccagctttggctcggcatgagagggagaggga

SEQ ID NO: 5577 - DNA, 1251 bp, Artificial sequence
  DNA replication origin
ccccaatactctctgcctcgaattgacatcgcatctgcggattcatctttgatgcaattaaacttaaggcaagtgaaagtataacgtctcctgcagctactcccaccttcttctcaccaggatctcttagcatttttgttaggcaacctcttcttctaccttggtagctagccgcggaaaccttgcaggattcatgatctaagttacgaaatctaagttagattcatgatctaagttacgggaaattctcactcttcatatactcaaaacatgaaatacagggctagaaggaacctgctatttatctcccataatgcaccaagaggttttgaggatggtttgctattatagaacttttgacagagttggaggatgtttaaacattgaattgggttactgccttcttggaagatttccaaaactagttgaattggctcagtcatgttttggcctaaagacagagagctggagtatatgactttcctatcctttcctgctctgtgataccctgattgtcctttgaggtgctgaataaaggaataaagcatctcagcttttccatctataaactaaggatgttaacacttgccactctcccactttgtaactgacctgggaaatgcagctatgtgatctacagctagacatttagagttgaacggaaaccactccccttggacagttctctgacctgttaatgtgatctaaatcacatagcactttctaataggctctgaatatgagtagatagtagtgtgatggagtagggggggaaggtagtgtaacagtgaggagggctgagtaggcaaaacttaccgaggacatcgctctctcaggctctggcaaagtgactggatgtaccaggttccctctgcagggtttcggtaggaaacacagttattcacagtggccatccccagcagaaagtcagcctcatccgggatatatctcgtttgaggtgatgataaatccatttctaaatagggttgctcctctgaatcagtctcaacaggtatacctttctggtagttatccccctgacaagcctgaataaaaaacactttgggttttccagcaagggaagggcacttcaaaccagtgaactgagatgtcagctcatagatgggggcctcctgtccatcagtgccatagatgatgcccttgtctccatgggagaggatacagcagatgaagcagtccatgttactgtggtccatgagttggtagattttcaaaatctcatagatttgc

SEQ ID NO: 5578 - DNA, 1423 bp, Artificial sequence
  DNA replication origin
agcccgagctgcactggcgcagtggctgctcgccacctcgggccgcattcttgccacggctcccgccagccgccggtgctcgggctggaggtgggctagcgcgttctggcctctggcttcccgggcgtgcgcggaccaaggctcactccctcacacgtcccccaccggccccgacaccttcccttcccgggcctgcctcccgtctttaccctagcggcgaccacggccagcgactctcttcaggctgccagcggtgcggacaggggcgggcgccagagccctgctcgcggaggggcgaggcgagcgctctaggcccgctcccggcgcggggcgcgggagggcggcgaggccgcgaccggggccgtgggcttggaactctgcaccagtcccaggctacccgctgggaacgcattcgccccacccgcgccggggtcgcggccccgcctccctccccggggctgggcagcgagaaggcggggccttcgagcttgaggcggggcgggcaggaaactacaattcccagcaggtcttgcgctggggccgtggaggccgctgggagagtggctctcctttggcttccccaattgtgtgggggctgccattgacccggtgtcgccgcagaaccgaggtcgccgagtgatgatgttgtgaagtcgcccgcctgtccctgccacgcccgggcggttgctggcagtgggagcagcggcagcagcttcggctgctgctttcaggctgccgctgcattaggggcttcctgaggaagcgcgggcggacgacagaggatgccgaaccactccagtgagtaagctgtccgcgcagaacccgaacttgcccttgacaacttccccggaaagcggagggacctcctcgtcccaaggtcctccggtacccggaggtcacgcgcggacgtcggagccggaggctgggtgctggagggctgggtccgggtcccgcggtgaggcgtgggttgtttcctaagtgtgggtgcaaagtaatgggcgctaggcgctggcgtcggtattcagcccagctgcacatctgaggcttggcagcttctcatagcgccttatcctctgccatacagcatccatctggagccctgtcttttaggatgagtggctttagggtcgggcattaaaccttaagcttcagtcgccatctgtgatgtaagtgggaggagagggtattggaaagagctctttctgggtcaaatagagttgggcttttcttgcaattgattttgagccagatgccacatatcttgaaaaagaaaaacggctgactttagtttgaagcgtaaataatagatattcgcacatgtcctttttagtagcagcccaaaaattgaatttcaacttaaaaaaaaatctgcgtcataataatagggatgttacttgctcttgctcatgcaccttttgcttag

SEQ ID NO: 5579 - DNA, 996 bp, Artificial sequence
  DNA replication origin
gcccggccgcccctactgggaagtgaggagcccctctgcccggccagccgccccgtccgggagggaggtggggggtcagccccccgcccggccagccgccccgtccgggagggaggtgagggggtcagccccccgcccggccagccgccccgtccgggagggaggtgggggggtcaagccccccgcccggccagccgcccagtccgggagggaggtgggggggtcagccccccgcccggccagccgccccgtccgggaggtgaggggcgcctctgcccggccgcccctactgggaagtgaggagcccctctgcccagccagccgcccagtccgggagggaggtggggggtcagcccccgcccggccagccgccccgtccgggagggaggtggggggtcagccccccgcccggccagccgccccatccgggaggtgaggggcgcctctgcccggccgcccctactgggaggtgaggagcccctctgcccggccaccaccccgtctgggaggtgtgcccaacagctcattgagaacgggccaggatgacaatggcggctttgtggaatagaaaggggggaaaggtggggaaaagattgagaaatcggatggttgcggtgtctgtgtagaaagaagtagacatgggagacttttcattttgttctgtactaagaaaaattcttctgccttgggatcctgttgatctgtgaccttacccccaaccctgtgctctctgaaacatgtgctgtgtccactcagggttaaatggattaagggcggtgcaagatgtgctttgttaaacagatgcttgaaggcagcatgctcgttaagagtcatcaccactccctaatctcaagtacccagggacacaaacgctgcggaaggctgcagggtcctctgcctaggaaaaccagagacctttgttcacttgtttatctgctgaccttccctccactattgtcctatgaccctgccaaatccccctctgtgagaaacacc

SEQ ID NO: 5580 - DNA, 651 bp, Artificial sequence
  DNA replication origin
agcagtgaccaaggtctgggccattctcaaaagaaagtacaggcagttgtattacctgctcaggctgttagaacaaaatatcacagactaggtggctgaaacaacagcaatgtattccctcacagttctggaagctcaaagtccaagatcaaggtgttgtcagggccggtttctattgaggcctctgaccttgcctacagaggaccgtcttccccgtgtgtctttgcccggcctgttctggtgtgcacacatccctggtgtctctcccacttcttataaggacaccagttgtattggctgagggtccaccagcttcattttagcttcattaccactttaaaggccctgtctccaaatgcggtcacactcggaggtactgggggttagggctccaacatatgggtgggggttgggtggggacaattcagcctataacagcagtgggggttaagagaaggtgctgcggggagaatcaaaggagagaggcttagaggctgggccctggggtagacacagcctgcagcagggacaagggtgccagactgataacctggtgttgggtgggggtttgggtggagggtggccgtctaggacccttagctggggtgggaaagggcaggtagagtgagtggtcttgggtggccgtgggtg

SEQ ID NO: 5581 - DNA, 1512 bp, Artificial sequence
  DNA replication origin
gcgcgggagtggcggaggcggtgtccgcggcgctctgggcggattcctgaggggaggggcgggggactgggagggaaaagttcggaaaaacttttaccctgaattcgctcagggacgaaaacgcgcagaaagggaatttgcttcaaagatttgttcctcttcctggtgcactcagatgcgcattcctgagcaggggcgccttcgccagcggcgtttgaggggagcgaggaccgcgcagcgccccttcggggagagacgtgaccaggagtcgcgttaggactgcaaaggctggctctggcggggctttcgggtcgccgggtcctcaatgtggggtttgggacgggacgagaagggggtgcgccttgcggatcgcctctttccccccggacccaaagagtccacgcgaggccacagtcccctctcccctcccccgagttataaaaaggaggaggggccgcctccgaggagaaacccgagtcgggcggagggggccgagtgacggcgggaggaaggacccctcggaggaagggcccgaagcagggagagcggggaacccgggctcaggccaccccgcccgcgcgcacggcctggagtctggggaactggggtgactctagcgaggttttaaggaaacgaagacggcgttggggagactggttctagaagtaacctgagaccgagcgcccaggaacactctgtacgacgcgccgggcgtctcagtggccccgtgtgccttggttctgcggcgtgtgccctttcgggatcccatcttcgttgcagaagcaaccatttgatcctccatttagaatctgcgtaggaatgttttaatgcgtcttagaaaccaggctaattaaagagttttcaaaacacaaagcggggttatcctcgttctcgggtagcgttttctgattggcaaacgttcttttgttctcggttaaatcttcgtcttgagccaggcgctgggcgctcgcgcgcgctctctggttactcctgcgggggtcataagtcaccagggggcctctcccctctctccgggctgccaggaatatcaggaattcccatgcaggaaagtgacatgttgagaaggaaaagaaaaaaatcaatcaatcaatctctcctcctcctcctctttcctctgtctctctctctctctctctcacacacacacacacacacacacacacacagcaatcctgtgctttaaaaaacgttattcctggcggagcccttctgcctcagtcccgggtgctggagctctgagcgatttctgatcaggttgaaccttggcagaagttgctgtctctgctgcctcccgtgcgcttcttctacagcaggaaaaaaactcattctgaaatcgaagacaattaattgggttcccttccatgggagactttggctttctctgtttttctttatttattttcgatcactgaagattgctgggaatcgttctttccgattcacggttctttgtccttccccactcctgttaataggtcgaaagggcggaag

SEQ ID NO: 5582 - DNA, 922 bp, Artificial sequence
  DNA replication origin
ctccacaccccgctccttcttcagccccaaaagctcggccccaagtttcagccaaacggccggctcttgctgagtccgatctcggccccggagtcgggagcacggcgagttctttttggaaacccagtcacactgcgtccgaaaccgcgaggcgctcgtgcccgcggcctggccccggcccctccagcccctcgcagccccagcagcgagtcctggcgcccgccgccgccgccgccgccgccgcccgccgggagtgagcgccgactaacgcctcggagtcgcgctggtcgccagaagaagcgtcgggctcgcggggttccgggccggcccgccccctcccgtcccctcccgtcccctcccctcccctcccctccccccccattcacaaaccactccgggggcggccccaggccccggcggcccaatggcggcctttgttttttcggtggccgccttcggattgggcggaagtcggaaggggcgggcgcgggagtggcggaggcggtgtccgcggcgctctgggcggattcctgaggggaggggcgggggactgggagggaaaagttcggaaaaacttttaccctgaattcgctcagggacgaaaacgcgcagaaagggaatttgcttcaaagatttgttcctcttcctggtgcactcagatgcgcattcctgagcaggggcgccttcgccagcggcgtttgaggggagcgaggaccgcgcagcgccccttcggggagagacgtgaccaggagtcgcgttaggactgcaaaggctggctctggcggggctttcgggtcgccgggtcctcaatgtggggtttgggacgggacgagaagggggtgcgccttgcggatcgcctctttccccccggacccaaagagtccacgcgaggccacagtcccctctcccctcccccgagtta

SEQ ID NO: 5583 - DNA, 1945 bp, Artificial sequence
  DNA replication origin
tggtctcaaccttctattaggcacaagctggcccgtacctttgacgattcacatcgccgttatcatcatcttcctgcaagtctttgcctgaaatcttttcatccaaaccgctttccacccaggtcttcttttccaaatcacccctcgccccaaatctgcaaagaacttctcacttccaggtcacttctcagtagagggggagaaagttacagaaacaggcccccacccagcagttcttttccctaccgtgcctctcctcttgcaagagggctggggtgggaaaggtggggaggggccggggctcataccgcagtctcccccttgctgctgtggctaagtctgtggtagaagcggcgccacgactgcagggtcttgcccgaccagatccagaagccagtggtgatgccgacgatcatggtcatcaggtacttgatcatgaagacggtgaagtcggggctcatgggcgggaagtggccgggcgggcagggcacggcatagctcttgcacgtctgcaggagccaggtgcgctcccagtgctcgcggaaggcctgctcgtagaagtagcaggccaggacgatggtggcgggcactgtgtagagcacgctgaagacgccgatgcgcaccatgagcttctccagcttctcggtcttggtgccgtcgtgtttcatgatggtgcggatacggaagagggacacgaagccggccagcaagaaggacgtgcctatgaagaggtagacgaacagaggcgccagcacgaagccccgcagcgcgtccacactggagaggccaacgtagcacaccccgctcagcaggtccccgtctacctggcccatggccaggatagtgatggtcttgacggcgggcacggcccacgcggccaggtggaagtactgcgagttggcctcgatggcctcgtggccccacttcatgccggccgccaggaaccaagtgagagacagaatgacccaccagatggagctggccatgccgaagaagtagagcaccatgaagaggatggtgcagccctccttcttggtgccctgcgccaccgtgcggtagccatcgtccgagaagcgctccacgcacacggcgcggtcctctagaaggaagccggccacgtgcgccacggccaccatgaagtagcagcccgacaggaagatgatgggccgctctgggtagctgaagcgccgcatgtccaccaggtaggtgagaacggtaaagagcgtcgaggcgcagcacagcacggaccacacgcccacccagaggcgggcgaagcgcctctcctcctccttaaagtacatcaggccgttggcacggcccggttcgcacggggcgccacaatcgcgctcacccaggaagcggtagcccaggtacgggggcaccttgagctgacgggggcatgagaaggggaaggcgggacgccccctgccatctgaggcccccgggggcagcgcggtgaagggcaggtccggcaggtagggcgcggtagggtaggcagtggggccgccgcctgggcccccggagccgtccgacgtgttctggcccacgcagatctcgcccgcaccgtgcaccgggaagttctcgcagcgcagccgctcgggccactggaagccgaacttgttcatgagcgcctcgcagccctggcgggcgcgctcgcacagagaacgacacggcgggatggcctgatcgagcacggtgcacacgggcgcatacatggagcataagaaaaagcggagttcgggagaacactgcaccttcaccagcgggtagaactggtgcacctcgaggcccgcgtcctcttggttcgtgtggcccagcaggttgggcaggatggtctggttgtaggcgatgtccgtgcacagcgggatggagatgggctggcagaagccgtggtccggcacggagatgcccttctctccgtggtacggctgcgccccggcgcccg

SEQ ID NO: 5584 - DNA, 1200 bp, Artificial sequence
  DNA replication origin
ggaagccgctgctgctgccgccgccgccgccgccgccgccgccgccgccgcctcgttctcccgcagctctgggctcctgacggaactcgggcgtcgcggaccgagggcggggggcggcgggagggcggatgaaggtagccggggaagggggtgggcagggaggcggcgagacaccctgcgtccctccgggaggcacttccagtggctccgagcagaccagacacaaaggggggagtcgccgcagctgccagtctgcggcgctcccggtcaccggagtcgccccgcctccgccgccgcctccgcctcctcctcagtctccggctcttcccggccctgtctgtctctagcctgtggtgcagagcgggcggcggcggcggcggcgccggcggcgggatgaagcccgcactgcgcctgcgcgctcacggccccgcccggccccgcccctcgttcggggctggctgagggctccgaggccccaccgcagcgcgtctctccggtgaatggccgagggctgggtggggctgcggtgggcagcggtggcctttctccttcacacacatacacatgccttccaaatgtgcatggcttgggattcgcgtatttgtttaagagacgacggccacatccttttgttcggcgttcagcagactcctccgagttccgggatttctcccgactgaggcgtctccgtctcagtactctcggaggaaagcctcgaggggcagaactgccctctgttgtttcacggggctggaacctccctctccgcagcccaaagaatccggatggacccgcctttcccagaaccggagaccttggcctcctcaggctcccctctgactcaaacaaaagccggaattggaaagaccacccctttgatgtgttcgctgtaatcgacgtcctgctttcctcaaccgcccattcccttagccttcttagttgacaggaatattgagtatttgcaaggatgcgaagccagaaaaaaaaaaaagacttttaattctataaatcgtcccgctgcgtgcgcgcgtctgtccgtacagcgcggtgcccaccccgagagagggcctggattcaccaaggctgggggccttgagggctttttagggcacgtgaaaggaaaatggagttagagttgtgtcgggatagagagtgggatcattttgcactcaaggaattgagaagatcccgttggtaccg

SEQ ID NO: 5585 - DNA, 956 bp, Artificial sequence
  DNA replication origin
ccaccgcagccccacccagccctcggccattcaccggagagacgcgctgcggtggggcctcggagccctcagccagccccgaacgaggggcggggccgggcggggccgtgagcgcgcaggcgcagtgcgggcttcatcccgccgccggcgccgccgccgccgccgcccgctctgcaccacaggctagagacagacagggccgggaagagccggagactgaggaggaggcggaggcggcggcggaggcggggcgactccggtgaccgggagcgccgcagactggcagctgcggcgactcccccctttgtgtctggtctgctcggagccactggaagtgcctcccggagggacgcagggtgtctcgccgcctccctgcccacccccttccccggctaccttcatccgccctcccgccgccccccgccctcggtccgcgacgcccgagttccgtcaggagcccagagctgcgggagaacgaggcggcggcggcggcggcggcggcggcggcggcggcagcagcagcggcttcctcggggggttgtgattcgctcacaggagccattgacgggagaagaggaggctttcttggtggaatttacctcaggcaagatcgagccgcaggaataaaaagcgaggaagggaagggagcgccgccgggaggactagaaggggcagcctctcacacccactccgcctgccgtctcggggagcccggaccggggccgcgaccgcgacccctcccctcccccgctcctacctctcctcagccttcgccagggcctccccaaccctctcacggttgttctgcgaaggcgtggggactgtgagcttgtccatggaggcaggcaccttttttgatccagtcaaggaagaggatttgttgttttcgaaatcagagtgaaggaagcaccgaagcgaaacttaaggaatcctgccttcccggagccgcgggcgat

SEQ ID NO: 5586 - DNA, 946 bp, Artificial sequence
  DNA replication origin
tctaaatttcaaaataaggttcaagtgtgtgttctctagttgatgttctttttactataagccaaaaccgcttctttataataataattttaaaaatctacaggtctgtttccagagatctcataataagcactgttcactggtgattaaaatattatttttaatcgttgcattacctcacagctaaaaatgtcaagataccacacccaatatgtctttttcaccccgtaaaggggggtggggtgggaatatggaagtggggataggaaaatacacaagaatattaaaggcgatttccctggaaggcatggggcaggcgcgcaggcaccgggtcgcagctccgctgcaccgcgatcggggggacgcatggcgaagggcaagcacaggcctcggcctctgcgggctccctccctcgccacccgcaggggcagtggccgggacgtgccggccggagctactcaccagccgcagtgctgaccagcaggatggtccatggtagccagggcacccgccagggccgctgcagcgaggaagtcatccctgggccagccaagaatcaggagggcaaagaaaagaaatatgggaagtagaccggcggagaaacagccgggaggctcgtcttctctcccgtggactgatcctgcccgtatcacaatacagtttgaaaggacaaatggctgatgagaggacctagctgcagagctttcatgccgctgcagaaattcccttcatttctctccctcgcggctgggggggttccttcgcctcggacggggtgccgcggccctccaaacggaaggcatgtctgtggggaaagcagggagccaagaagaaatcccccaaattatttccctcgtagtttcacgatatcaaaaaaatatccaggtctgggagaaaacatatccagggtgcggagggcggggattcgatccggggtcggggggcg

SEQ ID NO: 5587 - DNA, 956 bp, Artificial sequence
  DNA replication origin
gcctctccgcccagcagccgctccgtctgggaagtgaggagtgtctccgcccggcagccaccccgtccgggagggaggtggggggggtcagccccccgccaggccagccgccccatccgggagggaggtgggggggtcagccccccgcccggccagccgccccgtccgggagggaggtgggggggtcagcccccagccaggccagccgacctgtccgggagggaggtgggggggtcagccacccgcccggccagccgacccgtccgggagggaggtggcagggggtcagccacccgcccggccaggaggtggggggggtcagccccccgcccggccagccgccccgtccgggagggaggtgggggggtcagccccccgcccggccagccgccccgtccgggagggaggtgggggggtcagccccccgcctggccagccgccccgtccgggaggtgaggagcctctctgcccggccaccaccccgtctgggaggtgtgcccaacagctcattgagaacgggccaggatgacaatggcggctttgtggaatagaaaggcgggaaaggtggggaaaagattgagaaatcagatggttgccgtgtctgtgtagaaagaagtagacatgggagactttccattttgttctgtactaagaaaacttcttctgccttgggatcctgttgatctgtgaccttgcccccaaccctgtgctctctgaaacatgtgctgtgtcccactcagggttaaatggattaagggcggtgcaagatgtgctttgttaaacagatgcttgaaggcagcatgctcgttaagagtcatcaccactccctaatctcaagtacccagggacacaaacactgcggaaggccgcagggtcctctgcctaggaaaaccagagacctttgttcacttgtttatctgctgaccttccctccactattgtcctatgacccagcc

SEQ ID NO: 5588 - DNA, 1359 bp, Artificial sequence
  DNA replication origin
cccgttctcaatgagctgttgggcacacctcccagacggggtggtggccgggcagagaggctcctcacctcccggacggggcggctggccaggcggggggctgacccccccacctccctcccggacggggcggctggccgggcggggggctgacccccccacctccctcccggacggggcggctggccgggcggggggctgaccccccccacctcctggccgggcgggtggctgaccccctgccacctccctcccggacgggtcggctggccgggcgggtggctgacccccccacctccctcccggacaggtcggctggcctggctgggggctgacccccccacctccctcccggacggggcggctggccgggcggggggctgacccccccacctccctcccggatggggcggctggcctggcggggggctgaccccccccacctccctcccggacggggtggctgccgggcggagacactcctcacttcccagacggagcggctgctgggcggagaggctcctcacttctcagacggggcggctgccgggcggaggggctcctcacttctcagacggggcggttgccaggcagagggtctcctcacttctcagacggggcggccgggcagagacgctcctcacctcccagacggggtctcggctgggcagaggcgctcctcacatcccagacggggcggcggggcagaggcgctccccacatctcagacgatgggcggccgggcagagacgctcctcacttcctagatgtgatggcggccaggaagaggtgctcctcacttcctagatgggatggcggccgggcggagacgctccccactttccagactgggcagccgggcagaggggctcctcacatcccagatgatgggcggccaggcagagacgctcctcacttcccagacggggtggcggccgggcagaggctgcaatctcagcactttgggaggccaaggcaggcggctgggaggtggaggttgtagcgagccgagatcacgccactgcactccagcctgggcaccattgagcactgagtgaacgagactccgtctgcaatcccggcacctcgggaggccgaggctggcggatcactcgcggttaggggctggagaccggcctggccaacacagcgaaaccccgtctccaccaaaaccagtcaggcgtggcggcgcgtgcctgcaatcgcaggcactcggcaggctgaggcaggagaatcaggcagggaggttgcagtgagctgagatggcagcagtacagtccagcttcggctcggcatgagagggagaccgtggaaagagagggagagggagaccgtggggagagggagagggagagggag

SEQ ID NO: 5589 - DNA, 1238 bp, Artificial sequence
  DNA replication origin
cggagacctcctccgatgccggacgcgggctgggggtggggccgcgctcacctcgccggtccacaggtgggtgggcgacgagctgggcgacgacacggtgcccagcagcggcggcggcggcggcggccgtggggggctcccgcgagctccaggcgcggcgctgcgcgtggggctggtgcctcgcgtggacgtcgcggacgcgcccgtctgcgtggccaccgtggggctggtgcgcgcggccgcgttcccgccgccgcgcgtggggctggtgctgcgcgaggcggtgcgcgggccaccgccgccgccgccgcctgcggggcctgaggcgccaccacagcagccaccgttgttgttgccgccgccgccgccgccgctccgcgtggggctgccatgttgctgctgctgctgctgcttcagctggaacggaaccgtcgccctcatgggctgcaagcggctcccgggtcccccggccgtggccaccgcaccacccccaagggagccggccggcgtgggggacccattgcgcctcacccgctgggacatggtcccccccctccccggtgactgggcgagacggggggttttgttgttgttgggctgcagggggaggattctcgaggccggagggcaggccccccaagacggggtgacgaagccggactccggggtgcagggggagaccgggccggggcaggcagcaacgaggtggtgcagccgccgccgccgccgccgccgctcctcatcaacaatagtgtctcctctgctgcccccgccccccacgatcgcccattggtgcagcgtcagccgcgctcgagccgctccactgctcccattggctacgagcagctcgggtcccgggcccccgaggccttgagagcctgggtgtgcgcggagaccgtctgctctttaaagagaaagagacccgccccccgcggggagggagcggaggaaatgggccctgtgtgtatgtgtagtgtgcgcgcgtgtgtgtgtacacgtgagtgcccgtgtacgcgcgcgcctagccacgcgcgcctttcctttcccgccggggggagccctggggactcagactctggaaggttgccaaaggaaatgtccagacccggagcagttcccagggatggtctgaagccttttccgcataactcatttccttaccccagtgttcacttgtgttcacctgtacgcgcatctcgttcgggcttttattcttaatgtttttgttctgccctaat

SEQ ID NO: 5590 - DNA, 1090 bp, Artificial sequence
  DNA replication origin
tccacgcgaggcaccagccccacgcgcagcgccgcgcctggagctcgcgggagccccccacggccgccgccgccgccgccgctgctgggcaccgtgtcgtcgcccagctcgtcgcccacccacctgtggaccggcgaggtgagcgcggccccacccccagcccgcgtccggcatcggaggaggtctccggagcagagccgaagctcgccggagaagaggagccccagcgccccggtttgcaaagcaggtaagtgctgggggtcgcgcagcaagggggaggcggctgcgggaaggggtcccgggcgcgcgctgcaatcgcgcggggactgcagagctgccgcggagcccgggtggctgggggcggggctgggggcggtgccgggcggtgggggacccggcagtgcggccccgcctttcccgggcctaccctacgccccgcccgcccgcccgcctcattcacccctctgcccgccccgcacggctccctggtggtggaggtgcagcggctaaaccttgggcttgagctgatgagtgttaatgataaacctggcttcctggccttactcctggaggagtcgttactgcttaccctcccttgagggtgaggctaggagtggtttgtcactttgttttagggacaaggttaatgttggcatagcccatatctgctgctgctaagtatttctgttcacaaaacagtttcagatctggggtactgaatgcattagcagtggcagatttggatcactgaacagaggaggctgagaaccgtgttttagcatttcctaagacttgataaatgggtagcaagaagtgaaaattaaacaagattccttaggaaggtttatgggttttgtctgaggctctgggtgtatttctgattttgtgtactgattctgtgttttgaatgtagaaaaacagaatccagtgttttgtctccatcttgttattgttttagggagctaacattcgttgtttttctgtttacctggaagctttcttggggaaggtcctgaatggagctgttgggtgccaatggagtcattcataaagagtaactcaaaagagaaattcaaattgtgggaagtgg

SEQ ID NO: 5591 - DNA, 927 bp, Artificial sequence
  DNA replication origin
gagcgtctctgcccggccgcccatcgtctgagatgtggggagcgcctctgccccgccaccctgtctgggacgtgaggagcgcctctgcccggccgcaaccccgtctgggaggtgaggagcgtctctgcccggccgccccgtctgagaagtgaggagcccctccgcctggcagccaccccgtctgggaagtgaggagcgtctccgcccggcagccaccccgtccgggagggaggtgggggtcagcccccgccaggccagccgccccgtcccggagggaggtggggggtcagcccccgcccggccagccgccccgtccgggagggaggtgtggggtcagcccccgcccggccagccgacccgtccgggagggaggtggggggtcagcccctgcccggccagccgccccgtccgggaggtggggggcgcctctgcccggctgccccttctgggaagtgaggagcccctctgccccgccaccaccccgtctgggaggtgtacccaacagctcattgagaacgggccatgatgacaatggcagttttgtggaatagaaaagggggaaaggtggggaaaagactgagaaatcggatggttgctgtgtctgtgtagaaagaagtagacatgggagacttttcattttgttctgtactaagaaaaattcttctgccttgggatcctgttgatctatgaccttacccccaaccctgtgctctctgaaacatgtgctgtgtccactcagggttaaatggattaagggcggtgcaagatgtgctttgttaaacagatgcttgaaggcagcatgctagttaaagagtcatcaccactccctaatctcaagtacccagggacacaaacactgcggaaggccgcagggtcctctgcctaggaaaaccagagacctttgttcacttgtttatctgctgacct

SEQ ID NO: 5592 - DNA, 1098 bp, Artificial sequence
  DNA replication origin
gcccgttctcaatgagctgttgggtacacctcccagacggggtggtggcggggcagaggggctcctcacttcccagaaggggcagccgggcagaggcgccccccacctcccggacggggcggctggccgggcaggggctgaccccccacctccctcccggacgggtcggctggccgggcgggggctgaccccacacctccctcccggacggggcggctggccgggcgggggctgaccccccacctccctccgggacggggcggctggcctggcgggggctgacccccacctccctcccggacggggtggctgccgggcggagacgctcctcacttcccagacggggtggctgccaggcggaggggctcctcacttctcagacggggcggccgggcagagacgctcctcacctcccagacggggttgcggccgggcagaggcgctcctcacgtcccagacagggtggcggggcagaggcgctccccacatctcagacgatgggcggccgggcagagacgctcctcacttcctagatgtgatggtggccgggaagaggcgctcctcacttcccagactgggcagccaggcagaggggctcctcacatcccagatgatgggcggccaggcagagacgctcctcacttcccagatggcatggcggccgggcagaggctgcaatctcggcactttgggaggccaaggcaggcggctgggaggtggaggttgtagcaagccgagatcaggccaccgcactccagcctgggcaccattgagcactgagtgaatgagactccgtctgcaatcccggcacctcgggaggccgaggctggcggatcacttgcggttaggagatggagaccagcccggccaacacagcaaaaccccgtctccaccaaaaaaatacgaaaaccagtcaggcgtggtggcgcgtgcctgcaatcgcaggcactcggcaggctgaggcaggagaatcaggcagggaggttgcagtgagccgagatggcagcagtacagtccagctttggctcggcatcagagggagaccgtggaaaggggagagggagagggagaggatatctttttgttgaatcgacacct

SEQ ID NO: 5593 - DNA, 1295 bp, Artificial sequence
  DNA replication origin
caccaggcacagtggctcatgccagtaattccagcactttgggagcccgaggcaggcggatcacctgaggtcaggggtttgagacgagcctggccaacatggcgaaaccccatctctactaaaaatacaaaaattagacaggtgtggtggtacaagcctgtagtcggggggctgaggcatgagaattgcttgaacccaggaggcggaggttgcagtgagctgagatcatgctactgcactccagcctgagcaacaaagcaagactctatctcggaaaggacaggacaagacaggacaggacaggacaggaaagggaagggaaaggaagggaaggagaaggggaggggagggggaaggagggggagggggaggggagggggggaggggagggccagggggaggggaagcgaaagggaagggaagggaagggaagggaagggaagggaagggaagggaagggaagggaagggaagggaaaggaaaggaaaggaaaggaaaggaaagaaaaggaaaggaaagaaaaaagacaggacaagacaagacaagacagacaagaaagacaacactagactgaatcacttttctacctggggataaacagaggtttcttagctaggacaaaaaaatcataaactgaaaaagaaaaaaaagataactggtattaatcaaaatttaaaacttctactcatcaaaagacactattaagaaaatggaggctgggtgcagtggctcacgactgtaacccctgcactttgggaagctgatgtgagagaatcgcttgagcccaggaattcgagaccagcctaagcaacatagtgagatcccatctcttcaaaaaatagaaaaaaattagcttggtgtggttgcgcatgccagcagtctcagttactcaggaggttgagattggaggaattcttgagcgcaggaagtcaagactggggtgagctgtgatcgtgccactgagtgacacatgccatcagcaaacaaaaagatgaaaatctctgcacttgtgaaacctatattctggtgccagagtgagactctaaagaaaaaagaaaatggaaagacaaaccacactggctgaaaatattctcagggacttgtatgaaaaacataaagatctcctacaaatcaataacaaaaagacaattcgatttaaaaatgggcaaaaagcttggacacttcacaaaagggaatatacaaacggccaaacagcatcctaatctgtgatcaatatcattagttatccagagaaatgcaaattaaagccaaataaggtactattatatacccac

SEQ ID NO: 5594 - DNA, 1276 bp, Artificial sequence
  DNA replication origin
gcacatcttgcaccgcccttaatccatttaaccctgagtggacacagcgcatgtttcagagagcacagggttgggggtaaggtcacagatcaacaggatcccaaggcagaagaatttttcttagtacagaacaaaatgaaaagtctcccatgtctacctctttctaacacagacacggcaaccatccgatttctcaatcttttccccacctttcccccctttctattccacaaaaccgccattgtcatcatggcccgttctcaatgagctgttgggcacacctcccagacggggtggtggccgggcagaggggctcctcacttcccagtaggggcggccgggcagaggcgcccctcacctcccggagggggcggctggccgggcggggggctgacccccccacctccctcctggacggggtggctgccgggcggagatgctcttcacttcccagatggggtggctgccaggcggaggggctcctcacttctcagacggggcggctgccgggcggaggggctcctcacttctcagacagggcggttgccaggcagagggtctcctcacttctcagacggggcggccgggcagagacgctcctcacatcccggacggggcgacagggcagaggcgctccccacatctcagatgatgggcggccggacagagacgctcctcacttcctagatgggatggcggccgggaagaggcgctcctcacttcctagttgggatggcggccgggcagagacgctcctcactttccagactgggcagccaggcagaagggctcctcacatcctagatgatgggcggccaggcagagaccctcctcacttcccagacggggtggcggccgggcagaggctgcaatctcggcactttgggaggccaaggcaggctgctgggaggtggatgttgtaccgagccgagatcatgccactgcactccagcctgggcaccattgagcactgagtgaaggagactccgtctgcaatcccggcacctcgggaggccgaggctggcggatcactcgcggtcaggagctggagaccagcccggccaacacagcgaaaccccgtgttctccacccaaaaaatacgaaaaccagtcaggcgtggcggcgcgcgcctgcaattgcaggcactcggcaggctgaggcaggagaatcaggcagggaggttgcagtgagctgagatggcagcagtacagtccagctttggctcggcatcagaggaagacggtggaaagaggggagagggagagagggagaggga

SEQ ID NO: 5595 - DNA, 775 bp, Artificial sequence
  DNA replication origin
cccggccgccatcccatctaggaagtgaggagcgtctctgtccggccgcccatcatctgagatgtggggagcgcctctgccctgtcgccccgtccgggatgtgaggagcgtctctgcccggccgccccgtctgagaagtgaggagaccctctgcctggcaaccgccctgtctgagaagtgaggagcccctccgcccggcagccgccccgtctgagaagtgaggagcccctccgcctggcagccaccccatctgggaagtgaagagcatctccgcccggcagccaccccgtccaggagggaggtgggggggtcagccccccgcccggccagccgccccctccgggaggtgaggggcgcctctgcccggccgcccctactgggaagtgaggagcccctctgcccggccaccaccccgtctgggaggtgtgcccaacagctcattgagaacgggccatgatgacaatggcggttttgtggaatagaaaggggggaaaggtggggaaaagattgagaaatcggatggttgccgtgtctgtgttagaaagaggtagacatgggagacttttcattttgttctgtactaagaaaaattcttctgccttgggatcctgttgatctgtgaccttacccccaaccctgtgctctctgaaacatgcgctgtgtccactcagggttaaatggattaagggcggtgcaagatgtgctttgttaaacagatgcttgaaggcagcatgctcgttaagagtcatcaccactccctaatctcaagtaccca

SEQ ID NO: 5596 - DNA, 834 bp, Artificial sequence
  DNA replication origin
ccgggaggggcgtcacgtgactccgggtgcggtccccgcgctgaagctctggagcgaacccgaaccctcctctcaggcccgccccctgcggcccgcagcgggcaggttggcctggatgccggcgacagagagactggggcggcgcccggggccccagagagccaagacggcgctcaccggatagaggtagagcacggctcccaccaacgccagcaagaaggtaacggcgaagatcgcgaagtccaacatggttctgccgcccagggagccacgtctcggatcggccgctccagcagcagcgcctcagcctggcccaatttaaggcatagcgtgtgggcgggggcaccccgcgggacccggaaaccaacgggccgctgggggcgtgaccgaggcctgcggccggcgccagaggaaagagcaatggatcgccgaggagccggggcgcgggttcctgagcgcagcaggccgaggctgaggccgcctagcgccagcctccaccgcaaggcggggatttcggtgcacacgatttcagacagaatatgcccgcgacttcggaccgggttgctggcgaaagcagagcccagctttctgagaaaagttaggagttagtagtgctctgtccgcccaacagttttcgcaatggattcagaattaaaacctctaaaccgatgattttcgaagagtggtcccggtaccagctgcatcaacgtcgcccgggagctcgttagagattcagattatcgatgccgggcgcggtggctccacctgtaatcccagcaccttgggaggctgaagcgggaggatcgcttgagcccaggagtttgagaccagcgt

SEQ ID NO: 5597 - DNA, 936 bp, Artificial sequence
  DNA replication origin
cctcctcctcctcctcctcatacaggtcgcagagggagcggcggccgcagcgccaaggaaacccaggaccgggagaggaggagcggcggcgacggcggcggtaactcggaaggagcgagaaacagccccagcgcgcgacaggggagggggcgacgggggcggggcgcgagccgacggactccgaggacggtcaccgcggcgacggccggccgggcgcgcgcacgcgcgctcccttccctccgcccccgggagcccgaaaaagattcccaccctcgcccgcgccgccggcccctcccccacttccggcgtctcctagcgacggcgggggtaggggccgggatgcgcgcgggagttggtggtgcagttaacccttccgccgcccgcccgccgctggagcggctggagaagcccccacctcccggcggcctttgttagcccggcgggaacacaccaccctgctcagctggcttcctgccggctccctccgggactcatctcggctccgtccccatggaggtcatcggcctagggaacttctcgaggcttttctccctctgctgctgacgggaggccgaaggagggcacagcctccactcttgggaccctcctctgtgaaagatcacacctcaacagggcaggaataaaacttccacgcagctttcaatgccacctgacttcatttttctcagatttgacctcatcctctttgttgcagtgaattgcagtttcctaaccccagctttcctgcgcccctgcctctttgcacttccccactaacgctgttctcccctgccagattagcccctttctctcctggtttgcggtgccgtgggcctcagctttttatgtttgccatttctatgattcgcttcctcactcataaccttttctgtcatttctctaatgctatcaacttcgctgtcctttttcctattc

SEQ ID NO: 5598 - DNA, 955 bp, Artificial sequence
  DNA replication origin
gcgcctcttcctggccgccatcccgtctaggaagtgaggagcgtctctgcccagccgcccatcgcctgagatgtggggagcgcctctgccccgccgccccgtctgggatatgagggcgcccagccgcgaccccgtctgggaggtgaggagcgtctctgcccggccgccccatctgagaagtgaggagaccctccgcctggcaaccgccccgtctgagaagtgaggagcccctccgcccggcagccgccccgtctgagaagtgaggagcccctacgcccggcagccaccccgtctgggaagtgaggagcccctctgcccggccagctgccccgtctgggagggaggtgggggagtcagtcccccgcccagccacccgccccgtccgggagggaggtgggggggtcagccccccgcccggccagccgccccgtctgggagatgaggggcgcctctgcccggccgcccctactgggatgtgaggagcccctctgcccggccaccaccccgtctgggaggtgtacccaacagctcattgagaacgggccgggatgacaatggcggttttgtggaatagaaaggggggaaaggtggggaaaagattgggaaatcggatggttgccgtgtctgtgtagaaagaagtagacatgggagacttttcattttgttctgtaccaagaaaaattcttctgccttgggatcctgttgatcggtgaccttagccccaaccctgtgctctctgaaacatgtgctgtgtccactcagggttaaatggattaagggcggtgcaagatgtgctttgttaaacagatgcttgaaggcagcatgctcgttaagagtcatcaccactccctaatctcaagtacccagggacacaaacactgcggaaggccgcagggtcctctgcctaggaaaaccagagacctttgttcacttgtttatctgctgaccttccctc

SEQ ID NO: 5599 - DNA, 1240 bp, Artificial sequence
  DNA replication origin
cagagagcacagggttggggctaaggtcaccgatcaacaggatcccaaggcagaagaatttttcttggtacagaacaaaatgaaaagtctcccatgtctacttctttctacacagacacggcaaccatccgatttcccaatcttttccccacctttcccccctttctattccacaaaaccgccattgtcatcccggcccgttctcaatgagctgttgggtacacctcccagacggggtggtggccgggcagaggggctcctcacatcccagtaggggcggccgggcagaggcgcccctcatctcccagacggggcggctggccgggcggggggctgacccccccacctccctcccggacggggcgggtggctgggcgggggactgactcccccacctccctcccagacggggcagctggccgggcagaggggctcctcacttcccagacggggtggctgccgggcgtaggggctcctcacttctcagacggggcggctgccgggcggaggggctcctcacttctcagacggggcggttgccaggcggagggtctcctcacttctcagatggggcggccgggcagagacgctcctcacctcccagacggggtcgcggctgggcgccctcatatcccagacggggcggcggggcagaggcgctccccacatctcaggcgatgggcggctgggcagagacgctcctcacttcctagacgggatggcggccaggaagaggcgctcctcactttccagactgggcagccaggcagaggggctcctcacgtcccagacgatgggcagccacgcagagacgctcctcacttcccagatggggtggcggccgggcagaggctgcaatctcggcactttgggaggccaaggcaggcggctgggaggtggaggttgtagcgagccgagatcacgccactgcactccagcctgggcaccattgagcactgagtgaaccagactctgtctgcaatcccggcacctcgggaggccgaggctggcggatcactcgcggttaggagctggagaccagcccggccaacacagcgaaaccccgtctccaccaaaaaagtacgaaaaccagtcaggcgtggcggcgcgcgcctgtaatcgcaggcactcggcaggctgaggcaggagaatcaggcagggaggttgcagtgagccaagatggcagcagtacagtccagcttctgctcggcatcagagggagaccgtggaaagagaggga

SEQ ID NO: 5600 - DNA, 2442 bp, Artificial sequence
  DNA replication origin
ggttctgctctggacatgcgggaggagagtgagccgtgccgagtgatggactttcgttgcagtgtcctgttgaggtcagccaggaatccaggctggacactaaggctggatttgggagaggtgggcacttgtggcacaactgtggccattgttggctgctcagaaatctcagcttgagtgaggcgggtgctatcattccgtttgggtcgtgtgggtggaggggccttcttcactgacattttagaccattgttgtggttgaggattaacgactgccacttttggagaggtgtttcccgagaaaactgctggaatctcaatggggggcagaggaagctctgtttcaggtggagggggtggaaaatcagaatcggatggaggagaaggaaattccaccacggagtcctttccacgcccactcagaacaggggcttttgctgacacacacccttgttggagaactccaggaaggttgactccagaaagattgagttttccaggcttggggggtgctgcaggaggtggtagggtctccttgctgggagaccctgattctgctggcggtgtaaacttgctgactagactgtccaccgagggtctcttgggctcggggtgctctgcaccactgctggatttaatgctggagttgcgctgtggggttgggggtggtttctttcccccagggctggacgtcttactggtctttttgcctggagatccacttttgtcaggggtaggagaagctgtgggtggaggtggtggtggtggggctgggacaggtgatgggggtggaggaggaaacaccaggctgctttcaggagggggaggagggaagtccggagaagggactgggatggagctgggctgccacttgggctttgcttttactgcaggaggggactgtggagctacatttgctgggacaggctttaagggctgagattccatggcagggggagttggagggggtggaaactggctggctatctgcttcacgaccgagggcaccggtgacagtggagagggagggggttttgcacagaagctctgttgcttgggtaatgttggcgggggtactggaacaggaggggtagggggagagggtggaatgtaagaagcagggaaagctggctgcttttttgctgggggcactggaggagtaggtgtgggtggtgcagcttgagtcacaacaggtgccacagtcttggtgctggttggtgcggggatggtcacaaggggttttgggggagcttggggagggaggggtgcagggataggaggaggtggggggggtgttgggggagccacctgagtaatatgctgaacttgatggatcttcagtggaggaggcggggcactgaactgtggaagggatggggcacacggtgcaggctttagctgggccatggcagagcctggggttgggggtggaggagggggagggggtggtggaacaactccattggggggtaccaggatctgaggcttcactgactgtgactgcatcactgggggtgttggcggcttaaacagggcccctgaatgctgagacgcattctgtagccgtgttattgtgctgtacttgacgaacattggggctgctgagcctgcagaaggtgcagactggctggggagtgggggaggagggggtggtggagggggtggtggaggaggaggtgggggtggcggaggaggtagaggtggtgaaggctgtgaagcagtgtagggggtgactatcttaggttgcggggataaagggggcacaagtgaagtgtagggccgattcatagactccattctggcctaaaaggagtataaaaagggagtgggagagagaaaaacacaacaaacaaaacagttacagaggtaagctttgattgtgtaaaactaaaaagcagggagtctgggacatgcatgaaaaggatgcagaagttggtggtgatcataaagatggacaatgtcaggaaggctaaaatctgattgtgcgggcaagaaggaaacagaaaacttgttttaccccacagtaaaatagctagaccatctaacaatctaggaaaaatgtccggctgcaaaagctgtttgaatggtgacaggatgcatgacttctgaccttggctgtatgactttgacacagcctgccctacatggaaccctctgtggcggtcctctgagcactggacttccaaggggagatgtgatggctccagtttacctttcagtccatgactgcatccacatcaagcagatgctataactgggtttaggagggcttcctggtggaatgaggatggctttttgatgctagtaagctgacacaggagagtatgagaatgttgagcaggcgtgcacagtcacacaggaatgaataagcttgacacacacactcgtgttggtgtgagacaattgcatccaacatgcacagaagtccagcaatgcaggtaaa

SEQ ID NO: 5601 - DNA, 2013 bp, Artificial sequence
  DNA replication origin
ggctggaccgctcccggctggtggatggaggtcggtggggcctggactgcaccctgcgcccctggggaccgcgacggagggagacaatgagataaggggccgcctgggagggtgcggttaggcttctccgacccagcaccgggggctggtggcccgggaccgcagggaggaaaggactttcccccgcccagctgcagaaaccagctactggatgtcgggttgcttgggtttcgatgcccccatctttcatagatgagttcagtgcagagattttgaaaggcggggctccttctgtgtcttctttctaattaaacaggataagtaattgcttcattgctttttaaccgcgtctcctcttgcggtctgtattatacattcccgccggaaatccaaactgcaattcatggggggggggggggggtggacggagggagggggcagtgtgatagtattaggatgccttcgtgttaagacaggttgaaagatgtggttttcttaaggcagtgacttagggtgtccccactgtgtgagctggaaaccgcataaaccttattgcttacaagctcgaagacatggtttaatatgaaataagagccttgagggagggtgtaagtgttacatgtgtcttgcgtgtgtgcatttcttaaattctttgggaagatccgttggggaaatccgggagaatggaaaagttcttcactcaatcttccaataagggttgatgttgtctgcagcatttctcagggaaatgtggagagctgcttatgtaggtaaagtccaccgttaaggaacagtaaaggtaacgggttagggatgaggcgtgatcggattattaaagagtcagtccatggggatattaaattcagcaaacatttatggaatacctactctgtcagttaggctgggtgacaccaggtgaacaagcatggggtggtggaaagagctcttcggagtgggggaaaccgtacgccctggaattggcttgcaatgtgagttggataagctattgaactctgcagtacgttccctatcagtaaaatgggaataacaccacctgtttacctccccagatgtttttcatgtagattaaatgagataatgtatgcaaaatgcgtagcaccttgcctggcatagaggtgtttaacagcaccttaaattcctttcctcctcggggtggtttttttgggggtgcggtgcggggggttagtgaatgtaggtaagtgtaatacagtgaactatatagtaaaatgttgaggtatagaataggagagcgaagaagagagattaattctaaattgagggaggaatgcatggaagcctcggcatttaagtgaaacctttaaggatgagtaggatttcagcagattcagatggggaggaggacatttcacatggtggtgctatcctttgagagccgaattgagggggaggacctttgggggaggggcaaaatagagacgctcaatagcttttaactcttgttgagtctgaccttcaaagattgtctccgttattttgctttttgtgtggtgaatttcccagaaaccagatgcagccctactcaagtaagtacaaaaagcttaattcatgattttttgggttagacattttgtataatttagattgctgtctcctgtttgaatgtaataaagaattatttgtagatgttgccttatgataaacgttagctttatttggtagaagcagcagcttatttttcagactcagaggtctcactaagattatagagtatgtgactgggtgaaaggagtggagtagtgggcactattgggtgtgttttcacaaatatttaactctttattttccaaagaggtgtttttaaccattgtctttgaggatgattatgtcttttggttttgctgccctttggtgctcaccccataaatacttactagattggcatcgtggataactgtcacactattcacagattcttggttacacattgtagaatctcatggctttggttgccttggtttggaagtaattgaa

SEQ ID NO: 5602 - DNA, 1159 bp, Artificial sequence
  DNA replication origin
ggaggctcgcggcagcgccccttccacctggccaggcggcaggtggcgggaatcggggaggggcggccgcggaaaggggttacctcccaggtgcccggcggcccgggacgcggcagctccgcggcaccggctcctcctcctcctcctcccgctcctactcctgcccggcccaggcggctgctccgcgcccaccaaagcgaaactgccggccctgccctgtcgctggtcctggccctggccctggccctggcggcgttggcagggccggccccaagccgggggctggagtgggcggcggcggcggcggcgcacggggccagagttgggaggaaacttttgcgccggctcccaactcctctgcggcgcccgcgctctgggctcctgcggtcccggcgacggcctgggcccggctcttaaaggggccgcggcgctcccgggccccgccgcacgctgggcgacgacgtgccccggccctgcgggccagtaactggagcccgggagcctcgtctcgtcacctgggtctctccctggctctctccctctcgcacgcatgcacacggagctctggggagttgtaaggggacctgagggctacacgctcgaggattgaaaccggatctcagaaagaacacccgagggaagagcgaggagactgcagagctgcgcccttcacaggaggggactgcagcaagatgcaaaaggagcccaggagcaggtgcttctagtcacgcccaccaaaaacacccaaggggcgaggctgccgggtgcggagatgcaggagtgccccgagggcctgttaggaactcgccttaagcacagcccgtgccgctgccatcaggagccctgggatagcagagctgaagcgaaccttggagagaacgcgccagtggaaacttttccttttacagaccctcgaggacactgagtatttggccaaaggtcacacccaagacccagatatgatcgcgtgtgttgacacatagccttctggaatgcgactaccgttgtgcattttattaggaaaaaaaaaagttaacacccttaggctcatgatttggcaggtgtgtatccatcaccaattgaaatgggaatatgtgggggaaaccaacaaattacgttagtttcattcttagctctcatgtaaatgagctcctttgag

SEQ ID NO: 5603 - DNA, 1199 bp, Artificial sequence
  DNA replication origin
ccggcgcaaaagtttcctcccaactctggccccgtgcgccgccgccgccgccgcccactccagcccccggcttggggccggccctgccaacgccgccagggccagggccagggccaggaccagcgacagggcagggccggcagtttcgctttggtgggcgcggagcagccgcctgggccgggcaggagtaggagcgggaggaggaggaggaggagccggtgccgcggagctgccgcgtcccgggccgccgggcacctgggaggtaacccctttccgcggccgcccctccccgattcccgccacctgccgcctggccaggtggaaggggcgctgccgcgagcctccgggcctcagggtgttccggggagcggcgccccgggtctctgggcccacccgccccgggcgtcctccgagagtgggggctgcgcccgcggggtcagacacctgttcggcccggcccggcgtggtcgccgggggccaggatgaaagtgaccgtgtgcttcggcaggacgggcatcgtggtgccctgcaaggagggccagctgcgcgtcggcgagctcacccagcaggcgctgcagcggtacctgaagacccgggagaaggtgagcgcggcgcggaggagtggggcgcggctgcagccaaggcacctgccaggtgcgacccggtggcgacactcaggggatgcagaaaacccaggggattatggggcactgcctgtagctgcagctgttgtctattgctaatatcagtgatgtgggtgtctttgggtgtttgtgggccttgagctccgagggtcgtgagtggacctgcagcattggaatctcttgggagcttcttagaactgcccaatatgggcagttctccaaacccaccgactcaggatctgctctttaacgagatccccaggtgattggaatgcccactgaagtttgagaaccactggtttagaacttgtttgagggaacgtcttaaaaggtgctgctcacctaagtgtgatttttgacccattaaggcccgcctcacttaggctccttggagttagaaagttgattgtgcaagtgacacatactcggaagttacaactgatggggcctttggagtttcagccttgtgagctgccctgtctcagtgacttgggcaggaacacaggtgggagcatgctgtttgcttagccaacctgtctacattttgagtgtttt

SEQ ID NO: 5604 - DNA, 1536 bp, Artificial sequence
  DNA replication origin
gtccatcaatgatagactgggttaagaagatgtagcacatatataccatggaatactatgcagctgtaaaaaagggtgagttcctattctttgcagggacatgaatgaagctggaaaccatcattctgagcaaactatcacaaagacagaaaaccaaacactccaggttctcactcataggtggaaactgaacaatgagaacacttggacacagggtggggaacatcaaacactggggcctgttgtggggtggggggtctggggagggatagcattgggagaaatacctaatgtaaatgacaggttgatggttgcagcagaccagcatggcatatgtatacctatgtaatgagcctgcatgttgtgcacatgtaccctagaacttaaaagtataatagtaaaatgtgccatgtaatcagtgaggtctcagtcagacttccaattaggggatcctgtgtgatgattgcctgtaacaatctgatcatctaaaagtcactttagtcacatggaggaagatttagacagtgactttgggtcagtattgtgttttttgctgaggatatagagtaaaataagacacagcttctgccaccagtgggcttatagatttaacaggcatagaggagcatggcaacaaatggcatggtatgatcaaggtgctttggggcaaggggaggtggggaagttgagcaggtttcactccatgagctgtacgtggccaggggtttgaaggatgcatggacagttgccagggaagtaggagtggaagatggggcaggacatgagggaggggtgggggcagcctaccgctgtttgaaggtaaacatgtatgttttgtttgaaggaggaggttggggagaagaggatagaattgtgggaagtttctccaggacagttgtgggacgggtagtagggaaggagtaagggtcaaagccagagttaaggaagcatttggggcaggatggagatattgttggacctaccttttttattgattgcgctagagagtggagatagagggagctgggactggaggtggaggaactggctcaggtcctgctgttggagtggaggttagatgtattgaagcagaagcagaaatgagctttgaggtttagggggcaaagtaattaggcttgggggttgactctcagtgggaagagaagtgtaggtggaactggggagagggcgcagtctctgagacatttcagtgaatatgcctgtgttctggccacccaggctggggttccgagataactaagacatggcctttgctttacagaacctgatagatagggataggagaggtgggagactgagaacagatgaaagggttggtgagcagtgtgagggcctggagcaatcagaaatcctgagttcgtaaagatgccaatcttttgcaccagttgttcagcattggattagagccttgattcaaggttgggattagagggcaggtgtgggaacaacctggtgctcagaaataaaagttgttaggctcagttaatgaaagtataaattgatatgggtggcttt

SEQ ID NO: 5605 - DNA, 1555 bp, Artificial sequence
  DNA replication origin
gcagagcggagcgcaggggactggcgggggcgcccggggcagggagggaggcaggctagcggctgcactgcggtctggcgaggcggcgcagtgaggagaggggcagcctggtgcgcgtcgcccatgcggcctcccagccacgcgccagcccaaggtgccgcgcgccgcgaccgccgtgttatttgctcagttgctcccccgcgcgcaccttctgccccatcttgctccttcccagaattggttctcgtcgccggcggcggcggctgaaccaggcccccttcccggccggcgcacaccgggtgagtcagaggtatgtggcttggcctcgccctggccacccgctgccggctcccagggtgccagtgctttgctccgcctgaaagcctgagcagctcacggcttgagatcgcattttggggagctggaggtccctggcaggtcccagcttcgaatcccaccctgagatcccaccccgggtccgaggttgccccgaactccgcgcctctgggcttctctggaagtgacgcagcactgctggggattgggatgggagggggttctgcagagagcgcggcaggcaggtggcagagcgggagtgggtccaagcgggtgtcgcgcacacacgtacacacactccaagcagcgctcggggacagatgtgcgaacatctggggtaggagatggcccctgagtcttcacgacccctcccgctccgcacagcacacggaacctgaagttgcatgtgtgtgcgcgccagtgtgagtgccagtgtgtgcgcgctcgcgcgctggggcctactggagtccgtgtctgaatacataatatactgtgggcatcctcacggcgcgcgcgcgtgtgcacacacacacagcgaatcacacaaacatacataatttacgcagcatccaggtctgtgagtggtaatttaattccgcttcaagctgggaatttagaaataaggcaagggggaacggcggaggcccagaaaatctccccaagtgggacccccacccatccctttggcaggatttgcagctgccctgaagaccacttatggcaaagaaagagctgcaaacgtgcggatctgggtggcaaaggcattcctgaattttcttcccccctcaaataaatgcccaagcttaaagtggtgtgtgtgctggtggggggcgtgaggagaaggaagggtgacagtaccagatgcaaggctaggatccactagctgatgttctggggatgccaaggaggctgcagagttagctctaccactgccgccatcgccttgcaagtgccttgggtgagggcacttcaggaaggctttttcgcctttctttcacccatttcctccatagatggtttctccatctccaatcacctgtagcagctgctaagagttttgttgttagattccagacactgttctcagaggggtagggaggctcactctagagagtggtccgagaaggaagcacaaaccccactgcattccccatggattcccctttccagagcataccccttgccgctccccacaaatgcggtccccagactgttctgg

SEQ ID NO: 5606 - DNA, 1122 bp, Artificial sequence
  DNA replication origin
ccagggggctctcctctctgtctgaaaccgaaagaacaggaagtggagggaggggagccgagcagggagcacacgccaataaacctgagcgtggatctcctatcttttagaagaaattcagccggagccgcagaagccgcaacgcatatgggcaagatcccctaaaacttggtctggaaagctgattcccgaaggttccccaacccagatgattcccagaggggcgacaagtctattccaaatccctcccccacctccaaacactagggctaccggcgcccgccacccagccgctggacgcctgcgacccggtgggaaagacccccggcacagccagcccgagtcgaagggcgggggcagcccttcaatcagagcgcgccttgcctccattaacttgtgttgatattaaaaagaaatcaatcagtgaaaatgaagcatcggccgtgaacatttctttttctcacgtggaaaagcaaagagcgaggcggctggggaggggaggcgggaactcgccggcggctgcaggcagaggcttctccagagaccagcgctgcagccgagacctaactttccggcatagggcagcgttgaagaaatgccgcaggcttttccctgggggtgtccttaggaggaggaggaggaggagggcacaagcatggagtagttggaggcggccaacttcgcggaggcttcagcctcggttttgctttcgctgggaatatttttgcttaatagaatgtttatggatcgctgggctctgtttctgctgcgtagcccaaacaaatcgatgcggcgttagagaaggcgctggggggcggggaaggggagggagggctaggaggagagctgaggggctatcacgtccccaccacgtggatggccgcacgccgcgtgctcttcacctgttcctgcgcaccggcgggcgctgggcgcgcggcgcttctagaggctgtgcaagttgcgcgcattcctggggctcaagctggttccttcccgcctctctccgccctcctctccgaaatcccaccccagtttcctctcacctagttgggccagcgcttggattcccaagccagccggcctcggcctcccgccactcaaagccgtctctctaggggtcgc

SEQ ID NO: 5607 - DNA, 1033 bp, Artificial sequence
  DNA replication origin
aactccaaacctgatgtgcactggcgcattcacaattccaccaggcaccgcttggacgagtaggggcctgcccggggccctttggggagtgctcctcttgccactgtcttgcactgtgtgctctgctggcaactggccacagcttccctacctccaggagctgatcacgggggaaaaatgtttactgggtacccatttaatgtgggcatgagaccaatccctagagcccagagcaggccgtctgcgtaaaatctaggagtttacagtttacttgcaaattattatgctcgccaatggccatctcacattttggggagacaggctaaaagaaacacttcaaacccttatccggcgcctagaccgtcattgcttctctttcaggatttgtctgaacccagacctgtctcccacagccaatttacacctcttatctgatcatccagtccagacggaagggtgaattgaccgagaatctgcgcgtgtccatggcaatggcgttaaaacccaagcatagatcaaagctctccagacgaggaggggaggggtagatggttatggggtctgggttcttttggccccaagcgatgtgtcccggaggtggggacattaggcctgggagttgccaccatttgaagaaacccattgtcaggacttgaatgattttctgagcaaaacccagtccccccgcagatcatgattaactctagcaaaggggacgttcgtagtgggcgctgatcgggaatggctagcgccagggggctctcctctctgtctgaaaccgaaagaacaggaagtggagggaggggagccgagcagggagcacacgccaataaacctgagcgtggatctcctatcttttagaagaaattcagccggagccgcagaagccgcaacgcatatgggcaagatcccctaaaacttggtctggaaagctgattcccgaaggttccccaacccagatgattcccagaggggcgacaagtctattccaaatccctcccccacctccaaacactagggctaccggcgcccg

SEQ ID NO: 5608 - DNA, 1272 bp, Artificial sequence
  DNA replication origin
aaggaaagaaagggaagaaagggaaggaagagaaggaagggagggagggagggaaggaagggagggagggagggagggaggaaagggagggagggagggagggaagggagggagagagggaaggaatggagggagggaaggaatggagggagggagggaatggagggagggagagagggagggaagggagggagggagggagggagggagggaggaaagggagggaaggaatggagggagggaaggaatggagggagggaaggaatggagggagggagggaatggagggagggaagggagggaagggagggagagagggagggaagggagggaagggagggagagagggaaggaatggagggagggaaggaatggagggagggagggagggaaggaatggagggagggaaggaagtttggttaagaataaaacttccaaagagattggttgaagattgaaacaaattttttaaaactttgagtcaagactttggtatcagacaagtgtgggttcaactctcagctttgtgttttactccatctttaactgagggcaatttatataaagatccctatgagaaataattgaggcaatatatgcaaagtgcttggcacaaagtacatgtttaatgaaccttagtaatgaggatggtgtcccccaggggttaaaggtggtagagattacttacgaaacagaagcaatgttgtaatccagaattcaaaattgaacccataacatactattttttacctaactgcccactgaccaacattgataaacatctaatacctagtattggtgagaatatggggaaaaaaggccctttcatgcaatgataataggagtacaaactgatacaaactttctgaagccaattacagcaactcacatcaatagtcttaaaagtgtacataccccttgacccagaaattttacttccaagagtttatctaaggaaagaatcatggatgtgtgccaagacagatacccaaatacattcattacagcattgtgaatgattagcaaaagttgaggggggtgagggaggaagacccaaatacccaacaaagagaactaaagaaatgatgatagaatactcagaagccagggctggcacagtggctcacacatgtaatcccagcactttgggaggctgaggtgggcagatcacttgaggtcaggagttcgagaccagccaagccaacgtggcaaaatcctgtctccacgaaaaatacaaaaattagccgcgtgtggtggcactcgcctgtaat

SEQ ID NO: 5609 - DNA, 1372 bp, Artificial sequence
  DNA replication origin
cccgggtggtggaggccgggggcctgagggcctccggggcgcccgcgggcggcgacggcgggcgggcaggggtccagccggagccggagtggggcgagcggagcggcctgcgcgggccaggtgggggtgtgcggcgggaggggggggcgccggtaggcctcgggccggtaggccccacggcagccgcgccctgcccccgcaccccgggcctccgcgcgccccctcgagtcccccggggtctccgggtgggacggcggcgctgctgggccgaatcccgcgccggcccggaggctttcccgcggggcggcaggcccgggctgccgggacaggggcgtcagggcctaggagtggggagtggggaatgggcgcccggctccccttcccccgggtctctcgcagacggcccccagattccggtaagagttgaatttatttatccccctcctccgcgctccggacggccaggccggggcggggcggggcgggcggcctggcgggcgtggggtcgggtggaggggcggtgaggagtcaggtgcagccgcggcccagaaagtttccttttaggcccgaactgggggccgctgtctctccggggagccctggtcctagcgcccgggaccccccagggcgtgggggagcgcactcggctattttgaaactctttgccagttcctgtccattgaagaaggtactccgcccctgcacccctcgcccgcgccccacccaactccccgcgagcccattcggggctgctaactccagccccttccccctagagccccccaggttggggagagggccttctcttccggtttggaaaagtttgcaaggggcttttcttagctttattagttagtgactgggtttttggggtgggaaggaggaggtaaactcaggtggtgtttctgccggacaatctttccctattgccttttttagcccttaccccaccaactgggggtgttattttcagcttgagtacccaccccctttcatcccgattcctttgggtccaaaatcccccttctggacagctccggcggagaggaagatgtagggagcagcgaggagactgtcagtgagaggggcaggatcaggcagggtttctggagcagtccccagatgtaggagtttcccctcctttttggtcactgtccggtaaaaccaacaccggaacagatcccaagggggagacgtggttgtcagatggcttggaagcctccgggattgggaggagggagaggaagtgggcagggcagctcccgaaacaaggtctacagtttaaggatcagtagttcatttattctgataatcactgtttagttttatgtgacattcttgtattcgacctagaaatagagtaatggagatt

SEQ ID NO: 5610 - DNA, 879 bp, Artificial sequence
  DNA replication origin
gaccccgtctgggaggtgaggagcgtctctgcccggccgccccgtctgagaagtgaggagaccctcctcctggcaaccgccctgtctgagaagtgaggagcccctccgcctggctgccaccctgtctgggaagtgaggagcgtctccgcccggcagccaccccgtccgggagggaggtgggggtcagccccccgcccggccagccgccccatccgggaggtgaggggcacctctgcccggccgcccctactgggaagtgaggagcccctctgcccagccaggagcccctctgcccagccagccgccccgtccgggagggaggtgggggggtcagccccccgcctggccagccacccggtctgggagctgaggggcgcctctgcccggccacccctactgggaagtgaggagcccctctgcccggccaccaccccgtctgggaggtgtacccaacagctcattgagaatgggccatgatgacgacggcggttttctggaatagaaaagggggcaaggtggggaaaagattgagaaatcggatggttgccgtgtctgtgtagaaagaagtagacatgggagacttttcattttgttctgtactaagaaaaattcttctgccttgggatcctgttgatctatgaccttacccccaaccctgtgctctctgaaacatgtgctgtgtccactcagggttaaatggattaagggcggtgcaagatgtgctttgttaaacagatgcttgaaggcagcatgctcattaagagtcatcaccattccctaatctcaagtacccagggacacacacactctgcctaggaaaaccagagacctttgttcacttgtttgtctgctgaccttccctccactagtgtcctatga

SEQ ID NO: 5611 - DNA, 1268 bp, Artificial sequence
  DNA replication origin
acaggatcccaaggcagaagaatttttcttagtacagaacaaaatgaaaagtctcccatgtctacttctttctacacagacacggcaaccatccgatttctcaatcttttccccaccttgcccccttttctattccagaaaaccgccgtcgtcatcatggcccattctcaatgagctgttgggtacacctcccagacggggtggtggccgggcagaggggctcctcacttcccagtaggggtggccgggcagaggcgcccctcagctcccagaccgggtggctggccaggcggggggctgacccccccacctccctcccggacggggcggctggctgggcagaggggctcctggctgggcagaggggctcctcacttcccagtaggggcggccgggcagaggtgcccctcacctcccggatggggcggctggccgggcggggggctgacccccacctccctcccggacggggtggctgccgggcggagacgctcctcacttcccagacagggtggcagccaggcggaggggctcctcacttctcagacagggcggttgccaggaggagggtctcctcacttctcagacggggcggccgggcagagacgctcctcacctcccagacggggtcgcggccgggccgaggcgctcctcacatcccagacggggcggcagggcagaggcgctccccacatctcagaggatgggctgcggggcagagacgctcctcacttcctagatgggatggcggccgggacgaggcgctcctcacttcccaggtgggatggcggccgggcagagacgctcctcactttccagactggcagccaggcagaggggctcctcacatcccagacgatgggcagccaggcagagaggctcctcacttcccagacggggtggcggccgggcagaggctgcaatctccgcactttgcagggccaaggcaggcggctgggaggtggaggccgtagcgagccgagatcacgccactgcactccagcctgggcaccattgagcactgagtgaatgagactccgtctgcaatcccggcacctcgggaggccgaggctggcggatcactcgcggctaggagctggagaccagtccggccaacacagcgaaaccccgtccccaccaaaaaaacacgaaaaccagtcaggcgtggcggcgcgcgcctgcaatcgcaggcactcggcaggctgaggcaggagaatcaggcagggaggctgcagcgagccgagatggcagcagtacagtccagcttt

SEQ ID NO: 5612 - DNA, 925 bp, Artificial sequence
  DNA replication origin
cccggcccggccagccgccccgtcctggagggaggtgggggagtcagcccccggcccggccagccgccccgtccgggagggaggtggggggtcagccccccacccagccagccaccccgtccgggaggtgacgggcacctctgccccgccgcccctactgggaagtgaggagcccctctgcccggccagccgccccgtccgggagggaggtgggggagtcagccccccgcccggccagccgccccgtccgggagggaggtggggggggtcagccccccgcctggccagccgccccgtccgggagggaggtgggggggtcagccccccacccggcgagacgccccgtccgggagggaggtggggggtcagccccctgcccggccagccgccccgtccgggaggtgaggggcgcctctgcccggccgcccctactgggaagtgaggagcccctctgcccggccaccaccccgtctgggaggtgtacccaacagctcattgagaacgggccatgatgacaatggcggttttgtggaatagaaaagggggaaaggtggggaaaagattgagaaatcggatggttgccgtgtctgtgtagaaagaagtagacatgggagacttttcattttgttctgtactaagaaaaattcttctgccttgggatcctgttgatctatgaccttacccccaaccctgtgctctctgaaacatgtgctgtgtccactcagggttaaatggattaagggcggtgcaagatgtgctttgttaaacagatgcttgaaggcagcatgctcattaagagtcatcaccattccctaatctcaagtacccagggacacacacactctgcctaggaaaaccagagacctttgttcacttgtttatctgctgaccttccctccactattgtcctatgaccctgccaaat

SEQ ID NO: 5613 - DNA, 1523 bp, Artificial sequence
  DNA replication origin
ccgggccgggggctgacccccccacctccctcccggacggggcggctggccgggcagaggggctcctcacttcccagtaggggcggccgggcagaggcgcccctcacctcctggacggggcggctggccgggcagggggctgaccccccacctccctcccggacggggcgtctcgccgggcggggggctgacccccccacctccctcccggacggggcggctggccgggcagaggggctcctcacttcccagtaggggcggcggggcagaggtgcccctcacctcccggacggggtggctggctgggtggggggctgaccccccacctccctcccggacggggcggctggccgggccgggggctgactcccccacctccctcccggacggggcggccggccgggctgaggggctcctcacttcccagtaggggcggcggggcagaggcgcccctcacctcccggacggggtggctgccgggcagagacgctcctcagttcccagacagggtggcagccgggcggaggggctcctcacttctcagatggggtggttgccaggccgagggtctcctcacttctcagacgggcggccgggcagagacgctcctcacctcccagatggggcggcggggcagaggtgctccccacatctcagacgatgggcggcagggcagagacgctcctcacttcctaggtgggatggcggccgggcagagacgctcctcactttccagactgggcagccaggcagaggggctcctcacatcccagacgatgggcggccagacagagacgcacctcacttcccagacggggtggcggccgggcagaggctgcaatctcggcactttggggggccaaggcaggcggctgggaggtggaggttgtagccgagatcacgccactgcactccagcctgggcaccattgagcactgagttaacgagactccgtctgcaatcccggcacctcgggaggccgaggctggcggatcacccgtggttaggagctggagaccagcccggccaacacagtgaaaccccgtctccaccaaaaaaatacgaaaacccgtcaggcgtggcggcgcgcgcctgcaatggcaggcacttggcaggctgaggcaggagaatcaggcagggaggttgcagtgagccgagatggcagcaggacagttcagagggagactgggagagggagagggagagggagctaatttttgtatttttagtagtgacaggattttgccatgttggtcaggctggtctcgaactcctgacctcaagtgatccacctgccttggcctctcaaagtgctgggattacaggcgtgaactaccgcacccggcctctcatggggaatttaaaaggttcagtggctttcccaaagtcacaaagcttggtgactttggtgaccatggtgaagcatggacttgggaacctgggcagtgtggctccggaatccatttcactgccaagccatataaccacttctcagctgtcacgagcacaactttttaaggtcc

SEQ ID NO: 5614 - DNA, 939 bp, Artificial sequence
  DNA replication origin
gaggggcgcctctgcccggccgcccctactgggaagtgaggagcccctctgcccggccagccgccccgtccgggagggaggtgggggggtcagccccccacctggccagccgccccgtctgggagggaggtgggggggtcagcctccgcccggccagccgccccgtctgggaggtgaggggcgcctctgcccggccgcccctactgggaagtgaggagcccctctgcccggccagccgccccatccgggagggaggtgggggggtcagccccccgcccggccagccgccccgtccgggagggaggtggggggggtcagcccccccgcccggccagccgccccgtccgggagggaggtggggggggtcagccccccgcccggacagccgcctcgtccgggaggtgaggggcgcctctgcccggccgcccctactgggaagtgaggagcccctctgcccggccaccaccccgtctgggaagtgtgcccaacagctcattgagaacgggccaggatgacaatggctgctttgtggaatagaaaggcgggaaaggtggggaaaagattgagaaatcggatggttgccgtgtctgtgtagaaagaagtagacatgggagacttttcattttgttctgcactaagaaaaattcttctgccttgggatcctgttgatctgtgaccttacccccaaccctgtgctctctgaaacatgtgctgtgtccactcagggttaaatggattaagggcggtgcaagatgtgctttgttaaacagatgcttgaaggcagcatgctccttaagagtcatcaccaatccctaatctcaagtaatcagggacacaaacactgtggaaggccgcagggtcctctgcctaggaaaaccagagacctttgttcacttgtttatctgctgaccttccctccactattgtcccatgaccctg

SEQ ID NO: 5615 - DNA, 1055 bp, Artificial sequence
  DNA replication origin
gggcggctggccgggcagaggggctcctcacttcccagtaggggcggccgggcagaggcgcccctcacctcccagacggggcggctggccgggcggaggctgacccccccacctcccttccagacggggcggctggccgggtcggggggctgacccccccatctccctcccggacggggtggctggccgggctgaggggctcctcacttcccagtaggggcggccgggcagaggcgcccctcacctcccggacggggcggctggccgggcggggggctgacccccccacctccctcccggatggcacggctggccaggcggggggctgaaccccccacctccctcccggatggcatggctggccgggcgggggggctgaccccccacctccctcccggatggggcggctggccgggcggggggctgacccgccccacctccctcccggacggggtggctgccgggcggagatgctcctcacttcccagatggggtggctgccgggcggagaggctcctcacttctcagacggggcagctgccgggtggaggggctcctcacttctcagacggggtggttgccaggcagagggtctcctcacttctcagatggggcggccgggcagagacgctcctcacctcccagacggggtctcggccgggcagaggcgctcctcacgtcccagagggggcggcggggcagaggcgctccccacatctcagacgatgggcggccgggcagagacactcctcacttcctagatgtctgttctgtcagtcttaaggtctctgtgttgatgttaatgctggtcagctatgcctgaattccaaaagagaggagagtataatgaggcatgtctgacccccacttcccattatggcctgaactggttttttaggttaactttggaatgaccttagctgagaggaggggtccatttagatggtttgggggcttagaattttattttagatttacagaagccagaaagtgggagagagaaacagagagagccatctgtggctgctatttagagggtcctgtggcctggggtt

SEQ ID NO: 5616 - DNA, 1076 bp, Artificial sequence
  DNA replication origin
atgctgtgctgctgctgttgcctggcccggaacgcactgcgcatgctttgttggggggcggggaagggggtaaagcagcagagtgatgcagcagcccaagcagcatcggaggtgacgggtggtacctcaaaagatgggggcggtggagggggagccggcagtcacggataagccagaagaaagagagtacgggggtttccaggccagagacagggatgatcgggagaaaacaaccagccgaagtccacctgccttttccaccaccccagacttcacataccctctcctattccaacctcttcctgctctggataaactaaggccacgcatctccttcttaatcccttatatatttgcttcctgcatgtaaatataaaggattgcagccggggaggtaaaaatagcgcggctcctcattcagattgccagcagcgggtgggactgcggctgagaagagcgtttgcgccgcaggctggcgcggagtggcaggaatcccccgcgcaggggcgctctgccccggcctgtgtcctccctgccggtgcctggggtctttgaggaaagcacaagaagccggacggtgtttgctcaaaagttcagaaagtatgactgggcatattcgggaaggacttcgacattctggcggggaagcaatacagagattagaaaccaagtgtgtggcagctatcttgggaaatccgttgtttgtcaaccacggggatgggcacacatttaggaggacacatttctatttttgagatccagtcctgacttctgcagaggaaaggggaagttttctctcgttgctgtaaaaaatgtaaatccctgacttcggtgggttcgcagccactaaatctgatggcttcagataagagtctgtggcatatttctgcccccaaactctcataatgcaagcattcatttattcaccctcccaatgacaatctgagtgataacaatgttgtcttactccgacatccacggggtgagggctggggtggagaattccatgattaaaagaaagaatgtgggtataaaagtgccatggccatgacagaactcagtgttagccatcatct

SEQ ID NO: 5617 - DNA, 956 bp, Artificial sequence
  DNA replication origin
cagcccgccaggggcggctgccgcgagctgctgccgggcggcttcatggctcatagctcccgggcgccgctccgtgtggccggcgagagcgccgggctagctgcggggcggccgcgggcggagccggtcacgccggctcggcgcgcatggtgccgcggcgggcagggggctccgggctcggggcacggggcgcggggctcggggctgggcggcgccccctttcccggctcgcctagcctcgcagccactcccggggcgggacgcagaggagtccaggggtcctcgccgctccgccaacttggagcctccccagcggctactccctcccccggcgggcgcggccgcttcagcgactgcgggggctgccgccgggcctgaggatgctgaggcggcgcgcgggagcgagcggcgcggggacgcgcgggagcgagcggcgcggggacgcgcggagcgggcgtgcgccccgccccccgagagcgcgcccgagcggggcttcgggtgctgatgctgttgctggatgctgtgctgctgctgttgcctggcccggaacgcactgcgcatgctttgttggggggcggggaagggggtaaagcagcagagtgatgcagcagcccaagcagcatcggaggtgacgggtggtacctcaaaagatgggggcggtggagggggagccggcagtcacggataagccagaagaaagagagtacgggggtttccaggccagagacagggatgatcgggagaaaacaaccagccgaagtccacctgccttttccaccaccccagacttcacataccctctcctattccaacctcttcctgctctggataaactaaggccacgcatctccttcttaatcccttatatatttgcttcctgcatgtaaatataaaggattgcagccggggaggtaaaaatagcgcggctcctcattcagattgccagcagcgggtgg

SEQ ID NO: 5618 - DNA, 1194 bp, Artificial sequence
  DNA replication origin
ttttatttaatgttggaagcagattgggtaatagaatgtatattgagaataagacggccttttgaccttttagggtctagggctgtaaagtgtctcagggttgctgccaaacgagccatgaactgggctgggtttttatatttgatgaaaaagggcctaaacgcttctgatttgggataaagaaaaaggagcattaaccttgactatgcctttagctccagccacctttttaagagtaaattgctgggcaggtgggggagggctagtcacagaacgaaactgtaagccggaccaggtgtgaggaggggaggcgataaaaagattacagggtggaggagcggaggctgaggaagaatggggacctagcttgggctagcgaggaggggagaggtcagatgggtctgtagaaaaggaagattagaaagactcagcgacgcttggggttgggactgaggggacaggcgggagggaaagaaggaagatttgggacaagttgcactgggcacagagactaggaagggactgatgtgtaaaagaatgcctggacgtcaggcacctcagaccgtttgcctattttacgacaagaattatttagattgtgcaggatggaaaaattcaaagtgccattttctggctatttggaactactgttgagtttgtattggggtcaagcggcattgcagaagaaaataaggcatttaggttttaggtcaggtgtgagttgaagaggttttaagtttttgagaacacaggccaagggagtagaaggaggaatggagggtggaaggttgcccatagtgaaggaagcaagcctagagaaaagagagagtagagaaacggagggaaggggttcaggagttcttaccttccagaaaagtgggaaaaggggttggggtgcagagataagaggttggggcacagaaataagggattggggcacagagataagaggttggggtgtggaaataagggattggggtgcagagataagaggttggggtatggaaataagggattggggcacagaggtaagaggttggggtgtggaaataagggattgggggttcttgccctgtagaaaagcgggacttgccgctaagggtgaaggagaaggggttgaggggtacttgcccctctcccagaaaagcagagaaggggtagagacaaggagagaaggggttgaggtacttgccc

SEQ ID NO: 5619 - DNA, 842 bp, Artificial sequence
  DNA replication origin
aacggagggagggagtttggggagggggaagagcaggaggaggagaaaagggagggggaagactacaaactagcaaggatggggtggggggtggggagggaagggaaggggggggaagagaagcgatcgcgagagaaaaaaatgcaacctcccaaaataaagagcaaagattgcattaggagcgaacagcgctgcagaaatagatggcagcttcgtgtcagtgagtttgcatcccccttcctgatccacgagctggagtgattagagccctggaagggaattgttactcccgtggagaagtccccttttcctggcagtcgtctgcactgtacacgctggatgcctctctccatccaccccactcactcgctcctctctcacctcctctctccctctcctgcattgatttttttttttcctttttagttgactgaaacaaaacaaaacaaaagggccactggatgtctgccttcttggggggtgagccagacagactgacaaacaaacagccccaactgtgttcgggggagggtttcgcctcccgttttgcccggcagcagcagcatggacgtgttggctagttatagtatattccaggagctacaacttgtccacgacaccggctacttctcagctttaccatccctggaggagacctggcagcaggtgaatgatttaaattacttgtgtaaatcgtgtggtggcggcggagacgcaggggctgcgttggtgtgggctctgggttgaaatttttgtttgtttgtttgacttttttttcttcctttttggctgtctgttgttgaaaatgttttctgaaacagtcatctgcgcttacctctcca

SEQ ID NO: 5620 - DNA, 1260 bp, Artificial sequence
  DNA replication origin
tccactagatgcctggcagagcccggcgcgtccggagcccgcgcccctcagagggaaggggtcgcgcgtcgccgcggcggccctgaggctgacggtcgggaggtgaaaggccggagtgcggggtcaggacgcctcctggagggggcgcggcgcagggggccgcggggaagccgccgagggcgcggagcgggaaggaaggacagtggccaccccgcctccgcctgggcacggggcagggacccgcgcgaggcggtgccggggaggtcctcacgtactcaaaaacaagcagaaaaggcatccagggccccttcccgaactccccacgggctgccagggtgcagagaagaagcgcctgaggaggaagtgccacacaatgggagagaacaaaggggagcggagcgagaccgcggcctgcgcccgccccccgcttgcgcacagtccccgccccgccccgcgggcgccgccgccgccgccctccctcccgcgcctccttctgaccccgagcgagagacctggtcgggagtccggcggctagagttgattgcaaggggcctgttgctcgactgtgcgttaaagaggctagagggagcctaggtagacgtggggcgcaagctggagccggcagcttgcgagggggcctttacgtgatgaggctcaccatggggtctccagcgaggtgtctgcagagcttcgatggtgagaggaggaactcgatttctcgttttctggagttgggatgtagacatagagagatctgttacatctgagatgaaaaccctgcacaattcacgttagggttggccaattgtttgcttgaccttaaatggttagtgtggtttaagcttccccaaaatgcgctgtgagctgagcttccacttttggaatgattgcagaattcggtgcttaagagatgagaaacttcgttctaccagtaatggaagaaacgcttcaccttaatcaccctccttgtctttcccctccctttgactatgtaggactcgataacacaacatttgaaagattctactctatgaaataagcacagattgaaattcagtatttgccaaggaatattaaacatgaattactgggattgaggaaagcctgatttatttacttgttagtgtctggaattctgttggccagattcatagcattcattgtatgagtataattggaacatttactctaatgtagatgcagatgcatctgcaattagatgtgcaaggacgctgccagctaactagctgcacgactttg

SEQ ID NO: 5621 - DNA, 819 bp, Artificial sequence
  DNA replication origin
gtggagagaagagtaggtcagacgttgcagctcttccccttgcgaagcgggcatggcaggcaccgaagccaccgggaaggcagcaggcaccttcacctcctctgccctcaactgtcgccttcttcctcctccatcccccaccggcacctaggcggcggctgccccggaggcccggccgggtcgggccgggggcgaggcgggcggcgggggccggacgagcgagcggcgcggggggcagcgccgggccgagcgggcggcctcccccggggcggctccgggttcccggctccgcgcccggcccggcggcggcggcgggaacgcgggcgccagctcgccgcggccggccgcccgcacacacccccggccgccggctcccaccccgcccgccgcccgccgcccgccgccccccgccatgagcgccgccgctggctgcaggcagagtcgctgccgccccggccgccgctggctccagtccgccgccattattctttgttcgctgcgagcggcggcgatgttgtggggctcgggcggaggctccatctttaccgcggcccctcctgcgaggggaaggccccaagcgcgggtgtccggcgcctccccgtcccccctccgtccccccggctctctctggctcctgcctcctcctcctgctcctcttaccggtggtacaagctcctccgtcactgctttcgttcacggcccggatctcgctggagttttattctctcccccacgtaacacaccgcgtcaaactacacctccgccgcgtcactcaccaacactccgcttctcccagccgcccgggccacaggcagcagc

SEQ ID NO: 5622 - DNA, 1115 bp, Artificial sequence
  DNA replication origin
gaggcaggagccagagagagccggggggacggaggggggacggggaggcgccggacacccgcgcttggggccttcccctcgcaggaggggccgcggtaaagatggagcctccgcccgagccccacaacatcgccgccgctcgcagcgaacaaagaataatggcggcggactggagccagcggcggccggggcggcagcgactctgcctgcagccagcggcggcgctcatggcggggggcggcgggcggcgggcggcgggcggggtgggagccggcggccgggggtgtgtgcgggcggccggccgcggcgagctggcgcccgcgttcccgccgccgccgccgggccgggcgcggagccgggaacccggagccgccccgggggaggccgcccgctcggcccggcgctgccccccgcgccgctcgctcgtccggcccccgccgcccgcctcgcccccggcccgacccggccgggcctccggggcagccgccgcctaggtgccggtgggggatggaggaggaagaaggcgacagttgagggcagaggaggtgaaggtgcctgctgccttcccggtggcttcggtgcctgccatgcccgcttcgcaaggggaagagctgcaacgtctgacctactcttctctccactctttgtgcaataaagttcgaaacccaaggtttcctctcgtgctgtattttattcgtgccctttcccccccgctcctacaccgttgaggaaatgctgctttctgccctgtgttgcttagttgagagatgagagcttgtgcttttggggggaatttttgactccctcacccctttgctttttttttttttttaaagtcagtcatggaaatgcatgctttttgggagaaagggtgctaagaaaaacatttataataactttttaaactgttgggatcttataaaagggaagctggtgtttgaaaacagtttcggttttaaccctttttaataaggtaatcatcacttgagatctatcattctgaaacacttcgttggaacgagtatcagccgatgtactcttgttttacatcatttcgcggggtgcaaccttgccaaccgcgtttgggtcatctggatctcccctcaccctccgtc

SEQ ID NO: 5623 - DNA, 1309 bp, Artificial sequence
  DNA replication origin
ccacctccctcccggaccgggcggctggccgacccccccccccccccccgcctccctcccggacggggcggctggccgggcagaggggctcctcactttccagtaggggcggccgggcagaggcgcccctcacctcccggacggggcgactggccaggcggggggctgacccccccacctccctcccggatggggcagctggccaggtgggaggatgacccccccacctccctcccgggcggggcggctggccgggcagaggggctcctcacttcccagtaggggcggccgggcagaggcgcccctcacctcccggatggggcggctggccaggcggggggctgatccccccacctccctcccggacggggcggctggccaggcagaggggctcctcacttcccagtaggggcggccgggcagaggagcccctcacctcccggacggggcggctggccgggcggggggctgaccccccccacctccctcccggacggggtggctgctgggcggagacgctcctcacttcccagacggggtggttgccggacggaggggctcctcacttctcagacggggcggttgccaggcagagggtttcctcacttctcagacggagcggccgggcagagacgctccccacctcccagacagggctgcggcccagcagaggcgctcctcacatcccagacagggcggcggggcagaggtgctccccacatctcagacgatgggcggccgggcagagacgctcctcacttcctagatgggatggcggcggggaagaggcgctcctcgcttcccagatgggatggcggccgggcagagacgctcctcactttccagactgggcagccaggcagaggggctcctcacatcccagacgatgggtggccaagcagagacgctcctcacttcccagacggggtggcggccaggcagaggctgcaatctcggctctccgggaggccaaggcaggcggctgggaggtggttgcagcgagccgagatcacgccactgcactccagcctgggcaccattgagcactgagtgaacgagactccatctgcaatcccggcacctcgggaggccgaggctggcggatcactcgcggctaggagctggagaccagcccggccaacacagcgaaaccccgtctccaccaaaaaaaaccgaaaaccagtcaggcgtggcggtgcgcgcctgcaatcgcaggcactcggcaggctgaggcaggagaatcaggcagggaggttgcagtgagccgagatggcagcagtaccgtccagccttggctcggcatcagagg

SEQ ID NO: 5624 - DNA, 958 bp, Artificial sequence
  DNA replication origin
tccgggaggtgaggggcgcctctgcccggccgcccctactggaaagtgaggagcccctctgcccggccagccgccccgtccgggagggaggcgggggggggggggggggtcggccagccgcccggtccgggagggaggtggggggggtcagccccccttccggccggccgccccgtccgggaggtgaggggcgcctctgcccggccgcccctactgggaagtgaggacccctctgcccggccagccgccccgtccgggagggaggtgggggggacagccccccgcccagccagccgccctatccaggaggtgaggggcgcgtctgcccggccgtccctactgggaagtgaggagcccctctgcctggccagccgccccgtccgggagggtggtgggggggtcagccccccgcccggccagccgccccatccgggaggtgaggggcgcttctgcccggccgcccctactgggaagtgaggagcccctctgcccggccacgaccccgtctgggaggtgtgcccagcggctcattggggatgggccacgatgacaatggcggttttgtggaatagaaaggcgggaagggtggggaaaaaattgagaaatcggatggttgccgggtctgtgtggatagaagtagacatgggagacttttcattttgttctgtactaagaaaaattcttctgccttgggatcctgttgatctgtgaccttatccccaaccctgtgctctctgaaacatgtgctgtgtccactcagggttaaatggattaagggcggtgcaagatgtgctttgttaaacagatgcttgaaggcagcatgctcgttaagagtcatcaccactccctaatcttaagtacccagggacacaaacactgcggaaggccaaggccgcagggtcctctgcctaggaaaaccagagacctttgttcacttgtttatctgctgaccttccct

SEQ ID NO: 5625 - DNA, 898 bp, Artificial sequence
  DNA replication origin
tctcccgggacgaccagtgcgcccttcctgcccgggggccccggagctgcggcaaccctccaggggtgagagggagaccaggcgaggggggtcacagggcctcttaggatccccaggccatacggggcgccgtgagctgcccggcggagcacccagggctcgcccaggccgggctgaggcgccgccacgccggtacttacggcccgggaggcggtcccgcgtggagcgcgcgctccgctttccccgccccgggctggctgcgaaaaccgccggccttaaagagcccgcgacgcgggggcgggcggccccggcccggagccacgcatttccggtctcccggcacccagcctccggcaggtgcccccggagctcacggcgagggcggggccgggccgtggcgcggtggaggagtgacgttgcgggaggggggaccggggctttccctcgtgcgtccccagggtacacggacgacttaatccgtttcccccgccgccgagggaggcgctgtgggggcgggagcaagagtgagatcggggtgccgaactgccgcgggtgcacagggagagcatggggtgccctgggctctcctagcgggagagaaaagccacccacctggcgctgaatgtgcctctcgaccttttctatcatgtgctccgccgctctctgcctctgactttgtcgcttgcgcgttgtgcctgttttttaaaggtggcgcgttagcggatgatggagacagctcgctccgaagaaggcatggtcactctagtccccgcgtctccacggtggggtcagaagcggcgtaatagcccgcttggcggcaatcgagtggaaaagtcacaaaacccttttcaactaaagcacagtgggggaagtgaacacgtggcgcccgagtccaagt

SEQ ID NO: 5626 - DNA, 890 bp, Artificial sequence
  DNA replication origin
acaggcgtgagccaccgcacccaggcttgaattcttaaattctatttccttcatactatttcatctaattcctttcctcacttgtatttatcttatgattaagttatcctatctggtcctagggaaccttaacattctttagggcggccgcgggggacaaagggcgggcggatccgcggggagggggcggggcgcggccaggccaggcccggggtctccgcatgctgcagctgctcccgggtgcccccgccgccgccctcgccgcggagccgcgcggagcggagccggcgagctaacccgagccagccggcgggcgtcccggaggcggcggcgcagggaggagcccgacgcgctcacgtggccccgacggccgccatggcggacagctgcaccgcgaggggcgtggcgttggctgccccggaccccgggcagggcagtggcggcccaggacaacgcgtctactttcagagcccccctgggccgcaggagagggcccgggcggcgcggacgatgagggcccagtgaggcgccaagtgaaggtcaccgtcaagtatgaccgcaaggagctacggaagcgccttaacctagaggagtggatcctggagcagctcacgcgcctctacgactgccaggaagaggagatcccagaactggaaattgacgtggatgagctcctggacatggagagtgacgatgcccgtactgccagggtcaaggagctgctggttgacttgttacaaacccacagagaccttcatctctggcctgctggacaagatccggggcatgcagaagctgagcacaccccagaagaagtgagggtccccgacccaggcgaacggtggctcccacaggacaattgctgcccctcgacctcgtagcaacagcaa

SEQ ID NO: 5627 - DNA, 934 bp, Artificial sequence
  DNA replication origin
atgttttatttttttgaaacggagcctaggtcgcccaggctggagtgcaatggcgcgatctcggcttacggcaacctctgcctcccgggttcaagtgattctcctgcctcagcctcccgagtagctgggaatacgggcgcgtgccaccatgcccggctaattttttgtatttttagtagagacgggatttcaccgtgttagccaggatggtctggatctcctgacctggtgatccgcccgcctcggcctcccaaagtgttgggattacaggcatgagccaccgcgcccggccgggattgtttttaagggttaaataaatataccacagttggaacactgtctggcacatagtgcttgccaaatggtaactattcatcttcatggaatcaagactgtggtgccccactgcatggttctcagttttgcgtgagaaaatcgtgctttctgtgctgtttttagtacaagaagagaaacctggaagtccctgcctagaggagagaaacaggcaagaaaagggagttggcgagtcccagcatttcagagttggcagggacgagttaggtccctattttatggatgaggaagtggaagggtgacgtgtcctcgagtctcattcaagacccacagccacaactctttatggagagtaggaccagggccccagggttgctatgatcacgttgcaggtgaaaactaacgctcattggaagacaggagcggagcactgagttacaaaaacagttaacaatttgggtgtaaccaagtttagtgagcaaacgaaagctgtcagactcggaagaagagttgctaatggagcgaactctttactaataacggctttctacagagatcattgacacagcttccagttacaaatgcccgtgcgcttccagtaggaccggaaagctcccagcagccagcgatgaatgaaaac

SEQ ID NO: 5628 - DNA, 1357 bp, Artificial sequence
  DNA replication origin
ccgcatccgcagcgtcatcaagcagggcggcaccaagacggacaagctggagaagctcatgatccgcatcggcatcttcacgctgctctacacggtccccgccagcattgtggtggcctgctacctgtacgagcagcactaccgcgagagctgggaggcggcgctcacctgcgcctgcccgggccacgacaccggccagccgcgcgccaagcccgagtactgggtgctcatgctcaagtacttcatgtgcctggtggtgggcatcacgtcgggcgtctggatctggtcgggcaagacggtggagtcgtggcggcgtttcaccagccgctgctgctgccgcccgcggcgcggccacaagagcgggggcgccatggccgcaggggactaccccgaggcgagcgccgcgctcacaggcaggaccgggccgccgggccccgccgccacctaccacaagcaggtgtccctgtcgcacgtgtaggaggctgccgccgagggactcggccggagagctgaggggaggggggcgttttgtttggtagttttgccaaggtcacttccgtttaccttcatggtgctgttgccccctcccgcggcgacttggagagagggaagaggggcgttttcgaggaagaacctgtcccaggtcttctccaaggggcccagctcacgtgtattctattttgcgtttcttactgccttctttatgggaaccctctttttaatttatatgtatttttcttaatttgtaactttgttgcattttggcaacaatttacctttgctttgggggctttacaatcctaaggttggcgttgtaatgaagttccacttggttcaggtttctttgaactgtgtggtctcaattgggaaaatatatttcctatacgtgtgtctttaaaaaaaaatgtgaacagtgaacgtttcggttgctgtgactgggaagttgttgggtgtgctttttcagccagcttctccttccactgcttaaagtgtccatgattctttaaggtgagctgcagtttatagccccaggtcatacctaggaggggagcataatgagctcagggcctccccaaagtgacaaggttagggagtgcttagcggttttgtgttcagccttagctttgtttatagagggaggttcagtttcttttctgtagtgcttgtaataattctcactcctaacagcaccatcgttgtgtcttgaataagttagaggtagcattatagaggatctggcataaatatttgcagtagtgagagcctaagcgatggtgattggtggagcttgaattttaggctggtgagatggcagctttgtgcctgagaggtagtgggtggttcttaagcttcagtg

SEQ ID NO: 5629 - DNA, 1343 bp, Artificial sequence
  DNA replication origin
acgcccctcttccctctctccaagtcgccgcgggagggggcaacagcaccatgaaggtaaacggaagtgaccttggcaaaactaccaaacaaaacgcccccctcccctcagctctccggccgagtccctcggcggcagcctcctacacgtgcgacagggacacctgcttgtggtaggtggcggcggggcccggcggcccggtcctgcctgtgagcgcggcgctcgcctcggggtagtcccctgcggccatggcgcccccgctcttgtggccgcgccgcgggcggcagcagcagcggctggtgaaacgccgccacgactccaccgtcttgcccgaccagatccagacgcccgacgtgatgcccaccaccaggcacatgaagtacttgagcatgagcacccagtactcgggcttggcgcgcggctggccggtgtcgtggcccgggcaggcgcaggtgagcgccgcctcccagctctcgcggtagtgctgctcgtacaggtagcaggccaccacaatgctggcggggaccgtgtagagcagcgtgaagatgccgatgcggatcatgagcttctccagcttgtccgtcttggtgccgccctgcttgatgacgctgcggatgcggaagagcgacacgaagcccgccagcaggaagagcgtgcccaccagcaggtagagcaccagcgggcccagcacgaagccgcgcagcgagttcaggttctggttgcccacgtagcagatgccggccactgggtccccgtccacggagctcagcgccagtgccgtgatggacttgacgctggggatgagccacgcagccaggtggaagtactgcgcgtagcccgcgatggcctcgttgccccacttcatgccggcggccaggaaccaggtgagcgacaggatgacccaccagatggagctggccatgccgaagaagtagaccaggaggaagacgatggtgcacagtgcagggcccgtggtctcgtagtggatgtggttgtgctcgcggctgcaggccacgctggcatggcccacgaccagacgcaccaggaagcccagcgacacgcacaggtagcaggctgacaggaagatgatggggcgctcaggatagcggaagcgttccatgtcgatgaggaaggtggccactgtggtggacgtggagatgaagcacagcaccgaccacaggcctatccagaaggtggcgaacgtgcgctcgtcggcactgaaggacggctggtagcagggtaccgcgcagttgggcacctggcccgtccgcaccttgttgtagagcgggtgtgactccttcagaatgggcacgaagggctcgcgacacttgcacacgaacggg

SEQ ID NO: 5630 - DNA, 1175 bp, Artificial sequence
  DNA replication origin
gcccaccaaccgcgcccgggcctgagggggcggagccggggcggggcttcccggcgggcattagaagcaggtgacccgggcggggcgggagagggcagccagcctgcggccgtgagtccgctgtggtcgccgccgcgcgcggttccgtgctcgccagaggtgggcgaaagggtgcgagagcgcgggggaggagccgagcagggcacgtcccgagagcgtcgccaccgcccccaggagtccactggagcgcggagccccctgcaggggaggaggcgagcggcgggcgggacgcggcggccggcgctcaccatgcagtcccggcctggccagcgccggctgctcgcggtgctgtgaggcggcggggtcccacggcccccgcctcccgccttcctcccgcccaggtgctgccaggcgcgctcgccctccgtccggctcccggccccggggagaacgcacggcctgcccctgcccggctccgtctggatcatgcggggggctcccgaggaggagagggcgagtgaccggcctgcgccgcccctgttctgggggcgccccccactctgagtcgcccccacctgctgccatgtgccgctgccacgggtacccagcctgtcgctaaactttccgggcgccagcccggctctgagtcgcgcttctcagcggagtgacccagggacggaggacccaggctggctggggactgtctgctcttctcggcgggatccgtggaggtgagaaccttccctttctccctgttcttctcccgtttcctgtgcccttttccgggaagctgagggttctggtctccgggcactgcctgaagggcccagcttggaaagagagggtgggggagtcggtagtttggttacaggaggcggagcggggaggaaaggaaaggggttaacttaagagatttggagacagctcgcggggaccgaactgttgacgcctctccaacagggagtggttgcaatctttcttctcccccttcttttttaaagagtcctttccctggaatccgagccctaaccgtctctccccagccctatccggcgaggagcggagcgctgccagcggaggcagcgccttcccgaagcagtttatctttggacggttttctttaaaggaaaaagcaaccaacaggttgccagccccggcgccacacacgagacgcc

SEQ ID NO: 5631 - DNA, 825 bp, Artificial sequence
  DNA replication origin
cccgccgccccgtctgggatgtgaggagcgcctctgcccagccgcgaccccgtctgggaggtgaggagcgtctctgcccggccaccccgtctgagaagtgaggagcccctccgcccggcagctgccccgtctgagaagtgaggagcccctctgcccagcagccaccctgtcccggaggcaggtggggggtcagcccccgcccggccagccgccccgtcccagaggcaggtggggggtcagcccccgcccggccagccgccccgtctgggagggaggtgggggcccgcctccacccagccgccgccccatccgggaggtggggggcacctctgcccggccgccccttctgggaagtgaggagcccctctgcccggccaccaccccgtctgggaggtgtacccaacagctcattgagaacgggccatgatgacgatggcggtttttgtggaataggaaagggggaaaggtggggaaaggatagagaaatcagattgttgctgtgtctgtgtagaaagaagtagacatgggagacttcattttgttctgtactaagaaaaattcctgtgccttgggatgctgttgatctatgaccttacccccaaccctgtgctctctgaaacatgtgctgtgtccactcagggttaaatggattaagggccatgcaagatgtgctttgttaaacagatgcttgaaggcagcagactcgttaagagtcatcaccactccctaatctcaagtacccagggacacaaatactgtggaagcccgcagggtcctctgcctaggaaaaccagagacctttgttcacttgtttatctgctgacc

SEQ ID NO: 5632 - DNA, 1709 bp, Artificial sequence
  DNA replication origin
cctttccccctttcctattccacaaaaaccgccatcgtcatcatggcccgttctcaatgagctgttgggtacacctcccagacggggtggtggccgggcagaggggctcctcacttcccagaaggggcggccgggcagaggtgccccccacctcccggatggggcggcggctgggtggaggcgggcccccacctccctcccagacggggcggctggccgggcgggggctgaccccccacctgcctctgggacggggcggctggccgggcgggggctgaccccccacctgcctccgggacagggtggctgctgggcagaggggctcctcacttctcagacggggcagctgccgggcggaggggctcctcacttctcagacggggtggccgggcagagacgctcctcacctcccagacggggtcgcggctgggcagaggcgctcctcacatcccagacggggcggcggggcagaggcgcttcccgcatctcagacgatgggcggccgggcagagacgctcctcacttcctagacgtgatggtggccgggaagaggcgctcctcacttcccagactgggcagccaggcagaggggctcctcacatcccagacgatgggcggccaggcagagacgctcctcacttcccagacggggtggcggccaggcagaggctgcaatctcggcactttgggaggccaaggcaggctgctgggaggtggaggttgtagctagccgagatcacgccactgcactccagcctgggcaacattgagcactgagtgaaccagactccgtctgcaatcccggcacctcgggaggccgaggctggcggatcactcgcggttaggagctggagaccagcccggccaacacagcgaaaccctgtctccaccaaaaaaatacgaaaaccagtcaggcgtggcggcgcgcacctgcaatcccaggcactcggcaggctgaggcaggagaatcaggcagggaggttgcagtgagccgcgatggcagcagtacagtccagctttggctcggcatcagagggataccgtggaaagagagggagagggagactgtggggagagggagagggagagaaaaatgcctctttcaatatgtaaggtaagattgatagatgattgccttccgtagttcctcccaaaattcataggttgaaatcttagccctcagagtggtggtattaggaagtatggagcctttgggagataattagctcaggagggtggagccctcccgaataaatttaatgcctttataagcaagaccccagagagccctttcacccttttctaccctatgaggacacagcgagaagacagctgtctgtgaaccaggaagcaggccctcactacataccgaatctacaagcaacttgatctcagacttcccagtctcctgaactgcgagatataaatgtttgctgtttaagtcacccagtctaaggtatttttgttatagcagcctgaatggactcaggcggtaggcaagaggaggacagtgcacctgagttatacattgggcaagtcatttaccttcattggagcctcggtttacttgtgttagatatgggaataatgatagttacactgcagggtggttgtgaagattagagaaagtgcatatactctgatcagcacagtgcatggtacttcagtacacagtgttaactgaagacacagtgttaactgaagacaca

SEQ ID NO: 5633 - DNA, 906 bp, Artificial sequence
  DNA replication origin
ccagccctcccctcctcccgcagccatgttccacgcgcggggaggggtggggggaggggagaggcacgggggatcagggcggagagagccggctctgcctcggggaaggaggggatgagagttgggagcagcgggaggaggcggcggcggcggctagcgaggagacagagctgggtcctgcagtaggactcccgggagccaccattatggtgaagaggaagagctccgagggccaggagcaggacggcggccgcggcatccccctgcccatccagaccttcctgtggcggcaaaccaggtgaggggcgcagagggcgcaccgcgggccgccctgggctgggggcgctcctggggccgcccgggtcgccgctgccgccgccgccgctgaggccgcgccacagcctgcagctccctctctggggctggaaaacaagccctctgcaccagcttaaaaacacgcattaaaatatgtatatatatgtatatatttcagtgaagtttgacgacaagcagattggcagttgtcgcataaatgtatacattattttagggggtgggagggcagagagcctgggaagagggggcggggagctagataattatgactggttgtgctcctgcgtccaattccccctccatctcctgctgtaattctagcccagtgacctgttgtttttccagctcctgtttggcgaatatctgctatgcccacttgttaaccgttttgctcagattaatctccccagttaaatctcctgaggatttgtgataagggaccttcccccacaaccccggaaaggcctgacacctattccaataaacagaaaaggttttctttattattgttattttagagatttatcagataagatattagattctggaaattatgacccataagccgtg

SEQ ID NO: 5634 - DNA, 1356 bp, Artificial sequence
  DNA replication origin
gggaggaagcaggagctgcacggaacccgtcccgagggagccgaggtaaaccctgcaccagagttaagggagtcgtgctcctgccacttccagaacactccgagccgcttctgcaggccccgccccctgccggggtttccccgccacccgcttcatttgcatggcgctgcccctcccccgttgccattggctagcgccgggccccgcccactgctcccagaccgcggcagggttccgtccccccgagccgcacggagctgcgggcagcgggcggactgttaaaccgcggcggcggcggcggcggcggcggcggcggcggcggcggcggcggccggggcgggagcggggcgcgctctggagacgagtcagcggcgccccgggtgggggaggcgggcgggcagctagagatcacctcagcagcccccaccacggccggaccgaaggtgcggcggcggaggggagccagggcgccccagcaggcgagtggccggcgtctcagcggcgggatgacgggggtgggtcttccctcttggggacggcggcagcgcggggaggggagaagactgccgggtggacttgcgggtcaggcgaccgaccggcagccccttcgccccccgaatcctctgggctgctggactctggtctcggcacgggatcgcgctctagggcgggggtctgaccgcagccaaatttaaacggctaaacctaacagccttggcagctggggagggaaggggtctagggaggggtgggggcggacctggacgccggtcacgtggggggtggggcttggcagacctcccttttgttttggctggcgcgtgcgcagaaggcagaacacgtggtttcctggacccgcctcttgcctcatcggctgagcctcacccattgggggtgtggtgacggctcttttgaggcggctctgaggcggagcccactggatttgatgagacccctattttatttatttcacactttctttcaggaaaacgtagatttgggctttagagttagatgggatagagcagaatctaggggatttttgagggacggtgcttccaagtttgtgtcaccggtgtgctgaggaagggaccggtcttgctggaaaaagtcagattgcgtggtgtttggtagcaagaaataccaggcggtatcctggccgtttcagaaaccacaggaaaggaaagaggctggctttgcagtcgggagggcaggcactggatggacgttcttgtaatgttttcttactctgggagagtccgtttttgtttgtttttttgtttgaactgtggtaagcacattccgtttttgattccccaaacttcaggacattcatgttctggcgaggtttaggag

SEQ ID NO: 5635 - DNA, 1069 bp, Artificial sequence
  DNA replication origin
ttagtacagaacaaaatggagtctcctatgtctacttctttctacacagacacagcaacaatctgatttctgtatcttttccccacatttcccccatttctattcgacaaaaccgccatcgtcatcatggccggttctcaatgagctgttgggtacacctcccagacggggtggtggccgggcagaggggctcctcacttcccagaaggggcggccaggcagaggcgccccccacctcctggatggggcggcggcggggcggaggcgcccccacctccctcccggacggggcggctggccgggtgggggctgccccccacctcccggatggggcgactgtcaggcggagatgctcctcacttcccagacggggcagctgccgggcggaggggctcctcacttctcaggtggggcggctgccgggcggaggggctcctcacttctcagacggggcggccaggcagaggcgctcctcacatcccagacggggcggcggggcagaggggctccccacatctcagacgatgggcggccgggcagagacgctcctcacttcctagacggggtggcggccgggaagaggcactcctcacttcccagactgggcagccgggcagaggggctcctcgcatcccagaccatgggtggccaggcagagatgctcctcacttcccagacggagtggcggccgggcagaggctgcaatctcagcactttgggaggccaaagcaggcggctgggaggtggaggttgtagctagccgagatcacgccactgcactccagcctgggcaacattgagcactgagtgaacgagactccgtctgcaatcccggcacctcgggaggccgaggctggcagatcactcgcggttaggagctggagaccagcccggccaacacagcgaaaccccgtctccaccaaaaaaatacgaaaactagtcaggcgtggcagcgcgtgcctgcaatcgcaggcactcggcaggctgaggcaggagaatcaggcagggaggttgcagtgagccgagatggcagcagtacagtccagcttcggctcggcatcagagggag

SEQ ID NO: 5636 - DNA, 1655 bp, Artificial sequence
  DNA replication origin
cgagcctgcgggtcactggatccacccgaggcgaaagcggcagcggcgatgggtgcgcggccactgcttgctggagagctcgagccccaggtacctgggcaggcaaagggctaattgaccccgagaggcagcgcggcggggctggcccgccacggcttgcaggactaatgacagcacctgcagtgcaatggagctcaaagtttctgacactagagtttcctggggatgaaagtgggacgggagaggtctgaggaggaccggtgtcttgacgtggccaaggggtgccttttggagagccagagagatttccgaaaccatccagggatggtgactggagcgtgggaagtagcttgaggtgataaagcccccgggagtggcgatagggagcgctttaggcccccggagggtgtccttctgacctcaccaagaaaacggctagctgtagttttcccgctccgccgccgccgccgccgccgcctcctttgcctagtaaataacaagttacaattatcgagtctttcaaaatgaccttcgaatggcacatgtgaggcgtttgtgctggccgtttgcaccctcccaattactccgaaattcttcacgcataccaggtcccgcgctccagccacctccggaatcacaccaacacggacttgacattccaagcggcctcttagatacatctctttttatctccctccccacttcgagtcccttcatattttccctcaatgggttgattatgcacattgacccattcaaaggcattggcgaccgacatgcaggcttagccgagaggaatttctacgaggcgacctactgggggctgtctggttcagcctctgccactgggggaccccgctccgagtccgcagcaatttggtattaactgtgcggctccgagttgagctatgccgaaaagcccttttcagaatttctgcaaggaatgtaatccaaattagttctgcagctgtcctcttcctcgtctcaggcgacactagctcgcgccctcgcttcgtctcttctcgtttccctgggcgaattgtcagacccacaagtgagcccatttagagcgcgaggattagcgtgccattgttgttccgtgtgtgactctgtacttgaaattctgggggcacaaaggcgagcctcacttgttcaaaacacaaagtgatccagatgaaagggccgcacaaagaaaagctctcgggtgcatccctggtataattgcaacacgcatactaaggtgatccattggaaactgtaaatgccccgggggacttcgtttttcatcctcccccacccccaccctgccgcacctggcagggaaagttcagctggttttaatgcagtgctattataaaaacaagttactgtctggggtatgagtgaggctgtgtgtgtttgtgcctatgtatgtgtgtggctgtgtgttcccaactaaatacatattgcgcgtctcccctctcgcggttagcagtcagtagcagtttggaggagtttgttttggtccaaatgagaaattaagtgcggataagtaaactaagctgccagagggcgacaagatgttgagtgaattgcttttagatgaaacaaattaaggaaacgagggaagacaatctgcttctcgcattattagacacgcttggagttcaggggaa

SEQ ID NO: 5637 - DNA, 1314 bp, Artificial sequence
  DNA replication origin
aaaagcagggggttaaggagagaaaagagggactcagagtgatttttcacgataaataaagcaaacgcacacatacagggtaagtttcaaatggaaagaggggtgaccgaaagcccagggaagaggccccggtcaagcggtccctccacgcctcccgggatgggtgaagagggcaggggagccactcgaggcagccccgccggcggctgcaggttcggcgaccggagtgccagaaggaacccacctgactgagaatcgctgggctggacggtccccgccgccacgagaaggctcacccagacccaaagtcctgtcgccggcttcattttttggaagtctcagatcccgtgctgacaattacatgtccaaatggcatatccccctttcgggcacgcggaggagatcccccagccgggcgcgcgtgggggtgcgaggggggcgggcgcggcgcgcgcggtgtggcgactcccagggcgggcgaccgagtccgcgcccgcgggtccagggccggggcccgaggagggggcgagtgtgagcgcgtgtgtgcgcgtgtgggagtgtgctcggtgtgtgcgcttggcgctctgggccggactgtgcagctatttccccgcgtgagccttcgcttgctcgctccctcctcactttctctctctctcactggttggtcaacaataaaaaaggaaggggggcgaaaggtttccaaaaaaagttgattgcaaagaggcggtaggtttccggcctctccccgcagccgggctatgttctgctccttcttcagtttccttgcacctccagtccaaatcgggaggggagcggggcggggggagcttctcgcttctccccggatcccgtccttctttttcctctcagctttcctcacacttgtccggcggctgcggtaattaaagctccgagcgtcatttccagcgctccgcggtctccagctgcagcccacagagaaattaataagactccagaaaaaaaaaaaaaaaaggtgcggggggcggtgggaataaaacaaccctccacgcaaccaggccggctctgctcagccgcgcaaaccccgcccatgctctgacccaactagccacgcccttcccccccccttccaaagggaaatcttattggctcagccactccccaaaatcctgggcctccggagttgggaaaacacctgtcagggaaagggagcctcttggtgggggcaggggaagctggatttaaagggctcaccgaagccatgcactgaagcactcgtcttccctccctggcagaggcctgggacagctggcctgctgagtggacggacca

SEQ ID NO: 5638 - DNA, 883 bp, Artificial sequence
  DNA replication origin
cacgctcgaattctcgctgggcctcagctgcctccccgcggggcagggctccagacctgcagcccgccatgcccaagcctcccccgccccgtcgtgggctcccacacggccctaccctccccaacgggcatctccccctgctccgcggggccagtcccatccaccgcccaagggctgacgagtgcgggcgcgtggcgccggactggtgagcagctccgcctgcggccccagcgcaggatccactaggggaagccagctgggctcctgagtggggtggggacttggagaacttttatgtctagctggaggattgtatatgtgccaatcagcactctgcatctagctcggagtttgtggatgcaccaatcagcactctgtatctagctaatctggtggggactccgagaacttttatgtctagctaaaggattgtaaccgcaccaatctgtgctctgtgtctagtttatctggtggggacttggagaacttctatgtctagctggagggttgtaaatgcacaaatcagcaccctgtgtctagctcaaggtttgtaaaggcaccaatcagtgctctgtgtctagctaatctagtgcggacttggagaaatttgtgtgtagctaagggattgtaaatgcaccaatcagcactctgtgtctagctcaaggtttgtgaatgcaccaatcagccccttgtcaaaacggaccaatcagctctctgtaaaacagaccaatcagcagaatgtgggtggggtcagataagtgaataaaagcaggctgcccgagtcagcggcagtaacgatctctgcttggtggaagctttgttctcttgctcttcgcgataaatcttgctgctgctcactctttgggtgcgcactgcctttgtg

SEQ ID NO: 5639 - DNA, 1164 bp, Artificial sequence
  DNA replication origin
ggccccgcggagcagggggagatgcccgttggggagggtagggccgtgtgggagcccacgacggggcgggggaggcttgggcatggcgggctgcaggtctggagccctgccccgcggggaggcagctgaggcccagcgagaattcgagcgtggcacccatgggccggcactgctgggggcccgctgcaccctccgtagttgctgaaccaggtgctaagcctctcactgcacggaccagcagcgccggcctgccactctaagtgcagggccactgagcccgtgcccacccggaactcgagctggcctgcgaccgccgcgcagccgggttccgcctgcgcctctccctccacacctccctgcaagcagagggagccggctctggccttggccagcccagagaggggctcccacagtgcagtgccgagcttcgggaagctcggccagagtggacgccatggcctgaggaggtgccaagagcgatcaagggctgatagcacgttgtcatctctcaatagctattataagggcccagtccactctctctccttggttgttgtttacctcttgactaaatttatagactttcttcttttagactccctcttctatttactatgtacacttcacttcatatccatggtacctatgtgtccatcatctcaacatccacaaattcctgaggcggggattactcagcatccggcagggatgaggacagcaaataaaataagggaaaaaaaaaagtggggactcagtaaatccaacttgagctgtgttgagagttgtcaaattaagagatctacataggcattcatgatcttccagatttctcagattgattacagcagccatggggactttgaccagaccacgctccagaaagcaagtactggccttaagtttattctagacttcaggacagaagaaggcataagtaaaatgcttttcaaaaccaaggtccatcttaaagccagaggtcaaggaaaggtactgcagtcgtcaaataagatacctggagttaggggcagcttgcttagacagaagtcaatggagaaagcagctaacagaacctgtaactggagagtaagagaagagactgtcatgttcagaatttcactcatacaatactagagatgagcaagtcaccataggcattaagcaatc

SEQ ID NO: 5640 - DNA, 873 bp, Artificial sequence
  DNA replication origin
taggtgtaggaccgctaaggtcgtctctgctcggcgccggggcttgggccgaggaaagacgctggggtcgcgcccctgaaggccgcctgagcgcggtttacttcagccggtatgtgacctctgaaccgcggacgcccccttgcgagtactggctccacctggcggaggggaggcgcggaacccccgcgggagcgccccgctagctgtggggaggcgagggctccatttgggtggatctgtgctggctttcaggtaccgccgccgcggactgcgtttagtctgcactcagcgccgcctgcccacggccttctctttgttttaccagcagcagctggctaatggaggccgccgtccagtgtggaggccgcttcttagcgttggctcttggcgttcctgtgtccagcggagaatgtcttcatcgccggcttggctctccttccgcgccaactcctatcctggggcatttgggaaatgcttcctctggaggaggggtgccattcccaggggtagagcccggcctggggactgacctgctaggtcagtctgttggcagaatactcaggtcaacctgtactgatagaatactcaggtcagtctgtgctggagggttcaactctattttagttaaaatcttttttaccagctcacggaggattcacctgcacttataacaaataatacaaagatcgcagtgtaccctttacctatttcccccaccggtggcatcttggacagctgtagtacctcggcgcactcaacatacagaccctttcctctgcacaaggatgcctcccattgtccttccagtgccaaccaccttcttccctctccattgccctgatgcctggcaaccactaagctgttccccactta

SEQ ID NO: 5641 - DNA, 1080 bp, Artificial sequence
  DNA replication origin
ccccggacgtggtggtcatgaactcctgcctctgggacctcgccagggatggccggggcttccccaggagctaccggcgtgacgtggagagcctgttcgtgcggttggactgggcgctgcccacgtcctgccttctgttgtggaacacggccatgcccgtggccgagaccatctcgggaagctgcctcccatgcgcgcgccagctccgccgcgcccgcctgcgcgaagacgtgatggaggccaacttctacagctccgccgaggcggcgaggcgcggctttgacgtgctggacctgcatttccacttccgccacgccacgcggcaccggctccccgacggcgtgcactgggacgagcgcgcgcaccgccacctttcccagctgctgctggcccacctggcagacgcctggggcgtggacctgccccgccgcgaagccgtggacgggtggctcaggcatgaccacgccaacagacgtgcagccccggcgggcagaaggcagccccgagacgaccgaccggacccacacggccgaggggaccgagcgggccgaggagacctccgtgcccctcgatcgctcgcttcgttcttctgggctcgaccgcctttccctccccgccgtcaggtcgcctttctgtcctctgaccggcatttctccagcgactcctccacgcgccacatccgacacagcggcgaagaaaacgccagggttggccgcgagtcgcggccgttccccatccgcacaagctctgctctgcgccgagagaggaggcattccccttaccttccgtggcgccccagcgagccacccctaagccagcgaagccgcacacgcacacacagaggggtcccgagaacacccaggactcagtagtagccagacctgggagaacgtcctgtcttccccagcatggtcaatgggctgcctgaccactatcacacgggcctggccttcagcagctcttccgaggtgggggtatttttacgcttcctactccaatcagtgaaccgctttccacatcactcgtctttgccagagcttccacgccactttttgggaagggagcagggacccagaccac

SEQ ID NO: 5642 - DNA, 1164 bp, Artificial sequence
  DNA replication origin
gtgggggggtcaaccccccgcccggccaaccgccccgtccgggagggaggtggggggggtcaaccccccgcccggccagccgccccatccgggagggaggtggggggatcagccccccacctggccagccgccccgtccgggaggtgaggggcacctctgcccggccgcccctactgggaagtgaggagcccctctgcccggccagccgccccgtccgggagggaggcgggggggggggtcggccagccaccccgtccgggagggaggtgggggggtcagccccccttccggccggccgccccgtccgggaggtgaggggcgcctctgcccggccgcccctactgggaagtgaggacccctctgcccggccagccgccccgtccgggaggaaggtgggggggacagccccccgcccggccagccgccctatccaggaggtgaggggcgcctctgcccggccgcccctactgggaagtgaggagcccctctgcccggccacgaccccgtctgggaggtgtgcccagcggctcattggtgatgggccatgatgacaatggcggttttgtggaatagaaaggcgggaagggtggggaaagaattgagaaatcggatggttaccgggtctgtgtggatggaagtagacctgggagacttttcattttgttctgtactaggaaaaattcttctgccttgggatcctgttgatctgtgaccttatccccaaccctgtgctctctgaaacatgtgctgtgtccactcagggttaaatggattaagggcggtgcaagatgtgctttgttaaacagatgcttgaaggcagcatgctcgttaagagtcatcaccactccctaatctttaagtacccagggacacaaacactgcggaaggccgcagggtcctctgcctaggaaaaccggagacctttgttcacttgtttatctgctgaccttccctccactattgtcctatgaccctgccaaatccccctctgcgagaaacacccaagaatgatcaattaaaaaaaaaaaaaaaaaaaaaaaaaaaagattgacataccttaagtcaaaaacaaaacaaataaaactacatttttctgccataccaaagatgtactgttcaatcattagtagcatgcatttcatacttcctgcatatcaccaaaa

SEQ ID NO: 5643 - DNA, 1346 bp, Artificial sequence
  DNA replication origin
gcccctcacctcccggacggggcggccggccggaaggggggctgacccccccacctccctcccggacggggtggctggccgacccccccccccgcctccctcccggacggggcggctggccgggcagaggggctcctcacttcccagtaggggcggccgggcagaggtgcccctcacctcccggacggggcggctggccaggtggggggctgatccccccacctccctcccggatggggcggctggccgggcggggggttgaccccccccacctccctcccggacggggcggttggccgggcggggggttgacccccccacctccctcccggatggggcggctggccgggcggggctgacccccccacctccctcccggacggggcggctggccgggcagaggggctcctcacttcccagtaggggcggccgggcagaggagcccctcacctcccggacggggcggctgcccgggcggggggctgaccccctccacctccctcccggacggggtggctgccgggcggagacgctcctcacttcccagacggggtggttgccggacggaggggctcctcacttctcagacggggtggttgccaggcagagggtttcctcacttctcagacggagcggccgggcagagacgctcctcacctcccagacagggttgcggcccagcagaggcgctcctcacatcccagacagggcggtggggcagaggtgctccccacatctcagacgatgggcggccaggcagagacgctcctcacttcctagatgggatggcggtggggaagaggcgctcctcgcttcctagatgggatggcggccgggcagagacgctcctcactttccagactgggcagccaggcagaggggctcctcatatcccagacgatgggtggccaagcagagacgctcctcacttcccagacggggtggcggccgggcagaggctgcaatctcggctctttgggaggccaaggcaggcggctgggaggtggttgtagcgagccgagatcacgccgctgcactccagcctggacaccattgagcactgagtgaacgagactccatctgcaatcccggcacctcgggaggccgaggctggcggatcactcgcggttaggagctggagaccagcccggccaacacagcgaaaccccgtctccaccaaaaataaaacgaaaaccagtcaggcgtggcggcgcgcgcctgcaatcgcaggcactcggcaggctgaggcaggagaatcaggcagggaggttgcagtgagccgagatggcagcagtaccgtccagctttggctcggcatcagagggagaccgtggagggagagggag

SEQ ID NO: 5644 - DNA, 1274 bp, Artificial sequence
  DNA replication origin
tcccacgtctacttctttccacacagacacagtaaaaatccgatctctttcttttccccacatttcccccttttctattcgacaaaaccagcatcatcatcatggcccattctcaatgagctgttgggtacacctcccagatggggtggcggctgggcagaggggctcctcacttcccagacagggtggccaggcagaggcgcccccccacctcccggacggggcagctgctgggcgggggctgccccccacctccctcccggacggggcggctgccgggcggaaacgctcctcacttcccagacggggtggctgccgggcggaaacgctcctcacttcccagacggggtggctgccgggcggaggggctcctcgcttcccagagggggtggctgccgggcagaggggctcctcacttctcagacggggcagccgggcagagacactcctcacctcccagacggggtggcggttgggcagagacgctcctcagttcccagacggggcactgtccgggcagaggcgctcctcacatcccagatggggcagcggggcagaggcgctccccacatctcagacgatgggtggccgggcagagacgctcctcacttcctagatgggatggtggccgggaagaagcgctcctcacttcccagactgggcggccgggcagaggggctcctcacatcccagacaatgggtggccaggcagagacgctcctcacttcccagatggggtggcagccgggcagaggctgcaatctcagcactttgggaggccaaggcaggcggctgggaggtggaggttgtagcgagttgagatcatgccactgcactccagcctgggcaacattgagcactgagtgagcgagactccgtctgcaatcccagcacctcgggaggccgaggctggcagatcactcgctgtcaggagctggagaccagcccggccaacacggcgggccaacacggagaaaccccgtctccaccaaaaaaatacgaaaaccagtcaggcgtggcagcgcgcgcctgcaatcccaggcactcggcaggctgaggcaggagaatcaggcagggaggttgcagtgagccgagatggcggcagtacagtccagcctcggctcggcatcagagggagaccgtggaaaggggagatgagggagatggagactgtggaaagggcagaggcagaggcagaggcagaggccagaggccagaggccagaggcagaggcagaggcagaggacaaaatacacattctattaaacagtgca

SEQ ID NO: 5645 - DNA, 1244 bp, Artificial sequence
  DNA replication origin
gcctccccaggtcttacacccgcgagctgctctaaggcgggccccacgcaggctgcggcccggccggggagcggggacgctggctttcaatcccgcagcgccgcccctgcagtgccgggtcccgccggccgccgccaaggcgggagcgtggggggccgcaggcgaggacgcagaccgcgccgctccgctagggcctcaccgagctggccgggagccatggctgcaggcactgggttcagggcgagcgggaggcagcagcggcggcaccacgtgcgcaggtaggagggctgccgggatgtggcggctcaggaagcgagggggcggagctgtttccgggcttatcacgtggcccgccggccctgcccggcgccctgctctgctcagtttcagatgcaagatccgcgccccggggctgaagggaacggcgggatggggtggggctctgcctggcgcgcctgggcggagtgcttgggctggaagggatcctgcctgcgatcccgaagtccaggcgtgggagccagcgatctgcccacgaccccaaagtgaggccactccacggcctctggggcaaatgcctgttattctaggcagccggtccccagaagctggaaagtacgtaaaagtgccagaagctcccatgctgaaaactaaacaaaaggaatagttcatatagcggcaaagctggaaagtatctggacagttatctaccatcctccctttttgtttgttgtttttttgtttttctgggtttttttgttttttttgttttttttttttttttttgagatggagtttcgcttttgttgcccaggctggagtgcaatggcgcgatctcggctatgtcacgtgcaacctgcaacctccacatcccgggttcaagagtttatcctgcctcagcctcccgagtagctggaattataggcaggcgccacgatgcccggctaatttttgtatttttagtagacatggggtttcgccatgttggccaagctggtctcaaactcctgacctcaggtgatccgcctgcctcggcttcccaaagtgctgggattacaggggtgagccaccatgcccaacttgttttttgtttgtttgcttgcttgcttgtttgcttgtttgttttgagacagggtctcgctctgtctcccagactggagagcagtggcaccatctcagctcactgcaacctctgcctcccaggttcaagaaattctcctgcctctgcctccacacccgtctaattt

SEQ ID NO: 5646 - DNA, 960 bp, Artificial sequence
  DNA replication origin
gcaccgctgtccccaggcactggacggccagcagcagcagcccgggccccggacccctaagcatgttgagacggtgggggagagacgcccgcaccgggaggcaagttgccaccaagtttgcttcccttcgcaacctgcgggaaaaatcccttctaatgcctcccgggggttgtcgcctccaagaaggtgggggccagagggtggggaaggggacgggtggagggacagaagggatgcagaggaccagagaagttgtggctgcaggtcccctcttcccgctcgcgcctggggttccctctcctccccctgtgcagcacagccggcgcgggcgtccgagcgccgggagccggggcttatatgggacggtcccctcccgcccctctggaggcccggggcgcgggggaggagagacccgccgggctgtccccgccccgccccaccccacccgcccgcccgcccgccggccgccgcagccgaccgcgcgccgattggcccgggctccgggtgacgtcacgggggactgtgggttcgcagcgaacaaaagagatgctgatggcccgccaggactggggcaagacaactttttttcggtttcctttgcggtcatcaaactttttaggggatgggggaagggatgggaagcggctgggaggaaagggagtggctggacttgtgtgaagcgaaggggttgcaagacgctcccccttcccttttcttttttattgggggtggtggtagtgtttgaggacattgcgtcacctctcttcggggtggagggggggaatctctgcttataggagtgtattttgtgaggaagaaaacccataaaatatccacgaccttgcagctgttaagaatccagacttttcagtcccagggcggggctgcctttccccccatcccgctccctttctttggactaaagggtactgactcgggactcccttattttgtcttcac

SEQ ID NO: 5647 - DNA, 1155 bp, Artificial sequence
  DNA replication origin
attgctgggtcattggtcaggtgcctttttaattttgatggatcttgccaaattgctccccaaagaaataatccgaatttactctctgaccagcaacatatgaaagtatctacttccctataccctcgccaaatgcaaggttcaatctaaagttttgtcttttccagtctgatttattcaacaaatatttatggagcatctcatctgttatgtgctgggtattttctaagagccgggaataaagcagtgaatgaaacaaatacaaatctttactctaatggagcaaacgttctagtgggaagtcagacaaagtattattcaatatgttaggagtccatatgtactatggagaaaaataaggcagggaagggaataagaagtgccagggagagcggggtgtgtgtgtgcacgcgtgtgtgtgcgcgcgtgcgtctgtgcgtgcgtacgtgtgcgcgcgcgcgtgcgtgtgtgttcgtgtatgtgtgcgtgtgcgtgtgtgtgttgggtggaggggagtgatgcctgcacttttaaatgaggtggtcagggaaggcctcgctgagactgtgacatgtaagaaaaacttgaaggaggtgagcaagctagccatgatatcgccaggaagagtatttcaggcggagtgaatatgggcaaaaccccagaggagggagaatgaactatagggtacctgtgggagaatatggactctaggggccctagagagaagggggccatggaaagggaagagttataggagatagcggaacacgggacgttgcaggacattgattgcaaggactctggattttgctccacatgagctgagaaaatcttcagaggtttttgagtagagggaacgatatggtctaactgagatggtaataggatccaatggctgctgtcttgagaaaaacctaagtgtcaagggagatgtatatggaggccatcctaaaggtccaggtgacagatgacagtggtttacaccagggtggtgggtggtagcagtcgaggtggtaaggaacggctggactctagctggaatttgaaggtagagccaacaggatatgctgaaggattgtaaatagggtgtgaaaagaaaagaaaaaagtgagtcccaagttttggatttataaacttggaggctgaatctccact

SEQ ID NO: 5648 - DNA, 931 bp, Artificial sequence
  DNA replication origin
cctctgcccggccgcccctactgggaagtgaggacccctctgcccggccagccgccccgtccgggagggaggtggggggggtcagccccccgcccggccagccgccccgtccgggagggaggtggggggatcagcccccttcctggccagccgccccgtccgggaggtgaggggcgcctctgcccggccgcccctactgggaagtgaggacccctctgcccggccagccgccccgtccgggagggaggtgggggggtcagccccccttccggccggccgccccgtccgggaggtgaggggcgcctctgcccggccgcccctactgggaagtgaggacccctctgcccggccagccgccccgtccgggagggaggtgggggggacagccccccgcccggccagccgccctatccaggaggtgaggggcgcctctgcccggccgcccctactgggaagtgaggagcccctctgcccggccacgaccccgtctgggaggtgtgcccagcggctcattggtgatgggccatgatgacaatggcggttttgtggaatagaaaggcgggaagggtggggaaagaattgagaaatcggatggttaccgggtctgtgtggatggaagtagacatgggagacttttcattttgttctgtactaggaaaaattcttctgccttgggatcctgttgatctgtgaccttatccccaaccctgtgctctctgaaacatgtgctgtgtccactcagggttaaatggattaagggcggtgcaagatgtgctttgttaaacagatgcttgaaggcagcatgctcgttaagagtcatcaccactccctaatctttaagtacccagggacacaaacactgtggaaggccgcagggtcctctgcctaggaaaaccggagacctttgttcacttgtttatctgctgacctt

SEQ ID NO: 5649 - DNA, 1261 bp, Artificial sequence
  DNA replication origin
ttcccagtaggggcggccgggcagaggcgcccctcacctcccggacggggcggctggccaggcagggggctgatccccccacttccctcccggacggggcggctggccgggcggggggctgaccccccccacctccctcccggacggggcggctggccgggcggggggctgacccccccacctccctcccggatggggcggctggccaggcggggggctgacccccccacctccctcctgggcggggcggctggccgggcagaggggctcctcacttcccagtaggggcggccgggcagaggcgcccctcacctcccggacggggcggctggccaacccccccccccccgcctccctcccggacggggcggctggccgggcagaggggctcctcacttcccagtaggggcggccgggcagaggagcccctcacctcccggacggggcggctggccgggcggggggctgaccccccccacctccctcccggacggggtggctgccgggcggagacgctcctcacttcccagacggggtggttgccagacggaggggctcctcacttctcagacggggcggttgccaggcagagggtttcctcacttctcagacggagcggccgggcagagacactcctcacctcccagacagggttgcggcccagcagaggcgctcctcacatcccagacagggcggtggggcagaggtgctccccacatctcagacgatgggcagccgggcagagacgctcctcacttcctagatgggatggcggcggggaagaggcgcttctcgcttcctagatgggatggcggccgggcagagacgctcctcactttccacactgggcagccaggcagaggggctcctcatatcccagacgatgggtggccaagcagagacgctcctcacttcccagacggggtggcggccgggcagaggctgcaatctcggctctttgggaggccaaggcaggcggctgggaggtggttgtagcgagccgagatcacgccactgcactccagcctgggcaccattgagcactgagtgaacgagactccatctgcaatcccggcacctcgggaggccgaggctggcggatcactcgcggttaggagctggagaccagcccggccaacacagcgaaaccccatctccaccaaaaaaaaaacgaaaaccagtcaggcgtggcggcgcgcgcctgcaatcgcaggcactcggcaggctgaggcaggagaatcaggcagggaggttgcagtga

SEQ ID NO: 5650 - DNA, 1066 bp, Artificial sequence
  DNA replication origin
gagggttgggtaacttgtttgtttgttgtaagactggggtttgggttctgggctcctggctccaagttcaatgctctttctacggtttaattaagcataattaaatttagcagctatttttcaagtacctgtgatgtgccaagcatagtgctagccctaggaactcaacaaataaatatggttccgtctcaataacttttcggtttaacaagagagataagtgtgtgagcaaatgattgtcataaaaaaccatgatgatgagatgttccaataacatcaggggcagaaaacagggaggggcatgcttagattgcatgagtcagaggccagtggcttcctagacaacagaacctctagctggtggtaggagcatgtgcaacagcagaccagagaggtgggggagaaggggcccgcaggcacctgtcaaacaaggtggtctggtgtcacagtgaggtggtgtggcacagtgtggtggtgtggcacagtgtggtggtgtggcacagtggtgatggtgtggcatgatgaggttatgtggctcacatgatggtgtgggtaagcaaggtagtgtggcatagtgtgcagttctggcatagtgagggggtgtggcatggtgaggggttgtggcatggtgagggatgtggcatagtgagggagtgtggcgtaatgaaggagtgtggcatggtgagggggtgtggcacagtgaggggtgtggcacagtgagggggtgtagcacagtgagggggtatggcagagtgagggggagtggcagagtgagggggagtagcatagcgagggggtgtggcatgatgagacagtggcgtagcatgtttgtgttgtggcacagtgtaatgccatggcatagcatggtcgtggtggtgtggcatggcgtggcatcgtgtggcatagcatggttgtgttgtggcatagtgaggtcatgttgtatcacattatggtgtggcaaagcaaggtggtgtggcaggtgaaagaaatccacttgatgagtgtcagaagacaggagggcaaggcccagaggcccctgagcatgttagttttttgcctccaccca

SEQ ID NO: 5651 - DNA, 886 bp, Artificial sequence
  DNA replication origin
atgagggctcttaaacatagagtcctcatactaaagacaatataaccgttccccagggcaagcaggcgagtagcaatctgcaagacctgaaaataccacaggaagcaggagaagagaaaaggggactcacctgttctggcccctggaagcagatgcggcagagtggggtcctcataccactgtccaagctgctgcccagtgagtagcgatcctcggtcttctccttacagaagtcatctgaggaggcactgctgagcagcgaggcaggtggctctgtggctgggccaccccagtcatcttccacagaagaaggtggcaaggggggtggaggtggcacaggagggggctccctgcccaccacttctcgggggcccctccagcctgcccaccccccggcgcccagagccggaagggtgttgttggccgccaaaccggggggctgggggtcgccgtgcatgggcaggggcgcttgaggagggcgccgcagtaagaaaaccttcaggtcattgaagagcatgcggcagcggcacttgaggagaccctggtggcgcaacatctggggggctggggcacacaatccatagcagtaccagccggagcagcagcaccaccaccaccagagcagcccacacaggggcatcagcatgtgccccgtggaagtagagagcccaagaggggtggctggagtcttaaaagagggggacaggacaggttttgggggtccacagtggatctgtgttgtggggggagtctgctttctcactggcttttcttacaacccctccaagtagcaaataaattgctcccaggactgagaagtgtgagtcactggttctgaactccacctggaaagcccaataacaaaaaagtttttcttgccctcaca

SEQ ID NO: 5652 - DNA, 1082 bp, Artificial sequence
  DNA replication origin
gccagaggcggtggagaggaggaaggggcggggtgggggggcagagagcgggccgaggccgcccttggtgggggtagcgggggcagagctgccgagcagacccggcagccgccctcctccgcccccaccctccagaagcactcttgcctgagaaccgaattattccactagtattatttcattttttattactccccctcctcactccccagccgcccccacccccacgccggcctcgcctctggttgcatggcagcgctgcccgggcgcgggggctcagggctggcccccagggaagggggaggaggaggaggatcatgaaggccggagtcgcgaccgcgccggacggcgggcagcagccagaggacgagccggagcagcccccgccccggagacacccggacgccgagcagcagtcgcctccgccgccgcagcagcagctgcgggcgcgggccgacccggagccggaggaggagggcgaccgcgacccagaggaggaagaggaggagaaggcgaggccactcgcccgcccggacctgcccttctctcggctcttgcccctcgaccgaagggacctttgatggaaccgaggggagggcgccacggatttgccgactgcagcaggggtgggctgggggctgagataatgtaaccactcctttctcctgttctctcccacacgcccctctcctctacccctattctctgctccactgccctctcaccccggtacacacacccttcctctagccaggatcttcatgctcaggaaggaggcgcctctgcaagggttaaacgatcttttctttttctcccatcctttttccttcccaaacctctattttacctcccttctcctaattggctttcccctcttcggtgtaaccctttggctgcggaggcaaagcacaagcccctagcccagtttcacctgcaacacccctcccccacccaactgctctcttaaaagcaactctggtgcttctgggggttaattgccccagttttctgcccaggagaattaaaacttctcccaatcttctctcctcccctaccttgactcccccaacccctaccacctg

SEQ ID NO: 5653 - DNA, 748 bp, Artificial sequence
  DNA replication origin
cctcctccggctccgggtcggcccgcgcccgcagctgctgctgcggcggcggaggcgactgctgctcggcgtccgggtgtctccggggcgggggctgctccggctcgtcctctggctgctgcccgccgtccggcgcggtcgcgactccggccttcatgatcctcctcctcctcccccttccctgggggccagccctgagcccccgcgcccgggcagcgctgccatgcaaccagaggcgaggccggcgtgggggtgggggcggctggggagtgaggagggggagtaataaaaaatgaaataatactagtggaataattcggttctcaggcaagagtgcttctggagggtgggggcggaggagggcggctgccgggtctgctcggcagctctgcccccgctacccccaccaagggcggcctcggcccgctctctgcccccccaccccgccccttcctcctctccaccgcctctggctggctaggctcgctgttgctacctctcctcgcagatgcaacgaggtaaggcttgtttgcggtgccagctgaaggtggggaggggggagcgaagcagtgtggccgaggtgggaggcagccggcacttggctccagcttggtcctcgcgactccccaaaaccgtatataaatatatctcttataaaagccgagaggaagcaaatcagattccaggctgctgccaggtgttgtctcgtcttccgccgttgctcagcacccgccgctgcccccactgg

SEQ ID NO: 5654 - DNA, 914 bp, Artificial sequence
  DNA replication origin
cttcctcctctccaccgcctctggctggctaggctcgctgttgctacctctcctcgcagatgcaacgaggtaaggcttgtttgcggtgccagctgaaggtggggaggggggagcgaagcagtgtggccgaggtgggaggcagccggcacttggctccagcttggtcctcgcgactccccaaaaccgtatataaatatatctcttataaaagccgagaggaagcaaatcagattccaggctgctgccaggtgttgtctcgtcttccgccgttgctcagcacccgccgctgcccccactggctcgattcccaaaggggtggtgctggaagggaggtggcggggcggcgagctgaccgtccgagaactggaaacaaggttcttgcagcgagggaggctctcggctatctccgccgccggcgccgcggccgccgctgctgcattcagcaccccgggcgagtggacagctcccacccagaccccgcgcgtcacgctcgtgggggcctgacgcagacgccgcggagggatggaggagggaaaggggatgagaggaaaagaagctggagggagagggagcaagaggaggagagaactgtgcgagggaaggggatggggagggaccaagggaaagggaggtaaccaggagagggagggatttaggaagggaaggaggagggagcgaagtgaagagtaaaagaaagaaggagaaaggccacggggagggaggggagcgattcaggcactaactcttgcatttcacctcagcaggaacgtgtcggtgtggaaggtctggttgtagactctctgcccactgtccactatcacagctcctctcattgcacatacaagacacagacacctgtcaaccagagaccgtttctctgttcacataaacatttaaagtagatctcagtctgc

SEQ ID NO: 5655 - DNA, 1404 bp, Artificial sequence
  DNA replication origin
tgggatttcaccatgttggccacggttggccaggctggtcttgaactcctgatctcaggtgatccacctgcctcggcctcccaaagtgctggaattacaggtgtgagccaccgcgcccggccccatttctgtgtttttgcttcaggtggtccctctgcctgtgcccttgctaaccgcccatttcctctggtagaattacaagcttcaatttcagctccgactcacccaagaaactcccctttcctcaaccaccacatcacctctctaccaaaatatttcttttcttcaaagcctctgataaacatttatttatttattttttatcttaccaaagtctttcccgataactcttcccagcttggcgtcttaagaccaggtacttgccttcctggaggcatctaggtcaccttcagagccaggtggccattgggttaactagctgttgaactgaatcaaacaggctctgagccttgaagtcagaaagagccagagtggaggggtctggggggaagaggggcgctgaggtatagggagatgaaacctgcggtggaggcagcttaatggtccacctgtcacccaaggaatctctctgacaggggtctttgttagggtcacaccccaggagatggttgattatggctgagtccagcctggaatgatgggggttgggggcagcttgggtagatgactcagtaaatcaaacagaacaatgaaaggaggtcatgcttgtccatctgcattattgaagacagccataaatggccttaccccagagcgggtctgtcacacctggagagctgatctgacctctccaagacccctgcaactgagtgttctgggatctgtcctgcaacaagtgcctcgagatttgtaggtgggggcccagggtgctaagggattattttagcgggcggagaagggagggggtctgcagacgaagggggcaggttttgcggggcacttagggttctcataggttgtagtcacgagctcccaggtttggaaaactgcaatagtcactaagaccattcggggctgtttgggtctagcttggtctagacgggtctgaaactccgcaggacccacccaacaagaagtcattgttccaagccacgtgtcagtggtgggtgataccccaggatggaaggagttggtatgagccgactgaaatctacttgaaggtcaaaacggagccttatgtcttttgtgttccccagcggttagcccagtgccggccacaggggaagcgcgcaaacgaagtcctcgcgaactgaactgagagcagacaaaagcacgcgctcttctccaccgccacgccggtcctacccaaacccgcgagttatccgtattctccttcaggagtcatagtcaggccagaagagtgcggagggacggggcccggga

SEQ ID NO: 5656 - DNA, 1182 bp, Artificial sequence
  DNA replication origin
cagggccgtgccacctgcccgcccgcccgctcgctcgctcgcccgccgcgccgcgctgccgaccgccagcatgctgccgagagtgggctgccccgcgctgccgctgccgccgccgccgctgctgccgctgctgctgctgctactgggcgcgagtggcggcggcggcggggcgcgcgcggaggtgctgttccgctgcccgccctgcacacccgagcgcctggccgcctgcgggcccccgccggttgcgccgcccgccgcggtggccgcagtggccggaggcgcccgcatgccatgcgcggagctcgtccgggagccgggctgcggctgctgctcggtgtgcgcccggctggagggcgaggcgtgcggcgtctacaccccgcgctgcggccaggggctgcgctgctatccccacccgggctccgagctgcccctgcaggcgctggtcatgggcgagggcacttgtgagaagcgccgggacgccgagtatggcgccagcccggagcaggttgcaggtaacgcggtctggaacaagtagttgggagaaacttggagggcagcggagaagcccgacgggcggctggaccttacggacggttttaggggcggcagagccgagaccttggaccaaatcaagggggactgttgctagcgggacgcggaagtcaggcccggggaggggaactggagttagagcaagtggaagagccctggcgactcatttggtggggatgaatggggagaggaaaggcatccctgctgccatagttttacccgcgtggaacggacccagacttctattctggaggagggatttgctgagaagggggccggtggtcagatccatgggagtaggaactcgaatcttatttggggcactgcttgaggacccaagggtcctggtgggatcgctgctgggaggcggaggctgcggggtgccagtgacaccaggaaccttggaagaggagagggagctaggaggaggcaccggcgtcccaaggggcccttccttctactggggttgtgagttggaaagaaaggacttggtactttgtaggatgagtcgcttaggagaaaaatgaaaaccaccactactatttctccatagggaacgagcagggctcttgctaccacgttgaatggaaaaataaaagggaggcatttggtaggcgaggggtctcctag

SEQ ID NO: 5657 - DNA, 961 bp, Artificial sequence
  DNA replication origin
cctcggctcgcttccttccctagcctgcctggaagttaacccttccctcctgcttctcttagaaagtaacaataaaaggaaaaagcccccacgaaatcctttcactgcggggtgcctgtcccccagtcatgcgttcctcctcatcacccctcgtggtccaccggggaggtgctgtgcagtttctgagctgaactctgacaaactaaacatcttcctcagcagggtgaactttttgaaaggcctctaagttcataggatggtttggctgctgactgttttaataaagtgtgtgatgcctttccttctttaacgttttacttttttttttttcctactcttcattcgtcttattctaagcctgaaaaccaattctacttcccaaatccctgaagccggttagggtctttagccaggaacagatgcggcagattttctcccattcacttttccctggagcctgaagggggtggggggtagttgtcaggggaggccagggacaatggggtgagttcatgggaagaatgtcactctggattttctgcctggttatgggactcccttccgccagcttgccccagctgcgttctcctccccagtgcccagacgccttccgcatttttgtgcaccggcctgggaagaggggatgttaagcaggggtggaaggtggggggtggggctggaagctgagtgggtgcactcaaaagaagtgaccaatgtcaggggtgcctgagaaagagtcgggctgggggaggggagcactttgggaaggagcctgagcttgcaagggtgcaggagaaaaaggggtcaaggttggaggcttttgtgtgggagagggtcttaggctggggcagagactggagtcactggatggagagtgctgggtccgagttgggtggggcctggcccagacggagatcttagcactgaatcctctgcctcccactccatctcccgtcccgtc

SEQ ID NO: 5658 - DNA, 876 bp, Artificial sequence
  DNA replication origin
ggaagaggggatgttaagcaggggtggaaggtggggggtggggctggaagctgagtgggtgcactcaaaagaagtgaccaatgtcaggggtgcctgagaaagagtcgggctgggggaggggagcactttgggaaggagcctgagcttgcaagggtgcaggagaaaaaggggtcaaggttggaggcttttgtgtgggagagggtcttaggctggggcagagactggagtcactggatggagagtgctgggtccgagttgggtggggcctggcccagacggagatcttagcactgaatcctctgcctcccactccatctcccgtcccgtcttctctcctctccgaagaatgagcaccccccctccagcctgcattcctctttgagcaggttgcttttgagaattttaaacataccctcttatttcgaggcagcgaacctcagcagttccggctttgctgttagctcttttgtctttgttcccgggactcaggggctgtgttgctgctggcttcctggggatggcaaggatgcaggggtgggggtgggcacatcagtgggtggaaggagtgggtggtggtgagcctgtatcccacggggacgatgggctggggcttgttggttcaaagaaactgagaagtcagtcttgggggaaggggtgggtaggcctagaagaaaaaccgaaaggagaccctgagatctgcttgaagttgggactctaaaagcgtgtgtatgtgtttggtggtggagtggatagaagtgcctagaaatgtcagggtcgaggagggaacagggttgggccagtccaggccctttcagaattaaggctgggctagaccggttccttcagtatctccccagcctccttccctaccgtgta

SEQ ID NO: 5659 - DNA, 658 bp, Artificial sequence
  DNA replication origin
tcttgggggaaggggtgggtaggcctagaagaaaaaccgaaaggagaccctgagatctgcttgaagttgggactctaaaagcgtgtgtatgtgtttggtggtggagtggatagaagtgcctagaaatgtcagggtcgaggagggaacagggttgggccagtccaggccctttcagaattaaggctgggctagaccggttccttcagtatctccccagcctccttccctaccgtgtacaatgcaggggattatgctgaggggcggggccgcccgagtggccgtttggcccgctgcacgtataaaggtgctacagaaatgtgtagtcgttcaaagtcccagggcgggcagacaggcaggcaggcaggcgggcgggcgggcgggcgggcgggcctggggaggctctgcatctgcagttgccggggaagaataaaggggggaagaggcaagcactgatttacagtggttcagtgcagcttcaaaaaaaaagggggaaaaagcaatgggacttctggctcagagtactgctttgcatctcgtcttgcataaatttgcatactgagttcaaagtcgtaaaatagactagggaaatgagtgggatctactgtcactgattgttaacaccactaccttccacctcccctccccccatctggacaga

SEQ ID NO: 5660 - DNA, 733 bp, Artificial sequence
  DNA replication origin
ctaggagtgagggaaggtggtaccatgcattggagaaatgagggtaatgtgggggaaataatccgattaggggcccctaataagtttcccaggcaggatgtggggccctcggagcctggggattctggtgtgatgtcagctcactcaatagtggcacttttccctgtggggctcagcagtgccatgcaggagggacagtgctgactggacagggctgaggtgctgcagggcaggggagccccagacaagctgatgccaagcatggagctatgggcttcggtctccttaggcaaagcatcagagccagagagggctgatggattgaaaactcaagcggggtgagcaaaggctctctgtcgtaaaatcgtctctgctctcttgcctcattcttctcactctcatagtagactacgattagagtgggagagtggggttttcagattttagatgtggaatcttgggggtcccatggctcagagtgtggcttaagtggatggaggggaaggcagatggtgtgtggcagagcttggaccagcagcataccactggggagagggtgggagacacagtttctgggctgctgaaccgcggggaccccaggggaatggtgctatcgctaaggggctgtatgggttgtcccactgagcacgggcagtacagggtggtggggagacaggagtggagtagtccgtccagagccggaatcatcggtggtcacgggctgtgagcaggg

SEQ ID NO: 5661 - DNA, 1607 bp, Artificial sequence
  DNA replication origin
gctcaggcctgtaatcccaataccttgagaggccgaggcaggaggatcgcttgagcccaggagtttgagaccagcctgggcaacaaagtgagaccctatctctacaaaaaatcaaaaagttagccaggcttggtgacacatgcctgtggtcccaggtaggtggtaggctgaagcaagaggttcacttgggcctaggaggtgaggctgcagtgagttgtgttcacaccactgcactccagcctgggcaacagagacagactgttgaaagcaagggaagcggaggggaggggagcagaggggaggggagggcaggggagaagagggggaaggggaagggaaaggggaagagaggggaggggaggggaggggaggggaaggggaatagagggaagggaaggggaggggaggggaggagaggagatgggaggggaggggaaggggaagagagggaggggaggggagggggaagagaggggaggagacaggaacagagaggaagggaggggaaggagaaggtgggggaagggaagggggaggagagagaggggaaagaaaagaaaagaaaaagcaagcacaaatcaaccccttctgagtgcatttccctccagctatgaagttttcctaaccatgaccctttggggtctccatcttaaaaataagcagggagctctttaaccaaaagaagatgccaaagtcgtaaagaaattgacctcaacaaagcctcgctccttctccagcagtttccagctccattgtcttaatcttcccgtgagagtcatgcgtcaaaatcttgaccagtctccccatgactttgccatctcctctttcacctcatcacttgcttcctcctcccactaccaaagtcatccagtcacttccatcacctccttccacatcctcaccatcctctccaccctaacttactctttttgcctctttctgtctgcagaaccctgggaaaaatccttcaccaagccatcaagcctcacaggccttctttcaggactagctcttcctgccctggttgccatacatggcactgtggacctccccctcctgaaatgtcttcatcttcggactttccagatgaactctgccctaattcttctgtcccagaccactttcgtcatccccttctttgccttcccttcctcctctttccccttaaatacgtgcatgtgctaaagtccagtcccttctgaatctcctgctttctcttccttgcaaacctaactcctcatggcttccaccctcagttttacatctgttactccaaaagctatagctctaccccttacttggtcagataagccaactgtctacccagatttctgctactttatatcacaactgcctgagattcaacatccctcagcctgaacacaatttctttctcaccaaatcaccctctttttgacttcttgaccccagttcatggtagcactatcctccttgttatcctgatctgacacctcacaagaacatcttatccttcacctctcctaagtcccccatattcagtcagctggtactttcttcaaaatttctctctcacttctccatggctatttattctcattgccactgtcctccctcatcagggctat

SEQ ID NO: 5662 - DNA, 1150 bp, Artificial sequence
  DNA replication origin
cgcacagtgccgtccctggcacatagctgttcatttctgtcactggtattgctgcgtggtctcccgggaagatttcgccaaaactgcctcctcccttttcaccacattttgcctgaactctacattggggctttacagcaggcttggttttgcccatggctgcctcgctccaaagacactggggtggagtctggtttgcctggcacctccccaaaacaagcacagatgaggccccgtgaatgtcaaatccctcctgctcctgtctcctgagctcctgccaccgccagccactccgagcgaaggcccatttcactctgactccacagaaggcatgtgtcagacactgtgtgagtgtgtgacagacgtgcgtgagtgtgtgtgagcatgagtgtgagggtgtctatgtgggtgaatgtgagagagtgagtgtgtgagaaatgcatgtgtgtgagggcataagtgtgagtgtgtctttgtgggcgtgtgagtgtgtctgtgggagagtgtgagagagtgtgtgacaaatgagtgtgtgtgagggtatgagtgtgtgtccatgtggagcacttgctgtgtgtgagtgtgagagtgtgagtgtgtgacaaatgagcgtgtgtgagagtgtgagtgcgagtgtgtctagtgggtgtgagtgtatgacaaatgtgtctgtgtatgagtgtgtgagagtatgagtgcgagtatatctatgtggataagtatcagggagtgtgtgacaaatgtgtgtgcgagtgtgtgtggccatgagtatgaggcgtctatgtgggtgtgtgggtgtgagagtgagcgtgtgacaaatgcgtgctcgagtgtgtgagggcatgagcatgagtgtagctatgtgggcatgagagtgtgagatgtgtgagcgggggtgtggtatatgaaagtgagtctatgtgtgcatgtctatgtcagagtatgcgagtgtgagtataagaatgtgttggagaatgtgtattgtgagaatgtgtgcgagagtactgtgagtgtacatatgcctgtatgagaatgtacaggtgagtgtgagagagtatgtgtgagtgcacaggtgtgtgtgaggtgtattgcgggattatgtgtgagagagtatgtgcgtgtgtttatatgcacatataaaaggtgtatg

SEQ ID NO: 5663 - DNA, 1693 bp, Artificial sequence
  DNA replication origin
aggccaggcacggtgctgatgcctgtaatcccagcacttggggaggctgaggcgggtggatcatatgaggtcaggagtttgacaccagcctagccaacatggtgaaagcccatctctactaaaaatataaaaattagctgggtgtggtggcacacacctgaaatcccagctactcaggaggctgaggtgggagaatttcttgaacctgggaggcagagattgcagtaagccaagaaggtgccactgcattccagcctgggcaacagagtgagactctgtctccaaaaaaaaaaaaaaaaaaaaaaaaagatagcaacaatagacactggtaacatacccaggtaacaacatacccaatatatgcatgatatacccacacaacatacccaggtaacaaacctgcatttgtactgcctggtgggtgtggtttgtgaaccggtatgtgtggtctgtggtatgtatggatgtgtgtagtttgtgaactggtgtgtgtggcatatggtgtgtatgtgggtaactggcataactggggtatggtaggtatgggtatgtgtggtatgtgaactggtaagtgatatgtatgagtgcgtatggtgtgtgttgcgggtggtgtgtgaactggtgtgtggtgtgtggtatgcatcggtgcatgtgatgtgtgaactggtgtgtgtggtatggtatgcatgggtgtgtgtagtgtgtgaactgatatgtgtggtttgtgaactggtatgaactggtgtggtgtgtgatgtgtggtatgtatgggtgtgtatggtttgtaaactggtgcatgtggtgtgaactggtgtgtggtatgcatggagatgtgtggtttgtgaactggtgtgaattggtgtgtggtgtgtggtatatatggatgtgtggtatgtgaacttgtatgtgtggtgtggtttggatgtggtgcatgtggtatgtgcagtatgtggtgagagtgtggcgtgtggtgtatgtggtgcatgtggtgtgtttggtatgtggtatgcgtatggtgtgtgtggtgtatggggcatatgtggtttgtgtgtggtgtggtgtttgtagagtgtggtgcgcatggtgtgtgtggtatgtggtgtgtgtgtggcatgtggtgtatggggtgtatgtggtttgtgtggggtgtgtgggatacgtggggtatatgtggtggggtgtgtggtgtctgtgatgtgtggtatgtatgggggtatgtggtgtgtgaattggtgtgtgtggtttgtaaactggtgcatgtggtgtgaattggtatgtggtgtgcatggaagtgtgtggtttttgaactggtgtgaactgctgtgtggtgtgtggtatatatggatgtgtggtatgtgaacttgtatgtgtggtgtggtttggatgtggtatatgtggtgtgtgcagtatatggtgtgtttgtggcgtgtggtgtatgtggtgcatgtgtgcggtatgtagtgtgtgtgtggcgtgtggtgtgtgtggtataggggtatatgtggtttgtgtggggtgtatggggtgcgtgaggtgtgtgtggtgtgatatgtggtgtctgtggtgtgtggtatgtatgggggtatgtggtgtgtgaattggtgtgtgcaccatggtatgtatgggtatgtgtggtctgtgaactggtaggggtgctgtggtggggagtggtgtgtgtggtgtgtggcatgta

SEQ ID NO: 5664 - DNA, 1188 bp, Artificial sequence
  DNA replication origin
ctcataggacctctctcccctccctctctggcccttgcatccctgcctttccgcttggggctcagtttcactttgctcccagattctctccctgcttctcttcagggcactggggctgccatgggtttgggactggggctgggctgggctacactgggactgggctgggctggactgggacccggtggggctgggctgggctgtgctgggaccaggctgggctagactgtgctgggtgagagttgagcaggggctggggctggggctggggctgggctggggttggggctggagttggactgggctggccacttttcctgactcccggccggtgggagtgaagggcttgggaagccaccgtgatgtcattcaagaacggcatagctgcaggatgataagtgaagccctggggacccagctggctgaaattacagacagttttatcccactggcttcctacaagccagagtgaggcagagcaagctgagctggggagagagcgtgcaggagagtggagggagggagggagtggggtgtgtgtgtgtgtgtgtgtgtgtgtgtgtacatgggcaggcaggcggcactggctcctcccacccctgacagtcggagggagcttgagtaggacacagacagcacttggagctgcagccatgtaggaattattgggaacttggggcaccaggatcaaatcagagcgggcttccctccgcttcctccctctccctccctccctccagagggtaagtgtctgctgggcagttgttttgcctgtgagtgttcttgtgtggctttctgctggatctgggctggggtgctcgtgcttctgtgctgggagggtgtggaggggcaggctctgtcacgaccccaccttggaagggcttgtggctgagtggggctgtggcccgctgtgctgctgtctgatgtggatgtgacgggcctggtggtccccttcctggacttgcttctgggacacgtaagagccatagctttcagggcgagggtatctgggttggtgggggggccgtgtgtctgagttgtcctaagtcttgtgggggtaacggttcgtcttgtgcgcgaatggggttggcagagggaatgaggtggatgcatggatagctctggtgagatgttattcaggacgccccctccctgcatctttggcctgagctttggggcacctccagt

SEQ ID NO: 5665 - DNA, 1087 bp, Artificial sequence
  DNA replication origin
atgaagggctgaaaggtgcaggggtggggggtctgtgagtccatctccccggggcctctgctgggcgtcccccagtcccaacgctgtggaacttcaccttggattgaccttgcttccctccccgccctgcccccaactctggcagtcgctggcaggaagtcctgctgattagggccctaatcaccggctgagactcccagaaatggcagagctggttgagtgagaggggccgccaagccaggaaggggggctggcatggggagaagcctccacccagggacatgagctggggttcgggctatgatttgggggtggcagagatgggccagccccaggggttggctccttgggtccggggcagtgcctgtggacccactgtggacgctgtgcggcagcagctgagtccagctgggcacacggggccgctggattgttcactttaaaagcctttgagggcatccaccctatgccagttaaggtgctgggtatgaggctggaaagaccgggagacacgatctagtggggggagtaggggagtaggggagtagacagagtgttgctgcaaaacgcagtgggaatgtcaagcaggaggcagctcatgtgagctggcagagcggaggaagctttggagaagaggtaccatttgagatggattttgaagtttggcaaggagttttgcggggaggaaaaggggcaaagacttcttcaggcacaggggaaggcatgtgcagaggcccagtggcatgcaggtaaggagaaataacaagcgtgggtctccctcccagctctgctacatgggtctgagccttagtgtctgcatctgtaaaataggattcatatttccaaccttgtagtgctagcgtgggtatgaaatgagatgctatttgtaaagttctcagcccagtgcctggcatggagcaaacccacagtatatggaggcttaaaatggcatgtgtgggaaaggatggctttggggagagcctgaaactgttgcttggggctcaagatggggggatattctgaggcaggttaaagaggggagcggcaggggattttaatacagggaagacatgatgagactgtgatt

SEQ ID NO: 5666 - DNA, 955 bp, Artificial sequence
  DNA replication origin
catctccactcctcagtgtgggccctgctcccttgcccatgggcacagactggcagaagtgccccctctgccctctccaaccactagcccttactccttcctcacccctctgggcagaaatggctaatccaggtggttaatgaacagacaggggcagctgccttccccctgctcctccctctccccccacccctcctgtcctctgactctgatgccctgcctgccacccgttcccaggctggagaatccatacagagctgacctcagtgtcagtcccccaacccccaatccaggacttgggccaggactgcctgcccagatgttttaggctggctactgttctagaagaggaaactgggtgggggtgataggggggacccggagaagcctgctgtgctcccaggctgggctccctgcaggggaggggatggggttgggggataggatgggtgctgggtggggaggagatggaggaggagggcaggcaggcaggcggttgtgggggtgagaataggagggggacctggaaactagggtgccagggtctttggagacaagggcttctcttctggaagtcccagctgcctcttcaatgtggcagcagtggggaaggtgtagggggagcaccctctcttcccctcctgaagctgcctggggtgggtggagaccatggtggctcacatgtgacctcaagttgcacctgcccctgccagctggtggccactcctgtaagcctgaatacagctctccttggacctcagtacttgctatagctggggcaccccttgcctgaaacctctggcccagggttgtggaagggagtgagggaggatgtggattgagatggagaggttggggggagagacccgaatgggatcagcactggagacccaacttggggttggcttggactctgctgcccatggagggcagggatttggagagcagtgggctg

SEQ ID NO: 5667 - DNA, 1275 bp, Artificial sequence
  DNA replication origin
ggcagccgctcccctccgtcccctccctctctccctctctccttccctccgtccctccttccctccttccttcccgagcgcggattgcgggctggggtgggaggagatttcgcggagtttccatttcatacctcgcggctaaaactttctttctgtgtctcgccctcttgcagtctgcagcttctcctgtcatcggaaatgccaggccaaggtaaggggccgcgggctggcgggcccgggaggacttgggacaggcctggctcggggtcccagattggagcgggggcgccggcggggcgggggcggtgcccggggcgtccctcctcctctctttgtttatgcaaagcgcctgggcctgggagcgggcgcaggtcaaggtgaaggcgaaggcccgggggcgggggcaggggcgggctggggaatcgggggatctgggtggggggcgcggagcgcaatctgggcggttaccgggggtggctgatggggaccgagctcccagagagcggcctttgaaggtgtttctgctagttctcaagggggagagggaaagggggaggggatccatttcaattaccccgggccgcgcacaaccccagttggctcaatttggccaacctagaaaacctcagtgtccacagccacaggaccccgagggcaggagaagcgggtgggtgggataaatggagaatgaggtcggaggtcaggattggctggtctggaaccgcctgagagactgtcccttcctctttattggccaggtcttcttttggtcctcaatttccccatgagtattttctggctggtcttgatgggaaagggaaactgaggcaagaagactggagggattgctgggccctggttggccaggctggctcagcccctgatgtatccactgaggtttggacacaggagtcatatatcagcttcttggagtaacagggggtgggggattggcaccaagatggattatgagtttgggaaggaaatggttctgtccaatgggctcagctctgcctaggggtggaaatggcgttccttgcctttcacttgcagccaatgtctgcaccttctgccattgttgcttgtaaccctccctgccctttcactccctacgtttgctcttcatatttgacctttcaaggagttcagggagtagaaggagaagatgcttccagaaggagcattcattgagcagttgaggacctgtatctggtacatctcatgttttgcttcttattagctgggtggccttgggcaagttatgtacctctctga

SEQ ID NO: 5668 - DNA, 869 bp, Artificial sequence
  DNA replication origin
caccgcccccgccccgccggcgcccccgctccaatctgggaccccgagccaggcctgtcccaagtcctcccgggcccgccagcccgcggccccttaccttggcctggcatttccgatgacaggagaagctgcagactgcaagagggcgagacacagaaagaaagttttagccgcgaggtatgaaatggaaactccgcgaaatctcctcccaccccagcccgcaatccgcgctcgggaaggaaggagggaaggagggacggagggaaggagagagggagagagggaggggacggaggggagcggctgccgggcctgcggggcgggagtgcccgggactgaggacccgcggccggggaggcagggggctcccagagccagagcccctccgggtgcgggaaggtggggggagcaaaggggggggtcccccactggacccctgccaggggcagaggtagcccggacccgggccccacgccagccccaccaaggaataaggggggccttctccccttacacacacaccaggcaggcagacgacatcgcaaaccacaatcacacttactctgccccagagacagacacacagacacaattcagagtccaggagcgggcccacgcatatacacattacacccacacccacacactcacccagaaccactcccacccatccacacagccatccacgcacacacacacagtctcacacacacagattcatccaggaagagccctgactcagggcaccaacacacacaattttgtgggacaccatcagttgcagcctgacacagatttgtggacacagacacgtgaacagatgctcacataaacttcatgtgcatgacttgaaacacacagacacacac

SEQ ID NO: 5669 - DNA, 1292 bp, Artificial sequence
  DNA replication origin
ttccctgtccctgcctacctctcccccaggctcctctactccttccccaggaccccagccttctacccagggctgactctgtgcctctcctcccacagccagaggatctggaggcccccaagacacaccgcttcaaggtgaagaccttcaagaaggtgaagccctgtgggatctgccgccaggtcatcacccaggaaggctgcacctgcaaaggtgagcagcggtctgggctgtgggggatgggagcacccatcaggggaatgagatggctgggcctgggccaggctgggactctgctgtgcacacatccttggggtcccaacctgacgccttgttctcatctggtggaggatgctgagctcactggatgacaagcatgtgggtgggtgtggtgggcatggcaggtggagggtagcatggaaatggcatgcagcttgtatgaggatgaatggcatgaagaaggtatatgggtgtcatgcgggtggcatgaagaaggtatatgagtggcatgtgagtggcatgtggaagatgcatgattagtatgtggtggcatgtggaggttttgttgagggtgtgtggatggcatgtggctggtgtgtggatgatgcatgttgacgatgtgtggctggtgtgtggatgatgtgtgttgagggtatgtggctggcatgtggatggcgtgtggatgatgtgtttgaagggtgtgtggctggtgtgtggtggcatgtggaggttgtggtcagggtgtgtggctggtgtgtggcctatgtgtggatggtgtgtggatgatgtgtgttgagggtgtgtggctggtgtgtggtggcatgtggaggtcgtggtcagggtgtgttgctggtgtgtggatggtatgtggctggtgtgtggatgatgtatgctgagggagtgtggctggtgtatagatggtgtgtggatgatgcgtgctgagggtgtgtggatggtgtgtggatgatgtgtgctgaggatgtgtggatggtgtgtggatgatgtgttttgagggtctgtggctggtgtgtggatggcgtgtggatgatgtgtgttgagggtccgtggctggtgtgtggatggcgtgtggatgatgtgtgctgagggtgtgtgactggtgtgtggatgatgtgtgctgagggtgtgtggctggtgtgtggataatgtgtgctgagggtgtgtggctggtgtgtggatggcgtgaggatgatgtgtgctgagggtgtgtggttggtgtgtggatagcatgtggtctgtatgtagaagctgtgtggagggtttgtggcaggtgc

SEQ ID NO: 5670 - DNA, 1569 bp, Artificial sequence
  DNA replication origin
tggctcacacctataatcccagcactttgggaggctgagacgggaggatcacttgaggtcaggagttcgaggccagcctggccaacacgatgaaaccccatctctactaaaaatataaaaaattagctggacatgttggcacgcacttgtagtcccagctactcgggaggctgaggcaggagaattgcttggacccaggaggtagaggttatagtgagccaagatcatgccattgcactccagcctgggtgacagagtgagactccatctcaattaaaaaaaaaatgaataaataaaaataaagacactcaaggaagcagcactcacagctgccttggtccccagactcttccccttactctcagggagggtataacacccatagggcactctacctgccaggcactgccctggggaattggatacaaaatttcatccctacctctctgtaccctgtttctctgcaatcctcatttcaccaacgggaaagcagaggctcaccaggatgaggcacttttcccagtatcagtcagctgaagggatctatagagccctctctccagtcacagcagctcgtcacccctggaggtctacctgccatccttcttgtgtcacccctggacgtctacctgccatccttcttgctgcagagctccctcctgcctacctctgtcctcagcacagagacgaacctggccaaggctcccatttcccagatgtcaacaccagcccagtaaaccacaaatgcatcctgtgtgcaggcctccccagtcactctcaatctattaatccaatccatcccagcaccccagcccaacatgccacccaaaccgcctcattccaggccccctcccccaccctttctttctttgcccagaggacacctggctgcccgagtttgtgttcccacaactgcccccagcatgggcttgcctgggccaagagggccctcccgaggactggccagaacaaggaaagggacaggaaaggccacatctggatcacagccctgaagccccctcccccaaaccagccatcactctctcagagcccaacagtaacctcagccagggacgacttcctcaccctcctgaccccatgcatgcctttgcctggccaagacagccccacaggagcccctctgaggaaggggtcctctcctcctctgacccccagcccttctgcagcaggcagccctctcccatccccctttacccaggagcctcagcccaggtctggccttaagacttttaaccttcaccacgtggcccccaggcctctctgctggcccccctggcatccccatcctgaaacccacctccctgaacctggagccaagagagaaagggggaagagcgggccatggctccctcctccaggatggagaggtcttggtagcaggggagggctgtggaggaagggatggcagtgggtggaagctgaaactgggtgtagaaggaataaaagggatggactctgagaattctcccacagcccagctcttccagacttaatattttggactactattctttgctccccagccccaccactgcctcctcctcaaga

SEQ ID NO: 5671 - DNA, 688 bp, Artificial sequence
  DNA replication origin
caggcacgggtactcagagaaggggaggggccaaggcaccctgagtgtgctgattgtgtgggcctggggctgtctgttcatccatcagtggtctggagggttccaggagtgaaggcccccaggctggtttgccaggggcgggggtctgcagtgaggagggaggactccaggcctaccagcaccagatcagaagactgaggagccttggtggcacacaggggttgtgtgtccgggggtggggggcacggcctgggggggccctgcctctggtagctttcccttttccctgtcccctttacaccccctgcaaagcagggttcctgaccctcaaggccaccggtggagcctgggaggagggaggagagaggaggctgggacgaggggtggagtggggggaggaggaggaggagggagggtgagctggaggcagcagggcgagaggcccagcagatgctggcggagccggagcagccgcggactcagagagcccttctgccagcgccgcggggactctagcttcaggggctcttcacaggccctgggcgtgcctcagtgacgggacccagcaaagatgacgtggatctgtctgtcctgcatgctctgggtaggtctggctgctttagctgcgacgttactcttcctcaaaccccccgccccccaccggcccctgccaccttatccttttgct

SEQ ID NO: 5672 - DNA, 957 bp, Artificial sequence
  DNA replication origin
ctggattcccccttagtgctccgtgggaatacttttgggttttgacccagcctcctttccaccctctagacccccaacaattgtccctgggcagaggtgggggcgaggggaggggagggctggtgggcaggggacactgaggggaagaaataggcctgtggaatggtgggaggggagaactgggcccagggagggggagaggggaggagggggaggaagtggggaaatgcaaaccaaatgttggccccgggtacagtcaagaaaaacacactctcgcgggagcctggagcggggctccctttcagaagggcaggaaaggctgggacagatgtttgcaggaaagaaagaaagaagggggaaaaaaaaagaaataggaaaaaaattggaatgaaacccacagcctgggggcagggccattcttccccagtctcgggccctatttcttctgtgttaaggcctgtcctgggctctgagcttggcgcgtgggcaccagagtctgtcccagtctgtgtgtgcaaatgcatgtgtgttccgaggaggccaggaaggcaggcacgggtactcagagaaggggaggggccaaggcaccctgagtgtgctgattgtgtgggcctggggctgtctgttcatccatcagtggtctggagggttccaggagtgaaggcccccaggctggtttgccaggggcgggggtctgcagtgaggagggaggactccaggcctaccagcaccagatcagaagactgaggagccttggtggcacacaggggttgtgtgtccgggggtggggggcacggcctgggggggccctgcctctggtagctttcccttttccctgtcccctttacaccccctgcaaagcagggttcctgaccctcaaggccaccggtggagcctgggaggagggaggagagaggaggctgggacgaggggtggagtggggggaggaggaggagg

SEQ ID NO: 5673 - DNA, 992 bp, Artificial sequence
  DNA replication origin
tctgcgccaggagcggcgggtccacctcttccgaccctcgcgccccaggcgcccactctcggggtcagcatgactcggctgagttggtgcttctcctgcgtgatccgatggggcaagtacctcttctcgtgcctcctgcccctgcgcttctgcctccgcagccaggtaaatgctctcggccacacctggccccttccgacccccccccgccccctccctcccagacgcttccctcccgcagtctcctgggcattcgatctgacttactaccctccactctcagggaccctccgtctcggccatcgtcagcctggttctcagcagagtttgggactccgggggagtcgccacccaggttgctgggatccgggaaggggagttgctgcccctcccccagcgcacacccctgggtgtcttgggcttggatcagaagtctgaaggatagccccggagtctgtgggagggcggcggatttggggatacggagtaaagttcctggggttttaagcatccctctcaaatttccgtgggaagggaaggtgggttcctggaaatgccccctgtcccccgatccccagaagccaccgagttaaggcagcgaggtaaggaagtgaaatgaacacgggaatggggtggctgggggacggcaggagggatttcccacttattcaggatggagggaccagggaactggacagggagaggatgggggctggggcgccagggagggagcagcagctgggctgggggcgggagcaggggtctggggaacctgcagtgctgtgggtgggcgtgtcctggttgagcatcggtctccctgggattctcagagaggatgcttgatgttgccttcagcgtgtgtgtaacgtgtgtatgtgtgtgggtggggggagtatagacgtgagggtggaggtggaggtgggggcatagctacaaagtagggaattggaaaaactgtgtgtaactttaaattctccctggagggcaaggag

SEQ ID NO: 5674 - DNA, 1865 bp, Artificial sequence
  DNA replication origin
cgcctggggcgcgagggtcggaagaggtggacccgccgctcctggcgcagagttccggggttggggcggggtaggaaggcgggcgccctgccctaccctgtcccgggtctcccggaggctcagccccggaggagcagcccgtgtcctgctgccccctctagcgggaggagcggcgcgggaggcccgcggcgcggcccggactgggctccatctccggggaacccccacggggcgcgggcagcagggggcttacaccctcagggactcttcctccgcggctttctcctcccctggctgcgtgacagcctccgcctcctgcttcccgggcgcgctgcggggcggatgccggcaccccggcaacttctgaggttcggggagccgcgcgggggaggcgggaggggagccggcagaggcggcgcccggcgccgggcgtccggcgtccacctgcgaggaaggagcagcagccgcgggagccggggcggcggcggcggcagcattgtgctcctggctgcagtgagggtgtgagcctgcgtgtgtgagtgaatgcggattccctccagagcccactccaattcccatattgctccccagggcataatgtaattaacttaaacggaggcctccggcttccatgacccaagtagacacatccctgttccaggcgtgcacgtggggactctgtgcacaatctggaccagctgtccagtcccacctccaacctctgaccctggccacacactccgactcctcagccaggatctctctctatcccactcagtgtgagggcgctcagacgttcagcacatccaaagagcccccacaggttggaagggaccctgcctgggagagaggagagctggaccagcactctagggctggagctgcagccgcctgctctgggttcagggcctccacttcacatcttctcccttctgcgtgcccttgcctacctctgctgtgctcagctgaacagaggatggggccctctcaggaatattgtgtgaggtcatcctattaggaccctagaactagggagagggaaggaaaaagaggggaggcggaggtcctggactctagagagagatggggagagacacagagacaggtagacaaaggcagagagaggcaggcagagagtgcggagagctggaggggcacccatgagcattgcccggggttctgtggctgcagagaaagtgggagggcaggcagccagccaagccgggagagaagaggggcggaggagctgccagggggcctcttccgcagcaagcgccactggagcccagccagacccctcccccatccccctggggctgggctgccctagcaccatctcagggccatttttccagatgatgctgcctccctgtccccttcctctcctgcaccagccagggtccctttcccactgtgtgggcggaggccctgaaagtttctcagctagctcacccctgcccccaagctctcctccgcctgccccccgcgacagattcctcaggccctgcccgtccccattgcagctccccacctcgagacaaggcagtggggtccagcatttggaggagactagcaggaccccagggagggagaaggaagaagaggttcctactggcgagtggatagagacgggggaaagagagacattaggggccctcatcctctaacaagccctccagcaagggggatcactcaacaaccaccacacatgctctggataaaagctggagggggcatcagggaggtaggaggagaggtagtgtgatccccacactaaagtgagcccatctccaacaggccgggcctttgttcatgcccacaatctcaagggaagccccagcactgctgagtcctgttccaagtct

SEQ ID NO: 5675 - DNA, 752 bp, Artificial sequence
  DNA replication origin
atgaacttgcccagggctcctggcactgggacagagcctggtgccaagggcaggcaagctaaggcagaccccagaggggccgcagcctgtgagtgggaagtataggctgccatcttcagagaggccaagtagtggggaggaaaggggacccaggctatgcttaggggccaggtccccttgctgactgtcccagctctgatttttaaattcacctccacccccaagaccccagcctggtgcttttggccagcccttctgcctcccagcctgagtagctgtaaagcccagagcaggaagctgcaaatctaccccaaggataggggatggaagaccccaagctctagggtccttttctggcctgagatatgagagtgctgggtgcttctgctgctgtctgtttaaagtgtgcctccccagtaagcccatgagccagggttttcaggccagtgccaagctttagtgaacctggtatcccaggcacttagcaaagaacctgtgacatctggatactcaataaaggttgcccaagggatggctggatgaatggtgagaggtggacaggtagagaccccacagacaggagagagaatgcagatagggcaagtgcaagaggatggtggtgataggcccgggtggcctgctgtacggggtggagctgttctgtctgggaaatagaggtctcccctgggcccatctgggcctgagcttctctgggcacccagcaggagggtgcaggtgtgggaatggggggt

SEQ ID NO: 5676 - DNA, 1083 bp, Artificial sequence
  DNA replication origin
gcagctaccgcttcaggtaggggctgcgggaatgggtgagggacgacgccccgagtcgggagctggcggttggcagagcccagggcacctgacacaggttaagtagccagcccaggacggtgctagtctgcttgggaagtgcggcaaggcaggtggaccaagggggaggaaggaccacgaccgggtgaaggggcctccagttgggtagagggctcccctgggtctcttgtgcccttgggaggagggtgatataggacctgacccctagaagggcaaataggttgggtgaggttggtttaggagtcacccaggaggggcaggcctggagtgctggggcaaggtagggaaagagttaatcttcctcgagctggaccaaggggcagctctggcagtgtcccttcatttaggaggactctggagttaggagggtgggggccccactggagcaaggacttccccaggatggtggggacaggctggcctctcacccctgccttctctgtgctgggtaagtctcagagactagcaagtggggagctgacctggcagtggggacaggtctgagctgggaggcaggtgtctgctctggaggagtctgccagggaaccatcaggcctgggataggtgtggtgctggtttcttcctgggagagtaggaggaggtgtttggggtcaccagggatgggtaactcctctctaggtccctgtgacctcaggactcgctgttggtgggtcttctttcttcaccctgtgtccctgcctccccacctcccacacagccagctttgacatggggcaggtgcctgttgggccaggtaaaggtgggcagggacagggacagggagtggggctgtgatggagggaggagccggggctctggaggtggatgatcaaggggagaaagaggggagggtgtgtgtgccggtgtgtgacagtggcagggagagggatggggacgagtgtctgcatcagatgagctggtttctaagcggcctctggagagagcctggagctcgcctgtgactccctccctcctctgtctgtggggatcaagctccatcccagctgctgtgccctgactctg

SEQ ID NO: 5677 - DNA, 832 bp, Artificial sequence
  DNA replication origin
tagcaccgtcctgggctggctacttaacctgtgtcaggtgccctgggctctgccaaccgccagctcccgactcggggcgtcgtccctcacccattcccgcagcccctacctgaagcggtagctgccttctctctgcacaggccaaacccccggactcccagcactcagcccgcgccgagacccagggactccccgggggctggggaccgcagagtggtccgggccgcagctcttcgcagcacaccaggctcacagtgcagcccatccggcctggcgccccggcgggcaggggcggagacgcgggagccccagaagccggcccgcccccagcccttgcgacagctcagcccagagcgcctgcgacattggcaggcgagcagcaacgaccccagcctggccccgacagagtccctgcctttatgtccagcagcgacaggagcccccactgtggggcctgataagggtctgcaatacaggtcccgaacacagccagtgaggaagcccacctcagggaggggagaagggagggcggcagtggtggagtccttgggacagggacttcagacagtctgacttggggggcaaggtgagaaacacaccaagaacgtgacagagggacagggagaagataaaggcagacaatgaggaagaggcagagatgagggacagagatgggggaagcagcctccgcatgggggatataggtgcaggacggagccgaggatagaaaccctcgggcatccgttgtgctggtttttagatgcggttcctggggtttgtgaaaacagccgtcctcccaggcccctgctccacttccctaatactagcccct

SEQ ID NO: 5678 - DNA, 1049 bp, Artificial sequence
  DNA replication origin
cacaaaggaggatgcagagcctcctttgtgtaaagtccagagagggaaagacttatatctggccacacagcaagggaaaatcccagctctattttgtaggccagggtgtgaagatgatggtgtggcctccaccgattgagcagtccctgggcgacgacactgtgctaattgtttaatatctttgtcccattcaatccccacataaccctgggaggctagaggggaacctggggcacagagagggtaagtcttttatccagcatcacagaggttcccaggatttgaactcaggtgtgtgtgcccacagggcctgtgttctgggccctgacttggtgtgagcagccccgtgagggttcatgccatgtggacactaggctgggagtgtccccatgttccccatggagggcccccagcctcacccgggtactcatcctcctcgagacacccactcatcttttcctgggccccagctgaatggaaatgtgtgttctttgaggagaggttgcagaagtaaagcgcggccccaaggctggagctgagcagatgctgcgtgtgtggggggagcagggtgcctggttttaatactgcctctctcctgggggatctcatcctcttctcctcccaatggatcctggggcccagacggggacactgtggccctgagagcaggtggccttattctgagatcctagagtcaagaccaggcatggagcggaaaacccaggtgtcctgcctcccgggctgtggctgctggagtttggggtggcgtggcagtggtacagcagtgggacacagtggagggaaggggagagggaaacggaggtaaatgagggaggtggctggggcatgggattcagggaggacggggtcaggagcccagagacctgggtctccatcctggcctggctacacactcactgtgtgatctcgggcaaatcactcaccttccttgagcctcagtttccccacctgtagaccaaagattggactgatggtctcggcagccccttccagcccagatcctgtgtgaaatccatgaacggctccat

SEQ ID NO: 5679 - DNA, 914 bp, Artificial sequence
  DNA replication origin
agcagactgaagctgcctcccctctgcccctccctctccccccacccctcctctcctactctgactctgatgccctgcctgcagtgggccagggagagggctgagtggggccacgactaattttggataaaggactcgatgtggagatggcttgggtgtgggtgggaaggagtgggaggacgttgaaaatggcccctctcatctcacaaagatgagatgattctccacccgttcccaggctggagaatccatatggagctgacctcagtgtctgtcccccaacccccaatccagaacttgcgctaggactgcctgcccagatgttttaggctggcctctgttctagacaaggaaacgggatcggggtgatgaagggggacccggagaagcctgctgtgcttcaaggctgggctccctgcaggggaggggatggggttaggggataggatgggtgctgggtggggaggaactggagggggagggcaggcaggcaggcggttgtgggatgggaataggagggggacctggaaactagggtgccagggtctttgggcacagggacttctcttctggaagccccaattgccccttcagcatggcaccagtggggaaggtgtagggggagcaccctctcttcccctcctaaagctgcctggggtgggtaaagatcatggtggctcagacttggcctcaagttgcaccttcccctgccagctggtggccactcctgtatccccaactccagctctccccggacctcagtacttgctacagctggggcaacccctgcctgaaacctctggcccagggttgtgggatggagcgagggaggatgtggattgagatggagaggtgggtgggagagccccgaatgggatcagcactggagacccaacttggggttggcttggact

SEQ ID NO: 5680 - DNA, 1362 bp, Artificial sequence
  DNA replication origin
gcgttctcgaacttgagcgcgagcgtctcctcgatgatgcggttgttcacctccagcaggatcatggcggcggctgcccccaggggaaggagaaacaagggccggtgagggtgggtaagggaggcaaggacggagggagcggccctgctgccccctgagtggggctgggtggggtaggaggttaggggagaaggggagaggggccggggtggagggaagggtaagacgaacgcgctggcccacgcacgcagactgtggagacacccacccacccaaccgacctggcccccgaagcctgaacccgcctgccgagccgccgccgccgccgccactgccgcttcaccgacaagcccggtccccgcccagcccccggctctagccggccacttccgctctcacacccacttccgctcgccgcctggacgcgcggccccgcggcgccatttccgcttcaaccactcgtgaacgcgagcgcaggcgcgccggaggaaacggaggctgcgcttgcgtatgtgtgatgccgccgccccaccgtctactttcccaccgaccccgcttacgtctaccgcctaccagtgcgtcccccgcggagctgtcattccccgaggcttgcctgactgttcagcttctctctcccgcttgtcccagagatccaactccattcttccggtcttgtcatttcagaaacctcgcaagaagctcgcccttgtcgtctcccagcgggcttcttagctcccagcttgtttgatgggggtgcctctttttctttccaggtatagctgtccagcgacaccatcatgcattcatttctccaacaaacattttcatgggctcttgctctatactggggatgtagtggtaaatgaaatggacgaggccctgccctcgtggaacttacagtctggcaaaggaaacagacaataaaattctcagttgtctaaggaggcagagatgcatggggagaggatcagagtagggatgcggaagcagcgagtggtcaggagtgtgcgtgccaaaaggcaggagacctgtgggacgtgggggcagctggggccggaacttgcgctggaggaacaccccttgcctgctggggcgagaagaggaccctttccttgggtgaaattccccatattgttaaaaggacaattaaagaaatgaaagagaggtcacctgggtgaataggcaacttagatgggcctccctgtgttcctgtcatgcctccaattctgcgtccaggtgtccggaacacatttttttctgcctttgaaaccttccagtacctctggcagagatataccataccctccttgttacctgcgtgcggaatcttaactcatcgttgtgctacatctgcaccttctg

SEQ ID NO: 5681 - DNA, 1702 bp, Artificial sequence
  DNA replication origin
ttttctagcttcctatcagtatcatgtattgcctttaaatccgaaaatacccctgtgttattagtgaggcgtcgtcggggctctgagaggcgcgcgcgcccgggacagacccctgcgccccctggcggcgccctgaggccccgccccacgaggccggcgcgacggggcggggcgcggagccccagccgagcctagccctgcccggccccggaggacttgcaacactccgaggccaggaacgctccgtctggaacggcgcaggcaagccagggggccggggccggcgccgttggggactgtgggcggtggggactggtccagggctggggcggccatgcgccggggcgcctaaacttttcggagcgcgctcccggcttgcccgctcctgggcccaaggagcccgttccagatggggatctcccctcctggcccttggcgtttcgctctccctgggcgcgcgggtgggcggccgggtctgtggcacctggttagccttgggagcccagcagcgtgttgtgggcactggtgagcggagccagggtctgggggtgtcctcgtgttccctctttcgggcacgagtggcctctctgtcgcagggcctatccaccatgccagcccgagtggccagctgtgtgggatgagggctttcatggccctcagctggtgagaagagggaagagggaggggagacagccagggcctggcacggaccccaggttgcccccacacgcgctgaggccagtctcggtgtagacaggtgaatatttaaggggtggggaagggggggtcctagcttgcagctggggcagaagccaatgagcagctcaagtgtttggcatggggaagtggccacctctatcaccatgactttgccctctgccagtcccacttccagccactgtttcccggctgggttcacagaactacaggggagtaacatcctcctcgtgacttctttgggttagagtgaaaacaaaacagagaaacgggaaaagggaaagcaagtggagagactggggcaggagccagggaccagtgggaggaagcagagggaggctgctgggaggccaggccctggccttgtggggtcggcaccaattcttgtcctatggggtctccatctcctctccctcctctgtggcctctacgtggtacccaggagtttggggttctacctgagcaccctggacatgggataagtaggcctgggaacgcaggtcagagccagatgtcatggaagggccctcaggtgtccagttctctgggctctgaaatattcatctcattagtgagctttggtttccaagctggcgactttgggctggccagtggtggcaggggagccaggtgcctcctggggctgctttattggcgcaaagggggagccatacttccttctcacctgcctcctctctctgtctctccagtcatgaggatccagagaaccagtttatagcttaaatggaagaggcaggaccacagtgtcaggggccctgtctttctgtgctatgacctcaaggcctcacttgtaaaaatgagcccttcagagaggtaatgatgggttatcctgtaagtgttgggagagcctcatgtcatgagctggggtaatagccacctgggctcagcctcctcccctgggaatgggtgcctcagccagacgctgtctacctcagagcacctccaaccgcaggcctcaccctgg

SEQ ID NO: 5682 - DNA, 1645 bp, Artificial sequence
  DNA replication origin
gtgcgccatgagcagaccgcggaggccccgccgcgctcggcagccgcgggggctcacaagtaggacgaggacaaggacgaggaggagccagcagccggcgacccactgccacgccgcgggccagccctgccaagccatgctgggggcaggcacgcgccggccgggcggggctcggcgttgctaggcaacggcccggccccggccccccgcggggaacctgcctgccggctctggacgtgggggcgttgtggccccgccccgcccattgacctctcctttggacccgccccctcaccacctccagccgggcaagcaccccgaaggccacccggcttggggggcggcctggctccgcccggctggcggccaggaggcggggccacagcgggccgcgagcctgcgctgatcggggtccacagtcgcctgagccctgggaaggggcaggagctcgcagttcgccccgcccgcctccccgtccagggcactgctacactttctcaactggcagaaacctgagagatcatcggggtcagctgccattcatggatttattcattcgccgaattacttttctagctcctcctatgtacttggcactctgccaggctctgaggaggatgcaagggtcaaaggcacactgtctgcattcctggagcccacagtccggaatctagtgaggcgacgaaccaaataagcgagcaaacaaaattatatctgtttatgcatacacatacatatgcgcgtgataaattgcgaaaggaagtcaaggagggggcaatgatatggagcacagagagggccaacttagatgggggagggcctccccagcggacgacataagtcctgccctgaaggataggaagaggccacacaagctctggaggagcaacatgacctaggatatgtagccatgggtggcacagaggggcctagggctggggcattcccactcccaaacccagggcgatttccacatcaccgttcccagctccctcactgctgccctcctgatggattctagaagttgttaaggtccctggaatggaagcaggtgtgaggacaggcgtggtggtggtgaaatctacaaatttaggcacaggagccagggctgggcttgttttggctccagccctagctctggcccaggacaggaagggaaggaaatgctctaaagagtcaagctcggccaggcgcggtggctcacgcctgtaatcccagcactttgggaggccgaggggggcggatcacgtgaggtcgggagttggagaccagcttgaccaacatggagaaaccacgtctttactaaaaatacaaaattagccaggcatggtggcgcctgcctgtaatcctagctactcgggaggctgagacaggagaatcgcttgaacccaggaggcagaagttgcggtgagtcgagatcgtgccattgcactctagagcaagactccggctcaaaaaaaaaaaaaaaaaagagtcaagctcggccgggagcggtggctcacgcttaatcccagcactttgggaggctgaggcctgcggatcgctaggtcaagagatcgagaccatcctggctaacacggtgaaaccccatctctactaaaaatacaaaattagcctggcatggtggcatgcacatgtagtccca

SEQ ID NO: 5683 - DNA, 1606 bp, Artificial sequence
  DNA replication origin
cggcccgctgtggccccgcctcctggccgccagccgggcggagccaggccgccccccaagccgggtggccttcggggtgcttgcccggctggaggtggtgagggggcgggtccaaaggagaggtcaatgggcggggcggggccacaacgcccccacgtccagagccggcaggcaggttccccgcggggggccggggccgggccgttgcctagcaacgccgagccccgcccggccggcgcgtgcctgcccccagcatggcttggcagggctggcccgcggcgtggcagtgggtcgccggctgctggctcctcctcgtccttgtcctcgtcctacttgtgagcccccgcggctgccgagcgcggcggggcctccgcggtctgctcatggcgcacagccagcggctgctcttccgaatcgggttagtgcccgggctccgaagcgtgcgggctcgggaggcgggcgcgctgggagaggggactgggaggcgggggctggagctgggggtgggcgtggcggttaggaaggggcttggtctaagggaagagggatcgaggagacggactggagaagccactgagttggggggcctgagggatttggggggctggacaattgggataagctggggaaggaggatcggagaggcgggccagggtggccacggaaggagggcgtgagaggacatctggagcaaagtgccacagaatgggctggagaccaggaagctggacagggggatagtgcaggagccagggctgggaagaccgtccctgtccgggggtgaggtcagcagatgcccgggctccgatggcaagtgccggagagaaggaatgcctcccaccgtctgacatttaaaaccgccaactcctttcgtatgtccttgtcccactccccagcatccaactcctcaccagtcaagttaggttcttctgtcccaagcaagagtcccaaccctgttggattccagtatgtccctttccttctaaccaaagcctggcccgtgtggaagccccaggctgtgaaatctgacccaactgactctgcccacttttccagtgatttgtctccgtcgaccctcccccgctcactctgccctcctgcctccctctaccccttccttcctggccccaggggagggtggtgcctagcaagcactgttcagccccagggacactgagaggcagggaagaagacaggcctccgaggccccctgtccccttcctactaccagcctggccatgggtcaggacctcaagccccagtttagggacagtaatgttggggatgggaattgtgagagccctggccacaggccaggttgtggggagagcctaagcctgggaatttcccgagcttccgagcagacattgtgcaattcaccctctcctccccagaccaccccacacgcccagaagcttcaggcgcaggattccactcacagtctaagaaatgcagatataaaggcaggataactagaaaaacatggtgctggagggtggggtggggatcttgtgtttgtgccttttggggcattcacatctctaatatcctaaaccttggtcgcagtttagataatgtgccaagtaagttaccattgctctgcacg

SEQ ID NO: 5684 - DNA, 1528 bp, Artificial sequence
  DNA replication origin
ccgagacactagacgctagccagggacgctgtcgacgggcgctgcagagaagcgggagggccccatttattcccccaaaaccgcagcccggaaagcgcacccgccccggcgcgtcccgcccgcgtcccagcccgacccctggtttcctgccctgtccgggcctgggccccgcttaggccgcccccgagcgggcgtctccctccggctccagggagcggaaagggttgggccggtgggaggagcccaaggccggtgacgacggacgccacgggtcgaaggggccgaagaactcggcggcgaaggtgaccacgtcctccggctggcgcagcagcaggaagagcaggaagtcggagatgagcgcgtgggcttcggggtgctgccgcagatagctggcgtggccgagccggagctcctcctggcaggggacagagcccgagcctcagccggacgggacccccgcgccccaggagcccccagccgctcgctccaaggagagctaaggggcgctggagccttctagcccctacgggtgtgcatttcaatcaggtgcagagatcagtaatgaatttaaggcccatgggggaatgggaaccccaggctggtggagcctcccctcaccttccggtccaggaacttcgaatagagctccatatcctcctcccataccaggggcttcttctcaaacactgggcgtggctcaatctcatctaggtggggaacaaggaaggctgggcgtccctaccccggaaccttccttggatacacagcgagatcccgagaacacccaaacagaaggctcaggtgaaaccccaggattctgcccacatgggcagagttgcaggaagggacttccagtaggaaagatcctcctcttattgcttggggtcaggggctggagggcagatgttctccagctgattccaggctcctgtcccgtttacagcacactgggtccagccccctgcatcctggaaggcccaggtttccccactccccttaactctccctgcctgcacaaggcctgggcttcactcaccctcttccctcaagatgggcatcttggtgatgatgcagcaccctggggagcccacctgtattctcttggccaggtgcctggagtgcaacacaacatgtgagagtgagaatcttcccagaccgcctgctatggactgaattgtctctctaacccccagtgtggtggtatttggaggtaggggctttggggaggtcattacgtttacatgcagtcataagggtggggcccgaatcagataggattagtgcccttatgagaaaagggtgatgccagagagctttctcttcactcatgcacggaagaaaggccatgtgaggacacattgagaaggcacttgtctgcaagctaggaagacagccctcaccagaaaccaaccctgatggcaccatgatcttggacttcctgccttccagcaaatatatttctcttgaagccacccagcctgtggtgttttgttatggcagcctaagcagactcctacatgacagtgcc

SEQ ID NO: 5685 - DNA, 1195 bp, Artificial sequence
  DNA replication origin
ttgtaatctcagctacttaggaggctgaggcagaagaatcgcttgaacctgggaggcagaggttgcagtgagccaagatctcaccactgcactctagcctgggtaacaagagtgaaactccgtctcaaaaaaaaaaaaaaaaaaattagctgggtgtgatggcatgcacctatagtccctgctactcgggagcctgaggtgggaagattgctagagacagggagggcaggctgcagtgagccatgattgaaccactgcactccagcctaggtgacagagggagaccatctggggggtgggaggggggaaggataatggtgattcctaccctcctgccccccagggtggctgtggggacaatggaagccttgtaggcaagatgtgcctgggacagggcctggcaggcccatgcaaggctcagcgtgggggttgctggaggtcctgtttcgctcagcagtgggcagggctggtggggttggcgcatctcaccagcaggctctgcagcacgttgagcagatcattgaggcccgacaagtccctcaggtcccggaagacagccacgagcacggtgggcaggatggcgcaggagcgggtgaggaggacacgggcgaagcgtgaccaccgcagcctcaggaagccctggggtgggggtgaactccttggtgaggagtagacaggactggggattccagaggagagatcctctgtagtccctcaaccgatttatccctgggggcatgctctgtttttccactgttgaactgggacagctctgtccctaggtggcaagaggggatgggtggggagaaatggggagctcccatcccatagctggttgctgaagactaaacagttttggggaaaaggcttctgttagtcctgggtctgcagcttccagcaagtcacctcatctgtcaggatctgttttctcatctgtaaaatggggcttatagtgtcgccctctgggctacatgaaggaaacaaagctgagtggggtggctcacgtctgtaatcccagcactttgggaagccaaggcgggaagatcacttgagcccaggagttcgagaccagcctgggaaacataggaagaccacatctctacaaataattttaaaaattagcctggtgtggtggcatgagcctgtagtcccaatgactcgggaggctgaagttgaggctgcagcgagctgtgat

SEQ ID NO: 5686 - DNA, 744 bp, Artificial sequence
  DNA replication origin
tcctctttcttaaaagggcaacgatgcgagtgggtccctcaaggagagaagagatgggaccggtctggtgcgacctgggcaagcgctgcagagggtacctgggcaagagggccgcccgcctcctctgggtttggcactggagaagatgggtccatgccagctgaaggaggagatggatgggggacgtttagcgaagaaaggcatctcccagatcctttagcctcctggaagtgcccccgttgtaccccctacacacccctcttggcattgagtgccagtcctctgccaggctctgtgttacaagttggggagggcggcaaagtcccgaattaaagatgtcagttctcaaggaccccacactccagcggcgggagacagctgtgcaaacaagtccctgtggcaggatgcggtgaagggcgctgcccgtgacgccagccagggaaggggactgaatcttgctgaagggggggtcggcggtaggggggagtgttgacaggacagcccaggaggaatgagagtgccaggagcatgggggcacgtgtgtgcacatctgccaagacctgaagctttctggggacgtcttagatcttgtggggcaggacgggggacggcagagtaatgggcaggttggtcaagaagacacggagacccggctaaagggctacccaggacctgggcaaagggctagtgatgaggtcgcgccaaggtcagtcatttggacactggaaggcgtctacttagagc

SEQ ID NO: 5687 - DNA, 1544 bp, Artificial sequence
  DNA replication origin
gcccagcacggcgccgcacgcggtgggcccaaagcccgaccgtgggggacctcaaaccagaggccctcaaggcccgttccacccggcctgtggcgcagtgctgggcacttgggaacggaggtccctgtcttctcgctgcaagcccctccgtggtgcgcgccgtgggtctgcgggttggtctttttcctcgtttatgaagttcttttcactcgtcgttactattttgtaagttcaccatttaaaaattaataatgccaagcccgacaaacacccctcggcacttcctcccctccccctctcccgcgggcctccgtggcggggcggggcgggcgcgtcctgtcccgtccggccgccgggtgcgacgcggcgcacgtccgccaggccctgccgagggggagccggggaggggaggccccgcgcgggggccgggaggggaagggaggggagcggcgtctgccagaaggcgcggcggcttcgtgcgctgaggctgggagtaggggcgggaggggactgtcggggactgataccccggtccccgggctggatccctcggccctcctcctgctcctgggtagcccacggggcggccaccattgcgcttcatcaccgtgatcgccacacgctgctggcgttttcctaggcctgctctggctgcgccccctaatctcatttaccccttagaacggcctccttcttaacccatttcacagatgaggaaactgagtttcaagaaaggaagcgacgtgcttcgggtctaccggcaagggcaaaggcgggattccagcctgggagcgggacatctgtctcccctgcggtccggccccctgggtggggcctcggctttatctccggatgcggggccctcatgaccccaaaaggaagcgtgtggcgagggactgagtggagtcgtggcctcgcccttggcctgggttgggtggcgcgctttcctctccctctgtgaagggggctggtacctggccggctgtccccacacccaccattcccagacgcgccatcctgagctcacaggattcctcaggaatcccccacctcctccaccccatcttatcgccacttcaagccgttgcccgtgcagttcttttcccagggagacctaactcctcctcccaggctcccaaagcggcagaggtagccgcgccttctgcctggagccctggacttatctccccacgcctggggcgggtagttagttacggagtgagcgagaggccaggattgcgtggggggaggggggtccttcgagtgtcctcactgtaggggttgtctacacccagctgccctctgtctctacaggtggaggtcgctttatgcactctattttttgtctgttttatcattcgcaccccaggaaaaataaaatcatgggggccacaagtcagaaacggggaggggcaggaacgggattcagcaaggtgctgtctggcacctgtggatttggaagcgtctcttccaacacagtccctcagtttccccatctgccaaacagggctggtaaaagcccaacccagggggaggcggggagc

SEQ ID NO: 5688 - DNA, 834 bp, Artificial sequence
  DNA replication origin
gggtgtttgtcgggcttggcattattaatttttaaatggtgaacttacaaaatagtaacgacgagtgaaaagaacttcataaacgaggaaaaagaccaacccgcagacccacggcgcgcaccacggaggggcttgcagcgagaagacagggacctccgttcccaagtgcccagcactgcgccacaggccgggtggaacgggccttgagggcctctggtttgaggtcccccacggtcgggctttgggcccaccgcgtgcggcgccgtgctgggctcctaggatcggcagcgagtccagtgactcccaccgcacccccagtaatcacagggcggccgtcgaccgcgggcaggggagggggtctgggaaggcccctggagaaggtggcatttcctcgaggtcggtggaatttggctacgcgaaaggaacagcgcgtacgaaaacttcaggcgggaacgcgcggtggcccgtgcgcggcgggtagacgtgcggggccccgggtggggccgtggggagaggtcggcagggggctttcccagggcagagagttagaatttcacgtcctacagaccgggggcacctcgccctggggctgcggggggcggcgaccgtcccattcaagagcgtgattctgaggtttgcacagctgtttcgggccagcagagccttcgctggctcttgacgtccttgcgaggtgatctctgcgaccaccagacaggagagaagacccattttacagatgaggtagtgctatctccaagtcctcaacgaggaaaccgagaagcctctagtcccgggtcttcagaaaacgcagaggtggagccgcgccgcactcgg

SEQ ID NO: 5689 - DNA, 1008 bp, Artificial sequence
  DNA replication origin
cacccccccgggctgcggtccggtagggtcttgggagggggcgccgaggtgacagcaggctggggaggcttggagggatctcccgccaacacacagctacgttccccacaaacttcgcgtcacgcgtggaggcgccgaccccctcggaggcacagagaggacggccggcacttccaagagtcgcttggcgcccgcggggagagtcgtgcgcctagtgggcacgcaccaccccgcaaagcctcgccgccccgacgaggctgcgtcccccagcgtggctgggccggggtgggggggtctgtcttctccttttccccgtgtggacctcaggatctggacgctgcccccaggtctgcccaccctcgcctgggtctggctgccccggaactgagggcaaggtggaaaggctagttgcagggggccggaggggggtggggtgggaggggtatctgtcaatcaggctgctgggctccaggtcggaggtctgggcggggcagggcaaacagatggccactggacactggccccaggccgcgggactgcacccctgcctctgggcccagccgcagtgaggacttcgtacccacgggggtggagaggatggagggagggcaggggtggactgccctgggtcccaggccctggctgtcctgagcaggggtgctcaggtaaggtggggtcaggaggcaccgcaatggggctgatcagcagcagtcatggaggctgtgagaggcagggagagagcaccccaggacctccttctccaggccacgcactccctatgtgggcgccttaatacctgctagacctatttgtctgggagctgcaggagccttgcagttgattgtggagccctgacaggggcgtttcagagaaagtcaggagctgccttcgtgtgtctggatgaaggggccacggcaagatcctcctggctcaggggttcacacctgggcacacatgcaggattctgcaggccagtgtgcaccgagcctccaacttgtgcctccctac

SEQ ID NO: 5690 - DNA, 1597 bp, Artificial sequence
  DNA replication origin
gacacgatggggaggtggagctggggcgcaggcaccaacacctgagaggcatttcccccttcttccctgggtgtgtgcggtgggggctccagaaacgcccgacccccgggaaaggggtgagtgaggtgggccccatctttccagcccccggggagttcctgcgtccgcgaggacagggaggcctctagcggctggcgtgggaagcaagcaaaggctggctggggacggcgggagggcatttcctgccggcgcctggggccgcgcggtttcgcaaaggaagtgcctcccggacgcggggcggggcgggaagtggggcgggggcgcggccaatggctgctcagaggccgcagaggggcggggggggccgagccccggcgccggccccacccaggccgcccggcagagccaggcgccggagcccgccgcacccaggccaacaagttctgccgctggagcctccacccagagcctcgccccgctccccgcctctgccttcggagccgcacaagccccgcccctctgctccagggcagaggccacgccccctcccccgccgcattccaggactgcccctacccaggccttcgaattttgctttccagctactagtatcctgtcgtctgtgtccaggcacttaattagtcctgccaatagggcacatctccattttgcagaccacatacccgaggcgggaagacgtagacgagcacagcctggaggctcaaatttgtgctctgacgctgcccttcccacctgaagtgtcgagggccgggcagcccctccctccaccaacagccctctaggtgtgctgaagcgggggggggggggcccacggcagccgcaggtgcaaggcacacaccccacttgctgaagtcccccgcaataaccacagaagcaggataggggtctggctttctctttagttctcatcacactagggctctcagtcacagagaaggcacttaaatgggaaggccacctgatgcaggccaaccatattcaccccccgcccacccgctctgggggaggggagcacaacgacatcaccacttgacatcccccttggcactggtatgtgggtccccttaaccgttagaccctggggagagcccaaggccttgacctccggaatcgccatgttaggaggaggggcttcagaaacagttggaaggcaggatatcctgggagctgcccccagccagcaggggatcaggcagggggctgtaggagatgggttggcacaggggaaggggacagcttggtcgggcttcctggagatccccaaaccccacagaaggtcccacctcctacagatcccccaaaggcaccggtgaaggatgggcaaggaggcactgatgagctggcgtagagaccccccacacacacttagctggtgggcctagcatatgctgggcacagaaggtgctcaagaaatgtttttttgaatgaatgaacggagcaaaggggtgtgagggacagaggacagggcctgggccccttggcccagcttgttccattcagaaaatagcagtttaaaaaatgtaaaaatcctttccctccctccccccaacttctgggcccaggaaaggggcaaggg

SEQ ID NO: 5691 - DNA, 1232 bp, Artificial sequence
  DNA replication origin
tgcctgcaagaaaaaggctactcccagccaggcgcggtggctcacacctgcaatcccaggactttcagaggctgaggtgggaggatcgcttgagcctagaagttccagaccagcctggacaacatagtaagaacccatctccacaaaaaaaaatttaaaaattagccaggcgtggtggtgcatgcctgtagtcccaaatactcctacaggctgaagcgggaggatggcctgagcccaggaggttgaggctgcagtgagccatgatcatgcctttgcacattagcctgggagacagagacctcgtctcaaaaaaaaaaaaaaaaaaaaaaaagaaaagaaaaaaaagaaaaaaagaaaggccactcccttggtctggccatagatctgcataatctaccccctcctgcattctgcggcctcatttcctcatttccaaactcctctgagcctcgctactgcagggagtgttttccaatcctccagggctgcccaagtagggctaggtgtcccctgtcctcacccgccttccatggttctcccgtgctgcatttgcagaattgcagtgaccatctgttcacgtttctttctctccaccctaggatgtgagttccctgagagcagaggcacagcctggtcctggcacggtgcctggcacacagtacgcacccgatacatgtggttgacttgaacttcatgtgggtacagggtgtgtaggtggtggtggtggggaagcctcactgtggtctcaaagtctggagctcctttgcgtgtttatctggcctctgcgatgcacatctgggaggatcagtgtttgcatggagagcaggaaataagagcaggacccgaggatgagggcagagaccggagaggactgtgaatttatatagccaagggctcttgtggtccagcccaggccaaaactgagactagggtaactgcaggtttttccagggtgcttcttgaatcttttttaccagagaaaagtagtggaaggaggacaaagggcggcttcacacagcgctgactccccctcacacagacttggggaccgatcagcgtctggggcaccaagaggccgcctgggggctggattcaggaggtaaggtgttgagcagacacgatggggaggtggagctggggcgcaggcaccaacacctgagaggcatttcccccttcttccctgggtgtgtgcggtgggggctccagaaacgcccgacccccgggaaaggggt

SEQ ID NO: 5692 - DNA, 828 bp, Artificial sequence
  DNA replication origin
gcccaccatctcgcccggctaattttttgtatttttagtagagacagggtttcaccgtgttagccaggatggtcttgatctcctgacctcgtgatccgcctgcctcggcctcccaaagtgctgggattacacgcgtgagccaccacgcccagcccatgagtatttgttgagcacctactatgtgctaggagctgggggctgcaaagacaaacatatctaggtcttggagctcagggacctccaacttacaaacaggttatttcatcaccatgtggtcagggggccaagagaagggacagtccaggatgcagaggggccccttgtccagctgaggattctaggaaggtctcctggaagaaatgagatctaaattgagtctagaagagcatgttagtgtcagaaaggtggggagagctttccatattggagcagtgcaagcaggcgtggggtgagaggcagcatgggggtggggccgccagcagtgtggcatttctagagggcagagtgccagcagagaggggccagggggctgtgtgtagtggggagactcaagggagtttaggtggatggaagggcaggagcagaaagagtccaggatgctgcacagatggctgactttggggtcttggggtgaccatgcccttccctggtctggggacacagaagagaaagtaccaggagtggaggaagccagtgaattaaaactgaaggaggagacaactcaaatccaaaccagagtccacggtggcagggctgggggaagtgacgggccctggtcttcctggaagttcagggaagacaggagaagtgaggaggaggccctaccaa

SEQ ID NO: 5693 - DNA, 1055 bp, Artificial sequence
  DNA replication origin
cagggggcttggggtgggcctgggagggagagacttttttgtgtgtgaggctttcccagtccagcacctccagctccatcagactcttacctctcccgactctaggactgttacatcctggaccaggggggcctgaagatctacgtgtggaaagggaagaaagccaatgagcaggagaagaagggagccatgagccatgcgctggtagtggtgggggcgggggagggtccaggaggagggcagagtgatgggagggagagagcagatagcagcatggggtgggcaggcaggctcagaccagggcatagtgccaggcagaggcagggaaggctgggaggagcaggatgagggctgggcccggcccaatgggaggggcctgaggggccattctgtggtcatcttcggggttctctgcacaccagggagccaaccaccaggcaaccctggggccacctcaggatgtgggctctcacctccctgcacctgagctgagtttggagaagggaaggagaaatggagggaggctggcttcctacaaaaggggattgggtcagctcagaccagggccaagtcagagtttggggtcattgctggggctggagtcgtaaccctaactggcttggggccagtgttggattggggactgggcattaggattagcattgaggtagggtcacattaggcgttagatttggctttgggattggggtcagagttgtgtttcggtattagatttgaagctgaggtcagagtgagtcttgaggccagtgttaggtttcaggcggtatcagatttgaccttgaggctggggtcagagtagggttaggttggggattagcattgggattgggtttgggttcagttttggtgccggggtagatctgatggtggatctggttaggttagagctaggttttggcttgcattgggagtggggactaggggaggtgcatagcttccagccacccctttctcttccagaacttcatcaaagccaagcagtacccaccaagcacacaggtggaggtgcagaatgatggggctgagtcggccgt

SEQ ID NO: 5694 - DNA, 1458 bp, Artificial sequence
  DNA replication origin
ggtgtggggcttcccgatttcgaaagaatctcgctgcacccccgcccagagttcagaccaagcgaaaagttatttgagaggcctcgggggcgcggggtgaggagtcgtggcggaggccttggtcggggcgccgtggatatccccgagtcaccgcgtccctctcctgcagctcccgcgtcgctgggaggagcgagggagcgagcgggaaggggtctagctggcctttgctcggccctccccagcgcccggctttgaacccgccctgcactgctgtctgggcgggtccggggactcagcactcgacccaaaggtgcaggcgcgcgagcacaacccatggctgcgctgggctgcgcgaggctgaggtgggcgctgcgaggggccggccgtggcctctgcccccacggggccagagccaaggccgcgatccctgccgccctcccctcggacaaggccaccggagctcccggagccgggcctggtgtccggcggcggcaacggagcttagaggagattccacgtctaggacagctgcgcttcttctttcagctgttcgttcaaggctatgccctgcaactgcaccagttacaggtaacccgcgggggcatcgcgtcctggggatgggagtgggcaccggaacagagaggctagaggtgagaagacgttggacagaaagtgaaggctgcaggaactcagctggggacccactgaggctatggtcataaactggaaatcagtagggagaatgggcaaagtgcagacagagccctttgagctgagataaacaggacgaggaagggcttaaatcaggacggcaccagtaagggggggatctggacgccggacttacagtgagcagaggttgaggagggagctgtcttgggaagagagtggcagaggcaaatgtgtaagctaacggatattatggaatcactaattctgggctgatattggctaccacagacttcttccaaacgaaataacttcaggaggattatagaaacctcttggttatttgcaaggtaaatttcctcttaggggaaaacacaatgctgcatctcagatcgtggaagcaaactcacagacagtaaggaaaaggtactttttgttattaagaaatcagtctgaggccgggtgcagtggctcacacctgtaatctcagcaccttgggaggctgaggtgggcagattacctgaagtcaggagtttgagaccagcctggccaacatggtgaaaccccatctctactaaaaatacaaacattagccgggcatggtggcacatgcctgtaatcccagctactagggaggctgaggtaggagaatcgcttgaaccagggaggtagaggttgtggtgagccaagattacgccattgcactccagtctgggcaacaagagcgaaactctgtctcaaaaaaaaaaaaaaaaaaagaaaaaaagaaaaaagaaatcagcctgtagt

SEQ ID NO: 5695 - DNA, 1338 bp, Artificial sequence
  DNA replication origin
aatttttcttagtgcagaacaaaatgaaaagtctcccatgtccacttccttctacacagacacggcaaccatccgatttctcaatcccttccccacctttcccgcccctccattccacaaagccgccattgtcatcctggcccgctctcaatgagccgttgggcacacctcccagacggggtggtggccgggcagaggggctcctcacctcccagtaggggcggccgggcagaggcgcccctcacctcccggacggggcggctggccgggcgggcgggctgaccccccccatctccctcccggacagggcggctggccgggcggggggccgacacccccacctccctcccggacggggcggctggccgggcggggggcgacacccccacctccctcccggatgggcggctggccgggcggggggcgaccccccacctccctcccggacggggtggctgccgggcggagacgctcctcacttcccagatggggtggctgccgggcggagaggctcctcacttctcagacggggcagctgccgggcggaggggctcctcacttctcagacggggcggttgccaggcagagggtctcctcacttctcagacggggcagccgggcagagacgctcctcacctcccagacggggtctcggccgggcagaggcgctcctcacatcccagatggggtggcggggcagaggcactccccacatctcagacgatgggcggccgggcagagacgctcctcacttcctagatgtgatggcggctgggaagaggcgctcctcacttcctagatgggatggcggccgggtggagacgctcctcactttccagactgggcagccaggcagaggggctcctcacatcccagatgatgggcggccaggcagagacactcctcacttcccagacggggtggcggccgggcagaggctgcaatctcggcactttgggaggccaaggcaggcggctgggaggtgtaggttgtagcgagccgagatcacgccactgcactccagcctgggcaccattgagcactgagtgaacgagactccgtctgcaatcccggcacctcgggaggccgaggttggcggatcactcgcggttaggggctggagaccggccaggccaacacagcgaaaccccgtctccaccaaaaccagtcaggcgtggcggcacgtgcctgcaatcgcaggcattgggcagactgaggcaggagaatcaggcagagaggttgcagtgagccgagatggcagcagtacagtccagcttcggctccgcatgagagggagactgtggggagagggagagggagagggagagggagagggag

SEQ ID NO: 5696 - DNA, 1486 bp, Artificial sequence
  DNA replication origin
tctgggatgtgaggagcgcctctgcccggccgagaccccgtctgggaggtgaggagcgtctctgcccggctgccccgtctgagaagtgaggagaccctctgcctggcaaccgccccgtctgagaagtgaggagcccctccgcccggcagctgccccgtctgagaagtgaggagcctctccgcccggcagccaccccatctgggaagtgaggagcgtctccgcccggcagccaccccgtccgggagggaggtggggggtcgccccccgcccggccagccgcccatccgggagggaggtgggggtgtcgccccccgcccggccagccgccccgtccgggagggaggtgggggtgtcggccccccgcccggccagccgccctgtccgggagggagatggggggggtcagcccgcccgcccggccagccgccccgtccgggaggtgaggggcgcctctgcccggccgcccctactgggaggtgaggagcccctctgcccggccaccaccccgtctgggaggtgtgcccaacggctcattgagagcgggccaggatgacaatggcggctttgtggaatggaggggcgggaaaggtggggaagggattgagaaatcggatggttgccgtgtctgtgtagaaggaagtggacatgggagacttttcattttgttctgcactaagaaaaattcctctgccttgggatcctgttgatctgtgaccttacccccaaccctgtgctccctgaaacatgtgctgtgtccactcagggttaaatggattaagggcggtgcaaaaaaacaaacaaacaaaaaaaaacattgtgaaattacaaattcattttgaacttagaagtaaaaatgatgcatttgggtcttctgtaaaattggatagttttgcatgatgccagatgtcttttccccaagaggcatttaaaaacacttttgtaagcagaaagagaaagagtgaaaggcaaagtctcatcttaagctctccccccactcccctatccccagaagccccctctcccgcaccctagagtccccaagggaagatggtgctggaatggaatgttactttttaaataccaagggtttaggctgtaattgctactagcccagagaggtaaaatgctttgccctaaacgaggcctgggacccggctccttgccctgtccccaagccgaactcttctgagcagcgctgtccctgcagtcaggccctgggggacctcagtctgatgctcacttttcctgtctcatctcagctcttttccgccctccgctggaagggctgaagagtgactcaaatctgctccttaggctctggcgccctctgctggcttcgatgattcacgacaatccttaaaagacggtgggaactacactcaaccattcccgctcttcactgccatatggggaaactgagacagcaagtggggaagtgatttggtcaagaactcaaagcaggccgggagcggtggctcacgcctgt

SEQ ID NO: 5697 - DNA, 1036 bp, Artificial sequence
  DNA replication origin
cagtccggggagcaagaacccagggggagcttgaatggggcaggagagcacgggctagggaaggaggggctgctgctcgcccaccacaactgggctgggggaaagccagggaacatttgtttccacttagcttagccccatgggcccaagtgggagtggttggccccaggagcctctccagccatcctggcccaggctggctcctgtggtactgacgtgggatgggcaaagggtcctggcctggtctcaagcgttctagggaagagcctctgccctcctctcgtctcactgctccattctgctcctgggacaccacctgtccctgctgcttcagctctcacttctgcgggaaacggggctcctaaatccaggtctctggagccagcctccctattgatgtcttgtctgctgtctctctccctgggcagcagtcagcaaatttgtaatcggacactgatgtgccaggctcccagctgggtagcgggggaggggggaaatggtgagcaaaagcggacataactcctacccacatggagctgacagtctttaatcacatcatctctcaagcaaaaggaaagccaacaaccttgaccgtgctggggaaaagaagggaggggcctgtaagaggctgtgggatgaggattgaccaggtcatgggggcggggagggcttctctaaggagggaacactctagctgaaatgtaaaataaataagttggcgttaactgggagacacagggagggaagagcatttcaggcagaaggagcagcctttccaaaagtcctgcagggaggaggaggcgggtgcggtggagagtggaggggagtgatggagggagagtgggggagtgggcaaaaagaggttggaatgagagtgaacagcagagcctggtggcagattaggctggagggatttgggggaaatcagaccaagaaaggccttacaggaatggaaaagatttttttttcttattttaaaagcaatggaaacattacaggacaaattcattgcaagaggggaggtaaaagagatgga

SEQ ID NO: 5698 - DNA, 1884 bp, Artificial sequence
  DNA replication origin
cgcggcgcgcgagggcccgggcttcagtgcgagcgcggcgagcgcaacggcggcggccgggaggcgagggatccggcggcggcgggggggcccatcccgggcgaggagggcgcggcggaggcggagagcggacggggcagccagcgcctgtgtctcctgcggagctcgctcgggagaagaaatcagagccgggggcggaggtgggaggggagcggggccgaggcgggggcggggggcagggggccggagggaggtggcagttgcgacagtcaggcagcgggactctcgggagcgagccgtgcgccccggggcggctggcgcggagcgcagcggagggcgggagcggggtgccggggcggggccccagcgcgcttcgggctgtgggacccgcccgcttcgccccctcgcctcgcctctctcggacttggagccccccgccgctcgcggccgcctggagtcgggggcaaggaagggctgggaagaagagtagagaggggtgaggggggagaaagaggagctgaggaatgggggacgggctggaagggagacgtttgacaggtttgttgactgtaaagagagaaaacttcccaggaatgagggagtttggggcggggggcggtgcggagggagatgctggcgcggaggcaagagaggaagttggcctggggcgcggggtgcttcggcgagggttgtcaaactggaccgcccgacaggcggatgctggaggggtcatctctttccgtgtccctgttcgatgcctcatgccccttcgtcagcctctccttgaagaagggaggaagccctgggcctccgctctcgctcccccagccatcccacctctcaagcccgcgttctagggcggggaggtgggggaaatgagagggcaagagtagccgctccagggcgtgcgcgcaagcgctggcacttgtaagcgagcgggagaatggaggtcgcagactttcaagagatcgaggggtcagaattcgctttagcccggcctcgcgtgtccaagagtccctgcctcgagttcctcccccaacctggcccgggtagaaggggtgggagagccagctgcaggtgagatggcgtttatcagattttctaatgccacaaaaatgtctttgatgcccctggccccctccccacgagggggagatcaaaggctccgtggggaagagggacagctccattcatcatgccattcggctggcagtgggcagcagcccctgcccctcccgtccccgacgtgccccggggtgccaagggacaggtggtgtgggacattctccctgccataccatcaagagcaaccatcaacctttaaagctgtcctggagtggggaggacagatcgagtccctatggcagaaacgtcaggcgcccagaagaaagctcctggttgttggtagagagggggacctgaatgtggggactgaggtcgcttccaagagagtgatgactgaggtcacttccaaacaaccttggtgagcagagagagaagacaagatcctgagtcacccagagaggggggacaagtagatcaagatgaggccaaggggccaagggatgtgaccccaggggaggaggctgatgggggaaggaatgagcagacagaggtgagagaactggagaagtgtggacttgccggcaagcaagctccatgtcagggccctggtgtccaggctgcatcagctcaatcccttgcactggatacagagagttctggtgaaagggctaggacacactaaagaaggggaagggggcagggggcagtggcaagagtcatagagagagggtctggtctaagcactgccctctcccattttagcctttaacagtatccaaaggccacgcacagcccctgcacctagtaactttgcacaca

SEQ ID NO: 5699 - DNA, 1150 bp, Artificial sequence
  DNA replication origin
tcccgccctccgctgcgctccgcgccagccgccccggggcgcacggctcgctcccgagagtcccgctgcctgactgtcgcaactgccacctccctccggccccctgccccccgcccccgcctcggccccgctcccctcccacctccgcccccggctctgatttcttctcccgagcgagctccgcaggagacacaggcgctggctgccccgtccgctctccgcctccgccgcgccctcctcgcccgggatgggcccccccgccgccgccggatccctcgcctcccggccgccgccgttgcgctcgccgcgctcgcactgaagcccgggccctcgcgcgccgcggttcgccccgcagcctcgccccctgcccacccgggcggccgtagggcggtcacgatgctgccgcccttaccctcccgcctcgggctgctgctgctgctgctcctgtgcccggcgcacgtcggcggactgtggtggtgagtccggctgtcctggcgcggctctggaccctggagggtggggaccccgggacccaggacagactggggtgttccgcagcctcccggctctacctgctctccgagcccagctttctggcctcggccgggggcgtttctgaactccacttcgacgttcctaaccctcgggaacattctattgtgtttcctcctcccgggttctctcccaccccccgccaagttatgcgctcacccagctcaccaaggaacaggcgagtgggtaggaaagatctttcgggaagacacatatccgaggaaaagaatgtgtgaggagggccctggattcagggtatggggctggatttggagaagacaggaacaaggtgggaagccacaaggcagagagggccacacagctgccccttccccgccctgctttgcctaccaacccaccggcttctctctgggctcctgaggagtgggccttagtgacgacagagggaatataaaggggaaagtgagtcaggaccctggttttctctacctcgtcctccccaagcaaggaaaaggaggagcggaaggaaccggacccaggcgcccggcccttccagacctgggggtcatgaatgaaaaaatatgtgcagcccgggagatacgggaccgggaggggtcctgcgggaagggagaggggc

SEQ ID NO: 5700 - DNA, 1033 bp, Artificial sequence
  DNA replication origin
cgaggaaaagaatgtgtgaggagggccctggattcagggtatggggctggatttggagaagacaggaacaaggtgggaagccacaaggcagagagggccacacagctgccccttccccgccctgctttgcctaccaacccaccggcttctctctgggctcctgaggagtgggccttagtgacgacagagggaatataaaggggaaagtgagtcaggaccctggttttctctacctcgtcctccccaagcaaggaaaaggaggagcggaaggaaccggacccaggcgcccggcccttccagacctgggggtcatgaatgaaaaaatatgtgcagcccgggagatacgggaccgggaggggtcctgcgggaagggagaggggcctggccagccaagggaagggggcgtcttcccaggcttggccctagctagaagggacacctaggcagcgaaggttgcgggagcttcgagccttgggggtgggggtggggccggggcggggaaggagggtgcccgaccgggacggctcagagatccagatccaaaggacttttttccccctaggtctccagagccgcaaaccctcgcccggaatagctcagtgtttagagaggagagacttggacaataacgctgacgggttagccaatcctaagaaggcagggtcgtgtctatttgcatattgccatgtgattggctggatgccgaccctccgctcctccctcgccccccagatttggaagagaggcagatccccgtgctctggagagatagggagtaggatgcccacacagggagtggcgggcagcaatccctactccgtgatgcggagagccgtccgacgctagtgtcacggaaagggcgaaccgaggacgacccaggtcctatctagggaacatatgccctttgatccggcttagtataatgcagtggcagctttgaagcagatagatctaagatctaaacattatgtttgtgatcttgggctagtcacttcctttccctacctctcagtcttaactggaaataggataa

SEQ ID NO: 5701 - DNA, 974 bp, Artificial sequence
  DNA replication origin
ctgcctccctgtggggccagatgaggctgtcctaggcctctggctcttgtttccttttccaggaggggggtgggtgaaagacaagatgggatgggggaagggagtgacactgggtggtgttttccctagtggaacaaggggagggttagtttctttcatagaaaatataaaacagggctgggcgcggtggctcacgcctgttatcccagcactttgggaagctgaggcacgcagatgactttaagtcaggagttcgagatcagcctggccaacatggtgaaaccccatctctactaaaaatactaaaaaaaaaaaattagctggcatggtgccaggcacctgtaatcccggctaatcaggaggctgaggtaggagaatcacttgaacccgggtggcagaggttgcagtgagctgagattgcaccactgcactccagcctgggtgacagagcgagactctgtctcaaaaaggaaaaaaagaaaagaaaagaaaaaaacagaggaaagaggaagagagaagaaggagattgatttgaccattctatgagagtgagctctttactacatccaccgattggaggtataaataatgatgggtcagatgttgtaaagaacttcctgggggtgggcaaggccggagcaaggagcagagcggaagtggggaactggtgactgggaagctctccctctctgcctcactcccaagacagggtctgtcagggccacaggataggctggatgacctggatgcaatgaggctggacaagatgatttccagagagcctggccaatgtccttgaatctgggattctgtaattcacaaagatatgattacaaatgagagaaagacagagaggctaggggaagagtttatttttattgattgattgattgagacagagtcttgctctgtcacccaggctggagtgcagtggcatggatctcggttcactgcaacctcagcctcccaggttc

SEQ ID NO: 5702 - DNA, 1048 bp, Artificial sequence
  DNA replication origin
tcagataggtgctccccaccccaatatgggcgagcagagggcccaggacagtctcctgggggcacctttgcctgccgcagccctgaccaataggaagcccttttgtacagcgaagtctgtcagggaagggaatgcctccacctctcccaagagtgatgaggagagatggtgaggaagggcagagggaaccaagttgggttaggggtggtgaggtggggaatggggtggctgggggggcagtggggaggcaggggttaatggagctgggcatcactggctttgatgtggtggtttgggtgggggtaggggctgggggaggggagcagtaattaccgagttagacagagcaggacaggacaggcgggcgggcacaggcccggcccagccgcctcagcagcagtcaggcaacatttttctgccccttctccaccacccacctcccccacccctgtgcaacccccacccacagccccagggctcagggctccctctgctggcttgtgggaggtggggtcagtgtggggaccttgggagtaggggtggggaaatagagggaggctggcttggagacccttcagagggcgttgggtagccagtgggctgtgatccctttggcctcagtgatccacccaggagtgcctgctggggaagaggagggtcctagagggtgcatttggtccaggagcagggctggatggaggaggaggagacacagggatccaggctgagaagaaatagcagagagttggagaaaagggtgttctcaggaatccacaatgctgcctgcaccctactgtttgtcctgaactgggcaggctcaagagatgaataagggtgtggtgggaagacaaacaccagttgttggaggaagcccactctctggacaggttctctgcatctgtaatctgggagggaggtgggtattactagtttcatttgacagttgaagaaactgaggctcaggaggttaagtctcatcatccatctaatgaagactaagtgccagcttcacatgctagggactcactcaacatcatagaacaagcaa

SEQ ID NO: 5703 - DNA, 1218 bp, Artificial sequence
  DNA replication origin
tctggaagtgcgtgagacttcccgtgaagtcttcccctaccaagccaaatattgcctgcacccagcagtgatgtcaccctaatgcgcagggcttggttcactgccattctgctcagagaaggcaacagatccttggccatgtgtggtggctcatgcctgtaatcccagcactttgggaagccgaggcaggcagatcacctgaagtcaggagtttgagaccagcttggccaacatggtgaaacttgtctctactaaaagtacaaaaaaattagccaggcctggtggtgcacacctgtagtcctagctatttgggaggctgaggcatgagaatcgcttgaacctgggcagtggaggttgcagtgagctgggagcccgccactgcactccagcctgggtgacagagcaagactccatctcaattaaaaaaaaaaaaaaaaagaacgaaaaccacagatcctggagcaagagaagggtcagtgtcacctactttccaacaatgcttcagagacctggcccccagctccttcttcctgctctccagttcagggacatagaagatatcagggtaggagggcccaccttagagatgaaagcccaacacacccattttatagaaggagaaacctgggctatggagagggtgtgacttttctcagctaggctccattccctagccgttccaacatctcgtggcattctctctccctgggattgttcttgcctttcatccgggctgttcagctgacacatatccagcttgtggtccactaggaccatatcattccttgatactgcttacttttctttggtgtctcttgacgacacatgaatttccttgacggccttcttgatctttcttctgttatttcttttccttgtcacccttttgggctagaagtttgagttttaactttgacttacctgatgccagctgccttcaccttgagtaaaatttctataagaatttatttacaaagatgtgtgcaggaagataagattgaatctttgctctgtagcaattatcagactagactctagttagaggggacacagacatggactagcaggagagccagacaggacaatctcaagctcagtttggaggtagggtgggagggcatgtcacagctcccgctgcgggctgagtggggctggtcctcctcccttccaccccaagcccttttttgggttacacccctgacctgctattctctgctt

SEQ ID NO: 5704 - DNA, 746 bp, Artificial sequence
  DNA replication origin
ctcactcctgccaacacttcctcaagcacactcctgcgcgcacactcacatttccgcacacactcactccatcctgcccgtacgcaccagcctgcccgcctcgttgttgtgcagttgcaccaacgcgcggatgtctccgcgtccccgcttgtgccgcgcgtccataaagagcctcgacttctcgtccccgaagtccacgtcgtcgccgcagcctccccactcccaggcggcgctgccttccggggagcccgcggggccagggggtccgggggtgccgggcaggccggagggccggggaggggcccgcccgcggggcgcctggcagccgcactgcagcagctcgcccatagaacaggcctgcgtgacggcgtggctggcgccggccgcagtgatggcgaacacgaaggccgtctcccgaatgtctgtgaatgcagacaggtgcaatcagcgcgggctggggcggtcagctggggcctgggacctgaaacctgcggcgggagggctgccccaggggcctgggaggcagggtccttgcagggtgcccagacacatgtgagggggaagtggggctcaggcaacttcagcgaaccagttctcctctcctcgggtcccacagcagggagaaagcagccccacttccgccccctccccacactgaccctgttgcaggatgcgtccaaaggccttgctgtggctggagcaattccagcggcggaagcggaactggaactggcactctcgcaccc

SEQ ID NO: 5705 - DNA, 2118 bp, Artificial sequence
  DNA replication origin
agggggcggaagtggggctgctttctccctgctgtgggacccgaggagaggagaactggttcgctgaagttgcctgagccccacttccccctcacatgtgtctgggcaccctgcaaggaccctgcctcccaggcccctggggcagccctcccgccgcaggtttcaggtcccaggccccagctgaccgccccagcccgcgctgattgcacctgtctgcattcacagacattcgggagacggccttcgtgttcgccatcactgcggccggcgccagccacgccgtcacgcaggcctgttctatgggcgagctgctgcagtgcggctgccaggcgccccgcgggcgggcccctccccggccctccggcctgcccggcacccccggaccccctggccccgcgggctccccggaaggcagcgccgcctgggagtggggaggctgcggcgacgacgtggacttcggggacgagaagtcgaggctctttatggacgcgcggcacaagcggggacgcggagacatccgcgcgttggtgcaactgcacaacaacgaggcgggcaggctggtgcgtacgggcaggatggagtgagtgtgtgcggaaatgtgagtgtgcgcgcaggagtgtgcttgaggaagtgttggcaggagtgagggtgtgtaggtggaggggggcgttaatgtgtgggggagtgcgcacgggcggaaagatgggctgcaagcatggatggacatgtgggaggagaggtgtccagcctccaagaaggagtcacgtgggggtctgagaaggccagatgctggacggtacagcgggcagaatgggggaagggacactcagggaataggactgagggtctttagtgaccccaggcagagagggcacagcttcaagacaggacaggtgaagcaaagcttgcagtgggtaggaggtctggatgcctaggcaggggcaggagaataaaacaaaggtggggatgaaagacaggatagaagctaatgcaaggtctggggttttggtacagggaagccagggggagtgagagaggcctagaaagagttagaacaggtctgaggggcaatggaaaagagcgaaggacaaggaaccaatcctagtggaggttggagggagtcaggtggaggccaggacagctgtgaccaattctgggcatttgccaactggctgcccagcaacaccagcccaggtctcacctgcccagagccatggcagcctctcctctcccctctgtaacgaggagagccccaggagctctcattcaggggcaagaaggttgtctgggtgtgatggttccaggagggggcagggcagactcaggaggtgggagtgggacacatggtcaggttagcccctggactctgagcttccagaaatgattttcttgggtcttctgaaccatcagcgcttggtgggtttgggaatcttagaccctgcttcagacagtgactaggggagaggccgcctgggttccactctcagtactgcattcccagcgggccctcctgcaccccatgcctccgttctagcgttctccagggacatcgccatacataccgtgtcctctagggttcgggcctgaggcatcgggcagggggaggagggggcctgaagaggaatgtccggacaggcccacatacctgccgagagggttggggaggggtgacggagacagatgcccaggaggctggctctgcgtctgtgctcagcccggcctgggggccgtgaggggtaggaatgagggggccaggtaggcaggagagctagacttcgacagctgccacctctcccctcctccaaagagaatctcacccctgctgtccattctgctttctcccccaccccctgcctttggaccctggaatctctgcgctgcatattgtccccgtctcccctcttcgtcatcatcatattcctccatcctcaccattcctcctgctcctcccctccgagttgtcctttccttgatttcctccccctgaacttgcggtctccttttgtctgcattttcctctcttcctttcacctcccattcccaatcttattttctgtccatccgctgggcccttccctgcaccccctacctgtccacatgcgtccgcccctctgcctc

SEQ ID NO: 5706 - DNA, 1164 bp, Artificial sequence
  DNA replication origin
gcggccgcgggcaccgccaggagagcgtgcagctcgaagagaactgcctgtgccgcttccactggtgctgcgtagtacagtgccaccgctgccgtgtgcgcaaggagctcagcctctgcctgtgacccgccgcccggccgctagactgacttcgcgcagcggtggctcgcacctgtgggacctcagggcaccggcaccgggcgcctctcgccgctcgagcccagcctctccctgccaaagcccaactcccagggctctggaaatggtgaggcgaggggcttgagaggaacgcccacccacgaaggcccagggcgccagacggccccgaaaaggcgctcggggagcgtttaaaggacactgtacaggccctccctccccttggcctctaggaggaaacagttttttagactggaaaaaagccagtctaaaggcctctggatactgggctccccagaactgctggccacaggatggtgggtgaggttagtatcaataaagatatttaaaccaccagggctggacccacagttttgggggagactgatcttcaggctgccaggctccagaagaaggtggttttgctagaactagcacctcaggggctatcacctgggtccctatctcccgaccaggttggcctctcctggaaactcgctatctccccttggcattcttcttgttcactcctgtcacacatctaggtcctggatctgcaagctggagaagaactagcaattcctctttaaagggacaggggcatcagaagcttctgatgcatacctcttgacacccaacaatatttccttccttctggttcctcttgggaagctactggtgaaagtgaggagacagagggcagttctggattctccagagctgaagcttgagctctcatcttcctccagagagaaagagggatggcatagcccaacttccaggacccagagcctccaactttcctccagtccaaatactgcaatggggaatgactcccccatcaaggtatggaggacaaaaaatgagctttggggtcagacactctgggtttgcagttggtgctgctgcttagaactttacaacagaggccaaattagcctcattttctttatacaaagggatttcgctctgtttcagttatccattgctacataacaaacaacccca

SEQ ID NO: 5707 - DNA, 1551 bp, Artificial sequence
  DNA replication origin
ctctcatcctgggctggtgcctgtctcctgtcttgagtctggtcccacccttacccttaccgcttacccttcccaaatgctagtcccaagctgtccccgtttctgcagcatggtagggagagtggggagggcagggggcagttggggtcaaataaggctctagctgacgcagtctgcttgctgcccctggctgttttcctgcagtccagccagactgctccccccccactgccccacccccacccccagcagcctcaagcccttaattcctgacagctgcggtggctgccggcagagatgagggggaaaggaggggggagtatgccgtcagcctgctgttgctcaggccgcccccaccacctgacagtctggggacaaggagggccccaccccctccttcagttccccagggatgggcaattccaggaatgggccttttttgtctctgagcccagaggctcccatagttttgttcctaagccagcaggggctctcttcagagagaggggcatgtttgtgtaaaggcttgtgcccattttacagaggaggatgccgagggcacagggcaggagcacgatccactatcagggcccaggctagcaccagaaacagacggcagagctgcctttcccctgccctctggctctcaggcccttgcttgggcccagcacacttgcactatatcgaggaggggcccagtgttcagttggggtggagggacaggaagatctcagcgagaagtagacctgagccaggaggctggtattagggacctcctagaggaccatgtgcaggtggggccagggagggccaggacaagactgagagtatctgcgggcacaggcaggcaacactcagtgttggggaggcagctgctgcgctgggagtcaggagagctgcgttcggttctcgctcttccgctaatttgctgtgtgacctctttgagcctcgatattttcttgtgaaataaaggggagctaaataaactatctcaacggccacttctagggttaaaagtctctctaacgcctcctcccaggacgtgccaccccgggcgctcctacgcaagcattttctgggggcctgacactgctgcctccccgggctcactgaggagacaaggtggtccccatgagccgcattccgcaaaggggcagaggaggtctccgtgagcaggagcaggaggcacctgtttaaggtcacacagcaaaggggagaagaaaccagaggctgccaaactcctctgcaggagcccacacctgcctcacaccaggcaggcctgggggaagtccctcctctggcggaggaggcgaaacacagaggccagcccctcccctccagcccctgcaggtgtgtgtgttggggtgggatgggggcgctccccagcagctgcgtctctgccaggcacacacacctcgcggtaacacatatcccccacacaacccagcgcgctccacacacaggcatcttcctgtgcacgcgcgcacagaccccaacacctttccctctgttgccctcagcagggacgctcccacccccagtccccagcgg

SEQ ID NO: 5708 - DNA, 2796 bp, Artificial sequence
  DNA replication origin
aagccagggctacggagtcctcatggggtacccgagggccccgaagggaaacgcggctgcgggcagcgcggacgacctagaaacccgagggtaggagcgggcccgcggcggcggtgagcgccggcccggcccagccggggcatgaatggtgcagaggcccgtccgttcgtgtcggcgcgcaggcggcgggacagggaggagcgtgtggcccgagctgggcaggacccgggggtcccgggcagccgcttctggacggctggaggggcccgggcggcggtggggcgggagggggcgggagagcggggcagggagggggttgccctctgagagcggcgcggctggggccgggagccgtctgccgcggcccgcggggattagttcgcggctgcatgccgccacacgcgtcgggctgggctcggccgggtagaaacagcgcccggggcgcgcgggggagggaggagggagcgcgcgggggcggggcggggcggggcgggaggcctggggctgggctggtggaggctggggtggcccctgacttgggggcccaggggatgcaagcaggggtcctggtgaaaagggaagggccgcggctttctgagttttccgaatttgaggtacagcctgactccccaagaagcctcaagacccaaggctacaaggtgtatgtgtacctctcccactccacctccactgaaaattggacaagacctaaggagctagggctacggggtgcccacaatgtcccacacaatccactgagaagagagatagatacccagctaggcccatcccagaggcagggcccccatccttcccaaaagtcaaggcctgagataccaggccaggaggtgggtgtgagcagaagtgagtgacaaaacctcctgccatccccagcccaagccactctgggattgtcagggtgggtcacccagaagtcggagagggaggacagggaatggactgcagcttctctgagctgttaggggaagaggagttgacaggactactaggcctgctggcaggagccactgcacacaggcacacacacacccagcacctctgattcagagagggttttccagaggcagcagggatgacacacaggctggtggtgtcccccgccgggaagagcttctgcagaagggcagactttttacctgtccaggctgcctccatctgcacgattaggcaaagtcctcaacccctcctcatgctgattctgggttcttcctcatgggttccccatcctaaatgtggtttactaagcagagggtaagtagaggcaagcgacaggtacagatatttcctgggtttgagatatgcagtgtcagtgatagggcaggatgacccaggagtccagttctaaggcatggaacctgccaccctcagcctacacagcccagtctggagacacatttgcccaatttctctgcccccatggcctgagatcagaaagaggaaggagagcagcagggccaacagatgggtgtgtggggatgggaggatgccagcttgaggcagtgggttagaaatggctgggaatagattctgaggtggagatgctggatggggcaggcaggggcaggggtgaggggcagctacctctgctgaagatgggactctcataggggatcttgttgcgagtctccaggcttgagcagttccagcgctggtccctgaattggtgttggcattcgtggatggcgatctggatgccctgtatggctgaggcagccacatcagggtgacgcacacacacctccatctgccgccggctcaggcctggcaatgttaggcacactgtgttggcattgagcacgggctccggggggaggcggaggtccagaatgtcattgggtgctgacctgcagacatatggggtggagtgggtacgtgttttggggggaccaggagagccccatctaacaacacacactctgtcccaacggccataatcactccctcttccaacctctgcttctgaaggttgggcccatcagtacactcctacacattcctctctccttgacctcctcacaatcatcctgcccagtgcaactcactcagctagctgcacacccacacaggtaagcgtgcaaatgcacacacatccaccatgcttgtggccacagtatttcctatgcacatccccaggaatagatgcccatacacacagggttccccacaagcccactcccacagatatgtttcagtcacattcacatagacacacttctgcacacattgtggtggacacacaaacccaaccccagcacacttacgcacatgcacacttcatcagacatagttacagacacacacacaaagacactcccatttacacatgtgttcatcttaacatacattgacccatgagctctcacatgcacacatgggcacacatacaaactactgtttaccaacacagtttgctgggatcctgggctcgattgaaaacacacacacacacacacacacacacacagctcttgcagctgcagtctctcactgaccccacctgggctacccccttccagcctcccaacccctgcccctacctggggctgagctgcaggaaggagtgaggcagcttgtgcttactcctgaggtgggggtgcattcccccaacagggcaggaactccagactggcacttgctccccccccacacacacctcccctcctagttgccatcatgctcctgggcactgccttgtctccctggactgcccatatcctgtcaccagtccaaccccctcctatgagggagctcactgcctttggttgggcaccagca

SEQ ID NO: 5709 - DNA, 927 bp, Artificial sequence
  DNA replication origin
ccattcatgccccggctgggccgggccggcgctcaccgccgccgcgggcccgctcctaccctcgggtttctaggtcgtccgcgctgcccgcagccgcgtttcccttcggggccctcgggtaccccatgaggactccgtagccctggctttggtttctgcccgccggggactgggataggcgcggaggttctcacttctgccgcttcgggtgaggcaaggcaagctctgcatccctctcctcggccttggtgtcccctctgtcctcctgttccctttagaccgagtgaatccaggtgccctgagtggctcgctgggtcaggcccgcgcggcctgctggaggaccttggggtctttgaagcctgggggagagttcagagcggcagaacagcgcagggctggctgggtgccaggcgctcccgggttcacctgcagtttaataagctcgaggtgagctggggggacgggtggaggggggaggttagggctggagggggacgacttgccggggctagccagggcagggaggcactcagcatggggagggagtgggacagtggctgggcactttcccttggcctcaggacactggcctacctctgtggcttccgctccccagctccctatcaacgcccctcattgccacacctcacacctcatttctacctctacttctaccttctaccttctacttctcagaagggactctgtgcttctggaaataaatctgccaatcctctcctccactggccaccactgcacccctgactccacctgcaggttcatcctcctggggggcagtcatttcccagtccatcttggcccatcttctggaggactagctaaattggaatcccatgaagccactcacggtgtcaaccagcccctggtctacttccttccaccaggaatctcctttctttccaagtt

SEQ ID NO: 5710 - DNA, 951 bp, Artificial sequence
  DNA replication origin
gagaaacgtaccccaccgcggcagagaacacccctaccccatgcagctaaagacaccttccctacaccaccctgtggcctctgacagctgtcatagccacgtgcagaggtgacaaggcagggcctgtgtggccaccctctgctgcaagtatccaggcctcatagaagcccagcccactgggtctgcacccagctcctgttcagggccccagtttcggttctggccccagctgtctggggcagacacaggcactgtgccatctggccagctggagggggagcgggtggggccatggccagctgggctgcccggagcagggaggcagcggtgggggggtgggtggggggcggctcgttaagacacacaattagccgccctgcctttgatctgggacagggactgccagcatctaagtggagtcagctgctgctacaggccacagcagccaacggctgggaaggggctgggggaggaggtttggagggtaggggagggtggaggagagaggattcaggagccaatgggaactagaaggggttacagaagcttgagccctacccattcaagtcaaagagggagggaaggggagaggtctggtctccattctctccatgcaaataatctgtgcattgctcatgtgcctgggcagagagagagagactagtgtgcatgtgggaacacttaggcatgacactgaatggagccacacatatgcaaaaacaggagtaggtgtttggtgtgtgtgtgtgtgtgcgtgcacgtatgcatatcagtttcacttcttggcatgctcccccattgcaccagctcacctctctgggtacacagcgggacttagtgttggccttccaacttgggagatagtatagaaggggattgggtgcaaactttaaagtcagctggcctgcatttgactcctagatctatggctcacttttaagctgtgtgact

SEQ ID NO: 5711 - DNA, 1923 bp, Artificial sequence
  DNA replication origin
agacgctgacccactcggtgatgcggcactcttcgcagaccacgaaacagcaccagtggaagcggcagtggcagcgctcgctgcgcgtctggcgcaggatgttgtggccgcggccgcagcacatgctgccgcagccatccgagccggcgctgctcttgttgcacaggcggcccacggtgcccgccgagtccaggcgcggctcgcgctcgcagaagtcgggagacttttcgaagtagaccaggtcggcggggctggcccgtcggcgcggcccgggagcgcccggagccggcgagggtgcccccgctgggcccggctccagctggccgccgttgcggttgtgcggccggatgagcgtggcgcggtggaagcggctgcgcagcagcgcccccacggtgcggaactcgggcgtcacctgccagcacgtcttgagctggcagctgcctgacgtgccgtggcacttgcacttccgccgcatgttctccatcactgcctgcggagggaggcaccgtgaggggtgacacggcgcgcagccccactcccctcccagcgcttagcctggcctgcttctgaaacccactcccattatacagaggcaaacgctgaggccgggagcgagggtcccacaaccaggcagtcagaagaacttctgtacctgctcttctgcctctgcctctgcctctcccacccacctcccaccaggccaggccccgggggaattcccacctgccggctcccctcctctcctgcccgcctttccagcagctgcagggggcccttggggctggaggctcttgcttcctgaagggggatcccaaataggcagggaaattccctctcctgccacccctggggtaggggccaggagcaggagggtgctggccccgctgtatctcgctccaggccgtgtgtgtgtgtgtgtgtgtgtgtgtgtgtgtgtgtgtgtgtgtgtgtgtgtgtgtggtggggtgggtggaggggtgttcggtgagtttcagaaagccttggtccccctctcagtccttccctctccagctccccctacatctctttgtagagagccaaaggagggggacaagtgctggggaaactgtccccgattatgctgcctggggctcattctgcactatgctgagacccatggttcgtcctaggaaaagtcagcgccaccaggggccaaagctctacctaatacagaatggaaccggagagagccaggctctccagctcagtgaaagtggagaaggtctcaggcctccaagggaggtggttatgggaacgcaacccagccgcccccaacccagctcacaacctgctctagagtctccttactaagaaccctttgacattttcaccagaaaccccgtaagaagttggccacatcccctcctttccctcagtccactccgaaaacacaccctgagacagggacggcaatgatccagggcccttaaacttgggcagtagggccataagagagggcgccttcccctcgaggtctgaaagggctccacagcgtgcatgcgcagcctgtgctgtcagcaccacgtgggaaccagaccaatgcctccccaggccaacagctccagaacatctgcttcccacgggcagcagccattaattaaccagtttaacgaggaggaggaggaggaggcaccgttggtatgggctgggatggcggtgaggcttgggaaaagagctgtacagggcaggctgggtgggagctggacatgacccaagggtaagtgtgcctcagtttaccccgcctctaagtcaagatgggaattgctgaatcagctttgtgcaggaagatgacccatcgtgggctaagaggccaagagaaagaagagtgagatggagaaggtgccagccagagtgagaggaagccaggtaaaaggcctcaacaggctgagcagagtcaaaaga

SEQ ID NO: 5712 - DNA, 1658 bp, Artificial sequence
  DNA replication origin
tcaagacgtgctggcaggtgacgcccgagttccgcaccgtgggggcgctgctgcgcagccgcttccaccgcgccacgctcatccggccgcacaaccgcaacggcggccagctggagccgggcccagcgggggcaccctcgccggctccgggcgctcccgggccgcgccgacgggccagccccgccgacctggtctacttcgaaaagtctcccgacttctgcgagcgcgagccgcgcctggactcggcgggcaccgtgggccgcctgtgcaacaagagcagcgccggctcggatggctgcggcagcatgtgctgcggccgcggccacaacatcctgcgccagacgcgcagcgagcgctgccactgccgcttccactggtgctgtttcgtggtctgcgaagagtgccgcatcaccgagtgggtcagcgtctgcaagtgagcggcccggggtcccctgggccctgatcgaggtcccctcctggagcctggccctctgaggcttacggtcttggcaaggcagcatcgccttggctcttgggaagaggagattggaccacatgatcttataggaacccctcagctctgaggtctgtgatcgccggacagtccaggcctgtctgaaccccaccactcacttctgtgggctctaggactgactgggttcttcctccctccccgaagcccagacagttcagttgggctgggggttgctccacaccctaaaacaagcctcagccaggcaacccgtcagtctgtctccatcctttcaccccttccctggagatgggaggtggggaatgaatggaagctgacgggcagagagaggaggattaaaaaaaagaaatagacataactgagctgaagtaattccataaagggcccagacagcctcctccaccattcccttcatcattcatttaacaaatatttattttgcactctctttgcggcactctgggggcggtggggtgcgtgggggtggcaatgcaaggcactgaggccacagatgtgagtaagcgagacacaacacttgtcctcttggaggttacattcttgctggggggaggcatgggcaataaacaagtaaatatacaaacaaggtcatttcagacaatgctgtgtgcaggctgctgggtgtagggggatttatggggagtggggctcctcagacaaagccactgttttttcagggaaggcctctgtgagttgtgatacctatgctgggacctgcatcataagccatgcaaagagtatgggtaagggcattccaggcagaggccatgtgaaggcagaaagtgtgagctgagaaagatctctgcctgctggagaaacagcaaaggggccattgtgattgcagtgaagaaatcaagggacagactagcaggagaggtgttcagagggtgggcaaaggtcacatcgtgtgtctctctaagccaaagtaaggagttggggttttattaaagaggaatgggaaccttgagatccttaagcaggggagtgtcctggtccaagtctcacatggatcgctgatggggaactggctgaagggggatgaggtgacagctggtaagccagtgaggaataacaaccatcttctaagtcagagatggggcttggactggttgtaagcagtggggatgtcgagaagggctctggtgcc

SEQ ID NO: 5713 - DNA, 1269 bp, Artificial sequence
  DNA replication origin
gcctgtggcagaggggcttccgaatgctcagctctgctgcttctctggaggacagggtttctttccccatcccccaaaagacagccccacaggcgggcgggtgagagtcccccaggaggaggggtaggcaggagcagccagacacacctgcctcattcctttcctcttgatcacctaggagagagctgtgggggctgggttttccacccgcttcctccctcccatcccagggaggaggagagaagaggtgggggaaatggaggcctagggttgagggggtgctgccatgcccagcagtgtccactgcaacattagccttggcctaaccctcctctgccttcaaggcttaaggaggatgaccaagctgggggaggggagactgaagatgagaggtagaggatcaggactgggataagaaggtgggagcagccatgctgcagagcatgtgttgaatgcagagagaggggtgggtggttgggtggggcagggggctggacccggagttgtagggaggacacatgttttaatgacataagtcaaggtgatctgatatgtgttagcctaacttgtgaagcccagaagctgatgagttctgggaccaaaggtgacgcccacggttgaaaggggttgtatgggacttgataagggacctaaattaggaaaatgtggaggtgatggagggtgggaaaatggggcccaaatggcactgagcttatgcatgctggatgaagggtgtggcagggatcaataaactgacaggaaataggggaaatgggctggaataaagtgggagggtgcagtttagatgggaggaagaacttgccaacagcctgggaaagatcagaggtgagacttggaaatgagaacagaaggtgggtagagatcattcagagaaggagaggacctcccctgccaccaacaactgtcacctgatggatgctaggttacctccttgcaggagggaaaagtaggaggaggaagggcactaacagaatgagggtggtggacagattagaaggcagtggtggggttaagggtcagggagaggcagccaggctggggtgagatcagaacgcaggcatcccgctttgcagtcactcaaggtccagggtagaggcactcaaaggtagacttggagttgtaggagtgccccggccggtgagaaacaaggtcagggtcatcccggagctccccctacttcccccaaattaatgtgcccccagctagcccctggcagggggccttccacgttggagtgtggccaggctc

SEQ ID NO: 5714 - DNA, 1271 bp, Artificial sequence
  DNA replication origin
cccagacggggtggtggccgggcagaggggctcctcacttcccagtaggtgcggccgggcagaggcgctcctcacctcccggacggggcggctggccagacggggggctgaccccccccacctccctcctggacggggcggctggccaggcagaggggctcctcacttcccagtaggggcggccaggcagaagcgcccctcacctcccggacagggcggctggccgggcagggggctgacccccccacctccctcccggacgggcggctggccgggcagaggggctcctcacttcccagtaggggcggctgggcagaggcgcccctcacctcccggatggggcggctggccaggcggggggctgaccccacctccctcccggatggggcggctggccgggcggggggctgacccccccacctccctcccggatggggcggctggccgggcagggggctgacccccccacctccttcccagatgaggtggctgccgggcggagacgctcctcacttcccagacggggtggctgctgggcggaggggctcctcacttctcagacggggcggttgccaggcagagggtctcctcacttctcagacggggcgtccgggcagagacgctcctcacatcccggacggggcggcagggcagaggtgctccccacatctcagacgatgggcggccgggcagagacgctcctcacttcccagatgtgatggtggccgggaagaggcgctcctcacttcctagatgggatggcggccgggcagagacgctcctcactttccagactgggcagccaggcagaggggctcctcacatcccagatgatgggcggcaaggcggagacgctcctcacttcccagacggggtggcggccgggcagaggctgcaatctcggcactttgggaggccaaggcaggcggctgggaggtggaggttgtagcgagccgagatcatgccactgcactccagcctgggcaccattgagcactgagtgaacgagactccgtctgcaatcccggcacctcgggaggccgaggctggcggatcactcgcggttaggagctggagaccagcccggccaacacagcgaatccccgtctccaccaaaaaaatatgaaaaccagtcaggcgtggtggcgcgcgcctgcaatcgcaggcactcggcaagctgaggcaggagaatcaggcagggaggttgcagtgagccgagatggcagcagtaccgtccagcttcggctcggcatcagagggagaccgtggaa

SEQ ID NO: 5715 - DNA, 914 bp, Artificial sequence
  DNA replication origin
ggaagtgaggagcgtctccgcccggcagccacctcatctgggaaggaggtgggggggtcagccccctgcccggccagccgccccatccgggagggaggtgggggggtcagccccccgcccggccagccgccccatccgggagggaggtggggtcagccccccgcctggccagccgccccatccgggaggtgaggggcgcctctgcccagccgcccctactgggaagtgaggagcccctctgcccggccagccgcccgtccgggagggaggtgggggggtcagccccctgcccggccagccgccctgtccgggaggtgaggggcgcttctgcctggccgcccctactgggaagtgaggagcccctctgcctggccagccgccccgtccaggagggaggtggggggggtcagccccccgtctggccagccgccccgtccgggaggtgaggagcgcctctgcccggccgcacctactgggaagtgaggagcccctctgcccggccaccaccccgtctgggaggtgtacccaacagctcattgagaatgggccatgatgacaatggcggttttgtagaatagaaaggggggaaaggtggggaaaagattgagaaatcggatggttaccgtgtctgtgtagaaagaggtagacatgggagacttttcattttgttctgtactaagaaaaattcttctgccttgggatcctgttgatcggtgaccttacccccaaccctgtgctctctgaaacatgtgctgtatccactcagggttgaatggattaagggcggtgcaagatgtgctttgttaaacagatgcttgaaggcagcatgctccttaagagtcatcaccactccctaatctcaagtacccagggacacaaacactgcagaaggccgcagggtcctctgcctagga

SEQ ID NO: 5716 - DNA, 884 bp, Artificial sequence
  DNA replication origin
cggccaccaggcgcttccaggtgagcgccgagatgagcacggacggccgcttgagtcggctctcgcctttgccgcccttgcccactggcggcgccccgtagccccccagcgcctcgtcccccgcgggcggcgccttcttcttctcctcgggcagcccgccgggcctccggcccttggccgaggaggcaggcgaaagagacagcactgtgcccatcctgcagagcggggccggcgcccaggccccagcgggagccgcgggcggcgccgctgctactgcagccccgggggacccggcggtggggggcctagccccggcccgggcgcgcggactggcgggggaaggtggctgctaggcggctccgctgctctaatcctgagctgcgccagctgcagcgtcagccccaccccttgggccccttttttcgtcgcgccgtgccccgcctcacgcggccaatccgctcccgagttgcactcctgatgggcagctccaatgaccaatagactctcgcacttcaatttcaagtcccgccccaatccccaccctccgccctgagtcttttcccttcccccgagcggaggaaggggaaggcggtggtcgtcgttcgagtggcctcctcagggtcagagttgagaaggggtggtggctgctcctgcctcctccggatcctagggcctggaccagcttgttctgatgcactgggtcgcggtagcagataaaccatgggaacagctctccttccctctgcctttgaatttgtgtggggggccagtgtgagcagtgagtgccctcaccggatgcccaggtcccagatgggtcgcgttgcactggctcctccaatgtgactgtcaggtctgtttcctcttcgcgaccccacctcgccccc

SEQ ID NO: 5717 - DNA, 1111 bp, Artificial sequence
  DNA replication origin
ccctcccggggcccaaagaaagaccggcgcaaaaccatctgcaggcgcttccagcgctttatagttctttccgggacagacggacagacagacagtgcggcccgctctgtcggcccgcatcattggcaccttggacacggccccaggcccaactcagtccctggtaccctaccgggaggattccggtcccgccccagctcagcacctcggacagttcccggcccagcctacccccctcccccctccctccgcaaacaaccaaataaattaaaaggggcagtggggaggagcaacaaaaaagctaaggataaggaagcgggatgtccctcctccaaggtaagaagttttcttttcctcccacctgtccactgaggcgccgcggccggggtggtctcccaggttgattttgcctccaaacctcagcctcctgaaagaagccggcagccccttcccccacaccccccagctcccagcatgcaacacgttggaaaaggtggggagaggcggtgggggtggggcgagggaccatcctggtggctgtctggatacctgggactgcagtttctcctggcacctcagtcgatccaaattaaaaactaatattccctttgatcaggggagaggggtgtggtgactcagtcaggaataaaaaaatgcaagctgacacaagtggaggaagaaggcagacaggagggaagatggtgacacatgacaggagcaacaagaagggcagatggggacacaggtgcaggaggagaaacaggggtctacggggtacagtcaggcaaggggtaagatggagatgcagacacacaaacccaaggaacggaaaatggaaaggcagggagagggaggaagaaagagaggaacaggagagagagggagagagagagagaggaatgcagacaggaggaaaaatgaagacacaaaaaggaggcaaggaaatggataaaaccgagggggaatgggctgaagggaagggggagaccccggcagaaatggagaaatgggggcgcagacagacgggaagagtgaggttggagtgcctttcccgcgctcatcttccgtccccactccacgcccagcaaatccaaacaccgcggcctctggt

SEQ ID NO: 5718 - DNA, 1060 bp, Artificial sequence
  DNA replication origin
tccctcctgtctgccttcttcctccacttgtgtcagcttgcatttttttattcctgactgagtcaccacacccctctcccctgatcaaagggaatattagtttttaatttggatcgactgaggtgccaggagaaactgcagtcccaggtatccagacagccaccaggatggtccctcgccccacccccaccgcctctccccaccttttccaacgtgttgcatgctgggagctggggggtgtgggggaaggggctgccggcttctttcaggaggctgaggtttggaggcaaaatcaacctgggagaccaccccggccgcggcgcctcagtggacaggtgggaggaaaagaaaacttcttaccttggaggagggacatcccgcttccttatccttagcttttttgttgctcctccccactgccccttttaatttatttggttgtttgcggagggaggggggaggggggtaggctgggccgggaactgtccgaggtgctgagctggggcgggaccggaatcctcccggtagggtaccagggactgagttgggcctggggccgtgtccaaggtgccaatgatgcgggccgacagagcgggccgcactgtctgtctgtccgtctgtcccggaaagaactataaagcgctggaagcgcctgcagatggttttgcgccggtctttctttgggccccgggagggagggagtgggagtggtaatggaactgtcacagacagagcagaaaggcaagagatggggctctagtaggggagatcaagtacctgagaacttctcctcctccccatccccacccccgccatcggcttccattttacagagagtaaagagtaaagcgaggcagctgagggtgaggcctggtgataaagctgaatccatccccccacttccgcctccatcttgtctgacctagctcctcattaatgcccgggccacttagagaccgaatcatggggacagcggagttgtgccctttctgtgatgagacccattgaggcagaactagctagtccttattgctatttttcccttcctccccatctctcc

SEQ ID NO: 5719 - DNA, 818 bp, Artificial sequence
  DNA replication origin
ttggcccaaagaggcctggcttcaacagagtgcccgcggctccgaccctagtctggccgtggccgagaagatccggaaagaacccggggggacctgccaagacgaggcccgggttcgctgtccgtggtgctgaatggcgcgctcgggcggggtcggggcttgtaagggcaggaagagttgcagactcggcctcaactaggtcttccggataatttgggaatagggtgtcatctattctggcggcgagttatagaagtctggctccagaacccaaaaatgtcggtccccacttgccctcccgggacgacaggactcgattcccctggcctcagcccagcgcccttgtaacctgcctggagccggaaatccccagtccagatttgtgaattgagttcccggagggagggggagagctggcggaagggaaggcgggagcagccgcccattggctggaatttggcgcagtcagcgcggtgccgtcatctctcttggtttgggaggagggagggaggatcactagggtcactccgcggctgtcggctgtcgccatagtaaccagactgagcgggctgggcagccgctctactctcccacctctggctggggaaacaatcctggtccaccttatttggaactagctagtgagactagctatttgattagaatttctgaattggaggagcctaaaggggatgggaaagagagcagagaccctacagagacgcccccctcaacccccaacaaacatcctgccttcggatactgcccctgaactcttagacacagcacccaccctttactgcacacacacacccctc

SEQ ID NO: 5720 - DNA, 884 bp, Artificial sequence
  DNA replication origin
gaaaagaatagccaggacagagggggaaaggagagccaggggcttgccttgaggagcagttgccttgaggttggggactgtccctttaggcaccttccccagtgttgttttcctctaagcgaaggcgtttaaaaacgaatagaacttaagggcagtggccctggtgggagggcgcagtattcagaagggcctctaggtggtgaggaaaggggcccagccaggagaataatccactcgacccgcttcccaggcttccagaggtcagacctgggatgcagcgttccccttttcaccctcctctctgagggccaaaggagacctggagacgactgggtcctgcagtcctcagtctggccaggcacttgcggtttgcactgcgcggcgcacaaaatcctccccggcttaggtacaaagctctccccagcgtaccctcctccgaccagcagagggcgcgcaccgcccgcgagaaggaggtgcaggagctagactccgaggggaggctgcgagccgcaagcgcaggagccgggtgggagagagaccccttcttctgcaaatgaggaggccgagcagaagaaagacggcgacagatgttggggggaggggacggtttgtgagggatagggagagaaagtctaagtgagagcaggacgaggaggggagggtggttggggaaggggatgaaataaagtggctgagggaaggctgaggtggggtgaagctccgccaggagggatgaaggtcgggatgaggtgaggggcgggtggaagggtgggtgagatgagggggtggggtgcgcgtgcgtattgggataagatggggtgaggggcgggtggaaggatgggcgagagggggaagatgtgatgtgggtgcctgttaggatgggg

SEQ ID NO: 5721 - DNA, 1067 bp, Artificial sequence
  DNA replication origin
gtgaagctccgccaggagggatgaaggtcgggatgaggtgaggggcgggtggaagggtgggtgagatgagggggtggggtgcgcgtgcgtattgggataagatggggtgaggggcgggtggaaggatgggcgagagggggaagatgtgatgtgggtgcctgttaggatggggtggggtgaggggcgggtggaagggtgggtgagatggggagggttgggtggggtgggagtgggggttgggtgcctactgggatggggtggggtgagggttgggtggaagggtgggtgagatggggagggtggggtgcgggtgtctgctgggacggaagtagggatagagtggggtgaagggcaaccggaagggagtgaggtgagctggggtcgcctggcagggtgggtatgaggcaaggcggctccctcgggctgagcccaccatccaggcctctcgctgcctgcgggcggcgcccaagcccgcgccaccctccttctcgggacgttttccttggcagttctctgctcaggcccgagatgagcctctccctgctttcccctaaccacgggttctggcgcagcaaagaacagagagagaggaggcagcggagagctcaggagctttaatggggctgaaagggtcagaaacacaccgggagtttctcctgggagtgtggggacaggaggaagggggccgtgtgtcacggaggacggtggctttcaccaaacctgctcaggtcccaggaaggaggaccgtgagaggcctccacgtgctgaggtgggagcagttccttggggaagagcaaaagtgggaaaagatttggcactcgttaaagagtagtgatattgaatggggcttctaggagccaggcggaaatgcactggagtggtggggagacaagagaggtccacaaatcccctccgggacctggagacctagaagaaaaaaagtgaaagagggcgcacatcgccctcctcaggggactgcggggtgggacaggagcaaatctagtaccagacaaggattgagggagcttcggtcccgtccccctgctaagtgcggcaggtggagtaaa

SEQ ID NO: 5722 - DNA, 1174 bp, Artificial sequence
  DNA replication origin
ggcccgggcccggccagtaggagaagccggcgggcgcgaccccggccgaggcggccatgaggttgagtttggagaggccggggaagggcagcggggcgaggccggcgggcagcttgtagagcgcgccgtcctgggcggccgcggcggcggcagcagctgcggcggcggcatgagcgtgcgcgggcggcggctggcaggcctgcgccaggccctggaagtcgaagcggtaggcgtagcgcttgccatgcaccttgctcatgatgttcttgtcgtagtagtagcgcagggcgcggctcagcttgtcgtagttcatgttgggcttgctcttgcgctcgccccaccgccgcgccacctcgtccgggtccgtgagcttgaactcgccgtgaccgccctcccacgcgatgcagccggcgttcgcgcggtcagccagcagctccagcagaaactgccacagctggatctgtccgctgcctgtggggaggggggcggtcagccacaggcgggagcggggaggcgggaactggggaagagtgctggcgggaaactgacccaccccggcaggaaccggcactgggggaggaaaagtgcaagtcaaactgcagctgcgttcggcgggagaggccggccccggaggggctgatcagcagagtggtgtgtagccttaccgcgcttttgcacaatggaaatgcggcttccactgaagagcacgtagctttccagatgcacggttttgtggaacttgggggttggggggaaggggaagcattgcctccccccacgtgagcgcagcggcgcaccaaggcacttggctttccaaggcgagcaaggacagatatccgccgccactctccatctcagccgggcgcccttatttagggaaaagacgcacaaccgtacagggcggccttgggcagaatgatcggactgccccatcccagctggaccacatccagaggtgggaagggacaggcgtgcagcaggacgaccccaaccactgctggacaaggcccagctagtcccgagtccccaaagacgtagttggacaggctactcctgaggtggagtggtggctggctcccttgggacaccacatccgacaggagtaggaacgaacagtggccccctatacgtgacaggaggggcaagctctcatgggctcactatcctagccacc

SEQ ID NO: 5723 - DNA, 1149 bp, Artificial sequence
  DNA replication origin
gtccgcgggcgtctcccctgcgctctcacggctcctcaccttcctgctacgagcttcaggccggccctccaggcaccctcctcttctcttcgcgctccagctcggctggcgcagttccccgctcggctttataaggctccagccggccccttcggaaagcggatttcctttttcctggacgcgtttcctgacttgggctctatggaggggctccgcgcagcgcgcctggaccaggctccgggaggaggagccgggtggcccgggcccccagcctcgcgcctggggaccacagcaccccccttaagccttggcccggggcccttttgtcaagcccacaacttccgcccggggttctcctgattcttttcttctgctgcttgcagatcccgtcggagacggtctcttcaaggacgggaagaacccgagctgggggccgctgagccccgcggttcagaaaggtgagatggccggcgcgctgggcggcggaggcgaggttggttggggtcagggcacaggcggacagtaggtgggagcagtgtggacccagggttcacactgaagcccggagtcctggcctggttgtgcggaggccttgggaagacagtcacttggtttttggctcctgcatctcctgagcaccaggaaaagagttgcaggccaaggcagatggagaggatcccagccccaggcccttttgctgctgtgtatggttttccaggctttggggcaggggctgggacacttagcgtcctttccctgctggtagtaggagctcaaggccgcagcaccagccggcaatggaaccgggggaattactccccaaacacagcgggcttcccaatcactagaccctggctactgccacctgcttcaccctccggcgctgactcacgccggctgatctctgctggccaactctgccagacgattgcaattgattcccaggttcaccaccagcgctccacgggtagtcgctaaattacccttttgacggctggctcttcaagcagcgtctccccacagtccccatctcagtcgttaccctagatctcaccaagagacagaaaccacaaaaacgaggttggcgactgttttatccagaaggaaactatgcccaacaggaacggtcatccaagccgctgaggttgc

SEQ ID NO: 5724 - DNA, 966 bp, Artificial sequence
  DNA replication origin
ggcccatcccccgcgcgtctccccggctgcggggcgcggggggctgccgggtgcgcttggctgtggcgcggcgcgttggagactttattgcgatgggacgataagaggggcgggggcggggtcctgggggccgaggcggcagcgctttaattaaaacggaaattgcggccccgggccgcgcgggggccggagggttccaagcggccccttagctggaagcgtttctccaggacccccccgcaacccccgccacgcccgggctgccccctcccgccaggccctgccggacccggcgccgtcttctcctccttgtcacccgcggtcgcttcgggcggggatcggtgccaccgagcgcaaagcctgcctcgccccccttccccgtcccccccatctcccaccgcccagtccccggcggcgatgagacagagcggcgcctcccagcccctgctgatcaacatgtacctgccaggtaccagggaccagccggaggctggtggcaccggaacctggggcgggaagtctaggctcaggcatgggaagagagtgctggggtccaggggaaggagaagtgtccggagattcgggttgcatggagggccgattgtaatgtagggcactggggagacctaaaggcagatagagagctctgggtttcagtgcagggtctagaggagttgaaatgagcagattgggagcctgggggccaagagccgggactcagggacccgaaggagcctgagaggggaagcacgggtctctggcgtggtggagtactctgtggccgagccgtaccagaaggctgtggtccgcgggcgtctcccctgcgctctcacggctcctcaccttcctgctacgagcttcaggccggccctccaggcaccctcctcttctcttcgcgctccagctcggctggcgcagttccccgctcggctttataaggctccagccggccccttcggaaagcgg

SEQ ID NO: 5725 - DNA, 1425 bp, Artificial sequence
  DNA replication origin
ctttgctcccaccagattccaggtccacatcctgaaggcttcatccctgtcccactaggatcctcccaggccctgggatccctctttttccctccacactctgcctcccactcttctccctggctcctttgcaccctccacgagcaaagatgaacactccagaagttgcagcaaatgagggtgaacatgggccctgtagaaccccagaagtaggagtttccagccatcctcaatcaggcatcccaggaccaggcacttagcaggagacctgcccattcccaggcctcctccacccctgggctcaagcagtgagagaggactttgagaatgccagttttgacagtacccgttccatactgcaaggctgcagaaggtgggcttctgggctggagcctcatcttcagccagcatcctccttagcctgcctctccagagccacgaagccccataggtacccagagagactccaggccacttgggaaccacatcaacatctttgcatgagttagaaataggaatccttttcttggagtggattccagccttgtacagtgcacaaccctgtcttaacccctccacctctccagcctcgttcagggatagccagaatgggagtagtggtgagggtgggtggcagactgggaggacaggggatggggaaggatgggagcagaatagttgtacagggaagtagcagggggctcaggaacccatcagggaaagccaggacagattctcaacatctttagaggccttcagcagtccaagccactactaatttatggggactgaatgaatgagaaaaggaggggagggagaaggatgagagggagagagaaggctggaggggagatgagagtcggagagaaaagcctaggaggtaaagagagacctagaagggggcggggaggacagaagagggggccacccatcataagttgccaggagagatggcccagcaccaggcctgaggcttgggggccccagaaaggcaggaaacgggccaaagcaagaaggagacggggaaggggttcgggtctctagggaagagcagagagtgggagaagaggaggagggagcggggatgcgggcagagataaagggagcaacggctgcagggccgggcgcgcagcgacaggcgagagggagggaagcggaaatttaaaagtgaagatgcagataacgcagcctggagacgggaacccgggtggggatagagggagggagggggaggagagtgagcggcgagtggagcgggagccgactggaagaagggctctagggagggggctgtggctgctggggtccgaggtggggccgggtacaccagccccatcactgtttgcagagagtcagggaggcggaaaagacacgcgctctaggctcccatcagggcacatggcccgggcccatcccccgcgcgtc

SEQ ID NO: 5726 - DNA, 1087 bp, Artificial sequence
  DNA replication origin
tgggaagtggagagcagaggacccagcccaggccagcccaattcttctgttccaagaggctgaagaaccctgcagtgggaaggccggagccaagatgcaatcagtattgatgccctgacatgtctattctgattctgccacccagtacctcttagctgggcactaatctgtgagaggctgtgcgaaggggctgggcaagggcttgggtagttagtcaatgaggacctcagggaactgtcttggtgaatgggacagatttctctaaggacctctgattttgctcctgcaaaatgggcccatgtcacaagatgctctctagtcctgacctgaaagggtctctggaaatcctatcccccaatcacctccttatctcaaagtcatgggaggggccaggttcgggggaacctctgagcgatccatttcccagactgccagggagctgatggggtgagctctgggagtgcctgtgggtcctagacagcttcacagcttgtgaggtgcagtgggtgggggaagtgaggcagaggatgtatccgttaaccctttggaagccctgatctttctgtcctgatcttgctgtgcctcagaaccacaatgacagccgtgtgacactgtttgagggggacaacttccaaggctgcaagtttgacctcgttgatgactacccatccctgccctccatgggctgggccagcaaggatgtgggttccctcaaagtcagctccggagcgtgagtcctggaactggaaccagggagacagaagagcagggaggcaatggggaccaaggaagagggtggagaaaagtgatgtggggagggcgctaagagagatattggggacttggaggcaaggggagggagatgatggagtcagactggaagggaggaaatgaggaggtcctaggagaatggggggcagcgggcaatatgggcacagatgaagggctggagaacatgagggggtggaggaaataaggggtgggtatagaagactggatgagaacggtgacagaaagactggaagcagtgggcaggggagggagagagccacggagggaaagttgaagcaatgattttggaactggg

SEQ ID NO: 5727 - DNA, 948 bp, Artificial sequence
  DNA replication origin
gaaaatgaggtcctctctttcggtgtatttgattcattaacaacaccctcacacacacaataacacacacacaaacacactgagactgactcttttcagtgaccctgggcaagccactttgtccctttgagccccatttccacacctgtgtatggggctaacagcagtcaacccgacctcacatggctgtgtgacgacagaggcactcactcacacgtgtggacgatggaatgtgggggaaccctgggcactcaggactgggatggcctcagcgctgtccgtggtgatgatttctgggctccgggcctacgcccacaatcccaactttcttggagacacccttctgattctgagaaataatgctactaccacccatctcggagtttgtttacacacaccccatgcagggcttgaacagcctttctaggtgccatggtgaggccagggcctggagctaggaggcaggggaggagaagtgggctgtgctcaccgcgcagagcactggccggaaggacagcagctggttgctgttgtggctgctgctgccactccaggcgctccagcgaggatagtctcccttctccagaatgaactgctgtccctggaagtcggggtactcaaaggccacccaactggaaaaggagaagagctgggaggtatctgccccagccgcaccctctctgccctcccccttgccggccatgattgaaaagactgagaagcacaatgtttttctccaaccccaaacccttcccctgacacccccattgtatggcaatccagcccctctcggaactaaaggtccaaaacctgctgctttctggggtttgaggcgcccaggcttccccctcaaggaccccaggttgggaaagagttttcctggttatgaagatctcccgacccagtgctcctgcctcaagggtttaggcctttgcatggggacacatt

SEQ ID NO: 5728 - DNA, 1164 bp, Artificial sequence
  DNA replication origin
ggaggcccagagggctttggaatgtggtgcaggggtcacagctaagaaatctcccagggccgggcgcagtggttcacacctgtgatcccagcactttgggaggcccaggtgggaggatctcttgaacccaggaatttgagaccagcctgggcgacatggtgaaaccccgtctctgcaaaaacaaacaaaaattagccgggcgtgttggcatgcgcctgtagtcccagctacctgggagcctgagatgggagaattgcttgagcccaggaggtggaggttgcagtgagccgaaatcaagccactgcactccagtctgggcgacagagtgagctgggaaaaggcggcggtgggggtgggggtggggggtgtagagaaaaggggaggtagagggggaagaggaaaaggttgggagctccaaaaaggttgggagtcccaaggggtagctccaggtaggaaatttcctcaccacttgcagtggaattttctaaccacagcaaatgagacacaaaggcttcttgcaaaattgtaggttttccttaatggtggtgggtgcgggtggggatattccagcagaggtgagaggggcgagtgagaagggagctaatattttgttgcttccatgagtcacatgcttcccttatgggtcctcacaacagtccagcgagttaggtttgtgtgtacggttatggaagcggagggtcaaagaggtgcagggccttgtccaaactcacatggctagccagtttcagagcaagaatcgagctcagacctttggaagccaaagcctgtgctccgccgctgtccattgaagctcccgtgccaaaaagtgctcacaggccagctgcggacaccccagctcccagaagccttgccacaccagcctgccttctaagccttcttcccagtgttccatactcagcccatctcagagcctttgcatttgttgttccagctacctggagtgtcttggtcacaagatcgtggcatggctggctcctgtgtcacctcctcagtgatgctgttctaggcacccttccatccatcacatcagcctttttctttctagcatttatcacgctgtaaagttatctttttcatcttgtgtttatgggtgtagcagcatctcccttaccagagtgtaagctccatttgaaggggcaggga

SEQ ID NO: 5729 - DNA, 778 bp, Artificial sequence
  DNA replication origin
tcaaaggtcccagtgtgagatggagaactgaatgaggtcagggtgggggccctgagggtgataagatctctgtgagattttgagggctctgtgaagtgtccactggggtttctggtttttgtctacctaattccccgctccatgccccaaggccaggctgtggatgtggagggggtaggggtgactgtgctgagctggcaaacaaagccacctgggcacccatccttcaggaagctctgggcgcaactgatctgggaaaacaaacaggaacagctgctaggggtggggggggtgggcggcatggcagctggggagaggagcagagctggaccagcctggtagggaaaggaggagaccagtagggggtccgtggtacccaaggggggttatcgatcccagagtcctctcctggcacagtaggcagggctgcctcgaagccccttcccctcagtggttcttctctttggcgataactgtgaggcctaaagtcaggaggggcctgagggcgttaggggaaccctgagatgtttagaggtcttctgggccagtgactatgggtggcggtggtgggtatgcccatttctgagagagctggtcgcagttactagaactagaagtcatgggtgagggggtggggggggtacctccataccatttccacggggagggacaaggtagagaaggggagaggctggctgccgccaagaccagagtttcacactggaggaggagtaggggcccttctcacacacggggtccactccccaactccaagcgg

SEQ ID NO: 5730 - DNA, 1726 bp, Artificial sequence
  DNA replication origin
tcttgttatcttgaattgtctccatgtgtctctctctgttcctcttccctggtttctctctggtcatctctgcctctggtctcgctctcacagtctagggtctgcagcctctgcagcccctgggatctcccctgtgttctcacacccctctttccttcagcctatgctcttggtctctttctcatccttctccatttctcttctgctgtttctcagctgctgcactccaaccgctcaatcccttttccacttcccccactacctggtccctcccccacccagggtgctgacagggacgacaggaagcaggctccagctttgagcaggagggggagggggcctgcctcgtacagcagctgctgagtgcccccctccccatgcagccccgcacctgcaggcctgcccggcactgggagaccccgccctgtggcagcggagcagcggaggagggacctggatgagaggccagatccctggtaatggccagcaactgcagtcttaggatggatagtgggtgggggactggggaaattaggccctggggtgaaggggcagtaattctcagtcaccaggaaagatccccgcccactgggtggctgcctccttctcaccaccctcccctcaaggctgtgtgtgtgtgtgtgtgtgtgtgtgtgtgtgtgtttgggagggggtcattccaagcagagatctctttgttgtgcaaacccaggatgtggaatcctggcccctgacatggttggggagggaaggggaagccctcaaagacacagggaaggtgcaccaggaccatgccaggcccctgacaggcaaatctttcagtgccaggcagagtaaagggctggcccaggacagagcctggtcaggggggccaggagagggctgcacacaccctagcccaggacccaaggaccttcccctgcccctggggctgctccacgaagagccctgctgtagtccaccctctccctaaacctgcctgggatctgtccaacgccatctcgcccctcccccttctctctctgtgccacggactcgggctcagcagatcctttggggcctctgggtagttgggtgacataggggcactagagcgggtggtggtggaggggacaatccagcacctctaggaacatgcagtttggagggacttctgaccctggttcccatctcccggggctgcctctgcctgagctgagggccacctacctaccccaccccagctgatggaagcgaggatgtgggattctgaggtttgaggaaggtggtgaaccgctgtgcctgggggcttgtccttttcagtcagtctgactgtctcagacgtttttagactgaaagagggaccaagggagtgtcagggagtgacatctcaggatgtcagcagcaccacagagatccgaggagtggatttgaggctccatggtggccctcagcttcccccgcccagattttccacacctcagccttggctccaactccgtgagggcctgcatcttccccagcatgaccaggagcccaggaaccgggacaggaggctggggagggcctagcccctgcgggaggccagaccaaccgttcactgagcaaatgggaaaaccaagaggccgggaaatgacttgcccaaggccatagaagtcgcggggacagaggcggactagaatccgggtttccacctccagaagggtttctgttctgggccacggcccccttcgccacccgctggagc

SEQ ID NO: 5731 - DNA, 776 bp, Artificial sequence
  DNA replication origin
tgccacttcctaccgaccttccgtaaatgcccgcgcccagcctctccgacatgccgctaggggtcacgcctggccccctctccaccgccagtaaaagcatctagtcttttttctgtatctaccttgactttatttccccgacgagggggaacgcgcgcgcgagctctgagagggaaggatggcagggagcagcccgggcggactgcagaggcgcggcgggaacttagggcccgggaggatgcacctctccgcccacactgcagctggactgagacctggccgctagctgccggccgctggaccgggtctggccagtggagggcgctccggacggggcctggctggcctttgccccagcgcaccttggtgcacagtaactgagtgccaggcctggccagcgaagcaggtgtccactgggcagggcggccacccctcacctttccgcgccgcgcctgctcggaggcttagcacccccagggccagccccttagcatttgccgagctccgagtgcccaagaggctggggaggaagaactgaggcacgccgcggagggccaggaactaggctggggcgggtcgaggtcaccactggatttcgggccacagaccctgctaagcgactcccactgtgaatcagtcctcagacgaggatggatacccacctctcggttcctcctaacccccgcccgggagcttctgtcctctgcttctcggctcctccctcccagaggcaggtgggtggaaaagtgacatctggtgttgttccagaggcgccc

SEQ ID NO: 5732 - DNA, 1499 bp, Artificial sequence
  DNA replication origin
cccaccacggtccccccccccggcccccccaccccaggacagtggggctctgatggagctggctggagggattctcaggtctggatcctgagttctgccccattccagggctggcagatgagtctggagccagtccactatctccccagggttcctgcccatcatgtgtgtgaatctgacctgccctgcctccagcataccatgttcgcttctaaaaatccatgaggctcaaagatgtcttccttgaaagaagggacaggaggaacaactgaccaagggctcccctctccccacctagcagcccctttcccacctagaacctagctctgaagccagggctccccaggggcttcagggcccctcagcaagggccttctccttctccctgccacctaggggcctgctggaagacaagaacttccatgaggctgtggaccaaagcctggtggagcaggtgccgtacttccgccaattctggaatgagcagtcaactaagttcatggaccagaaaaacagcctgtacttaatgccaatcctgcctgtaccctccagcagctgggaggatgggaagggcaagcagccgaaggaagacagaccagagcactatccagggttgggaaagaaggaagagggggaggaggagaagggtgaagaggaagaagaagagttggaggaggaagaggaggaagaagaggagacagaagaggaggagttgggcaaggaggagatagaggagaaggaggaggagagggatgagaaggaagagaaagtgagctgggcgggcatcgggcccacaccacagcctgagtcccaggagtccatgcaatggcagtggcaacagcagctgaatgtcatggtgaaggaggagcaagaacaggacgagaaggaggccatcagaaggtgagcagccaggccccagtgaggacgggagggaggcgaagtgcagaaggttcctaggaggcagtgggatgccaaggatggctgctgcctgtatgcacatctcatcctaattcagtgcttagtgaggtcatgttggtagcttaaggcctctgtgggagtatccgcccggcaccaacactgaactttattcttttttctctaagaactagttgttgacatttaccaacttaccaggagaattgttatagtctgcaaagtcttgtaaatgggcttctagagccagaaaaggaccacctgtcttgcaggtgggacttcccgccggggctgccctacagatgatttatgtcattgtagggattccctaggccccacccagtcccttctgcgccctctcatcacttccctacctttctctaaacttggccctgagatgcctactacatcgcctgggtttgaatcccaccccttaaaccagcagcatatttggcaacttggaatcttttagccacacttggaacgtccgtaacattgaaacaagaatgccccatagtgtagtggatgaggggagtcgaatgggaatctccgtagagctcgcggca

SEQ ID NO: 5733 - DNA, 1195 bp, Artificial sequence
  DNA replication origin
ggtctgcactgtagaagctggcatgcacagaggccctcaaggtcaccacaaatgggaccgtctcttcaggagccaccacccctatcatgggactcacagacacctgttgatttggggaaggagtctctggagattcacagggatggaattggataggatggcacggaataggatgggatgagatgggacaggataagatgagatgagacaagatgggatgggataggatgggacaagatgggatgggatgggacaagatggaatgggatgggatgggatgggatgggatgggatgggataggatggggtgggatggggtggggtggggtggggtgggatgggatggagtggggtgggatggagtagaatggggtggggtgggatgggatgggatggagtggggtgggatgggatgggatggagtggggtgggatagggtgggatgggatggagtggggggggatgggatgggatggggtttgtggggtgggatgggatggagtggggtggtatgggatggggtcaggtggggttggatgggtctggagctctgatggaggttccagggctcaggggactctcacctccccaaaatctagaggacttggctgccaggagaaggcaatttcctcgttcttggagatgttgttgaggaagagcaggcggctgcacttgctctgcacaggtatgtttcccagggaaatatgagactgggacaggaagacattctgtgggtggagagcggaggtaaagaaataagaaccggccaggcatggtggctcacgcctgtaatcccagcactttgggaggccaaggtgggaggatcacgaggtcagaaaatcgagaccactgtgcctggcccttttgacacctttcaacacccccactcctatgccatctcttaacatcctcatcccagtgaagagggtgggatggagggccctgaggcaggtggagcggcttgagcaggaacacctgtgggcactaggtggcagggtagacctctcatggagctggtgctgcctcctgaatctggaggagggtgagttccaaggtctcatctctgcctctgtccctcctcaactacatctcatgtccctcccagcctccccatccttctgtctggccaccctgggctctgaggctctcccacaaggcctcaggccttcctagctcccctttccccacctgtcca

SEQ ID NO: 5734 - DNA, 817 bp, Artificial sequence
  DNA replication origin
agaccaccatgatcttgcccttggtgtggttcatcaggcacaggggtacagggttgggggcctcaggccctgggcaggcaccgaagtctacctcgacaggctctacactgatgggcggggggaagatggttatgtcgctggtgccgtcgaagaagaactcggtcatgggggggatataagggtactgcggggccggcatgtcctccagatcctgcatggggaaagacaggtggatagggctcaactgccattcctcttgctgttgcccctcctgggtacactcctgtctagaaaggctacaccagtcgccctgactactaatggtgcccatgggaccctgggggcatgggattgcccaagaatcactagagaagggatatgcagctggggagggcactgtacctggatgggaatcatgagagccccgttctggtcctgtgccagcttcttctccttcagcatggcatccaggatgtcaggggggtagagcgtcaggccccgggccaggtgtgtgcggtaccaggtgaggtgctgaggcttcaggatggctggcttggtgctgtccgagtggcaggtccccatcaggtccaggaacagtgggtcctgtgacatttgtctgtgtgtggtggggcatgggaggggtggtagggcaaggggggtgctgggggttgaactgaggacagaagctgggcagacaggataacagaggcagtggggcagaagctccaggtggccagtgagcaagcactcagcagtggtctggctcagccagggcacagcaggagtccagggaaggtcaggagagagcaccccggtc

SEQ ID NO: 5735 - DNA, 1485 bp, Artificial sequence
  DNA replication origin
cgagtgctctgtgggagaaagggacatgaaggtgttactgctgtgcagctcagcctcctggtcacaacgaccctcccttggccaccccagccagccagagctcctcttgctcccagagagcccccgtcaccatatcccagctcctgccccccacttcctatgcaggcttgaacccatacttcactgcccccatccccttactccaatgtgatcttctgtgacccccctccccagcctaataccttgccaaggagcatagtggggctccaagacccagtggatgagaaggaaagggctacctcatggaagggggaggttgcttagctcctccgaggcctagatgttctgttatttctcaccccttgctcagacacttcccaaaaattgccctctcaggctgactccccaggttctgtaacagagctggacctttgaatgtagggatgtgagaggagcccacccagtggggcaaaggcagactcctgggcagcctcggagtgaatgtttgggtcaggggcaggccaggggcgaggacacagtcaccatcttcagttcacatgctgagtccctgtgcagggacagaacactgcggcatcagcaggtgagctggagaacagtgtttgggggtcaggagtaatgaatggaagtggttgtcgtgggtcaatgtttgcagtgaagggtggatgggccttgcagtagacacagttggcaggggaagtattgagtggaaggttcagggtgtggttgtgggtcagggtagggtcaggaatatcaaaatgtgggcctgggctcagtgtgcgggtctatgagagtgcaactattacacgctgccagtgtgaaaggctgagccggcagccaggtggggcttggctgggagccacacaggaaccatttggagcctccatggctgggttcagtgtaggtgacagggtgctgacaagacttgagggaggggtgaggccccagtgcctgccaattctgatcaacaatgcggccaatctgggaaaatccactttattgagtccactttgtttagtctggctctcctggctggctttgccccaaaatgtccagcttcagggcacagggggagaggttggggacgcctgcgccccagggagggctgacctgcagctgggtggtgggttctgagcctctgggctcctggtcaggcatgcaggtgtctgggcataccccggctcctggccccaccacccgccttgttctgtgccaggtggggtggggaggccttgtctggcagcctggcttcctccatctgtccagcttgctctgtcttgcacctcctgtggcaggctctggactgtgggccaccaggtcagcacccagcagccctgggacagggccctatcgccctaggctcctaccatgacactgccaggcatgggatgagcaggcagtcacggtcaggagcagccttggagagcgccgctgatgtcctcttcccccggatccctgcctccatcc

SEQ ID NO: 5736 - DNA, 1311 bp, Artificial sequence
  DNA replication origin
gccggaggagccggccgaggtgcaggtgtaggcgcagcctcgcccagaactctcccgccacacccaagggagctggaagcccgggagggtgctgtccctctcccttaggaacagagggccctgaagtgctccctccctagcatacagccgcccccggggatctggaccgcacggcggtatcacaaatctggaggaggcatggaggcaagcgccctggcggcgccttcactggtaggtggaggtcccctctctcctgtgctgtcttcagctccgggtatccatccctccacagacaggactacacctttcagcgcccggtccctctgtgcctccaaggcaggagggccagccagcggccgggagggaggagtggcagcagagccgactgcctgcggccggcctgcgaggcgtgcaaggcccgaggtgcccagtaggtgtcaccgcagcctcagggctgaggcctggggacgacaggctctggaggcgcggcaggtgcagagcgtctcggtagcttcagggggtgtgttggaggggaatcgccggcctgcctggatccctcgagcaccaccgaggattcccgccgggaccctcttataatcttaaaccggcccacaaccccgccagagatgacagggccagggaaccagaaaccggcggattagcgccagggccgcccaatggggggccacatgcaacgtcttcctctgcaaggcgcaaaaggggctgacaatcccagacctccaggacctctgcaccggtgccccgcccctataccgtaggaaggaactccataaaccaagcttctgatctcagggagccagctccaccatcctcctcacgtggagttggggtagagccgcgccctgggggaaggaccgaagcggtcatccttggttgctgcctcctggtgtgcctgggtcctgagagcccaagagactgtgcagctgactctgagaagaagctggggccagggccttggtctgaggggaaaggcccttccaccagtcctcgactctgagactctgagattcgaggcgccaacaagtgtgggcagcccaagtctcaacctacccccaccctgcagagcccgggcctcacagacccttggactcagccttcctaggagccaatagcagctacaacccagggcctcgcaggtcctcgctggtgcacagcctggctgggggtgcttactgcccagggagggagctccgcttgctccttcgtagaccctgccgtcaggcttctagccccgcacctatgcccgcctgcagccctggttccccgcctctctccctcactgccaccgcc

SEQ ID NO: 5737 - DNA, 906 bp, Artificial sequence
  DNA replication origin
aggcgccgaccgcctcatgacccaggtgagcgcgatccgccctaccagcgcgccgccaccgaagcacggccacctgcccggccctacccaccccctggcacattttctcgactggctggcacgctccctggcacctgcccctctcgccaagccccgctgcctcctgcccaagatgggctggccaggggtccaggcaggagtgtcggcatccccaagcccggaggagactgctagaagagctccccgctgccaagccccacagcccagcaggttggcggcggctcctctgccccaaagtactggcagctcagccagacgctgcacccggaggtacctctacccggctgcctcctgcgcctccaggacccacgcagtccctcccggcctaaccttctgcacagctgtgcccctttcattttgaaacttttcggcacccctgaggcaaagaatctctgggtgcgtagggtcaccacggcctttcctccctgtgcgctcttggttctacgggctgccccttccaggagcagcgtcccggctgggtctggggttaagaacagcgaggaagagttgaatcgggaggcggaggtgggaaaaggaacctgcccagcgagcccacgtgtctgtccggagagctgaggggtgctactgcggtggaagggtgggttattggggccttcgggctctgggactgagcttaggggattcctgggcttggtggtggggacgggaaggagtggaaaagaggggctgagatgccgagggaggcagggaccagggctgacgctagtctctgcatgctggagtaggacccgcgctccacccaagcttagaggcgcaaattccttcccagcagccaggtccgcgaggggagagaccttcacccccttccttcggggtctcccgagg

SEQ ID NO: 5738 - DNA, 1108 bp, Artificial sequence
  DNA replication origin
cggcggtcaggcggctcgggcggagcgggagctgctgccgtctgcggcgcagcccggggccgagtgagaggggaaatggaagagatccgggctcgggccccgcgcagaccgcaccctacccatgtccctgcctcctgtgcgctcgacagcgaacctgcagcaagggcagcacagcctcctccccctcgggcgggcggccccggcactagccagccctcgtcccgctcgcgcctccgccgcgcgtccgcccgcccgctgccctctgcgccccctgcgctgcccgagtttgccctccccgcctggacgcgccccaccccgccctggcctcgcctaccggctcttcgcggctctggggtgccccgccaggcgcaaacctcccggacaggagctgccacccccacggagaccgcaacccacggcgcggccggacgcgaggggcggggggcagtggccggaccgcacagccgcctacggtgtcccctgcggggaagcaaacccaaaaggcaggaggccactcataacctggtgccccaccctggcccgggcgacgcgccctttcagcttggtggagctgggttctgtatcaacctggtgcacatcccacagcctgcctgtcggtgtcaaactggggatggggagtctagccttttgaagagtcaaatagggggttttaagttggaaacactgttgaaagtgacaatatgaagttgcaaagggataggtcaatatgcagagaagggtagctaaaatggtgacgtcaacagaataccgaggaaccccgactgaccatgttaaagaggggcagcaaagatctcagtaacgggggcttggtatgaatgccaaaatgatgcaaagccaccggaactgctaaataattacttggttctatattacacatctaaaagagcagagaatatgtagaaacaactaggaacgtgaacatgtgttatgtgtttttatatgacattcgagaaagctgaatgaattaggatcccttctgccaaaacaagtaaaggcaagtgtgttaaaaagcaaacaaaaaacatcaccaccacaacaccaaactatatgatttgactgtaatagattctacaaatccaataaaggt

SEQ ID NO: 5739 - DNA, 946 bp, Artificial sequence
  DNA replication origin
gcccgccctatccgggggggggggggttaggccgcgtcacgtgacgggctcagcgctccgcagtcacgtgacgctcgtccgcaacctctgctgtcctccgcggcgcccccttccgcctgacgcgcccccggcggcggccgcgcagccctggctcctcgcgggctcgggcggcggctgcggcggggctatggcgagcggcggtggcgggggtaacactggcgcgggtggggggccggggatgggcctgagcctgggcctgggtctgggtctgagcctaggcatgagtgaggccaccagtgaggcagaggaggaggcggccacggccgaggcggtgggacgcctggccacgacgctgtggctgcggctccgcggctgggaggcggtgctggcggcggcgcagcggttgctggtgtgggagaagccgctgcacagcctggtcacggcggccgcgctcaacggcctcttctggtaacggccgcggaggagggggcggggccgggatgagcgggggagggaggggtcgagagcaccattcccctttctgggttatcacttggcctgggggcatgacccatccccagtttttgcaggctgacatccgcttgaattgcccatttttttctatctctgagtcgtgagtcgcgagttaggcctggaggtgccattaccccatcagtaggcgcctttccaccttctgagatggatgcatgagcctgtctcacccactcactgctgaggtgcctgtctctccctaaggttgctgtcttcctcgtccctccggcccttcttcctactcagcgtctcacttttggcctattttctgctggatctctggcagcctcgctttctccctgacgtttcaggtgagtgtttcttcattcagtaagcacccattgggtacttgcttggtgcctgattccgctgggtggggttaagtggcgagggg

SEQ ID NO: 5740 - DNA, 1221 bp, Artificial sequence
  DNA replication origin
ccccagcttcaagccccgccccccggcattgccagcctgggagcccacccttccctcccaacctgcggttcaaagtccctgtccgctgggccccgccccccgcgcgctccgcccctcacccaagcgctgacagctcggctccgaacagtgagcgccgaggtccggaaactccatcgccaagccgggcagggtctgctaggagaagcgacgagtgctgagcgtctttagggctcgtgctcgaagtccgcaccgcgaccccgcactctggcgggctccctgccccgccccttcctctcccccgcccagcccgggttaccggagcccccgcgccagccggcccccggcgcccgctcctccctcggcgcgcgcggcgcgctgacgtcatcccgcagggctggcgcgtccggcgcagtctccgggcagccggggagggcctcggttgagccccgccccgcctcgccttgctctagaaggctgagtcggaagactgtcccgaggcgagagggtgttgatgcgcggctccgccaccctgggcgcgggcgtagctccgcagaggaaggccagcgaaggcaaagacggatatcttgggggatggaaggctgggtggtttggggtctttcacaattcggtccttagcccgcttcacacacgatgccctcctcctggccattttgttcacggccacggctgcccttcgcctccacgagctgacagctcctgtatttctctgaagtacagacgtctctagagctgcagatccctcctcagtctgaactaggcgcacctgctatgtgatcttacttcttccattctagcacccatatcactaatgcgaccaacccctatatgagcatactgggaaatcaggaaccacgtctaccttgtttcgtgttaggtcccagcacctaacagtgcctagaacagtgtggtcctcagtctttagtgtgaatccaaatcgcctacggagctagtttaaaatgcggatttccgggccctggagcttctaattcagtaggaagcacctgaaggaattctgacacagattgccatgcaccacactctgaaaaaccctagcctagaatattcttagtaattattgaatgtagccaggactacaggcacaagccaccgtgctcagctaatttttaattttgtagaaatggggttggggaggggtctctctttgttgcccagattggtctcgaactcctggccttaagt

SEQ ID NO: 5741 - DNA, 1474 bp, Artificial sequence
  DNA replication origin
cagtcttccgactcagccttctagagcaaggcgaggcggggcggggctcaaccgaggccctccccggctgcccggagactgcgccggacgcgccagccctgcgggatgacgtcagcgcgccgcgcgcgccgagggaggagcgggcgccgggggccggctggcgcgggggctccggtaacccgggctgggcgggggagaggaaggggcggggcagggagcccgccagagtgcggggtcgcggtgcggacttcgagcacgagccctaaagacgctcagcactcgtcgcttctcctagcagaccctgcccggcttggcgatggagtttccggacctcggcgctcactgttcggagccgagctgtcagcgcttgggtgaggggcggagcgcgcggggggcggggcccagcggacagggactttgaaccgcaggttgggagggaagggtgggctcccaggctggcaatgccggggggcggggcttgaagctgggggggggtggtcagcggcagagggggcgtggccaaggaggtaatgggcttgggaaggggcggtgtgtcgaaaatagggtggcgttttccttcccgagtggaagacttgagtgagagagaaggacatcgaggtcccgctggacctgcaatccgaccaactctttgcagattttctgccgcttaagtgtgatgcctgctcaggcatcttctgcgcagaccatgtggcctacgcccagcatcactgtggatctgcttaccaaaaggtgagggggcgatcctcagggtgaaagcaggcagatggagaatgcgtgcagaatcccccaaatctgtgtctcacgtttcttctcccttttgtccttctgaggctgtcagtgctgggaaacactgtttttttgcgtgtttgtggtgggtcatatccaagttctttcaggaccagagatttgttggactggagtgggccacagactgacccttgctccttgactacaggatatccaggtacctgtgtgccctctctgtaatgtgcctgtgcctgtggccagaggggagccccctgaccgtgctgtgggagagcacattgacagagactgtcgctctgatccagcacagcaaaaacgtaaggtaaacattgtaggggtcagccacaacccagctgggactacggatgcctggaaacccaaacagctaatcagagtctcagcagagacaaccttctcacttcacctcagatcttcaccaataagtgtgaacgcgctggctgccggcagcgagaaatgatgaaactgacctgtgaacgctgtagccgaaacttctgcatcaagcaccggcatccactggaccatgattgctctggggaggggcacccaaccagccgggcagggtaatggcagccaagtcctccacttgcttttgggaagcattcttttggaactgactcaagctctgttgttataaattggggagcttcaaccctaccctgtcggctag

SEQ ID NO: 5742 - DNA, 1699 bp, Artificial sequence
  DNA replication origin
tcggcctcgcagtagttgcccacagtcaccatggcaatgcgtggacgccggccgaggctgcgggcactgcgggaccggaggccgggactggtcactcggagaggggcgcggacatccgggtgccttggctcacgtagccgctgggcgccaagctgcgggggtcccgggaagggacgcacgtggaccaggcctcaccgcccactcccctagcgcacgcgccgccgccacgcactcacgcagggcacgtacgccgtctcagcacggccccgctggctctgggcccgggaccctcctgccaactgcaggcccacgggaatgctcggtgttggactcgcaccgcgctccacggctgtagccccgcccacagcccctacccacggctcccattggccaaatgtctccgaggggggagcggggggaatggtgcaggcaacgaatgcaaattagagaagcagagccggcttggtcacgtgcccagggcgggaaatctgacgaccaggccgagctggaaacctccacggaatcgtggctcggggctggaaacagacctcacggaatcctggctcggggcaggacacagacctccacggaactgtgggtcggaagctgcccttccgccagccgccttgctcagcgtatctgagcgacggcctaaacatactttcttctagaccccggcagagtccccatcccatttctcttgttcccaggattctagccgcgcgagacaacaagaagtctggtcaaactccctttttattaagggttatcaagctgtacacggtccctaccctgctccgctccgagttcgggcagcgcaattcaccactctcccaaagccggaccacagctgggtgaggggtgggacagagagtaggagcagtcccagcatgcagtgcagcagcccaaagcctcgggcgaggcatcgcccttcatcccccttcagggcacagcgagatgcgggccagagctcttttgctgggacgcacacagccaaggtcaccctccagcccggtctgtcccatgtgcaggtgatggggggtacgataagcagcaatgagggcccaggaagacctcagtctcctgggggcccatcctaaaagatggcaagggcagcaaagtatttccatcctgctcctacaatttagaaaccttcttttttagtgtcaaaatatagcgttgaggggagctggacgctagggtcttcaccctaacgcaaagcaaaagccgaacggaacgggagcaagcgaacagaacaggagcaagcagcacacacaggccagtgatgtgcaagaagcggagagaggtgagccggctgcagcactgggcgagaactgcgggtgaggtaagggccacagcctgacctgctcatctattgagggggctagggaaggttgcaggggttgagggtccaggcccaacctccccactccacagttggcacaggttctccctgcttggcagcttctatcgtgggcagccctctggggacttgcaggggtaggtgtaaaggtggcagtactggggctgggctgggggccagtttctagcaccacactctgagccaagggggtcctggggatgaggctagagtcccgtgtgccctcggttcctaggccccaaattcctctcctggggctgtggcaagcccagtgttggcacctcccttggccaggcacagacacacaaacaccacaca

SEQ ID NO: 5743 - DNA, 1382 bp, Artificial sequence
  DNA replication origin
ccggttattggaatcccaggccccgtgtctggccttgcccaggggtgcctgcggagccctaagtgagctcgcggcgggtaacggaggaaggggcgccgccggcggggcgggggcgcgcagccggaatgttttgattgctggcgcgcgcagacgggggcgcgcgcgggcgccggggccgcgcgcgaggttgtccgctgttgggagctgccagcccttggcctggggccgggcgaccctggggcgaggtggactccggtccacggtcgccgcggctgggtgtggggaggcaagccaacccacccgggctatcagctgtaaggctgactcgatccctgcaacatccgcaggaacccctgagcccaggcccagccggccggggctccacgggccctggtccacactgaccctgtgagtggtgacttccctgaggggcagggctctcactagcccagggaatcccaccggggccaggctgggccaagatccacggcccccaggggctgcacggacaggtgagtaccacctcgaccatgcctggcttacaggacctagggaacccacaaattcacctaggatcgggggtctacactgacccagtcaaggtttcccatccagaaggtttgctcaccggctggatctttggtgctagggaagtaagagaaggggttgaccagaaaggtcctcttcaggaaagactcttgaggttttgtggaccctgagaagtatgtcatttctgaggctaaggtagggcaatggagaaatagtccagaggcgcccctggcctcaggtctgtacccactcattctccatggggtccctaagttacttcttgagaccctggagttggaagagtggcccggtttagcacagccagaggaagtgctcgtagtcctgggctggaagggtgcttcttccccactgcagccttcctgccccatgcttggcctcctcttggtggggtgtggatggctgggagggttgggttcctttttatccccactgcccactctctggggcctgacatcttctcctccagcagctgcagagcatcgagggctggagaggagcacatactgtccatggagctggtagggccatgtgcttttctcaaacatttgtttgtgaagtgcttccaaactgttagtctcttgggagaccagggttcccaggatgggcgggggagggactcttctgtccgttaaatagaagatgaaacagcccccaacaaagggacagattctggctttgggccaggaaagcagcagtagacacccagactggccagagttaaggctcccccagccctgagcttactgcctttcttgtgtcactactcctctgcctctgagccaaggaggctggtagtggacaaagcccaaggg

SEQ ID NO: 5744 - DNA, 1064 bp, Artificial sequence
  DNA replication origin
gcttgcctccccacacccagccgcggcgaccgtggaccggagtccacctcgccccagggtcgcccggccccaggccaagggctggcagctcccaacagcggacaacctcgcgcgcggccccggcgcccgcgcgcgcccccgtctgcgcgcgccagcaatcaaaacattccggctgcgcgcccccgccccgccggcggcgccccttcctccgttacccgccgcgagctcacttagggctccgcaggcacccctgggcaaggccagacacggggcctgggattccaataaccggtctcacgtcttacctcaggaacagcgacccgggtgattccagaggctccgccggctccgctcggctcggctcggctcggcgcgacccgcggcgctaggccgggtgtctgccactcactgtcacccgcagccaggctggccaataagcacggggggcggagacacaacggccaattctcggcttcagggacgggactaaagtctcgaggcgggtcttggacagtcagcggcccaatagtgtgctctacgtggggcggggctcaggtgcggacgccgccggttgtcctcttcgctgctccgtagtgacggggattgttgtgttgcagaaatccggcaatcgacctgaggacttgcgagccgctcagctcccgggacgtttggtgcgtcttctaagggcgtgggcgagtttacgcgggccagttgttgctggtcgcatgggtaacgaagaaagttcggctaggcaagctcagtgatttttaactctgttggactcgatttgggagccgaatgcctatttcattcttttgtgggctgagactgggggtttgagaaagtggacgggggccaaggtattcatctcacagttggtagcaggatgagagacgagaagtcttgcggtgcaggagaaaccaagtcaggcaggcaggagacgcagcagtaggatctcgtttgcaggagccctgtttcttacacgctttctactccaggagctgctgctaaataatttctgctcagccatgtcgccggctccagatgcagccccggctcctgcg

SEQ ID NO: 5745 - DNA, 1106 bp, Artificial sequence
  DNA replication origin
tcttgttctcccaatcagatggcaagtctactgggaagaaagaccttgtcatatttcactatattcctttccatgccttgcctattttgttgatagagagttgccatcactagttctttcatggtattatgttgtgttgtcaggtgatgggggagggaggggtgaatcctttccaagtgatgtagagccaggaagacaggtttcttaagatctgcaaaccagcagcacctggggcactgccagatgactttccccagtgaagggagacaattagaaaatgcaaggcaggctggggtggttgctcaggcctgtaatcccagcactttgggaggttgaggcgggtggatcgcttgagctcaggagttcaagacaaatctggacaatatggcgagaccttgtctctactaaaaatacaaaaaataaggccgggtgtgggggctcacacctgtaatcccagcactttgggaggctgaagcaggtggatcatctaaggtcaggagttggagaccagcctgaccaacatggtgaaaccccgtctctactaaaaatacaaaaatcatccaggcatccatgcctgtaatcccagctactccagaggctgaggcaggagaatcgctagaacccgcgaggcaggtgttgaggtgagccgaaatcgtgccattgcactccagcctgggcaacaagagcgaaactccatctcaaaaatagataaataaataaaataagctgggcatggtgttggtgcacgcctgtggtctcagctactgaggaggctgaggtggaaggatgaggtagaaggatggccttgagccgggagatggaggttgcaatgagctgagattgcaccactgcactctagcctgggtgacacagcaagacactgactcaaaagagagagagagagagagaaagagaaagcagaagtagcttgaaaagatggggtggagagaacggaatgaaatgtagaaagaagggcttctgcggagaccaggggctgagtgctgagaccattaaggtgcgggttgcagatcctgctcttgggttagagacagaagagaccaagagtcagaatcatccaagatatgagaatctcgattttcttcttt

SEQ ID NO: 5746 - DNA, 1583 bp, Artificial sequence
  DNA replication origin
gggccgcagtctcccaggtcccagctggggctgacgtcgtcctggtgtgtgcccaaaatagccggctccgccctcttctcccggcagcccctgcaggcccccacccccccaggggacaggcggagccggccttctccccgtctctagtagtttccgcaccgctgacgcatgcctgcgcgcacagctgggccgggcgcgtcctacgcagcagccgcgagccgggctgcgggtgccagacggttcccggcggggggcaggggcggggcgccgcaggaggccgggactcctggcggaggaggtgcggccgggggcccgggtcaggctgggggccctggatcggactgctggagttggggggccccgatagggctcctgggcctgggcgtcgagatagctcttggccccggcctgcgggggcagataaggctgccggagggagcctagtcaccggccgcaagcagagcccggtgtgctccgcttccaactgggagcgccttccgccacccggggagggggactgctgcagccacagggtggggctcttggttctttccgcctgactccttctcttctgcagccccaaggaggcccgcctgacgactgaccagttgccatggcatcctactacgagatcctagacgtgccgcgaagtgcgtccgctgatgacatcaagaaggcgtaagtgcctccgtatgcaacagaagacctctcaccctccacccgccaccaccatggggcacttcagagtgacacctgtaggtgtctgagggaaccaggtcgttagaaagcactggggtgcttcttccgagtgacacctgcagggaggaaagagacccctggtagagtacaaggagaacgtccagagagtgaagtagttagttcctctgggagctgcactgtgttatgggttgttctccagttgatcttcccctcctcctcctcctcctcctcctttcccctcccctcccccttccccctagatttgggcattctcaggctgcagtgcaaagatgcagtgcaaagaggctctatgaggaggaggggccggtgtccctgtactcttcgaggccacatgtgccccaacctttgcagccccagtccagtgagccctagggaggggctagggaccctggcattgtatccgcttgtacatgtggtcccagcactggtggcggaggagagagggtggaacttgatgaaaatatcacagcagcggcagccctagcagctggggtggactgggacccgggggtgaaaggacagtgataggctaatgggaaaacaggtcgttcggttcctgggtgggaagtgcctgcatttgtcccccgactctctcctctgcacccactttctgcaggtatcggcgcaaggctctccagtggcacccagacaaaaacccagataataaagagtttgctgagaagaaatttaaggaggtggccgaggcatatgaagtgctgtctgacagtaagggccggggtcaggcaggacccagcacatcaccccctacttcatgccccagctcacattttcttaaagcaatgtctctgccacctagtttcctctgtgcctttttccagcct

SEQ ID NO: 5747 - DNA, 764 bp, Artificial sequence
  DNA replication origin
gctgtccagattcagaactggagcccactcctcctccctctcgttgcctcagcctgccctcaccctcaggactaggcagaggtgaggctggctcaccctgaagaggtgggataggaccgggggaccccagagggaggcctaggaggggactgcacccatactgcttccctaccacaaatcagggctcagggagaggccatgcggccagcccaggtctgcatgctgagccccatcctccacagcttgccgctgacgctctctcctgtcaccccgcccctgctctctccccagatgtgttctgagctggatgccgggttccagaatcgctgcacagttccaacaggacagcgccttcccccatgcgctgggaggggaccctccatttctccccctcacccatgctgagtgtagagccggggcctgggtggcgggtgggggccgggtgggaggtggcagtagtcttagcctgtgcactctcttccttgggtgtttggtgctggctcctggggactacaaatcccagagtgcggtgtgcccggcctcatttctgatagatcccgcttgggggaggtggtgtatggttacggagctgtgcatcttgggacatgtagtagcccaggtcggcttgtcactcgctgtgagatggggagattttgtcttttgatttatccctgtagggctggcagggttgtagatgaagggggaatgatctgagccttggttcccctgacacgtcttgctagccccagggttagagtgggcag

SEQ ID NO: 5748 - DNA, 1018 bp, Artificial sequence
  DNA replication origin
gtggtaggatggtcatggagagggctgacctgtgctctgccctcaagatggggggcttttggtggggggagggccctgggcaggtcccctgggaggaagggagccctcctggaggaggcgcagaagcaggtgggaaaggttggcagctgctgctttccctggggtggccaagaagtgggtgctagggaagggtgggagctggggttggggcaggaaggcatggtcaccttagagcggacaaggccaggccgctggtcacggacatgctccagggtggcagcgatgtcaatctccttcactcctggagatggaggtggggatggggctgctcagggggtgtccagaggaggacaggacccagaaaacctgaggcctcctggaggcaaagagccttggagggctgggcagagcctggaggttgacaacctgctccttctgagctcccaggaccctgtgtgctggggagcctctaaaaagggcctgggggctgcgggcaccgtggggaagctccctaccttttgccatgcggttcaggaccatgtcgatgaggatgtaggtgccggtcctccccgcaccatcactgaaacaggagttagtgacaggtttagcttgagatgcagcagaaagggggagggacggaggaggcgaggaggcctggaggcctgggggaggggaggacactgggtgacccgttggggttggcttggagagggacagtgagccgaggatgaaggaaagctcatagcacctgcacgctgggacttgggccttgagaggggagtctgtgacctgtgggtgtcatttgggcaatgggacaaccaaagaggagagccatggctcagcccagaagcagaggcagcaggagggaattggatgggcctctctagccttcagccagctttttgtgtatagggggccaatggtcaatattttcaactttgtgggccacatacagtttgtatcacatacttttcttcttttttcttcacccatttaaaactgtgaatgccacgcttag

SEQ ID NO: 5749 - DNA, 1469 bp, Artificial sequence
  DNA replication origin
cgtctcactgcaactgctgcctcccaggtttaagagattctcctgcctcagcctcccgagtagctgggagtacaggcgctcgccaccctgcctggctaatttttgtatttttggcagaacagggtttgaccatgttggccagtctggtcttgaactcctgatctcaagtgatccacccacctcggcctcccaaagtgctgggattacaggtgtgaaccaccgcgcccggccccgaactgcatttcttaagcaacagtttatttgttctggatgtctaatgccaactgagtttacataattccagcctaaagcaatcttttagcttatctgtgcagctttaaaacagatccatgcactagttctaccaggattttttaaatatggaaaaaaggaaatagctctgataccctggcactgctttcaagacgcctgtgtctcaggcctcagggaccccagttagaaactgctgtcctgaggttcagaaactatacccatgtccccacccccagctctgctcctctgtccagtacctagagacatcaggccagcttggcaagggacagagaaccaggagaagggcgcagtgtgggtgggcccctgcccttggtagtgggcttcccaagtacctgtctggggctaggaaaagcaggggacgctggagggctgacctgtcttggtgtcagtgttggaaaagggtaagtccctcaggtagcccctgtctagtccccacctgctccactgagccccccagaatccagagatcctcccacactcctttcgacagtctttgcctcttccctgtaccccttgctcccagctcggggtggtccccgggccacatgtcctgtctgtccatgcagcagccacacctgccaatgatcacttttgtgactatgcaactggagtgagaatactagctgcagatcacaaaaatgacactggcagctgtgagggagagagagaaagagggaagaagggagagggaaggacagagagaggaaagacaggcagcgggagggagagggagagacggacagagcagcagagagaaactggcagacaggggaaggaggtggagaaaaacaggggagagggcagagagaaaggaagagaagcgcggagagggagaaatggagagagagggaaagggtgaggcagagacagagtgagagagagatggggagagagaagaggaagaaagaggaaaggaaaaagaatgaaagacacagaaaaaagaggcgaagagacggagagggatgaaggagggacggagagggatgaaggaggggagacgggcaggcgggagtgagagacggagggggcagcaaggcagcgcagtgcagggcctggagacagcggggcaggagggaactggaaggagaaaggaagcaggggtcctggagagggaggggagacagaaagcagagggccctctggaggaagcaggtggaggagaaggagccagtccc

SEQ ID NO: 5750 - DNA, 1108 bp, Artificial sequence
  DNA replication origin
ttaacttaacccttttcacccaccctggggcggggagacagaggtgatcctagaagagggctacagggatggggccaagtgggaattctagcgaggcgcctactatttgatggaggagggatgggctaggtaggtcccccgctccgacagggctcttacgccatatgtgacgcaaattagcttacgagccgggggtggaggtgtcgtcagcacccgcctgcggttggccgcgttgcagcgagaggggcatgtagaccccgcctcgtagggaggtggggagcggcaagccccgcctcagcccctctggcaggctcccgccagcgtcgctgcggctccggcccgggagcgagcgcccggagctcggaaagatgcggcgcccgcggcggcctgggggtctcgggggatccgggggtctccggctgctcctctgcctcctgctgctgagcagccgcccggggggctgcagcgccgttagtgcccacggtcaggaggaaacttgggctggcgggtggtggggggcggggagcagcttggggcctggagcgaaactcggtgggggtgagggtgaaatgtcatgaagctcggggagaatatgggttgggggaggcatgcgagatgaggaaggtgagagggcgtctcggaggaaaggggcgtaggcctggaggtggggctgggaatacgggggcgggacctaagagaattgggctctggggaaaattgcaggttcgggagaaggacacggggtgcatgtgggcagagggacttagagaccggctgcgagaccacaggagaagccacttgctccgaggcgcctgggaggtggtgacaggcgctgaggaatgggaaggggaggtggcggggagaatgagggaacggtgatctctgggcagtggaagcctgggccgcagacatagagtcccagctgggcagagagagaggccagggtttctccgtaagcctagagaagctgattgcagcgatctgatctcctgtaacgggggacagcacggggagggggcagaagaggatgaagaggggagggtcctctcttgtccccctccccacagccaggcctggtgctgactcacatctgtgcggacagagacag

SEQ ID NO: 5751 - DNA, 996 bp, Artificial sequence
  DNA replication origin
ttcctagctgggcagggacatgggggcgggacttagggagtcgggctaaagttcggattaaggggcgggcctggctcatgatcctgggccggcgggctgaagctttcaacggagtttcagccctgggtttgggtctctcggtggggacgggcggaagcagaggtctgtgccttagagtggtcacttctgggggtggggatgggagaatcctcggaacctgggtgaaaggtcaggggtcccagaccttgtaaaagtctgagcatccccctcccctaggtggccatgaacggtaaggcccgcaaagaggcggtgcagactgcggctaaggaactcctcaagttcgtgaaccggagtccctctcctttccatggtaagcggtggccagggcaagggaggagggtggaggctgatgcgcccttcaccagcttccatcgctgtgagagggtgcttttcccacagctgtggctgaatgccgcaaccgccttctccaggctggcttcagtgaactcaaggagactgagaaatggaatattaagcccgagagcaaggtactgggggtggggtgggggtggaaaggcaggtccctaggctggtctccaagccctgtgtgccagctgagtaatgcaactcacacccctgtctttcctccccttctcctcagtacttcatgaccaggaactcctccaccatcatagcttttgctgtagggggccagtacgttcctggcaatggcttcagcctcatcggggcccacacggacagcccctgcctccgggtaaggaactcggacggtgttggggtgggaggagatgtcagagggagtacagggcaaaagagaactaggaggtacaaactggggcctctatcccctggagtaagggagaaggtaaacttgttggccccttccttcacaccttgagcctttcatgtgacactaatattcgctgtctgttacttatgagtagccaaagtctcatctccacatatcgtcatgaa

SEQ ID NO: 5752 - DNA, 1385 bp, Artificial sequence
  DNA replication origin
gggtggagcagcctggcgaggagcggggcggggtgggcggcacggcctgacaaggggcggggagcgcaaggaggcctgacgaagggcggggcggagcaagggcgggggcagggcgagtagtggggtacagcgagggccggagcggatgggggaaacctggtgaggggcgggacaaagcggggagggcggtgcagcctggcgagaggcggggcggacgaggaagcttgacgaggggcggggcgggcggtgcagccctgcgaggggcagggcgggcggtgcttcctggcgaggggcggggcggggcgggcggtgcggccaagctaggggcggggcaagggcggggcaaggcgggtggtggtgcccagcgaggggcggagcggacagggtaagcccgccgaggggcggggctgaccgaggtgggcggggcggatgccgaggggcggggagaggtgggcggggaggccaaacatggggcggggcggcgcggccggggaagcgtgatgaaggcctacgagtgcggcgcggcctgaaggggcacgcgggggacctgcaaagctagtgaggggcggggcaggcggcgcggtgggggcgggccgagcccggaggccagatgagcggacacagccccacgcgcggggccatgcaggtaagtggctcccgacggccccacttgaatttcgatcccagaccgggtccggcgccctccggggcccaagcttagcgcggtgctgcagtggggccgcctgacccaaagcgaaaccgaaagccccgcggagggtgacctgacgactttcccgggactggaagggggagtcctgcgagagactaggtgggtgcgagagaggagtcagggtgctccttggggtacagggctttggctccgggctgggtacgcgcacgtgatgcaggccgcctcagagtatggggcccgcttgggatcccggagtttgggagcagaacaggatttcctagctgggcagggacatgggggcgggacttagggagtcgggctaaagttcggattaaggggcgggcctggctcatgatcctgggccggcgggctgaagctttcaacggagtttcagccctgggtttgggtctctcggtggggacgggcggaagcagaggtctgtgccttagagtggtcacttctgggggtggggatgggagaatcctcggaacctgggtgaaaggtcaggggtcccagaccttgtaaaagtctgagcatccccctcccctaggtggccatgaacggtaaggcccgcaaagaggcggtgcagactgcggctaaggaactcctcaagttcgtgaaccggagtccctctcctttccatggtaagcggtggccagggcaagggaggagggtggaggctgatgcgcccttc

SEQ ID NO: 5753 - DNA, 1143 bp, Artificial sequence
  DNA replication origin
gcaatgtttctgcctcaacctcccaaagtgctgggattacaggcatgagccactgtgctgtcctgggacctttcttaatgctaccaaagcccccttcccttccgtccacccttccgtcccatcctctcctccctgtcatctcttactgggtgaataacacctgaagtttacagggtactgagagtccacaaagccctttcatctccatcatctcatgagctcttcccccttgaggcccagcctccttctcctcctagcctccttcctgggctgagctgtcctatttggtgggagaagttgggggctggggaggaggtgagattagccccagacttgtcctactttggcagaaagtccacagcactctgtgtctgtaaaaggagcgtggggcaggaggggcaggagtcggggctgtggggccctccttggagaaggagcaaggtcggggtgtgggggtgacgaggacgatgaaggaggggttgatgagaattggggtgggggtgccagtgaaggaaggggcccaggagagggtctgggggctggaggtggaaaaagttaggagagggaagatatggcccgaatgtcttaagccaaagagatgtggagcgtggccgatgggaggggggtggattgctggctgagcctggggaggaggcagcgcagcaggagagggatgagtttcagggagaatcctgacgccatcccggctgggcccccaactctccagcctccccccgggtgatatcagggagaaacagccgcctctggacattccttcccttttacagtcactccagctcctcagcagcctgtggaggtcaagcagctgctccagctgggggaaggtggatggaggggatggggatgcatgggagggggctgctggagggaggggctctggacagggaggccaggggacattagacagtgagtcccaggaaaaaactcagctgagaccaccccctgctggggcccagagtctcaggctgtcagaagttgaggggactccagaggtgacttggccttgtcccctcacactgggatcacaacagggccgaggccagggacttgcccaggtagcccaggtggtcagctggtgaatccccagggtgtccacctgtatcttcgcctccaattgaccac

SEQ ID NO: 5754 - DNA, 1573 bp, Artificial sequence
  DNA replication origin
acagcttgcactgactcgagggctggataagaatatctggaactcccccatctatttcagaagcttgtctcttggatgaaaattagacacttaatgggaaagggctttgaaaagagtgcagtaacaaagccccctttacaatttacccggcacattcacacccatcctgaggccaaagccacaggctgtgaggtctcactgtctcagcttcctgagctataaaatgggaatgatgctagtgtctacctcctagggttggagaattgggggtcatgggtgtgaagtgctcagcagcttggcccacactaggtggtcagtacatgtaaggtattattgttgctacatacattagtagggcctgggcctctttaaacctttatagggtagcatggcaaggctaaccatcctcactttatatctgacaagctggggctcagagaggacgtgcctgagctggggctcagacaaggacacacctactagtaacccctccagctggtgatggcaggtctagggtaggaccagtgactggctcctaatcgagcactctattttcagggtttgcattccaaaagggtcaggtccaagagggacctggagtgccaagtggaggtgtagaggcacggccagtacccatggagaatggtggatgtccttaggggttagcaagtgccgtgtgctaaggagggggctttggaggttgggcaggccctctgtggggctccatttttgtgggggtgggggctggagcattatagggggtgggaagtgattggggctgtcaccctagccttccttatctgacgcccacccatgcctcctcaggtaccccctgccccccacagctcctctcctgtgccttgtttcccagccatgcgttctcctctataaatacccgctctggtatttggggttggcagctgttgctgccagggagatggttgggttgacatgcggctcctgacaaaacacaaacccctggtgtgtgtgggcgtgggtggtgtgagtagggggatgaatcagggagggggcgggggacccagggggcaggagccacacaaagtctgtgcgggggtgggagcgcacatagcaattggaaactgaaagcttatcagaccctttctggaaatcagcccactgtttataaacttgaggccccaccctcgacagtaccggggaggaagagggcctgcactagtccagagggaaactgaggctcagggctagctcgcccatagacatacatggcaggcaggctttggccaggatccctccgcctgccaggcgtctccctgccctcccttcctgcctagagacccccaccctcaagcctggctggtctttgcctgagacccaaacctcttcgacttcaagagaatatttaggaacaaggtggtttagggcctttcctgggaacaggccttgaccctttaagaaatgacccaaagtctctccttgaccaaaaaggggaccctcaaactaaagggaagcctctcttctgctgtctcccctgaccccactcccccccaccccaggacgaggagataaccagggctgaaagaggcccgcctgg

SEQ ID NO: 5755 - DNA, 2437 bp, Artificial sequence
  DNA replication origin
gggtttcggctctaagggctcctccagctcggtgacgtcccgcgtgtaccaggtgtcgcgcacgtcgggcggggccgggggcctggggtcgctgcgggccagccggctggggaccacccgcacgccctcctcctacggcgcaggcgagctgctggacttctcactggccgacgcggtgaaccaggagtttctgaccacgcgcaccaacgagaaggtggagctgcaggagctcaatgaccgcttcgccaactacatcgagaaggtgcgcttcctggagcagcagaacgcggcgctcgccgccgaagtgaaccggctcaagggccgcgagccgacgcgagtggccgagctctacgaggaggagctgcgggagctgcggcgccaggtggaggtgctcactaaccagcgcgcgcgcgtcgacgtcgagcgcgacaacctgctcgacgacctgcagcggctcaaggccaagtgagggcccggcaccccagactcctctttctgcgggcagggcacaggaggctaggcctggggtctggggtcccgctgtcagcacctgccttctcccggggcccgggaccctctcctgccccatgtggagaaagggtcctccacctgtgtgtttcaaggggccgtgacctccaggtctctccccctgcgatcccatcttgcacaggagttttcttggggacatagatcagggggtggatatgggagaatttaggggacccggtgccctgtggacagccccgttaaaaagcattttaagatgctggggcgatatttatggggtcaggtagttgatgggcagaggaagggctgcaggaggcccagagggcagtgtagccagagggagaagggaggctgataggagacagggaaagcagggcaagggcccagagtccaagcaacagctctcagctcagctgtgatgaggccctgggggaggtggggggaggggggagcttggccctggggccttgccgagactgtgtctttttacaaggtgaatggacaggctggagaaaaagggagtaggtgggggtcacagctctcagagagcttgggaggacctgactgtagacttcaccaggctccaagaacgaaaagggcagcaagtgtagcatatttgttggtcccacttctgacaggccaagtgagcacagtcaccctcctgccaccaaagtcataaatattaattgagcagctatattggccaggctggagctgggaaccagaaacacagaggtggataaaatagacacagtttctaaccccagggaggtcacacagtctggtggggacatagacttcaagggtgtggctcctgggcagagattgggccacttcctgtgccctccctgggtgggtggggcctctccactccctgtctctcctgcctctacccagcagccaggccctcccgctctgtcctggacccaccccctggtcagcccccggccagtcgtttccactgccagctttatcacccgcaactgtctgtctttctgtctgtcccacccaggctgcaggaggagattcagttgaaggaagaagcagagaacaatttggctgccttccgagcggtgagtgcccttcttttccccttgcatggcctctggccttgctctgccccacctgggtggcggtgaccatgtccttctcgcttggcctctcccaggacgtggatgcagctactctagctcgcattgacctggagcgcagaattgaatctctcaacgaggagatcgcgttccttaagaaagtgcatgaagaggtataccttggcccctcttcctggggtcactgggccatggggaaagcagccggaaagtggggttggggtgaggctctggctgggaataggggtgtgagggtgctgtgtgggccctgagaggggactgaagcccagtcatgccctacaggagatccgtgagttgcaggctcagcttcaggaacagcaggtccaggtggagatggacatgtctaagccagacctcactgccgccctcagggacatccgggctcagtatgagaccatcgcggctaagaacatttctgaagctgaggagtggtacaagtcgaaggtgggtggcctcgcccggggactggcatctccgtccccctgaatcccagcttggatgtgctgcctgtggtaccatccatgggaggagagcccagaggcttcatgctcccttgctcatccctacccgtgccctgcatccttctcatttttgggcccctttctctgcccttaggtgtcagacctgacccaggcagccaacaagaacaacgacgccctgcgccaggccaagcaggagatgatggaataccgacaccagatccagtcctacacctgcgagattgacgccctgaagggcactgtgagtccctgcccacctggccaggccctgccccttcctgtctgcagttcacaccctca

SEQ ID NO: 5756 - DNA, 1561 bp, Artificial sequence
  DNA replication origin
cctgcgccccgcagcgccgcagccacaggcagctgggctcgggggccggcgcgggcaggagctgcccatcccggaaccagcggaggctgggctggggcgtcccgctcaccaccacccgcagccgcacgtcgctgcccgcgcacaccgccgcgttcttcaggggccgcaggaagactggcgccccggccacggccacaggagccccgccgccggcccccaccttggcccttttcgggggcactccggggctggggggtgccctcgtgcccgcatcctcgcctcgcgtgccccgggctttctgcatggccactgagagctgggctggggggacgccggaactgggcggccacgggggcacccgcgggacggtgccctaggagacaagtctggggggccggcggcctgccttcctgctgcccgcccgccttcggcctgtgctacccagaaggtcaccggggcggccggcgattgcgcctgggggctatttttaggccccccggctcgggttgcgagggagccgtggagggagggggcagcaggggagggacttgactccacttggctccttctctccctccaggagcccccatcgccggcccggcttaagggagtccctcggtatttgttccaggctttcccctccgtagtgtgcctggcccccacacgacccactgcagggagtcaggttacccctgggctcaatcccatttcccttcctccctcatctcagacccctcatccctgcccggcttcgctgggaggggaagaagaggaacggtcctggtgagatgcctgagaggtggatggggaggcaggcccaagtggaggtgagcagacagctccgaagagggaccatggcctcccccagcgcctccattacagctggcgaacagtaagaccaggagcctgggagtcaggtggattggggcctccactgcgccctgcccttacttgctgggtgacaccaaacctctctcaacctccaagtcctcatctgtaagaatgggtggtggaatagggttgcaataggcagaaaagagtgggcaggacattccaggcagagggaacggcatgaacaaaatgagcctgatgaaaacaaaggcgtcctgggaattagagaggtttggagggattgaagcgtagtgggtggggtgagtggaagaagggaggtggggcctggagaaggctttgtttgctaaggctttggtttctctaccctgaaagcagggggcgccactacacagctttaagcggcagaaaaaacacggtgggagctgtgtcttaggaggatcctcttggcggccacaaagtggaggatggatagaaatgacggccagttcaagtaaaggccagattcccagcctccttgccccacactggttcagcagctgagctgggaggaatctgcacatttaacaaatgactcaactgattctgatgtgcctaagtgttgcacgttgagaaacatcaagagtccagatgagacctttgtgatagaacagttctgtatcttggctgggcgcggtggctaacacctgtaattccagcactttgggaggcc

SEQ ID NO: 5757 - DNA, 1841 bp, Artificial sequence
  DNA replication origin
aaggcgggcgggcagcaggaaggcaggccgccggccccccagacttgtctcctagggcaccgtcccgcgggtgcccccgtggccgcccagttccggcgtccccccagcccagctctcagtggccatgcagaaagcccggggcacgcgaggcgaggatgcgggcacgagggcaccccccagccccggagtgcccccgaaaagggccaaggtgggggccggcggcggggctcctgtggccgtggccggggcgccagtcttcctgcggcccctgaagaacgcggcggtgtgcgcgggcagcgacgtgcggctgcgggtggtggtgagcgggacgccccagcccagcctccgctggttccgggatgggcagctcctgcccgcgccggcccccgagcccagctgcctgtggctgcggcgctgcggggcgcaggacgccggcgtgtacagctgcatggcccagaacgagcggggccgggcctcctgcgaggcggtgctcacagtgctggaggtcggaggtaaagggcaggtgggggccgcgcccggcaggggcggggtgctcagaggtagaaaagggctgcccaggccacgcgggtaaggtactggatactggttccgccgccttcttcccaggtgccctggcttctcggctgcccggccccagaagtgagacgaagagccaagtgcagggaatggggtgtcaaggtagagaggctccccacaggaaggtcagaggtcaaggggcagcaagcggttgataagccaagcctgagacccactcccacctctcagggaattctggggtggaagttcttctcctcctgtggagaaaagcctcctgggggaaagggtgtccttcagttccatgatttaaacttgagattgacactccgatcagctccttaacaggggagtccatgtccgaaggagggggccagctcctctggtccaggctgcactgttgaagggatggctcagagctccctgcaggccattgccgtggcagggttgatgtggtcagctctaggtggggtgtggaagaggcctatggttggccacgtgtgaacagggtccagggtaggaggaggtggagcccgagccagggccccatgggcatgaatggaggtgagtgcttgagaatccacatgcaggtgtgtgcctgcatgggtgctgtggagggccctggattctgtgtggtggtgcaaacaggtgaggtatgggcacgtggagctggaatgggaagctcctggaccatgtctacctgagcttccagagtggatgtttccagagcatggaagggggatgctatggaccagtgcttgtcccccgcccatagatttccaggtgcagtgtgaagaaaaggctgagggtctgaggcagaaggggagggcaagaggctgggcccagtgctcatggtccagctggggctaccatggaggccaggccagggccgttagccttggatccatttgggggcttcctttttgatttcctcagtccttgagtaagccaagtggtacttctctagccaaaggcagagccttgggcaggctgcgccttgagaaacagaattctgaggaagtaggctacagctgggagagatggcaaggagctgggggttcactcccttggacgtttctaagagggacatgtcactcccctgggtgctgctgtgtaggggtaaatccttggaggctggggaggaggcacagggaggaaagccctcagcagcaggtgggcaagaagtctctaggacacagccaagtcaggagagggagccgggctggcctccctccatcggcatctcctccccccagccctgctctgcccaccttcctggagtctct

SEQ ID NO: 5758 - DNA, 1163 bp, Artificial sequence
  DNA replication origin
ccggtggtcgcggggattgcgggcgatcggggagcgggggatctgcccttcagcgcggggaggggcctgcgcgctcaggacacagacccgggcgcccctagatcgcgcccggcccgccgccctcggcggggctcgggtggggcaggcgccgatccagcgccccctccaccgggcccagctgcggtgacccgccctccctccggggcgcccaggcctccctgccccctcccggcgccgcccgcccccggagccctcacctggaaacgcttcttcacccacagcttcttcatggcgggggagggggccgggccggcggccgggcgaggaggggacgggcgggggcggggcggagtcggaggcggggccgggggcgagctggggagcgggcgggagccggcgcgggtggcggaaggagcctggggcctcgggagccgggtgggggtaaggcggcgacggcggcggcagcagcggcggcggcggcgctggagtccgcccctccctcgccagcctgcaccccacctggggccccttccttgtcctgtccccctacttcccccggggaggccctcacctgcctccctacacgaccaccggtcacctcctaacgccgagagccacggacccccaccctgcatctgcctccggagccctaggcacatgaggaaactgaggcacagaaaggggtgcaatggcctctagctcaggccactttctggcagcccagcgcagcctcctcccaccctcacctcctcccgcggggcctctctggaaggtcagcagcatctcgacttgctcattccacaaacatgcgcgcacacacactgtgccaggcagaaccgaactcgccgaagggcacagcgccgggtgggggcgcctaggtcaaacgcagggcaagggtcctggcgggtgtggactgcgtgttaacatggactcagactgtgaaaaccctaaggcttctcaagaaagccagagagggctttatcttgccttacctcgcgattgtcccatgcgcggccccctacccccgtacattcacacacacaagcaaaggtgcacagaggtacccccattattcacaaagttggccagtgttctcaatcacagggaagcacactcaccaaatattttgtgtgttccacccgatccctgccctattcagcact

SEQ ID NO: 5759 - DNA, 1460 bp, Artificial sequence
  DNA replication origin
atccttggcacttactggtgctgccactggccacacacacacatgcacacacacacacacacacctgcttgtgtccagtccagccgcagacctgggcctcccattaggagtcaggcccaccctctattacaatatttgcattgtgctttgacccctctttgcaaaccaaccccttatctgtctgcatcatgatgtgacaggcaccttcctcaaggtccctcccttctactgttgaatcgtcctcaaaaatgcccagtggttaggttaggagaaaaggttcctgggagtattttcaactttcccagattctagcaggttctgtgcctcagtttccctctggctgccatgacaagcaggagccacgtactggttgccaaagcatggcaatgaactccttcccattaggcctcacatggagaacagggcacccagtccatgcaggggtgtgctagtgagccgccctcccttctgctgggtcctctctcagctgtagggcacagggggcctggtcgggtgggtggtagataagtgtgggggtgagtgggagggttccacatctcatgggctgtcttcaggaactcgatgcctcacagagggacagggaccaagaggaggagtaggcatgggctagagcaaggacgcccacggtccacgcaccatgggtgagtcggccaaaggcccggcgggaatggccggttttctgaaagagaaaagccagaatgagtagttgagggggaggcttgttcctaaggtccctgtgcctcccatccagacctgcaacatcaagcagaaactcattccctggccagtgtgtgtgtgagaggggaggtgggcagagacccagagtgaccagcttcccctgtagggaatgactcccctgccttcttccagggtacccagctgggctcttgggaggagcaggggaggaaggagagaactgcaggctgcaggtggaagctggaacatcccactggacagaggctcacagcccgggaccagggcaacagcccgggaccagggcaacagcccgagagaaagaggatagaagacgaggtagtcaggctcagtgaggagaaggagaagatggggatgcggggggcggggtgcttgagtgactgggagatggaggaacgagggcacagattcctgctggggggaggacagaaacctgggtaggtgtcaagggggtgggggagggatgatgggggcagagggccagagcctcacgaatgcaggaggcccaggtgcgcggaggacagggcagggcttggggaatgtattgagctcagcgcggatccgtgtgcgttgctttcaggagctccggaagatggaaagcttcagagtggggggctggggcaggccgggcggggggccggggcccggggttgaggttggacagaggagagagaagatgtggcaaagaagcaagtgggcgctccacgccgaacgctgcagcgggg

SEQ ID NO: 5760 - DNA, 1117 bp, Artificial sequence
  DNA replication origin
gcatgtgtgtgtgtggccagtggcagcaccagtaagtgccaaggataccagaaccactggggcagctggaataacaagcccaagtatgggggtccccagtgctgggcacatcccaggtatctccctccccacccattgccacaggacacctctggggactgggtgcctcacgccccttctgtcttgactgccctccatgccctgccccacaaacgctctgataacagtctgtccctgtctctctcctgctgctcctatggaagcgaagttttccgctcctgcagaaagcaaagttacggtaggaaactggctcctgctctagccccccgcatccccccctttcccacccggccccggcctctcctcaccctgcctcagctgcacccgatgccttgcagctggtttggggtagaggacaggctggccccgcggttggtcgagtgccctggcagtacgactctgaggtgactcctctttgttcctggggtactggaacccagactttagagccttggaacctaggacctgatgattttggggctgcacaggggcttaagctttcactgacaaggggaggagggagaagggaggaggctctgataatccattaagatattggcaggcggggagggggtggcagtttggagggccctacggaggtaaacgtgagtaaccaggggcccagagatggagccagggcactggcatgggaggggttatcctgagcagcccaggctgggcaggggatgtggggagcaaaagagaggaggtgctggcagccctgccagtgataagatggagcctgctgttggcagggaggcagaaggcaatagggaagagttggaggcagagggaggagggccctgcccacacagaccccttcttctccagactcagagacggctgaggatgacatcagcgatgtgcagggaacccagcgcctggagcttcgggatgacggggccttcagcacccccacgggtgagctcctggggtgtacaaagagcaggcaggcgggttttccataaggggtgcctcagtctcacggtgctcctttctctagggggttctgacaccctggtgggcacctccctggacacacccccgacctccgtga

SEQ ID NO: 5761 - DNA, 908 bp, Artificial sequence
  DNA replication origin
gcactccctcctgtatctgcgagccccaaatctccaaaaatggctccagtgcctccaacacctccgctcctcacaccccctcctgggacaaccttgaatcccaccctcagggacttaggggtttcccatgagagaaatcattgcaagccccctgccaccatcactcccgccctctccctctggcctggccccatttccagcccctccctttcccagccccctgccacccccagcccatggcctcctgctttcacaggccccttgccccatctgcccctggccacctcactctcttctctctcctgcttgctggcttgttcccctgctctctcctgctctcccgggagctgccgtgtggaaaggttctgttcctcccagaaaaaggcccacatgggaacaggaatgtgcagagagatgaaaaggcagcagctgctgagacagcaggcaccaagggggcccccgggtcgggggagggatcctggggacaactggagcccaaatgggtgaggcaaaagagggcccctgagaaactggagatcttggaggagacaaggaagggacagcagggtccaggagaccatggagatggcatggtgagccaggacaggtgggagcagggggatgtgggcggtgatggctcaggaggaggagggagcagtgtgggaagatggagtggcagcagggggtgaagaaatgcacagagagatggatggggcagggtgatgggtggaggctgactgagcagtgagggcagcgcaggacagcgtggtgagatggggcagttcaggcccaggtaaggccgttacttacacgtggatagagagcgcccgtcctctgtacaggctgaatgcgctgccgtacaggtcactggccacggaaaggctatcctctgacccccagcttgcgcc

SEQ ID NO: 5762 - DNA, 1665 bp, Artificial sequence
  DNA replication origin
tatccacgtgtaagtaacggccttacctgggcctgaactgccccatctcaccacgctgtcctgcgctgccctcactgctcagtcagcctccacccatcaccctgccccatccatctctctgtgcatttcttcaccccctgctgccactccatcttcccacactgctccctcctcctcctgagccatcaccgcccacatccccctgctcccacctgtcctggctcaccatgccatctccatggtctcctggaccctgctgtcccttccttgtctcctccaagatctccagtttctcaggggccctcttttgcctcacccatttgggctccagttgtccccaggatccctcccccgacccgggggcccccttggtgcctgctgtctcagcagctgctgccttttcatctctctgcacattcctgttcccatgtgggcctttttctgggaggaacagaacctttccacacggcagctcccgggagagcaggagagagcaggggaacaagccagcaagcaggagagagaagagagtgaggtggccaggggcagatggggcaaggggcctgtgaaagcaggaggccatgggctgggggtggcagggggctgggaaagggaggggctggaaatggggccaggccagagggagagggcgggagtgatggtggcagggggcttgcaatgatttctctcatgggaaacccctaagtccctgagggtgggattcaaggttgtcccaggagggggtgtgaggagcggaggtgttggaggcactggagccatttttggagatttggggctcgcagatacaggagggagtgctatagtggaagaggggagtggctgagaatagagggactagggcatttggggagctgaggggggcctggtttgtgatgggtatgggtgtgggggcagctaccaccgtgcaggagaaagaaggggcctggtgggggaggctgctttgagggtggttagagcagggctagcggtgggcaggggagagggccagggctgggccacggccagggggaggctcccttggcttatcttcttggccttacccggtgttcctgtgccctggacttgcctttcccttcctgcctttctttaccaggccccagccagagcctggagttgctatggcaacttcggaggaacccatttccttagtgatgtctatggtacagagactggcctggagctcagagctgccggcaagaggcctcctctgctgtcctcaatttctctccaggcctcacccacttcccagaggctcttccctggggactctgcggcccttcccccagagaagacacttcctccctgcaggtggctggctggggtttctgtctctcaggccactctgcattgccaccaccccttttagccccagtcagaggtgggtctgtcatgtgggtggctgactcaggtaggctaaaacatccttaactcgggacccctagaactgctcatggctggcaccctactacttgtcctcccttctgtgcccctggaaacccagacactttggaggaaataagggctcaggattctgactgcctgggtttcaatcctagcaccaatcatttcccagctgtgtcaccttggtaaggcatttaatcttttttatgcctcagtttcttcatctgtaaatgggggtgatca

SEQ ID NO: 5763 - DNA, 1506 bp, Artificial sequence
  DNA replication origin
tccagcgaggccgctttctgctggaacaggcggcgccgctcggccacgctgcctggcgcccgcagttcttcctgcgaggccccgggggtgccccacggtgcgccgcgctccgacttgggctgctccagagagcgggccttgcgcaggggcacccagggccgcaggggcgccggcggcgagtcgctgcgctccaggctgcgccgtcgctcctcgaagaactgcagcttgtccaggatgcgggagccggcgcgcaccagcctaggcgatcggcccaacgccgacaggcggcctgaggcctcgctcagtggcgtctggggtcgggattccgcggtgcccgccagggagggcccggacgacttggacttcttccctcgcttctcttcggtggtggtgtcctcgggcagcacaggctcctgagtgcgacggtggggcgacgtgggggtggccgcgggctgggccgggggtcccggcggggaccgcttcccgacccgaggggacggtggggggagcagcgcggatttggaaggaggcggctgggcagggcggcgtggggcttcgctggccagttgaggctgaaggtcgggctcctccctgcgcaacccgctctgagggacgctgctgcagaaccaagatggagaagggtagaggattcagggggcctcctctcctagacccttagcttgtgacaggaattgggtggtgggcatgctgggcaggcttgggggtgacatgggccagatcctcctgccccccacccccacccccacgaggagcgcacagccagagcaggtgctggggagaggccggcggctctggaaccacaagattgggctaatggctgggtcttggtacagactcagccccaggactcgggccagcctcctccccccagccctggaagccgagaaacagcggaaacagaactgagcatgagggagagaaaagaatgaggcttaggacccaaaggatgaagtggggagggaagacaagagggtggggtggggaggggcgttctcaggaatgcagccacccactcattccagcccccagctggcccccacacccctgcccatcatcagcagggcacaccccttcctagtggtccctggaagccaagcaacagcctcctggaccaggcacaagccttttggggggcagtgccccatccctaggattccctagctgctgtgtagacctgagcctatacctgccgccaccccgagcactgatgggacacagcaggtggcaacgggatgcccaggctcctactctccttgctcagtctgccccccgataggcctttgacttgtgcttcccctggcaaagctaccttgagtccttagaaatcccccctgagaagtacagaaggcccccccccacagggatatgctctgaaataactcagctcagaaatagctactaagtgggcctgaatagggagtgtgggagaaaaggaggagggaaggagccggtcaccccagagtatccctttcacttaacagagct

SEQ ID NO: 5764 - DNA, 1204 bp, Artificial sequence
  DNA replication origin
tgggaggcccaggagccgcgggccggcgggcaggacagagccgggggaaggcccgcagcaggaggttaggcgtcgggaccaattcccgctgacccggagcagagccatccaggagtgcaggagccctgtgccgccccccgccgccgatcccccagaggccaggacgaaagcaccccccggtcggaagcgggagcccccggcgcaggccgtgcgcttcctgccctgggccacgccgggcctggagggcgctgctgtaccccagaccttggagaagaacagggcggggcctgaggcagagaagaggcttcgcagagggccggaggaggacggtccctgggggccctgggaccgccgaggggcccgcagccagggcaaaggtcgccgggcccggcccacctcccctgagctcggtaaggcctcagggagggctgacaaggtgcctgaacccccgtcggggggcgtttgtggagagcaagactgctcagcaggagccggggggtcgggggtttcgcctggggctgctagccagctgcaagggtgggtttgccaaagaaggcacagacacaggctcgactttgagtgaaggattgtcaaagtccttgtgctaggactgctactggtgaggcagagcgtgagtgttgtgatggaggctaggtgaggctgagatgtgagctaagactggtgcccagatgcccgccatagctcccctgggtccagtggcctgctaggctgttggatcaagaaccactactggggggatgcactggtgggaacctaaggacccccctccatacccccaatccctctgttggggagagatggtagatggtctgaaataattttcaaatccctgttacagacacgctttgtgccagataactctttactctgcctctcccacccgggcaccatcccctgacccatgtgtggccacccagcctgcccttctagcctcctcacctcaggcttacaccccgcatggctgagctcactgtggtccctacacaatgcctgcctgtgtgttgtctcccaaccttcccatggatgatgaccaacaccaccaacaggagaatggctctgcaccccacccctcatcctgcacatcaactcgaggcccactcctggagagaggcagaggaaggcgtccttgacccacttccactgctcctccagaatagatgcctctacctgctgctcctgggag

SEQ ID NO: 5765 - DNA, 1029 bp, Artificial sequence
  DNA replication origin
ttgtttgttcatcttgccatctcccagatgctattaatagaagcccctctaaacatttttcaaagattcagtgaaaaaacttcaaggtagaggcaatgccatccatgagcttaattcagggtcacaggctgagccacctgcaggggccaagttcaggtagtcagaagccagcgggtggccctgtgaagaagggcggccacccacagggggcagcattgggccactcctctcccgcggattcatgcagcgaggggagcgactcaggatggccagtcctgatttttcaagagaggcaggaaatccagatttcttttgtgtgtgaaaatctcctaatttcaaagctgccaaattaatacagaaggtcaaacaaagcaagcctgcaccttgtgccaggtttcctcagatttggagaacatcacgtttggatttacggggcggggcggggcttggtccaggcagggaactctgttgtcccagttggtgggggtggggggtggtggcttgcagggaggcgggggtctagcgttctgactgagccagtcactgatgggggatcttgggaggggctgaggaggcagggtaaagccagcccctagccccttctcttcccacccctatccccatgtgtttcagaggcccctcggtttgagtccatcatggaggacgtggaggtgggggctggggaaactgctcgctttgcggtggtggtcgagggaaaaccactgccggacatcatgtggtacaaggtcagagtgtgctgctggctgagcctgggggagggaggaggggctccctgggggcgtgggagggtcctggaaggccttaggagggcggagcccgggcagaggcgtggttaggaggaggaaaggggctgcagaggactgactagctgaggggtgcagggctttctgtgggagataagggaggagctgactctgggtcctggtgagagatgcgctgcccagagtaggagatgaggccctggccccaaggtagagatgaggccaggcccaggctgaaggtgagacc

SEQ ID NO: 5766 - DNA, 1837 bp, Artificial sequence
  DNA replication origin
ggctggggctccggcgctgcggcagctccacagacgccgccttgtgcaggccccggcccagctcccgcggcccggcccggggcagggcgctctcagccgagctgcccctgcggagctctccccgcctggggctagccccagctgcgggctcctggcctggggaggggagggcctctgggctgggagcctcctggtcctgagagggagcccttccctgctcctgccagtccatgggggtggcagccccagtctctggggtccccagggcctcatcctcagtgggaatgtctgtgagggacacccgggagccagagaactcgggctgcagtgggcggggcactgagggcagctcttccagctcttcctcttcagaatccgaggaggatgagagccccccactggggggtggccttctgggcatggtcacccacacccgctctgggggggcccgcagcagctcggggatggggcgcagcaccaggtggcatttgtagctgatctgggagcgctggagacagggtactggagtcagacctgagggacccctggggcaggattgtcccccccaggcccacctcagccctggggaagaggcctgagcatgcagagggtcagggaacaggcaggaagctaggcatggagccagtgaaagcgagaagacaggagcaggagatgaaggcccacgggagggggaaggcagtgctagagaaaaggagaaggtggaaagcacagaggctggcctgccacacttacctgccacctccgccgggagaggaatagcttcaggtgatccgtgctcacctctgcgccctttgcctgagtctgcaaacccaggaaagagggcttgagggaaagctgtcaacctagaccctccaggtttggcaacagagagacaaagtccatggggcggggtggcaggagagagtggatcgagcagcactgagtctgggctcctgggggtccccttccccctgggtctgtcaggacaatgcctacagccaagatgcacacctaaagacaaatcccctgaaccccccaggggagaggcaggaaactggtggctcccctaggtaggcttctgagcttccaccagggctcatggccctgtcctggtaaaccagctgccctgggaggcctgtgatcttaggccctttacccgggtcctggctccccagctcccctctgtctccatgtagggccaacaccccagacatctggagccttggtggtccagaccaagacggatgcttccctcagctacccacccaggctctctcttctggagctcatttccggtctgagaaagaaggctcttaattcaactcctgatacccgaatgacctcagccttcaagtgacctggcacaaccctccatgaacagtttattcaggcgctctttccagactcatttgctgaaccccccctcccaaatccccaagaccccatcaatgcctggcactgtgccctgaggcactggggtttgaagatgaatgagtgagaaccgagaacctgctcacatgaagctcataaccaaggggctgagactgcctggtcacccccaacgctattgtgtgggaccagtgcaggacagagatggacagacagaagtcaggaagaccagggtctggtctcaagcatgggggagaactccactgaggacgcccaggatggagaggtccagacgtatgccctggagtccagtatgtatacccccaactccatcactgattagagcctgtttccttgtcaacaaaatgggactaataatgccttcctttgcaaagctattgtgaggctaatacgtcatatgtacatacaatgcctaacgtggttactg

SEQ ID NO: 5767 - DNA, 863 bp, Artificial sequence
  DNA replication origin
cgagctcccgccctccgagctctctccgtccccgccgcgggcctcccaggccgggtggcgctgcgcgggaggggtccgccgcagccgctgggacagtgacagcgagaggcggcggacgaggccaggctctccgacagccctgaggtcctgcaccgagcgtgagcgctcaggccgtcgcaccagctccagcggggtccccgccgggctgggccggtatatgccatcctcctcctcggccccacggaaggggccgcgctcctccgagcgcgaacggctcagcagccgcagccccagcgacaggggcgactcgcggctgcgcttgaacttggcctcgaacacggcctccgactccaagttttcgatgctgctactgagactgctgcctggcctggggggcaccgtgggaactcgggctttctcggctagcaccgggggacccccggctgagggcacgcgcttctcgggggctcccggaggtggggaggccaccctggcaaagacagcagcgtggggcttgggctctgaaggcggcgcggcagggccctgcgaggggccctgggcgtggcctgacagctggagggactgaatgatctgagcatagggtgtgaggggcagcgctagggtttgcagggcctgggggggtggtgcaggcttggaggctcggactggttctggcctgggctctggagccttgtcttgggcaggctggggtgcggggggctgcggagcatcactaggtgtggtggcagaaggttctgcagacttaggggtactgggtttgggggcgctgggccgtgcagggctggatggctgggcctcgctgagggcagacagggaaggagactcctgtagcctacgggccc

SEQ ID NO: 5768 - DNA, 1648 bp, Artificial sequence
  DNA replication origin
ccttgtttctgcagggaacggggagcggatgaggtaaggggacactgcctcagcaggaaatcagctgcataagcaaaactgggccgggagggaggccccaggtgggaagggatcagctgtccccaggcctctctgctggctgatcgctttctttccccctcactctccaccctcccctccccaccagcagcccttccctccatccttttctctcactgcagccccctttgccctggccaaggctggacacaatccctataagcccagctgaggcaagactcgacagccactctattctgagttttaccaggaaatgggggaagaacaggactggtggctcgtcaagatcctgcacacagcctggcttcatggactcgctcccttcctgcatgctggcctggaaaacccaacctcccgaagcctttgcttgtcgtccttgagtaatgcccctttttcaggggggatggggtgaccccacatggggaatgcctccctatctggagctccaggacactcaggcagagaaacagaagagggcaaagagctagcaaagagctccaaaggctgcttttctgtgcagaagggtcagggaggggcagtcaggtgttcggagctgcagagcaatggagacttagggggcacaatccaggtcgtggtcctctaggctggagagaaagtgagtgtctttgggtacacacccaagcacacacacatctaaagggggactgtggaggcaggagggccctatatcttgagctccttgaaaagtacagccagttacagaaacattctagggtctcccaggagagaggaggccagcccgacagacgtaagtggtgtcctgaagccgtttcagggacctggctgcagaaggtcacacagtccaacttcagctgctccacttactagccctgtgacttggacagatccttagcatcactaagcccgtttcctcacctgtacagtagagacaatgatactaatatttcccaaacagtgctgcaggattgaatgaggcagtgcttgtaaagtgtttaatagaacactcagcttatctaatgaatgtcagctactgctattgttatagttgtctgagcagaccccttccactaggtttgtcaaggtggcccacctctcaccagccatgactgctccctgatgggggtaggggagggcaggaggggaggagggtcctcacccagcaggcctcttattacctgactcactgcgcacgtactggtgacccaactcctcctggacgctggcagagaggtttggtggcgataaccccttgtccttccgcggccgagagaagccccagcggagccggcttcggctttcccctggggctgtgaagactcaggcccgtgagtatttgttcagtcagtaccagcaagttcccacctctctgcagccctcagcccagagaaccagaaggaacccctagcccacccagccctgccgccattcctgctttcctcccctccagccctgctgattccaccctcggggcctcagcctgcccctggtgggtgtccccagccctctgctcctcccacagcctctctccagcgcaccccaccctcctctgcacctgctgccctacccctgcccctcctcacctgaggagcccgacgtggcgctggcc

SEQ ID NO: 5769 - DNA, 686 bp, Artificial sequence
  DNA replication origin
ttatagaccacttacttagtgccaggccctgctctaagtgatttacaaacccatgacataagtagcattgtcagcagtcagtgcaaggaaaaagcagttctgcacacagtgagggcctggggaaagtgatgcttgccccaaagaaaattatcgaaggcatggcgtggggttccactttccacatctgcctgggaagagacaaagtttcatgctgcttcctgatggctgtttgcaggccttctccacccctccctcagcagtaagtgggccagggtccctacagatagatggctgtctctgcttttcctccagacttccccccagtcttccacatcaaactcaaggaccaggtgctgctggagggggaggcagccaccctgctctgcctgccagcggcctgccctgcaccgcacatctcctggatgaaaggtaaggagactctgtctcccacagagagggaggccagcaagtggccctgagcccaggggatgggaggggctaggccggagtggggactgagcacggttaggggggatgctggagtggggagtgagtgagggggcctggacatgtgctgcctcactcagcagcaactcctgctcctccctgtccccagacaagaagtccttgaggtcagagccctcagtgatcatcgtgtcctgcaaagatgggcggcagctgctcag

SEQ ID NO: 5770 - DNA, 717 bp, Artificial sequence
  DNA replication origin
caggacgcctacctgatgaagctgcgccgccagacgctcaccttcaccaccaaccggctcaaggagttcctgggcgagcagcggcggcgccgggctgaggctgccacccgccacaaggtgctgctgcgctcctaccctggcggcccctagaggcacggaccacagccaggcctcgggcttcaactggggttcccaccaatgccacgggacattccagggcccacgctgagccaggcgggcctggggcttcggttaccaccagcagcaacatctggctgggctcttacctcatagaccttcaaggacagagaccccagggcctggacctgatgccaccccaggccaaagccagagtgggagacccattggtcaggctcagcagggtgggaacaggcagagggacaagaggggaatggagaagtggagaggaaaaggaatcgagggacaggaagggggaggctctaggaaggttctgggttgggggtcagtgcatctcagggagaaccaaggaaggtgggcatggctggagaggaggaaaaggaaggagccccaggtgtcagggcagtaggctgggagtcagtgtggcaaagcgggggcaggacacagatacagtggcaggggcccagggctgggacatgagagaaggcagcgaggcggcagagggagaagagaggactcaggtggaggtggggtgggtcagctgtcagcatccctcag

SEQ ID NO: 5771 - DNA, 1077 bp, Artificial sequence
  DNA replication origin
tcatctccttggctgttaaagggacttatccctgcctctcctacttctcggggtcgaatagaggatcaagagagataaggcgggcgaaagcccctgaatgttcacacatctcgcggtgcctcagagaccgctccgggtagtggaaattgccagagttgggagccagaagacccgggtccaaccctggctctgcctctggcttgctgtgtgaccttggggacccggagccgcgtgatggaagtccacagctgactgctcagcccgggtggagctggatcccgaggtagggaaggacgcacttggctggcgcggcgatgcgccccaggccgtgcccagagctgggctggcggggaccctgtagctaggcccagaggtaaacacgcgcagctggaccgggctgcgggctctggctgagtggtgctggtctgcgccctggcgctgcgcccggggcgcgcgtaccttccacgaggatgcgcgccgagtcggagcactggccgaaggggttggtgacgttgatgctgtactggcccaggtctgccagctcgccgtcgcgcaccaccagtgccaccacgtcagggtcctcgaagacgtagcggtacttgggaccgtcacgtagctccttgccgtccttactccagcggatgaatgggtccgggaaagccgaaatgcggcaagtgagcttggccgcgctgccttcgatcagcaccacgtccttcagcggctccagcacccgcggcggccccttctcgcgcagctccttccgggacctacccgcgggccgagtcagggcccagagttcctaagacaggcccggccacagcccttaccgcgagcgcaccatctcctacctgccccctggaccggccagacccctaaacgtgtggcttggtagggaagaggactgctcctgaactgctgccctgataggatgatgcattcctcccggccactcccccatacctcagtaacgaccctcccctgagaccactcattctaaaggctcctgacgctgctcagcgcttactcaaaccctactcaagagtgcgctctctgcagctcccttcctccacagggctc

SEQ ID NO: 5772 - DNA, 964 bp, Artificial sequence
  DNA replication origin
cgctggtgcgggggagagggaatggcgacgcggaagagcaggacagacgcggagggtcagagagcagctttattaagcaagctggtggagggctgtgggtcccaccacccccgggctcggcgccagggcggaaggtccgggggtgccgttcaggccacgtcgacgcgagcgaagctctggtccatgcccaggctgttctccacgtacacctcgtacttgccgctgtcctgaggcgtggcccggcgaatggtcagcgtcgtggtggtgctgccgatctcgaagaacaccctgcggaagggcggcggggaggagggcggagccgtggtcagtacacgggcgcactgggcggggctccttagccagctctgttcctcgctgcccagtccccgcccccgtcactccagccagatttctgggctcagtcccacccaggttccagccccaggccctggccgtgccgcaggtcccggccctcgcctgtcatcctcctcgatgtcctccccgtccttggtccagcctacgtcgggcgcaggctctcccaggatctccgcagtcagcgtcacggtggtgcctttgcgcgccttagtgttgtcgggtcccttttgaatcttcgtcgggactagcggaaggaaaggggagcgaaaccccgtgaaggacccggagatgaggcagggcatcacctcaccggctaatacccggcactaaatacagatgcatttaaactcgcagtgtgacgttgagcaaatcattagcctctctggtttcatctccttggctgttaaagggacttatccctgcctctcctacttctcggggtcgaatagaggatcaagagagataaggcgggcgaaagcccctgaatgttcacacatctcgcggtgcctcagagaccgctccgggtagtggaaattgccagagttgggagccagaagacccgggtccaaccctggctctgcctctggct

SEQ ID NO: 5773 - DNA, 911 bp, Artificial sequence
  DNA replication origin
ggtggggagtcccgaacgtgatctgaggcgactgaagagggttagcgtcccaccgccaggccctgcccccactgtccgccagtactccttgcacccccaccccatctttctagggccaacccagcccagcaccttctcccgagtttcataccaacacttcccatctcctttcgggtactcccaagccaaggcaacgggtccctgggactataaggacaccaggtccaagatgggatgggggcatcaggaggaagtggggaagacaccaggaaagggagggcaggaagatgaaaaatcctggctggccagaaactaacaaagtctgtggggcctgcgggggagggctgggatggacgcagccatcgtgggagtgggtgtgcagccgacaacctcggagctgaggctgcagagggcaaagggcatggggtacagaggcggtgtcagccagtagccacagcgggggcctgagtggcagagacaggctggccgggagggggtgctggtcagagagcggagagagctgaggaaggagggggagagggctttgcagcagcgaaagctgctgggagcagataaggcggcacagcagcaggagggattagagctccgaggggcatgtggggagcggtgtgggaattggggggtggggcagggaggagaaggttgagggcaagacactagggccaaggagataagtgggaaaagtgagggctgtgaagacggcagggtttcatcaggggccaagaggtggtcatcgacggggagaggagagaaggaattcctgatccttctctcctctgtcctaggagagggggacttttctgccattgacagagcccccgccccccacaccccatgcatgtcaggggcagcagagggacgcactaccgaggatcgagaacgggcggatt

SEQ ID NO: 5774 - DNA, 687 bp, Artificial sequence
  DNA replication origin
ggagagacagggagagcagtgggtttctggctcaaggttcctgggaggaggcatggagattttgtttgggcaaagtgccccaaaggcagacccagagacctcccaggatccaacctggggggttccaagggtgctttctcaaagcacaggaacccccaagctgatgcccagattccttgcctggctggccccattcaaaaatgctgtgaccccctgaactcctagacagcattctccaaaagatgcccagcctccctccccctgcacccagaggacaccctccccagcccagacacctggccctggtgcggaccaagtgatgagccagtgtgggacagatgtgggcggtaagggacaaggatgggggggctggggctgggctggtccaggcctggctggtgagcacacagcggtgacaaacgggctgtgcaggggccgaggggcggggggcggacggcggctgatttatctgggttatttatgccgcggacgaggcaggagaagcggttaatgagagtcccagagaaggggggtggggagtcccgaacgtgatctgaggcgactgaagagggttagcgtcccaccgccaggccctgcccccactgtccgccagtactccttgcacccccaccccatctttctagggccaacccagcccagcaccttctcccgagtttcataccaaca

SEQ ID NO: 5775 - DNA, 1086 bp, Artificial sequence
  DNA replication origin
gcatgcactgccccccccccacattctgccctgttaccaaacctcgtcccagtccatctaccactcattctcactgtcaggaagctcatcccctggggggcggaggcaggtgaattggactgggaataaatctgaggaatggggacaaccagagagcaaaggaacctgggatgaggcttcacattctgaccccgcaacacccagctccccggcactcccagtccagggtccctaacagccctgccccctttgctcacacccagctcagggcctggccagccacacttgtccctgatgcctcactgcaaggggcagctggtcccccgggagtgggtgggggaagcagggaggggtgggggagcttgggcgcagggccggggtgggggtggggaagaagctgggccgggccccagggaccagctgggcaatgagccggggaagcagccgggaggctaaatgagggagattatcacccaactgcagccgggcagagagggaggcaggcagggaagcggggagagggaggagagaggggacggggccagaggcaaagggggtatagagagacagggagggggccagagggcctggtgagaagcggagggaaaggtcaagagatgagctggaagtatgggggcactccctcagaacatcaccagattcctggagatctgggagactggaggctgggggcttggggacaattggagacagctggctgtggggcagtggtgggggtgtgcatgcagctaattgctgctccacttcctggcagcctggagctcccctcacagcaccccccgcatgccccttatacccagttaccacccgatttctttccttatagaggttgaaggcatcctgcctaccctcaggaggaaagaggatgtgatttgtctcatgatggaggccagtatgttgtcggggaagtgtgaccccaagatctcaatagatggtgggtgaatttagagatatgtatgcactccagggtagcaacgagtgctgcggagagtttggggggcagtttcccgctttcttggcaaagccccagactaaagtaaccttaaaaagcaattaaatcacctt

SEQ ID NO: 5776 - DNA, 763 bp, Artificial sequence
  DNA replication origin
agctttgctccagacttcaacacccaccatgcccctgccccctctgggaggctggctgccctcaccctcattttgcccccaaccccaatctcagtcattcatatgtctgggacagacagcaccctggccagcttgcatatctgtggccactttgcttccccaaatgttccccaaatcccttgccacaaccaggcttcgggggagggctgttgggtaagcaagccagggagcaaaggggaggtgtgcttccggggtgctctatatgtagggggacagggcatgcaatggagggagaggaagagccccagtgggggcgtggaagggagcaggaagatgtgctgggcgtcaatgggagcgaatgctctcctaaagaaaggggtttgaggggtgcctggcagagtggggcaggagagccctaaggggtctgctgtgttctcgtggaggggaacaggcatgtgggccatcatcataggtgggggtgggagcctcagttgactggccaggaggggatgcatccatgcccccagggtgggggtggcaagaatcagtgcttgtgctctggggccccatccgacagcatgtgccctcacgggggaggaagcccttgtccccgggaggaaaggggggctgattaatcggggcgctaatgagcagcagggagaggaagcgtggacgggcggggggaggtggctccatcgatccaagccgcagaaccagcagctgagaaaaaaagtgagaaaggaatcgatctgagggaaacggc

SEQ ID NO: 5777 - DNA, 635 bp, Artificial sequence
  DNA replication origin
tggcccacaccccatgaagggtcagccaactctatccccccacctcctggcctctgagactcctgactccagcacccagccaccacctgatcccactacccgactcacagcagcttccagaaactccttgagagagccacttgtttgaatgacggagggaggggggcagaggagggcaggctagacagaccaggggacaactgtgacttcaagattctcagcttccctggagctttgctccagacttcaacacccaccatgcccctgccccctctgggaggctggctgccctcaccctcattttgcccccaaccccaatctcagtcattcatatgtctgggacagacagcaccctggccagcttgcatatctgtggccactttgcttccccaaatgttccccaaatcccttgccacaaccaggcttcgggggagggctgttgggtaagcaagccagggagcaaaggggaggtgtgcttccggggtgctctatatgtagggggacagggcatgcaatggagggagaggaagagccccagtgggggcgtggaagggagcaggaagatgtgctgggcgtcaatgggagcgaatgctctcctaaagaaaggggtttgaggggtgcctggcagagtgggg

SEQ ID NO: 5778 - DNA, 1086 bp, Artificial sequence
  DNA replication origin
tccctgctgctcattagcgccccgattaatcagcccccctttcctcccggggacaagggcttcctcccccgtgagggcacatgctgtcggatggggccccagagcacaagcactgattcttgccacccccaccctgggggcatggatgcatcccctcctggccagtcaactgaggctcccacccccacctatgatgatggcccacatgcctgttcccctccacgagaacacagcagaccccttagggctctcctgccccactctgccaggcacccctcaaacccctttctttaggagagcattcgctcccattgacgcccagcacatcttcctgctcccttccacgcccccactggggctcttcctctccctccattgcatgccctgtccccctacatatagagcaccccggaagcacacctcccctttgctccctggcttgcttacccaacagccctcccccgaagcctggttgtggcaagggatttggggaacatttggggaagcaaagtggccacagatatgcaagctggccagggtgctgtctgtcccagacatatgaatgactgagattggggttgggggcaaaatgagggtgagggcagccagcctcccagagggggcaggggcatggtgggtgttgaagtctggagcaaagctccagggaagctgagaatcttgaagtcacagttgtcccctggtctgtctagcctgccctcctctgcccccctccctccgtcattcaaacaagtggctctctcaaggagtttctggaagctgctgtgagtcgggtagtgggatcaggtggtggctgggtgctggagtcaggagtctcagaggccaggaggtggggggatagagttggctgacccttcatggggtgtgggccaggaaagtggcaaagaatgagctgaggaccctgggcacggcacccttccctgggtggccaggaagtggggagatctggggacccagtgagcggctagggtgcagcaggagtttgggggatagccccagtcttgggatctctgtcctgggctggggactgccccctcccctggcctggctcctgacgcccgtgctgcc

SEQ ID NO: 5779 - DNA, 874 bp, Artificial sequence
  DNA replication origin
gaggggttggcagccctcagtattttttaaatcagttactgttctattaaaataatcacgatttggagctgcttttgacagactggaagacccagccatgctgggctcctcacacagggcaacagttagctagggctgagaagcagctgcgtccttcaagactaagtggtcttcagttctcctcagaccccacccttccctactgtatccccccaccccaacctgacctgcctggctcctgagggcaggatcagccctgaaccagatgttgaactaaatgtgcttaaggctcatgcctcaggagaagctgggaccacagggaacagagggctggacaggcagggggagtcagaggcaagcctgtgcggtagataagaggcttgaacccacctcagtgggcaccctctcccttccacagccaacggggcaaggggcagcccttggaacctccaacccagtggcaaagatgtagagttgggatggagtgtggagtagctcctcccagggccaagtgtagggggtggagggcagagactgtcagtagtggcctgaccacacactgggaagagaaggagctaaggaggtcgctgggacagaaggagtgggtgctaaggagcccgaaactgggtcctgggacagccagagagagagagggcttgcatgctttctgtgcctcagagctgtcctggctggcggctgggtggggcagggagaggagagaggagggcaggggagggactgcccagctggaagaggccttgtctaattgtgcctgattagtagagaggaagagaacagggcgagtgattaatagtcatggcagtcaccagcatgtggagaaggagggtcgggagggggagggagaccggagagc

SEQ ID NO: 5780 - DNA, 988 bp, Artificial sequence
  DNA replication origin
cggaagatgctgattagcgtttgaagaaatggccccacgtcctgtccccctctgatcctccctctgtctcccctgcccgcactccttcctggacccccacccctgcccttctgcttcttgggaggaatctgctccctcttgtggctggcggcagggctgcctctgctaggtccaggcagggggcaggaaggatcaggaatggagaggcaggggcacccaggaagcactacagggagcattggaatgccaagacccaagctactcagtccccgagtcgtcagtgggtcccatgggcaggcaggagggagtgaagggggtggagcctgaggtggtccaggagagatggacagccaccctgcaggaggggacagaggccggcctcaggctgcctctgagttataagttataagtattcctgagttataagtattccttgcccttccaggctggccctgcagcccacctcctttgagcagctgggaagaggaggtgggaacggccagcactgggggcaggaggcccgaggggagaagatctgccacgtttgtttgttttttaatttttttgcaaatcatggtggaaacttagggtcttcagaaggatgagtgaggatgggaaggcaggaggaggacagaggggcagagatcctgagagtggagatgggaaggttcagtggtgtgttttctaggaagaggtgggcaggggtctgcacttcttcccctggctcctaggctggggctggcagcgctggaaatccaacccacccctcaaatgctcaccatgcccttgggacacccgtgggtgttgggttggagggggagcagttccagagagataggcacgggctgcagcagccgaggcggcagcaagagttcagagaggagccacgggatgattaaggggaaatggaggattgatttaggaggaaagattaaaggagctaaatccgtggcgcttggctcagcggtgactaagcgtggacaggata

SEQ ID NO: 5781 - DNA, 1116 bp, Artificial sequence
  DNA replication origin
gctggggatctgaggtcgcgggttcaaatcccacccgagcacccaagtccctcagtgcccccggccccgggccttttggccgcttcaggcccgccagccaggcccagctccgcatccatctcctcgggacccccgcccccgtcgccccctccccggccgccgcgggggcgggcggcggtgtttccctccgcggtggaagcctctggcgctgctgtgtgcggaggtcactttgccgaggagccgggagccgggggaatgcaaatgaggcagacccagggaggagagcggaggagcccgcaggagatgggagggagggcgctcgggagccgtgatggatgcctggcccgcgggagggagcggagggcggcgaggcgcgcgagccggtgggtgcggccctctgggtgcgggtgggccaggcctgggcggccaggctgtgtgtgcgggagagggcggggggccagggatcctggcaggcgcacacccacccacccaccgtccccgccgcctctttctgtcttgtctcctgaactcccgcctggctgtgggagtgtgctccactgtataagcaaaactcttgacgaggaactttgcatcgaggggcgggaatgtcagggaaggacttacttaccaattcaccaattaaaaactgactttctagggtgtaaggcctaagcggtcgctgcctggggaatggttttgaccgtttacctgggtcccggaggccttcatcctcccgttctcctctcccgtggaagcgcggcgcccgccggggaccacagccttcttccacggcccccagccctccctggctcctagggctcccctgtcccttccaccacagctcacacatttacatttgaacaaacacctcagccattgcctcctagatccactgtagggaggaagtggccctgaaaagctcatgggtggcggtggaggtggggggtccctgtatgcacgtgtagaactaagcctgctgagggcgctgtgtcttcctctttcttgagtgtggcattgtctgatgcccctcctgggtgagccaggtggcttgtttagagaagtttttcctgaccctgcaagccaaattgagctcctgttccaccgtggtgaccttgg

SEQ ID NO: 5782 - DNA, 866 bp, Artificial sequence
  DNA replication origin
agggtcagggctgccgcagcatcaccaggctccagtgctgcagtggcaaaggcctccaagaagccaggggccaggtcacgctcagccgcagctagaggcagcagcacagtgagacgtgaggcctcagtgacatagggcacaggcaagatctccacgcggctcagcggccggagcagctgcactcggcgagtgaggggccggcggcctccctggggggtcagtgcctccagctgcaagtccagcgtgtattccataccccgggccggatcaaagcgtcggtagccattcaccagctgctgcttctggagccgcaaggccgggtggtagcggcggttcagctcctctagagctgtccccagaacatcggccacatcagcccggtcagccccacgcagtgggcagcggggtgagccatcggcgcaggagaaagcgtgctgctccgtgaagtagtcccagcgcagcacctcaaagcgggaggccgggcgggatggtgctggaatacccacgggccaagcagctgcctggtccccatcaacggccagatggctggtattctggatctcccactggatcagagaaacaggccatcagcaagggacagattacagggagcagcacacagctgggggactgggtaggcagtaggtgccactcaggatgggcccctcatcccctgccaacctctgcccatacctatcatttccccagcatagacagccaagaggctcatcagagaatgtagaaacaggcaggggctgggaagtagttttgttctgtgattctagtgctaacttgtcatttctctgggctctctgtgacttctcagatcctgtccccgtcactctgccacccccagacctagacca

SEQ ID NO: 5783 - DNA, 948 bp, Artificial sequence
  DNA replication origin
gcggggagggagcgggcccgcccgcggggcccgagccctccggatccgccccctccccggtcccgccccctcggagactcctctggctgctctgggggttcgccggggccggggacccgcggtccgggcgccatgcgggcatcgctgctgctgtcggtgctgcggcccgcagggcccgtggccgtgggcatctccctgggcttcaccctgagcctgctcagcgtcacctgggtggaggagccgtgcggcccaggcccgccccaacctggagactctgagctgccgccgcgcggcaacaccaacgcggcgcgccggcccaactcggtgcagcccggagcggagcgcgagaagcccggggccggcgaaggcgccggggagaattgggagccgcgcgtcttgccctaccaccctgcacagcccggccaggccgccaaaaaggccgtcaggtagtgatcggctgcgcccgctctaccccctgggcagcggccgggaagcgcgcggggaggtcgcccgggcccgggtcaggctccggaaggaaggggctggcgagccaggaagtctttgggccccgataacttccgatggccctgccttcccgagagccgtggggccagtccgagactttctctgggccctatcccggcctgggctgaacttactggactgtgtcctaaaccggctcgacccgatggcgccccagagatcctactagctccctggctgggctgctggtgttagagaaatgacttatatatagggtgagtgtatagagacaggggaagagaaaggagagaactaggatttacctggatctcttgttcctgagtgggttacaagggccacctcagggtgagatgggggagggaggaatgtacctatctcattaatgtctctgctgatgagttgaaataacttctaagtaacattgggttcaaatgctggttctgc

SEQ ID NO: 5784 - DNA, 990 bp, Artificial sequence
  DNA replication origin
atattgtgatcattgttcagatgagaaaactgaggctcagacagattaatgtgcccaagacatcacaattagtaactgcaaagctaagtaaattcacactcaggtgtgcctaatccaaaaacctgtttttcctataatctagagtctagacaatctataaatgtgtgggatgaaagaaaaggaagaattattcatgatggtagagggattcagagaagacttgggggcccagaaaaagaactcggggaaacactggggagcccaggtgagggatgagatggggatctcaccgaagaagcagtagacgactccaaacaaacagcacatgatgcagacgagggccggcagtgcctggtacctgcgctccaggggctgttcacaaggtgcaccccagaaggcatcatctggctcagggggcagcagctggaaccgcagtgttgccacagtccccggcatagtgctgggaatagaagggagtcaccctcccaagttaacctgacagagggaaagttggggtcacggaggagtcctgggtccccaccaggatgggggtgggagagggattgggagaactcagcaaggacagtggacaaaggaatagtatccacatttgtgcagctccggaagcatctctggagtggggagcaaagacaaagggaaacaaaagtgcctggctagtggaggctgggatgaagttaaaagagggacgggagtcggggggatgaagggagcgtgctgccagtgagaaggaggcagccaagagattcatctgtgggcggctcaatatgggattgtccaagatttacctgggctggaggcgacctgagcttctgagtgaaagaggctgtgcagaggcccgaggggccggggttgcggggcgccagaggctccaactgactggggtccagggaaagtccgtcgtgcgaggaagggggctgctgggccggagagaatggtgtcggcgcggtggcggcgccgctccacgtccaa

SEQ ID NO: 5785 - DNA, 954 bp, Artificial sequence
  DNA replication origin
tcgctccaccacgtagcgccccagcagtagcagctcggcgaagtagtcagcggcagtggcgatcagcgcagcaccagtcacggcggtggccagggtggtgagtgggcggggccagcgcagagtgagcagggcacagagcaggccgccccccagcaacagccccagtggaccccacacggagcctggctggtagtagggtgcggagcccagcagggcagcagctgcgagcagcaggccgagcagcagccccaccaggaagaggcccacgctgcgcactagcatggccaccagcccgcagagcagcccgatgcccagagcgatgcccgcgctcgccccagcactcagctgtgtctctagcacccgctctcggtagcagaggaggaagatgaccaccgagccaaacagcaacccagtgagaaagagcactgccttgaagcagcggtaacctggaggggaacaggggctagtgaggggccaagatgagggcaccaggctggagggagcaggtccaaggggtcaaggacatgggatcccaggggaaccagagacaaagacactaagatcagagaattgagggtcactggagtcatgacggcatcagtgatggggccattgaggtcaggggaggttagagagatatggctgttggtggtcaatgggaaggcaaacataaccattgagatcatgagggttgatgtatttgaggatcacaggagttaggataaatcttttgagtcaagagtgaattcgtgcattggtgtctttgggatcataggagtcagagagagaagtcactggggtcccaaggggatcagaaaaagagtcattggggtctttgagaagggattgctcacagagatgaggtatttggaaatcataataaactcgagggccgggcgtggtggcagcactatgggaggccaaggcgggtgaatcatgaggtcaggagtttga

SEQ ID NO: 5786 - DNA, 862 bp, Artificial sequence
  DNA replication origin
ctggggcgagcgcgggcatcgctctgggcatcgggctgctctgcgggctggtggccatgctagtgcgcagcgtgggcctcttcctggtggggctgctgctcggcctgctgctcgcagctgctgccctgctgggctccgcaccctactaccagccaggctccgtgtggggtccactggggctgttgctggggggcggcctgctctgtgccctgctcactctgcgctggccccgcccactcaccaccctggccaccgccgtgactggtgctgcgctgatcgccactgccgctgactacttcgccgagctgctactgctggggcgctacgtggtggagcgactccgggctgctcctgtgcccccactctgctggcgaagctgggccctgctggcactctggcccctgctcagcctgatgggcgttctggtgcagtggagggtgacagctgagggggactcccacacggaaggtaagggggcacaggccaaggtggacatgagaggagtgggtggccagggatgggttgggggccaagtgactggggagtgggggacagcagcagaaggcctcgatggcggtagagagctgacttgctcagggtctgggaggatagcacccaggtgccatcattcattccacaacaacatatggagtgctggctccgcaccaaccccattccaggcaccagggatacagcagagataacacagacaaggttcctgtccttatggattcaaggcaggcaggagacagataacagagatgcaaacaaacatgattccagttgtgtagagtgatatgacagagacattgtgcaggataatgtgaaagaatgacctatggaagctattagagttagggtg

SEQ ID NO: 5787 - DNA, 744 bp, Artificial sequence
  DNA replication origin
gtgtcgctcactgcacaggggctccaggcaaggtctgcccccccacatcactcagagaggcaaggaaatgagctgtagcacttttattgttccttgtctctctacccctgcccagggtaagggcaaacgccttccaagctgtccaagggcacccgcctggcctggttaggttctcctagttgcctgcagaggaatgactccacatggggctggggagagaagggggtaccaccttcctctcccctggcagagcctggacaccagtacacaaagagctgggcccccaggttctgccctaccctttctgggccttggttagggctgtcttggcggcaggaaggtgggggtcagctaggggtggggcacagcgcggcacctgaagggaatgctgggatttgggatagaaggtgggatgtctcttatggggaagaggaaagaaagaggcttctgccaaggctgacatggaacttgctgagatgggcagaggcaagctgggcagagggcaggaaggaggagggacaggctggaggaaggcagtgttggtgaagtggggaggaaaggaactggtagaaacagggctgttcaagagagacaaacatggtccagtggcaggagagaggagaagcctggcaagaaggggcgtagaaaggtgggaacagctgaccaggagcagctgatctgagccaagcagttccagggctttccagccctgggtgtgctctacccctcccctcccccatcccc

SEQ ID NO: 5788 - DNA, 838 bp, Artificial sequence
  DNA replication origin
agagaggagaagcctggcaagaaggggcgtagaaaggtgggaacagctgaccaggagcagctgatctgagccaagcagttccagggctttccagccctgggtgtgctctacccctcccctcccccatccccacctcctacgtatcccaggacccgttgccaccccaagttctggaaagcctcccataggtgtggcttaacccatcagctcccaggcgccctcaccctcctgccgctgcccagttggctttactcaccctctaccagcagccgtgtgtgggtgctgtcctggccggcctggcagcagtaagtgccttggtcctcaggtcgaacgtcatggatgaccaggctgtgggtggggccgtggctgcgcatctcatacttatctcccgggcacagctcggccccctcccgcagccagcacacgtggccccccgagcgggacacagtcacctccagcaccgcccggcggcccaccagaacggtcttctcgcgaggggggtggcggcacatctggagaggcaatgctgggggtagggggcgggggcttaagttaatagggacacgcatggcccccaggaggagagatgcatcttccctccctgaagtctccactcctggccttagccctctatgccaccagtccgttcccttgcacctcagacccaaagtctcctcttgccggggaaacgcgctgccctctgtgacccggcccaggagagcccctcggggggaagggaagagagaggcagcgttcttggggccagccccaagtccgtcagtcccatggcaggagagacaggatgtacactctctgtcgctcccaccccaggtgctta

SEQ ID NO: 5789 - DNA, 1330 bp, Artificial sequence
  DNA replication origin
ccaaggcactcgggaagcccagagccaggtatcgatcacaggggacatgggcacggattctggagttaggcaaacctggattcgaatatgggctctacctgttgtctgcccttgggtaggtaatttttcccactgagcatcagtttcctgataggtattacagtgacaagacctacctcctagagttgtccttggagtaagggattaaatataatgcaaatcttagcacagtgccaggcacatccgctcaaggaatattagctgtttctgtctggggcattattatcgttggtgttacactgaagtgggcttggctggggctgggatctgaccttctcccaggtaacatcagccaaagcttgggaaagctcgcactcgaacgtagctgtgtcgccctcggtcacctctaggtcgtgtggcccccgcacgatggtcactgggacctctgggggtgggagagggaggacagtgcagagggagcaggatggggacccatcttgcagggacaaggaggacatacacttgggcacaacaggcagtagaggacactagcgagtggggttcgagctgggacaagtggtccaagaaggatctgtcagtggtgggggtgggggggatgtaggtgggcagggccacagggccaatgggttaggagtggccaactgggagtcacactttaaggtggtcagtgggggagaagctgggggccagagggcaatggggaaacaagcagagatgccagtggagtggtcagtgggaacatcctgggactggaagtaaaaatgggggacactcaagcagacttgctagtgatgtcgcccgtaggcagtcagtggattcaagggactggagtggtcacggggcccacacttaggcgggcagagggagccacggcagacagtgtagccagtagggtcacagttagagtggtcagtggggtggtgtgcaggcgggcagacagcagtgaccacaatggcaaaggcatgctcttggtagcagagtcagtggttggctgagccttgggcagtcaggggccacacccaggcagaggactctggggccacacagggcctatgagtcagggggatcacactctggcagggatgtcaatgagggccacactgagacaggcatggtcagtgggggtcacacgagttgggggtcagtattcatgcctggggtaagtagggccacacaggtcagcaggcaggctgtggtcctggaggccacacctctcacaatgagtctggctgcgcagcgcagggaatccgctgtgaaggagacacagcctgagtcggccaggcccaggccattgagtaccagtcggtga

SEQ ID NO: 5790 - DNA, 743 bp, Artificial sequence
  DNA replication origin
tcactcctctgcagaaagggaaccatgtcaatattagaggtgaccagcgcatggagcccaggcctgcccacacccctgctgcccccaggtccccccagaatcttcaagttttggggcgactactgctccattagcctctggccccctggtggctgggctgaggaactgctagcttcccaatcaggggccagggttgggggggtgggggctgggggtggtttataggggcatgcatgggccgaggtaaccacaagctcccactcagccccccagcctccacggagactcctgccttgagccacacaacccacctcccccatgggcttgcttgctctaagggtctgggggatgcaggctggtcctctggggccgagcaaggccaggagagaccagaatgcagctgcctgaggagtggggaaggtgatgagggcagtggggtgaggacagggtgcagtgatgggaccgggtggctgcccagccccgggacctcagcttggtgtcagacttgattcgctctggcctagagcagaggtggtgtttgtgtgaacttccctgtgaagagactggtgtttgtggggagcctgagcatgggctggagtttgtgtggctgtggccattctgtctggccatggctgggtgggagagggtgaagatgattacgacagggcagaatatgtgcagaaggcctcttaggcattgtgggcttgtgtgtgtagagtgcattagctggggtgcaaggagca

SEQ ID NO: 5791 - DNA, 1536 bp, Artificial sequence
  DNA replication origin
tacgtgtgccgcgcccgcaacgcggccggcgaggcctacgcggcggccgccgtcaccgtgctggagccgccggcctccgaccccgagctgcagcccgccgagcgcccgctgccatcgccggggtccggggagggcgccccggtcttcctcacggggcctcgatcccagtgggtgctgcggggggcggaggtggtgctgacgtgccgggcggggggcctccccgagcccacactgtactgggagaaggacgggatggccctggacgaagtgtgggacagcagccacttcgcgctccagccgggccgcgccgaggacggccccggcgcgagcctggcactgcgcatcctggcggctcggctgccggattccggcgtctacgtgtgccacgcccgcaacgcgcacggccacgcgcaggcgggggcgctgctccaggtgcaccagccccccgagagcccgcccgcggaccccgacgaggcccccgcgccggtggtggagccgctcaagtgcgcgcctaagaccttctgggtgaacgagggcaagcacgccaagttccgctgctacgtgatgggcaagcccgagcccgagatcgaatggcactgggagggccgcccgctgctcccggaccgccgccgcctcatgtaccgcgaccgcgacggcggcttcgtgctcaaggtgctttactgccaggccaaggatcgtgggctctacgtctgcgccgcgcgcaactcggcgggccagacgctcagtgccgtgcagctgcacgtgaaaggtacggcggagcccgggacctagggaggggcctcgagtgtcctccgaggccctccgaactccagccctcctcggtgcccagcgctgcccccaagactggaggagaggtggtccgcgggaatattaaaataccaaacccgcccgcctctcactccccagggattcggatttagtaggtctccagggtactcaggaacttcttagcaaactccttaaatgattccgaggcagatggtggaacaccactaaggagtgattgatgtacaaatccggagggccctagaactcttcttccctagtggttttcaacgtctttgttattttactcctccttcccccactgaattcacaaccagagccccaatatatgagacagataaaggagtagtttatgggcgtaaattgctgagtctacgtatataacaggtacttctaaaccatcagtgagaataaggaggctattttattgaatacaggaatttgaattaaaggctgcattcatgagaccaggctctgaaccctgtggggacggcctggctgcatctgtcaccttgagaaacaagtgattcagtggaaagctagacttgagggaggacaaatgtcctgcgtgtttttactattctttgattaaactgctccccacgtttgcaagaagaggaaggtgaaggagagaaggtttatatttcaaagttgaatcaccaacaatatccaataaatggttacattctcataaacagaaaattccaaaggaaaaaaaagcacacccca

SEQ ID NO: 5792 - DNA, 974 bp, Artificial sequence
  DNA replication origin
gctctcccgggcctcccgctcccggctcgcctccttaccctcggccccgagctgcagctctgcggcggcggcggcggcgattcccgggcccgaagcctggcgctcagggggcagtccttcctgtttgcctctccagcgagtggccccgcagcctcccctgcccgctgcctggcttcctgctcttaggagcctctcttcccagccccctcccacagcttgggcctcttccccctcctccctcccacctccagccgccaggtccccagccgcccgccaggcttgggcctgagtggcagaggcgcctgcagctgccaatcccaaaaatattctctgatgacacagctggaggacaagagcccagactggctccactggtctaagtatagagcaggcaggaccacctgcccccggccctagccccggttctagccccggttccagccctgcccccaagggctggccggccagcagctgcttattgaaaggggccccagaaggtctgaggggtgatgcactttgtctccctgacaaataacactttctggggctggccggctacagctcccaggctcctgtcccacctgatgtcacctctggatgtgtctgtgtgtgtgtgtgtgagagagtgtgtgtgtgtgagaatttgtgtgtgtgtgagtgtgtgtgtgagtgtgtgtgtgagtgtgtgtgtgtgtagggagaaggtgttgtatgtttgcatgtgtgagtcaggtcgcttgaggcgaaatccttcccagcccctcccccacatccctggcgggagtgggagataaggctcatggccacagacatctgcgtcagagataggaggtctcaatgccacgggcaggggcaactcggactgtggggcgtggaaaggactggggaagactggatgagaagggtagaagagggtgggtgtgggatggggaggggagagtggaaaggccctgggcagaccctggcagaagggg

SEQ ID NO: 5793 - DNA, 1034 bp, Artificial sequence
  DNA replication origin
atggccacagacatctgcgtcagagataggaggtctcaatgccacgggcaggggcaactcggactgtggggcgtggaaaggactggggaagactggatgagaagggtagaagagggtgggtgtgggatggggaggggagagtggaaaggccctgggcagaccctggcagaaggggcacggggcagggtgtgagttccccactagcagggccaggtgagctatggtgctgcacctactgctcttcttgctgctgaccccacagggtgggcacagctgccaggggctggagctggcccgggaacttgttctggccaaggtgagggccctgttcttggatgccttggggccccccgcggtgaccagggaaggtggggaccctggagtcaggcggctgccccgaagacatgccctggggggcttcacacacaggggctctgagcccgaggaagaggaggatgtctcccaagccatccttttcccagccacaggtaacgagggtgggggaaccggcaggatgactttgagaaaaagcaaggcacagcatgggtttgcaggccaggcggacctgggtttgaatcctagtcctgctactcagttgctttgcagcaataggccagttactaaacttccttatgcttctgtctccccatctgtaaaatgggctaatgcccacctctcaggattaagtgagaggctgtacctagagtgcatggcaggtgggaggcatttgggaagtatgcgctgggagaccgggggtctctaaagatggagatatttgggcttgagccccttcctgccacctttcctcctatctctgcctctgctcgctgctccaaaccctgtttctttactcccaggtagctgacactgagaagctatcagagatacaggcaaaagattagttgggaaacttttctggaaaactagtctatcttctcttgagttcctgtctcaacatatatgtgcccccttgttccactgactgaatggataagccctcctgtgggtgggctttcttgtcatctggtccacct

SEQ ID NO: 5794 - DNA, 1447 bp, Artificial sequence
  DNA replication origin
gagtataggcaaaacaagacatagatgagtttggggaagggaaggggcactgatggggaggtggagatggagcccaggggctgccatgggcaggctgatgccccctcattgccctcagcccctgagcgctgtggcctccgctctgtggaccaccgactccggctcttcctggatgttgaggtgttcagcgatgcccaggaggagttccagtgctgcctcaaggtctgtgctccctgacactgcccatgcccccagctgtccagggtgcccactcgtttccatcacagccaactgagtcagatcaagcactctagagacctgatctggcttctggtttcaaccccagcagcttcttgctgtgtggccgtggacacattccctggtatttgagtcccagttgttgcctgtctgcaatggagataacgatgcctcccttacacagtggcgtgcgtcagggctcatgttgaagctgcccagcccagcacctggcactcatcaatggggcctcctagcattattataaacacatgatgtcgttaggcctttgttgagcacctgttgtgctagacattgaggatctacagatcaatcttgcccttgatcttacagtctggtgtgagaagctgacaatgattatgcaatatgcaaatgctgtaatcgggctaaggcccttgaaggggtgtctagtccagcttgagtgggtcaaggaaccttcctgggaggtgatgtctaagctcagtcttgaagggtaagttaaggagtagggaggaaaagaatgtcttaggtaaaggaagccgcaaatgcatggaggcccgagagtgtcgctggtggggagaactgcccaggatgagggcacctggacatgcagggcgaggggcaggggtcctgagaggactctggggggccggcaggggccaggtcaggagctgcctcctgtgtctgccaaggagtttggacttgtttctgagggccactgggagccactgaaggatttgaaatggggcagtgatggtcagttttgtgccttagaatagttagtctggcggagcgtggagggggtgaggcgacaggcagggaagccagctgctgaggctctgagcgggcaggggctgcaaggcagagagcggtggtggatgaagaggctgtcgagtgtgagggaagctccatagactggtgggtgggcagtgggagggtcaggccgagggtgctgtcaccaggaactcggctttcagtctggccccacctccccaggcctctcatcaggtttctcaccaacttcctcttcccccaggtgccagtggcattggcaggccacactggggagttcatgtgccttgtggttgtgtctgaccgcaggctgtacctgttgaaggtgactggggagatgcggtgagtgagaggggagatgcagtgagtaaggggggagatggggtgagttggggggaga

SEQ ID NO: 5795 - DNA, 1044 bp, Artificial sequence
  DNA replication origin
gaagggggagatggggtgagtggggggcggagatggggtgagtggggggcggagatggggtgagtgaggggggagatggggtgagtgagggggagatggggtgagtgagggaggagatggaatgagggggaagatggggtgtggtgagcgcacgggggtgatgcagtgagtgaggcaggtgcagctggggcagggcctctctgggactctcactccactctcatgcttctccattgctctgtcccctctctccacagtgagcctccagctagctggctgcagctgaccctggctgttcccctgcaggatctgagtggcatagagctgggcctggcaggccagagcctgcggctagagtgggcagctggggcgggccgctgtgtgctgctgccccgagatgccaggcattgccgggccttcctagaggagctccttggtgagagaggggaggggaaggcaggagggtgggcaggagggtgggcagggccttggggccaggctccccacctggtacccagtagcggagacagagaggtaacaggacttgtcccttgtagaagtttctgaaatccagaaatgtggagaataggaagggattgagaggtggtgagtttaggctggaggagagcagagccttctaaagttccctggcctgcctctgtctagatgtcttgcagtctctgccccctgcctggaggaactgtgtcagtgccacagaggaggaggtcaccccccagcaccggctctggtgagtcgataggaggcagaggctggggttgctgcccaatcctctttccacagagccccagacatggccctgtgctgagtaggtcctgggcagccacctgtcctcatgccatgccccttatgggcccctagtgtctcctcccaaccccctgcagggctttcttcccactcccctctcttcaagtccttcccacccgctagctgatcttcctgtgcctgccatattccctctaggccattgctggaaaaagactcatccttggaggctcgccagttcttctaccttcgggcgttcct

SEQ ID NO: 5796 - DNA, 1265 bp, Artificial sequence
  DNA replication origin
gggttttaccatgttggccaggctggtctcgaactcctgatctcacgtgatccacccgccttggcctcccaaagtgctgggattacaggtgtgagccaccgcacctggccaatttccccttttcactggaacaccagtcataatggatgagtccacccttatcttaacatctgcaagaacgttattgccaaataagggcacactctgatgtaccaggggttaggacttcaacgtataaattttgggggacactactcaactcccaacagctgggtctcccattctgagttttggggcacagctgtgctctgcctaggcatagctgattcccaccctaggaattcccaccttgggactcaccatgtgagacttaggaggacagttcatctctttcagttaaaaattttgtttgtggcttggagagtcacttcaatacatggataatgatgcccaaacctgtcggcagcctgctttccagctgtgaccatggcaggtaacgagcctccctgagtctccactgtcctctgccgaccaaatgggaatcataacagctcctcttattattatgcctgagacgaggcagccagtctggagagggccaacctagcacaggactgtgagcacacacaagacaatgtgggcgtccaacagatcctagctcccttccccttggaaggctatgcacacagaaaatctttccttgggttgagctgagatctagatgaggccaggggtcagacgcggtgaagtaccaaggtcacagggctgttatggcatcgcactgtgtagaagtccagtttcattgatctcgggataggggccgattggggtccagtggctccttcgaaagaccttttgcccttggaaaatgagatgtgacctcagggatagggggagaagggagaggaaatgtggaaacggagccacacagtcttagagttgcatagaactttggaacacccctattgcaggcccctctcgctacagctggggaagctgaggcgggaggaggggaggtactgtgtcaaggtcaaacgttgggtggtgccaggcgacagaagccaggcctttgagaggcaaggctgtggtagaaatgaaaggggaggtggtgggtgcttccaggggtctgtgagctccgttcccaagactggaggggcctgtgtctgcggagggggtggcttcctgggctctggaggggaggggaggctaaaagcagggttggggagcgaatctgggggattgtgggaatatcgggccgcgcccca

SEQ ID NO: 5797 - DNA, 1419 bp, Artificial sequence
  DNA replication origin
ctgggggctcttgtcagtgtgtgggcccaccgagggcaggggcttggtgacagcagccctcccagggaggcctggactgtcatcctcgtcacttccaatggagaactgcagacatagaatgtgccctggggccttgccccgacctaccatacagcccccaaccctacccagcctcacacaggcccccaacacgcactcctctcctcctctctgtacccctccctgacccctgacctgccacccctccaaagggaagcccctacctttgccttctgtggggtccctgagtgggggggctccacaggttctgcctcagattctccttcctcttcctcctcttcctcctcttcctcatccactccagctcccccctcctcctggatgggaggggtcccctcggagggaggagcagaggttttctccttcttcctctttctcctggtgtgccgggcagaggtggggggcagccgccgcagcttgtggggtggaggcaggcgcgctgagagcgggtggtgggtgtggtgggatgtgtgccggtgaactgggggtgcaggagatccggttgaggcccccacagcagaaacaggggccctccccacccgagggcacacaccttccagctcaaggccgcaaacaagggcaccctagtccttcctccagggccatgaccccccaacacctgtgtccacgtgcctgtcattgatgaggtctggtggagtgggaggagagggtggatggacagggaaggtcatgaagggggctgggaggggagacgtgatacagcaaggaggggaaaggcggagttggactagccgaggtgggacaaggagggagtgagtggggacgaaggggaaggggaaggtcaccgtggaagggcccaggcccagctccctagatctcccctggtctggggcccacctccccaggcaggcggacaggcgatgggtgggggaggcaggatgactgaacacggcatgtggcccagcacagagtccagcacagtgtccggcacaggatggcactgggtgaccaagccggaggtgagcgcggtgatggtggcgatgaaggtgatggtggcgagggcggccgcactaggggtccccaggctacccacactcaaagtcccgctcgctgtagctgcggctgggcttctcggggtcccaggccgggggcttgctgatgaggtccccaaacctgctcacagccaaggtcttgcccaagtcatcgtcctcctcctccacgtctggacttagagggggctcctccaagggcacccggacctgcaggcccagacggcctctgctaaggacccctgacccatgaaggccccacacccaccccaactccaagccctagttgggggagctcagcaggctctcacaccatcgggccccctccccttgctcccaggcctgtgtc

SEQ ID NO: 5798 - DNA, 942 bp, Artificial sequence
  DNA replication origin
gaccttccccttccccttcgtccccactcactccctccttgtcccacctcggctagtccaactccgcctttcccctccttgctgtatcacgtctcccctcccagcccccttcatgaccttccctgtccatccaccctctcctcccactccaccagacctcatcaatgacaggcacgtggacacaggtgttggggggtcatggccctggaggaaggactagggtgcccttgtttgcggccttgagctggaaggtgtgtgccctcgggtggggagggcccctgtttctgctgtgggggcctcaaccggatctcctgcacccccagttcaccggcacacatcccaccacacccaccacccgctctcagcgcgcctgcctccaccccacaagctgcggcggctgccccccacctctgcccggcacaccaggagaaagaggaagaaggagaaaacctctgctcctccctccgaggggacccctcccatccaggaggaggggggagctggagtggatgaggaagaggaggaagaggaggaagaggaaggagaatctgaggcagaacctgtggagcccccccactcagggaccccacagaaggcaaaggtaggggcttccctttggaggggtggcaggtcaggggtcagggaggggtacagagaggaggagaggagtgcgtgttgggggcctgtgtgaggctgggtagggttgggggctgtatggtaggtcggggcaaggccccagggcacattctatgtctgcagttctccattggaagtgacgaggatgacagtccaggcctccctgggagggctgctgtcaccaagcccctgccctcggtgggcccacacactgacaagagcccccagcactccagcaggtactggctgcagcctctactcagcagggcccagcccagagccacagggtccagagctcctggcagt

SEQ ID NO: 5799 - DNA, 828 bp, Artificial sequence
  DNA replication origin
gtggatgaggaagaggaggaagaggaggaagaggaaggagaatctgaggcagaacctgtggagcccccccactcagggaccccacagaaggcaaaggtaggggcttccctttggaggggtggcaggtcaggggtcagggaggggtacagagaggaggagaggagtgcgtgttgggggcctgtgtgaggctgggtagggttgggggctgtatggtaggtcggggcaaggccccagggcacattctatgtctgcagttctccattggaagtgacgaggatgacagtccaggcctccctgggagggctgctgtcaccaagcccctgccctcggtgggcccacacactgacaagagcccccagcactccagcaggtactggctgcagcctctactcagcagggcccagcccagagccacagggtccagagctcctggcagtcacctccttcctgaccctggggagtgtccccagctctgaccctgagaaaagaggagcagggtgtgggaggggggtggggatccttctctgtcctcatgatttacaaggaggagagaacaaggggggggggagaaaaacagagaagagcagagtgaagaggttaggagttccccaggagagagtgacagagtagagagggtgaggagaaaggtggaggaaagggggagccacgggatggggagggggcctgggtcagcatcctttgctgcccaggaggggcctgggtctcatgctcagggtctactccaggccgtgctctgagctgagggacggtgatggaaccaccgacctggccctgtcaagtccaaggctgctgtgttgcctccccagc

SEQ ID NO: 5800 - DNA, 1087 bp, Artificial sequence
  DNA replication origin
ctccctgtgtcaggacccttcactcccatcccactacccttggggggggcctggctgtgatctcggcacattccttccatcttatcagtgccctggtttctgtgccacctgtcatcacccgtggggctctgtgcccaggccaggggcatcactgatccctccccctcctccgagccacagtgtgtgggtggggtggggggaagggtagggctttgagctcaatacgtcatggaaagttgccagggcctgaggacagggacaggaacaatccgatggcagcagtagcagcaggatggggggtgggggagggcgtgtttacagacccagggtgggggctggatgccgcagggagcaggcttgtggacttggggagttggggtcgggaggctgtgccaccttcagctctggttggacagaagccaccccgtccaggctcccaccttgtaggagagccgaggggtctggtagggagcggaggccgaggtctcggccaccgggagaatgacgagcccactggagaaggaccctgagcccaatggggcactgagccctgggcctggggataccaatagctggggctttgggagggatccagcccccagtcctcgagactcactggccccggaagacttagagatgtttgtgctggactttgaggatggtgacctgtgggagtccatcaggggccagctgggccccatggcagggccaccaacttgtgagtaacggggctgctggcctttccccgactgctgctggcctgggtggggcagacaggaggaagggagcgaagccctgcctgagtctactgggctgtgtaccttcggggaggggacgtgggtgttgagatagggtgcacggaaaatgttgggggctcagtgcctggggactctgactcagtgcctgtcatgggacccagatggagaaggaggggcagtggccatggcaggggctggagggtctggctggggctgtggactgagctgggtctacctttggattgcatcttggccggtggtcccaggtgaccatggggaggtccttccctctttctgagcttcagtcttcttatcaatgaaatggccac

SEQ ID NO: 5801 - DNA, 904 bp, Artificial sequence
  DNA replication origin
ccgttctcaatgagctgttgggtacacctcccagatggggcggcggctgggcagaggggctcctcacttcccagacggggtggccgggcagaggcggcccccacctcccggacggggcggccccccacctccctgacggggcggctggccgggcaggggctgctccccacctcccggacgggcggctgcagggcggagacgctcctcacttcccagacggggcggctgccgggcggaggggctcctcacttctcagacagggcggccggtcagagacgctcctcacctcctagacagggtggcggccgggcagagacactcctcagttcccagaccgggtcgcggccgggcagaggcgctcttcacatctcagactgggcggcggggcagaggcgctccccacatcccagacgatgggtggccgggcagagacgctcctcacttcctagatgggatgacggccggctgggaagaggcgctccttacttcccagactgggcggccgggcagaggggctcctcacatcccagatgatgggcggccaggcagagacgctcctcacttcctagacggggtggcggctgggcagaggctgcaatctcggcactttgggaggccaaggcaggcggctgggaggtggaggttttaacgagctgagatcaggccgctgcactccagcctgggcaacattgagcactgagcgagagagactccgtctgcaatccccgcacctcaggaggccgaggctggcagatcactcgccatcaggagctggagaccagcccggccaacactacgaaaccccgtctccaccaaaagatacgaaaaccagtcaggcttggcggcgcgtgcctgcaatcgcaggcactgggcaggctgaggcaagagaatcaggcagggaggt

SEQ ID NO: 5802 - DNA, 677 bp, Artificial sequence
  DNA replication origin
aggctgaggcaggcagatcaccaggtcaggagatcgagaccatccttgctaacatggtgaaacctcgtctctactaaaaaaaaatacaaaaaattagccaggcgtcgtggtgggcacctgtagtcccagatactcgggaggctgaggcaggagaatggcgtgaacccgggaggtggagcttgcagtgagccgagatcacgccactgcacgccagtctgggcgacagagcaagattccatctcaaaaaaaaataaaaaaaaacagagagagagagaatcagactcagatttgaatttcaagatcactctggctgcagtgtggagtctcaatgggagggtgggggatagagctggtgtgcaaagaccagtcaggtaggatctgcagtagtccaggtgcagaatggtggatgcaggagaaagatgagggggtagtcttggcagagtgctggttgcggggctggggatggaaatggagagatgtgcttggattcaagagatgtttagaagctctccaggaccaagtagtggattggatggggactgcggtgaagacaagcaaggtgttgagagatggctcctgggcttctgccttccagaaccagatgggcggtgatgctgtttactaagaaacaaatggctgggggacacccagtttaaaagggaaggttctggatctct

SEQ ID NO: 5803 - DNA, 2084 bp, Artificial sequence
  DNA replication origin
aaaaaaaaaaaaaaaatagaaaagagtggttaggggtgtttgtagacgagttatgcagactgaggtaggtaacccaccccaccaggcctggactcagtcctgctctgcccctcactggccgggctgggaacctcctttctccgcctcacagacaaaacgaatcagtgggagtagttgctgtagggggtctcttcaaggtccggactatgctaatctgaccattcaaatccttgtgaggtgcagagtaggaacaaaagctaacacctggaggtgctaggtttttaactatggcaaagccgggtcatcttccccaccccaaaaccaaaggttcttcaaagtgctgtgaccttccaagttggagctgtgtgaaagcagcctggtggtctaaccctggctgcctgcgtctggtgctgggggtgggggtgggggtgggggtgggggtgggggtgggggtgggggtcggggcgggggcggggggcgctggtctgtcctgattagggaaggtgtgagcctgacctgctggcttcgcttgcagggggacaggggaactggctagtgtcctggtatcaggtgcagggtgtgtcgccgtgggcagtgggtgcctctgcctttggcacaggcgccatctttgttgtttttctctttaagggtctgatcaaggcagctggagactcagggagactttccacagccaagtgttttcgtttttgtcttggctgggctcctggtgctgtcactctcagtggctgcgggcaggccggtgttccaggaatgttctgcgtacccggcgggtcttctccaagagccacctaaggggagagttgagggcattccccaaactggcgcccacactgccgctgacccacaagccagaggcaaattcccgcacctcgcccttctcacagcttgtgcagtccgcctaaagcagaagctccccaggcgtcccagctttaagacagtgtaaagaaaaacaggtgcccactggtctagtcacatcccctataaaacggttggagtctctgtgttttgtggggaaacagcagaggggggttggactaattagtttcctcccaggaatctgattaagggaaggttaagcagtgtgggaaagaaaagggaaccgctatgaagaactgtcaccgaggagagggtttgaaagttaatggcagcccggaggcggaggagcgtcctgactcaggcagtgttccagtaggggccggaggccaccttggggaggaacgtgcacagaggtgactaatcaactcggcagaggttggagtaaaaaacctagaaagttggcattgactctgaaattgttgcaaagctgagatccaggagagagggcagcttttcctcccatctctactctcgttattagccagacacaagatttgactcttataaatgcctctctactcctttcttaaaaacatttttgtaaatgtggtaaaatacacataacgtaaaagttgacattttaaccacttttaagtgtacagttcagtggcattaagtacattcacgttgctgtgcaatcaccaccatctatctccggaacgttttcatcttcccaagccgaaactctatactcgttaattactccgcgttctcccctcttcagcctcccttacttttgtttccatgagtttgaccactctaggtacctcgtgtaagtggaatcatgcagtatttatccttttgcagctggcttatctcacttacacagcatcttcagggctcatgcatgtggtagcccgtgccagaatttccttccttctgaagacggaagagtatttcattatgtgcctatagcacactttgtttatccactcgtctgttattgggcatttagattgttcccgctttttggctattgtgaatcatgctcttgggaacataggtgtacaaatatctgtttgagtccctgcttttaatgattttgagtatatacccagaattggaatagctcgatcacatggtaattctatgtttaattttttgaggcgctgccgtgctgttttccacagcagctgcaccattgtacactcccaccagcaacacaccagggttcagtgcctctcctc

SEQ ID NO: 5804 - DNA, 1003 bp, Artificial sequence
  DNA replication origin
ttaccctccttccaaacaaaaagcattaagtccactattgtttcccataatagagccttatatgtcgtaggaaatgcttgatggtcttggacattaagatcacaaaggtctatgcattctacatggaacagtaaaagaaataacttctattccaactgaagctctaaagatagaggaatatcactacagaaaaaagaaaaaaaaaggaaggaaggaaaagaaaaaggaagtgaagaagggagggaggaagggggagggaggaagggagggggaaagggggaagggagtgaaaggggaagtgaggagggagggaggggagaaggggggaggaagggaggggagaaggagggagagggaaggggggaggaagggaggggggaagggggcagggagggaggggggaaggggaaggagggaaaggggaagggggaaggggggaggaagggagggggaaggggcagaggaggaagggggcaggggggaaggagagagagaagtggggaaagagggaaggagggaagaagaaaagaggttaattttcagtgggtcactgtattagtctgttttaatgctgctgataaagacataccagagactgggcaatttaaaaaggaagaggtttaatggagaattcacagttccacgtggctgaggaagcctcacaatcatggcggaaggcaacgaggagcaagtcaaatctacttggatggcggtaggcaaagagagagcttccgcaggcaaactcccgtttttaaagctatcagatgtcatgagacttactcgctgtcaggagaacagcacaggaaagacccgcccccatgattcagttatctcccacagggttcctcccacaacacatgggaattatgggagctacaagatgagatttgggtggagacacagagccaaaccatatcagtcatgccactgtctctgtacagattatcatggagaaatatagcacatttctgattttttttaccagtagtactttagtatgtgc

SEQ ID NO: 5805 - DNA, 895 bp, Artificial sequence
  DNA replication origin
gcacagtgaaggcttggtgctcccggattctagcgaaagcctttcgagctctggtttctgcaaagtttcccgagccctgcgcttctcgggaccgggctgcggggcctgctccgcagcgcagcggtcgtggcgccgctcgtcaggcgccagtgacctgatttctagcacccggagtcagacacctttctcctcgccaagcccagcgccccgagggtgcgattgcgggcctgaggggcccgagctcttcgccccgcagacttggggaacccgccggcaagttgaacgcagtcgagttttagcttttcgccccagaattgcacacagtttagagctaacgtgcggggtcgacgggacccgtctgggtgctcagttttctgtgcatccgttcggacgtgctgggaggattgtatgtgcctgtgtgtctgtgtcgggaggtggggcggggcgggggggcggtgatcatttagtttctgagaaacccagggagaggcgaactgtgtgtgtgtgtgtgtgtatgtgtggtgtgtgtgtgcatgtctgcgtgtgtgtgcatgtctgcatgtgtggtgtgtgtgcatgtctgcgtgtgtgtgcatgtctgcgtgtgtgtgcctgtgtgtgtgcgcgcgcgtgcaactgcgtgtatgtaggtgcgcgaatgcctgcgtggaagcggacgcggaggattgtatgtctgtgcgcagatgtcctgagtgtgtgcgcgtgtgttcgagtgtatgctcgtgctctgttccagcgtatgctggtgctctggcctgcgtgcatctagtctcacatccgtctctcattcttctcctttccggcatccatctatctatccgtccgtccatccgtctatctatccatccatgcatccatccatctctccgtgcat

SEQ ID NO: 5806 - DNA, 1199 bp, Artificial sequence
  DNA replication origin
cttgcagccgcacagacaaggcagaccgggactgggaagctgcccggagcggctgctgcgactctccgctccgacctagccggggcagccctccctgccccgggagaagacggcgagcaggaggacccgcagagccccgcccggctgctccggccccgggggcactggcaccatcgggctgtggtcttttcccgatgcccgagccgtggacgcggccacctaagagcggtccggcgaaggcagcgcagccggtgtcccagggaccggtccccaacgccactcggtgcatttccccaggcgctggcaggggcactgattcctagcaatgaggcctcccttccccttcccaggccgcccctcctctgactccctccagagcagggccgagttttcctggggagcctgggtcccggcggccgggcggccgctgggaggtggaggagcctctccagccccggccgcagctcatcgtgagccaaccgcgccacctgccggccagatgcgggagtgtgcggccccggaggaagggcgagcggacaaagaccgcaacccgcaatccgcaaccccgcagagaggtggtgcgtgcgtttgggcgagcttttcagccaccgccaagtctcgtgcactagggctactcctaccgtggggctgcggacagcgctcaagaggtcctggagtctgtcgtgactctcgcctgctggatttcaaaagatggaatcggaaagcgtttcaaggagaaactcctaacaaaccttccgggggttgcctgagtggctgctctcggaaaagcggatcctaaataaagcgggagggttatagggcgacgtcgaggagaggacaggtctcgagtcactgctacagtttcaggtcactgggctccgcagcagatcgtgttttctcccgtggctcgagagctgcgctggtttctcatgcaaactcagagccgagctaatgacatgagcaacttttacttttacacaagatgagcacgcgtgccgaggcgctgggcggcggctgtgtgagttggtggcccagacgaacagcttgtgcgagactctgggcatttcggtttctagatacaagatttgcttaaatgtcacagtccaaagaagtggatttcagtcattgtagctactgattgcacacaagtaaaaagggaaaaaatatgtactcgggggatatatgtatgtgtgtgtgcg

SEQ ID NO: 5807 - DNA, 1195 bp, Artificial sequence
  DNA replication origin
gggttgggggtaaggtcacagatcaacaggatcccaaggcagaagaatttttcttagtacagaacaaaatgaaaagtctcccatgtctacctctttccacacagacaaggcaaccatccgatttctcaatcttttccccacccttcccccctttctattccacaaaaccgccattgtcatcatggcccgttctcaatgagctgttgggtacacctcccagacggggtggtggccgggcagaggggctcctcacttcccagtaggggcggccgggcagaggcgccctcacctcctggacagggcggctggccgggcggggggctgacccccaacctccctcccggacgggaggctggccgggtggggggctgaccccacctccctcccggacgaggtggctgccgggcggagatgctcctcacttcccagacggggtggctgctgggcggagggggttctcacttagacgtcagggctgccgggcggaggggctcctcacttctcagatggggcggttgccgggcggaggggctcctcacttctcagacgggggcggttgccaggcagagggtctcctcacttctcagacggggcggccgggcagagacgctcctcacatcccggacggggcagcggggcagaggtgctccccacatctcagacgatgggcggccgggcagagacgctcctcacttcccagatgggatggcggccggctgggaagaggcgctcctcactttccagactgggcagccaggcagaggggctcctcacatcccagacgatgggcggccgggcagagacgctcctcccttcccagacggggtggcggccgggcagaggctgcaatctcggcactttgggaggccaaggcaggctgctgggaggtggaggttgtagcgaaccgagatcacgccactgcactccagcctaggcaccattgagcactgagtgaacgagactccgtctgcaatcccggcacctcgggaggccgagggtggcggatcactcgcgggtaggagctggagaccagcccagccaacacagcgaaaccccgtctccaccaaaaaaatacgaaaaccagtcaggcatggcggcacgcgcctgcaatcgcaggcagtcggcaggctgaggcaggagaatcaggcagcagtaccgtccagcttcggcttggcatcagagggagaccgtggaa

SEQ ID NO: 5808 - DNA, 902 bp, Artificial sequence
  DNA replication origin
ccgcccatcgtctgagatgtggggagcacctctgccccgctgccccgtccgggatgtgaggagcgtctctgcccggccgccccgtctgagaagtgaggagaccctctgcctggcaaccgcccccgtctgagaagtgaggagcccctccgcccggcaaccgccccatctgagaagtgaggagcccctccgcccggcagccctgacgtctaagtgagaaccccctccgcccagcagccaccccgtctgggaagtgaggagcatctccgcccggcagccacctcgtccgggagggaggtggggtcagccccccacccggccagcctcccgtccgggagggaggttgggggtcagccccccgcccggccagccgccctgtccaggaggtgagggcgcctctgcccggccgcccctactgggaagtgaggagcccctctgcccggccaccaccccgtctgggaggtgtacccaacagctcattgagaacgggccatgatgacaatggcggttttgtggaatagaaaggggggaagggtggggaaaagattgagaaatcggatggttgccttgtctgtgtggaaagaggtagacatgggagacttttcattttgttctgtactaagaaaaattcttctgccttgggatcctgttgatctgtgaccttacccccaaccctgtgctgtctgaaacatgtgctgtatccactcagggttgaatggattaagggcagtgcaagatgtgctttgttaaacagatgcttgaaggcagcatgctccttaagagtcatcaccactccctaatctcaagtacccagggacacaaacactgcggaaggccgcagggtcctctgcctaggaaaaccagagacctttgttcacttgtttatctgctgaccttccctccgc

SEQ ID NO: 5809 - DNA, 1221 bp, Artificial sequence
  DNA replication origin
gcgccgggagggactttgccgtgtgcgcaaagccgtggaggcttccacaacggccccgatttcctccgagagtctcagggacggtccggagccccccgccacggcagcctgggggaggcggagggagaagaggggcaagcacggggccagcgagagggcgcacgggagggtttgtttttaattaaaaggaaactccctttttccctctgtgagaaacatatttcagagcatggatttgtttaccagactggaatctggaaaaaataagtgggagagagtgcattttcttttgatttttacaataggaaacgattctgcagttgaaatttaaaccctttatagccttaaaaaaaaaaaaaaaagggaagaaaggaaaaaaaagaaacttgatttacgggggggtgggggggggcgcggacaagtcggctttggttcttcctcccttaaggcgaaccgcaggatccatgcattcaggtggggaggaaggagggtacccggtgggctggtgggagaattctcttagattgcagacctagagcccggtcttcggagtccaggaagggaaatgcttcctgcccagaatcgagggacaaagatggcatccggccctaacttggaggcacggttttcccagcctccgtctttcagtaccgagatacagataatagggaggggggtttgagtggcaggatgagagggctggagaaggatgaggatgtccagagatgcaggaggagacacccgcgagcagtgcagggcagcggctctagggccctggctggtgtttgggggtggggggtccttcccgcacagccctgcttgtctcaaccatgtgcgctcccttgcttccttcctcctcccgcccccagtgagttccatcagccgcatcctgagaagtaaattcgggaaaggtgaagaggaggaggccgacttggagaggaaggaggcagaggaaagcgagaagaaggccaaacacagcatcgacggcatcctgagcgagcgaggtaagcggtggcgccttgggcggcgcacttgctgggtgacttggagggcatcggctagctgacattggtgatctgacggcagccaagcccagctcggatcaaggtcccttcatgcgcggtgtctctgcgcctgagtaacgacatggaactgaaagaccagagggacactaggaatcaaaacaaacatttctattctgcttagtttttctgttttgta

SEQ ID NO: 5810 - DNA, 1072 bp, Artificial sequence
  DNA replication origin
gcagcggcggcggcggcggcggcgcggagctgcagctggctcaggcactcctggcagaaggtgtgcaagcacgccagcagcttgggcgcgcgccggtccgcgtcgaagtagttgtagcagattttgcactcgtagtcctcaagcggagggaggccggagaccgtctccgctgcgtcccgggctcctgcgtctccgcagtccggggctcccttcgcggcgaccccagctccctcccggctcccggggctgctgcttgggctctgctggctgccgccgctgtcgctcgccggcgctgccatggcatgatccgcccctcatcgggggcaaggtgaggtgccttcctccccctgcaccgccgcctgggctccgggcggggaggaggcgcttctgcctcccccctctgactgctgtcgcctggcgggggaggcaccgctggctgggccaggcgggggcgcagcagcgaccgcctccccctcccgcctccccgtcccccgcccccggcgcgtgcaccacggtccctccccgtccctgggctcctctgcagtccccctcggccttctcaacgcagctttcccagcagcttaggatatcggtttttgttggacttgaaattgggagttgagggcggcctggaggcgctcgggaaggagatttggggtgcggctgcttataaagatgttgccttttaccccagcagtcccccgccccctacgcggggtggtggcaggaaaccggttcctgagttttccttctttctcttcctcgacacgacctccccaccagtgtgtttctgtttatcctcctcgcccgggggctgggtccctggcgaagcctcgttttcacccacccacccccaagccagagctcaccagtgatgtaatgcgggacccgcgcggggaggggaaacggcagcctcaaccgcctggcagcggcggtttcttctcttcgtgaaaatcgtgatctcatctctccgtccatgggcgaaaaaacagccatcaccaggccattcacgctttgtgcttttgttagcagagcccaggcagccctgcagcccacatctagggtacaaacg

SEQ ID NO: 5811 - DNA, 1156 bp, Artificial sequence
  DNA replication origin
cacagctccagcttctaaaaccaaaccacagggttttgcctcacacctgtaaatgacagccagaagcattgtggagagatgcttccacctcctgggccggacatttctgtgtgtgatcccgccagacatgacaataactctgcgtgtcttctgtaagaggaaaatggtttcccttaagagcttcagcattctctcagtccccttgactttgctctccagacaggactgagaagcaagaaaagtagaaactagggcatgaaggggactacatcatcctggaaagtcacatcccaaagacattcaggcctaaaaggacaactgaataaataaggcattgacaggtgttcattaatcatttgtgcaaccaaattcttagtaggctttgcatggacaatcaggaaacatgcaggtttctgctgcaaacgaaagacggggttgaattgcacttttgttgcagactgatcacctgggcctaatttgattgttgcctcccaagggatctctgagcccaggagggaaatgtaggagggaggagggaaaaccaaggccggcctgcaggatgtttcctttgctatcttctgctgagtgctctaaagcaggtgcaggtgcaatgagatacctaatcctgtccccagtcctccagcactttgttctcttctcgtttaaactccctaaatggtctggtggggttttcccagtgtcattgcttaaagagaggcagagcggaaagaaagaagtaggagaaagcggtaagcatctttgttctcaatgcggaaaacccagaagggactttccttcccacccacctgaaaatgttccccagttgccaaatcagaagggcaggggcagcgacgcggaagatgactcagggcccactttgaacctcctgggtacttgagcaagctcaagggtgttcggacctctagggagacgttgcatcacgcagtttggaaagaacttgggaattctccctggggggctcgctgtatttactgggaactagtcttgcaggaaggtgagagtacgtggctggctgtggggagctggcgtgggaggaaatccgacttcaccttgggctcagagttgcaaggaaggtcactgtgggatcagcctgagcccaaaaggatgggctaatgggagcggccgcaggtgcacg

SEQ ID NO: 5812 - DNA, 1174 bp, Artificial sequence
  DNA replication origin
cggagtgcgggatcggcgggggcgaggcgggagtggcggtgccagcggagggcaccggcccggcgtggcagcggcggcggagcgcggccccgggcacaccatggccgagctgctgcggagcctgcaggattcccagctcgtcgcccgcttccagcgccgctgcgggctcttccccgctccggatgaaggcccccgggagaacggcgcggaccccacggagcgcgcggcgcgggtccccggggtcgagcatctccccgcagccaacggcaagggcggcgaggctccggccaacgggctgcgcagagccgcggcgccggaggtaaccatgggcaggtgttcgccgggtacggggagggggcggctgcggacgtgcgggtccctgcgactccgccacgcggggccggccgggccgagagggcgccgtccccggcagtgacccggctcccgccgctgcgagcggacggggaggcctggccttccagtaaccaggatgccaccctccaacgctgccaggggcaaccgggtctattgagatatccccagacgctttcaatgcagtccatttagagacttcccactttcaaaagtagttaaattcacgtagatgccagcaaatatgtaagagttacgtaatggaacggaggagcggggatgtccttggcacttccccggggagacgttcttagactcccccccacccccgtattcttgcatttccgcccatcccccttccctgatgcgcacaaatgcgggtgcagccgggctcagcgcgctcctcaccgcgctgcaccgccagctctgggcacagaacttggggctcacacagctcctagagagatttacaacctccctgcactacccccggcgatgatgtcttaacagcaactctcgcttgccctcccccagagtctgggggtccctcctgcctggtgggtcttttatggaccgacaccagtgacttctaacagatgcttctgggagggaagctcgctacgctcccgctaggtgttcaaagcgtggttatacaacccactgcggcttggggggaaccagcgtgcgtcgtcgtcgcagtgcacagggactttaggcagcagggaccagacgggctgcacttggcttctggggacgcatgtctaccgggagcactggcagcacctgccttttccctcggcaa

SEQ ID NO: 5813 - DNA, 1518 bp, Artificial sequence
  DNA replication origin
ggagccacttcacacagggccctaaagtccaacccacgccatgagtactacgtcctgggagcagcctgaggccctgaagtagctctcactgggtagcaacatgactgggttttcactttaaaaagattgtctgactgcagtggggagggtggatgggggcagggagaagtcagggtggatgggggaggactaagggtggatagggaaggagtaagagtggatggggaggagtgagggtggatggggaggagtgagggtggatggggaaggagtgagggtggatggggaggagtgagggtggatggggaggagtgagggtggatggggaaggagtgagggtggatggggaggagtgagggtgaatggggaggagtgagggtggatggggaggagtgagggtggatgggggaggagtgagggtggatgggggaggagtggggggaagagtgaaggtggagggggaggagtgagggtgggtgggggaggagtgagggggatggggaggagtgaggggggatgggggaggagtgagagtggatgggcaaggagtgagggtggatgggggaggagtgagggtggtaggcaaggagtgagggagggaggagtgagggtggtcaggggaggaatgagggtgtgggggaagtgagagtggatgcgggggagtgagagtggacggagccggggttggggggagactgcctttcagaggaagagttgagtgtcctgaccgcctgcacctggctccagggctttaccagtacgcacttcagttcccctccaccatcccctcacgcttcaccatctctgcagcctccctccctgtggtttcttttcttgggtgtatgaatatgcactgatattgccttaattttggggagaaaaatccttcatataggcttcttggttaccaaaattgagccaaactctttgggttttctacacatgttgcctccagtctctcaacttaatgtgcagctgcttctaagctcctgcactcagatgatacgccactctcaaaggccactcactggacattcattggctgtttcttcagcatctaagtcttccaacagccccatatttccccttggggatccatgaggttctgggaaattatggagttgaagcacatgacctaggtaggccaatcaacgcactgaattcctttcatagtgaatagcgcaggggtaatcatgtgaccttgctacaacaatcagaatgaactgcaggactgttatttggaattcttggagaaagatgttctctctttctcttgacattgtgctctgggatttaaaccctttacttatcagacctttaaaattcagcttttattaatgttaccctgaaatagcctggttcttctgtgacctctaagaagtctcttggtttcttcctttacatcctcctctttctgcatcctaaacatgggcatttgcagattctgtctttgagccttgtgtgtttctctcgagtttacatcgctccctggcttcaactctccattccctatcagtg

SEQ ID NO: 5814 - DNA, 1652 bp, Artificial sequence
  DNA replication origin
ctccctcccggacggggcggctggccgggcagaggggctcctcacttcccagtaggggcagccgggcagaggcgcccctcacctcccggacggggcggctggccgggcggggggccgacatccccacctccctcccggaccgggcggctggccgggcagggggccgacccccccacctccctcccggacggggcggctggccgggcggggggccgatccccccacctccctcccggacagggcggctggccgggcagaggggctcctcacttcccagtaggggcggccgggcagaggcgcccctcacctcccagacggggcggctggccgggcggagggctcacccccccacctccctcccggacggggcggctggccaggcggggggctgacccccccacctccctcccggacggggcggctggccgggcggggggctgacccccccccacctccctcccggacggggtggctgccgggcggagacgctcctcacttcccagatggggtggctgccgggcggagaggctcctcacttctcagacggggcagctgccgggcggaggggctcctcacttctcagacggggtggttgccgggcagagggtctcctcgcttctcagacggggcggccgggcagagacgctcctcacctcccagacagggtctcggccgggcagaggcgctcctcacatcccagatggggcggcggggcagaggcgctccccacatctcagaggatgggcggccgggcagagatgctcctcacttcctagatgtgatggcggctgggaagaggcgctcctcacttcctagatgggatggcggccgggcggagacgctcctcactttccagactgggcagccaggcagaggggctcctcacatcccagacgatgggcggccaggcagagacactcctcacttcccagacggggtggcggccgggcagaggctgcaatcttggcactttggaggccaaggcaggcggctgggaggtgtaggttgtagtgagccgagatcacgccactgcactccagcctgggcaccattgagcactgagtgaacgagactccgtctgcaatcccggcacctcgggaggccgaggttggcggatcactcgcggttaggggctggagaccggcccatccggcagtacagtccagcttcggctccgcatgagagggagaccgtggggagaggcagaggcagaggcagaggcagaggcagaggcagaggcagaggcagaggcagagggagagcctttcttttttttttttggaggcagagtctcactgtattgcccaggttggagtgcaatggcacgacctaaactcactgcaacctctgcctcccaggttcaagcaattctcgtgccttggcatcccaagtagctgggattacaggcatgttctaccacagccagataatttttgtagttttagtggagaaggggtttcaccatgttggccaggctggtctcgaactcctgacctcaggtgatctgccctccttggcctcccaaagtgctggggttacaggtgtgagcagccatgcccaaccttacgtattttctttagttaaattttatagatttcttttaacaatgagctttcaaaagtcatcattatctcatggaaggagacttaagt

SEQ ID NO: 5815 - DNA, 781 bp, Artificial sequence
  DNA replication origin
gcgcctctgcccggccgcccctactgggaagtgaggagcccctctgcccggccagccgccctgtccgggagggaggtggggggatcggccccccgcccggccagccgccccgtccgggagggaggtgggggggtcggccccctgcccggccagccgcccggtccgggagggaggtggggatgtcggccccccgcccggccagccgccccgtccgggaggtgaggggcgcctctgcccggctgcccctactgggaagtgaggagcccctctgcccggccagccgccccgtccgggagggaggttggggggtcagccccccgcccggccagccgccccgtccgggagggaggtgggggggggtcagcccccctgcccggccagccgccccgtccgggaggtgaggggcgcctctgcccggccgcccctactgggaagtgaggagcccctctgcccggccaccaccccgtctgggaggtgtgcccaacagctcattgagaacgggccaggatgacaatggcggctttgtggaatagaaaggcgggaaaggtggggaaaagattgagaaatcggatggttgccgtgtctgtgtagaaagaagtagacatgggagacttttcattttgttctgcactaagaaaaattcctctctcttgggatcctgttgatctgtgaccttacccccaaccctgtgctctctgaaacatgtgctgtgtccactcaggattaaatggattaagggcggtgcaaaaaaaaaaaaaaaaaaaaaaaagaaagaaaaaaa

SEQ ID NO: 5816 - DNA, 1517 bp, Artificial sequence
  DNA replication origin
gcattgcggccccgacagctgcgccaggatccccgggcggcggcgcggggcgtgaacgctctggggctcagccaggcctgcgcgggcccgaggccggaggaacccggactccggcgtagcggtgagtgcggcgccggttgtgggagcggcgggagccggttggcggcgcggcctccgcgtgcggttcggctgggcccgaggggctccccagcctcggggcctgggaccctgtcgtcggcgccgcacctgaccgctgggtgtgcgcgcgggcggcccgcggcaccaggagcagcggcgagcagggtgggaggcggcccgctggggtccgggaagcggctgacgtggggcctcggccctgagcccacgcgagccgggagctgcagcgcgaacggcgtggggcggcgctgaccaggcagggaggatgcactgcgtgcctcccggcgctgtggggcggggtggggaggccacccccttgaattaagagggctctgccgcggccccagcagtgcggtgtccgtggaaggagactcagccctgcgatttcggaaaacccttgtttggcggggcgggaggggctgttgctgcgtggggtgagaagaaactaggtgcgtgaggtgggtcgaccttggtgattggttctgggcactatcgtggtggtgggactgggattaagactgtcgtttggggtttgagagttgcagctttgcttttccccaagtgcgttttaatcatatactgttgataggttgggtaactcggggactgcttactaccagcagtcctgtggggtaggtgttatcaggctcgtttcacagatgaggagcccgaggcacaggttttcaaatggttttcgcaggaagtctgatactagaaagtgtgctctaagctgctgtataaaagatccctcgaaaatgaaaaggctggaggaatgtctttaaaattatatggaagctagaaaggcagtaggctttgtgaacgaaattatagctgaaaagaatgacaaatagctgacatttattgagcttttattacatgccacgcactgtttggagagctttatgtacagtgtcttcacactgttaacagtcctctggggtgggggttattcccattttacagcgggagaaactgcagattggacgacttagcttgcctcagatctcagctagtaagaagctgggattcagacaggcctgtgtaaatccagagctctgaaatctaagcactatattttgctgcctctccttggtggctggctgaatagtttccacagtggattttagtctgggtggccaggagagttgtagtttgatgataccttctttcatgtttatcaacctattttgtttccccaaattagttctgagagttaagggtgctgatgagttgctcctgaaagtgtattagaagggtattataggggacaggtggtgtgacatgggaatcttttgcacagacttgattttgttttctggcatttttctgggcagttcctcacacttggggatgagtaagcc

SEQ ID NO: 5817 - DNA, 958 bp, Artificial sequence
  DNA replication origin
ggccagccgccccgtccgggagggaggtggggggggtcagccccccgcccggccagccgccccgtccgggaggggggagggggagtcagccccctgcccggccagccgccccgtccgggagggaggtgggggggtcagccccccgcccggccagccgccccgtccgggagggaggtggggggatcagccccccgcctggccagccgccccgtccgggaggtgaggggcgcctctgcccggccgcccctactgggaagtgaggagcccctctgcccggccagccgccccgtccgggagggaggcggcgggggggggggtcggccagccgccccgtccgggagggaggtggaggggtcagcacccgcccggccagccgccccgtccgggagggaggtgggggggtcagccccccgcccggccagccgccccatccgggaggtgaggggcgcttctgcccggccgcccctactgggaagtgaggagcccctctgcccggccacgaccccgtctgggaggtgtgcccagcggctcattggggatgggccatgatgacaatggcggttttgtggaatagaaaggcgggaagggtggggaaaaaattgagaaatcggatggttgccgggtctgtgtggatagaagtagacatgggagacttttcattttgttctgtactaagaaaaattcttctgccttgggatcctgttgatctgtgaccttatccccaaccctgtgctctctgaaacatgtgctgtgtccactcagggttaaatggattaagggcggtgcaagatgtgctttgttaaacagatgcttgaaggcagcatgctccttaagagtcagcaccactccctaatcttaagtacccagggacacaaacactgcggaaggccgcagggtcctctgcctaggaaaaccagagacctttgttcacttgtttatctgctgaccttccctccac

SEQ ID NO: 5818 - DNA, 1135 bp, Artificial sequence
  DNA replication origin
aggggcggccgggcagaggcgcccctcacctcccggacggggcggccggccgggcggggggctgacccccccacctccctcccggacggggcggctggccgggcagaggggtcctcacttcccagtaggggcggccgggcagaggcgcccctcacctcccggacggggcggctggccgggcgggggggctgacccccccacctccctcccggacggggcggctggccgggcggggggccgacatccccacctccctcccggaccgggcggctggccaggcagggggctgacccccctcccccctcccggactgggcggctggccgggcggggggctgacccccccacctccctcctggacggggcgaccggccgggcagaggggctcctcacttcccagtgggggcggccgggcagaggagcccctcacctcccggacggggcggctggccgggcggggggctgacccccccccacctccctcccggacggggtggctgccgggcggagacgctcctcacttcccagacggggtggctgctggacggaggggctcctcacttctcagacggggcggttgccaggcagagggtttcctcacttctcagacggggcggccgggcagaggcgctcctcacatcccagacagggcggcggggcagaggtgctccccacctctcagacgatgggcggccgggcagagacgctcctcacttcctagatgggatggcggcggggaagtggcgctcctcgcttcctagatgggatggcggacgggcagagacgctcctcactttccagactgggcagccaggcagaggggctcctcatatcccagacgatgggcggccaggcagagacgctcctcacttcccagacggggtggcggccgggcagaggctgcaatctcggctctttgggaggccaaggcaggcggctgggaggtggttgtagcgagccgagatcacgccactgcactccagccttggcaccattgagcactgagtgaacgagactccgtctgccatcccggcacctcgggaggccgaggctggcggatcactcgcggttaggagctggagaccggcccggccaacacagcaaaaccccgtctccaccaaaaaaaaacgaaaacc

SEQ ID NO: 5819 - DNA, 1458 bp, Artificial sequence
  DNA replication origin
gggcgcggggaggaggcagcggggaggagcgtgcagggaggaggcagccgcgctgggaggagtctgcacactttcagtgccagggcattgtgggaagcagccatggtctaagccgggcgcctcacctgtcagccgcaccggctccagcgctcgcctctcgccctcgcttctccagcgctccttgctcgcaaggcgggggaggcggcggcccagccacgatggtgagtgcgggggaaccgccggcccgggtaggcggtgggggcgctcgcgctccggggaggcacctggggcgtccgggccgggcgcgcggccgggtgggggtgcgggccgagtcccgcctggccacccgaaccgtgcgtccctgtggccccgctgccccagacggtgcggacgcgccaggatcgcttgcccgggattcctgcggcaacgcggcgccgcggcgccgcggctccattcattcattcgatccgccttagccgagtgcttagtctgtgccgggctcggtgctgggcgctggggatgtcgcgggggaccaggaggagcccctgttctccaggaagcttaccttccaggagggggatgcggagggagggacacgtccaatatacaagtaaaatgaagagaacttctaaagtaagaagcgctgtaaagtctcaaatacaaccgggtggagtggcaacttttgatttggcaaagcctcttcaaggacatgacattctagctgctggaggtcctggaggggcgctacaggtggattagagagagcaaagcggaggggagaaggccttgtttgtggcaggagaggtgggcttctgccaggtgaggcgggtttttataggccaaaataaggagtttggttttggttccaactgagtaggggaaacctcggggacgttttagcaagaaaactgaccttacccgttgtgcacttttgtttttttgagactgatctcgctctgtcgcccaggctgaagtgcagtggtgtggtctcggctctgcctcccgggttcaagcgattctcctgcctcagcctcccgagtaacggggattacaggcgtgtgccaccacacccagctaatttttgtatttttagtagagacggggtttcaccatgttggccaggctggtctcgaactcctgacctcaggtgatccgcctgcctcggcctcccaaagtgtagggattacaggggtgagccactgcacccggcatggtgtgcagtttggctgtggttggagaatggactggggtgtgtaagggcaggggatagggggtcaggttggaagctgaggccggccgcagccctgctgatgagagatctggtgacctgcacttgggtggaagcgatagctcaggctcctcttgctcttgcctgctgtttaggggcagccttttaagagtgtggtggtctgaacgtcactagtcccacttccccaagtgtgttaccacttcccaaat

SEQ ID NO: 5820 - DNA, 1194 bp, Artificial sequence
  DNA replication origin
tttaggatttgaaagacgctaaagtttaaagtcgaatcataaatactgttccaatccaatcactcaggcccagagctggtgggagttctggattgcatttccggcttcaccagtatctctgtaacttagcagcaagctacacctccaccagcctcggcttcctcttaggagaaatgagaaaactggacccaatcagtgtttcccaaaagcatggtgggcgtccaatgcaagatgtcacagtgcaagagaggactctgtgtgcatgccaattaacatgttttagttattagtttactctgtctggtgagtaatgttagttttcctaataaataagatttccttttaaaataaatgcatccaaatatttttaaaaatgagtcactttcacaaaaacctatttagtaaataagagttcaggtgattctagcagccgtggcaaaaataactgatctagaggcctggcgtggcgtgaaatccctgagtacagggggaggaagagagcgaaggcggctggagttcctcgcaaagaagcaagccccgggcaccagggtccgcagtgaccagccgccggtcctccacgcttccagaggagacgatttggaactgacccgggagggccaagaaacaccttccgagtaccaggctaaaccccgccagggagagagaccgggacgaaggtcccaggctagtgcgacaccgcaggtcggggttccctggttggaggagcgcggtgggctgggaggggcgcgttggtgcgcactggaacaggggtccccggcttgagcagcgcggtgagacagagttcccgcgctggaggggcgcggtgagacagaggtcctgggctggagaggtgcgttggggcgcactggaaccggggtcccgggcttgagtggcgcggtgggacagagttcccgggctggaggggcgcagtgggacagaagatccgggctagaggggcgcggtgggacggagctcccgggatggacgggcgcagtgggacaagggtcccggactggaggggcgcgttggggagcattggaacaggggtcctgagcaggaggggcgaggtgggctgggaggggcgcggtagggcgcactggaacaggggtcctgggctggaaagacacgttggaacaagggtcccgggcttgggcggcgcggtgagacggagttcccgggctggaggggcgcggt

SEQ ID NO: 5821 - DNA, 973 bp, Artificial sequence
  DNA replication origin
cgcgccgccgagaccaggctcccgctccggttgcggccgcaccgccctccgcggccgccccctggggatccagcgagcgcggtgagtacaggctgcgcggtgagtcccgggcgcggccggcgctgccctcggcgggggacgctccccggggctccgcgcgccaccggccctgctccctgaccttgcgcccggccgggaagctgcggggccagcgggaccctggggcgccgacgtcggggagcagagaactttctcagcctcccgcgggccgccttggccggggctgggtgctcgccgggcatcccggtcccgcccgccgggagccccgagcgggacccgggcagggcaaggcggggccgccccggggtggcgtccagtgatacccgcagctgggagcaccggggccggcgtggctcctgcccggccatccgagccggccctgaccctgaacctgaggtttccagctgctcgccggcaacccctaccccggacttaggctgcgcgccgccggatggggagagactggcgcactcttacttgttacctctgcctgggcagagggaggtgacgcgcggtgtggggaaagcctttaacttggcctctggcagccgatttaacccgagcgagcaggtctttgctattttcatcatctgtagaaacgggagttgcgaggcggatgagtgactgcaggtaaaatgaaagtacggtactcagaaattctggaaggaattaggcatttaatgtgtccacaaactgagcggggaaggaaggcttctattacataagacagcactccaccttcaggtattatggaagatgctgttgaaggttttagtgttttaatgaacgaaacacattctttgtgtgtgtgtctctggagaaatctcgaatgctgctgtcttgctttggctactttgcaggggacgttcttatatttagcatcagcataaaaaggtgttcgaaggtgtgactt

SEQ ID NO: 5822 - DNA, 1341 bp, Artificial sequence
  DNA replication origin
ccgcgcagcctgtactcaccgcgctcgctggatccccagggggcggccgcggagggcggtgcggccgcaaccggagcgggagcctggtctcggcggcgcggggagtcggaggacgcagccaagcggcggcggcgaggagggtcacagccggaaagaggcagcggtggcgcctgcagacgccgcgcagcccgggcagccccacagcgcaagctggctgccgcggcggcgggggctttatcggcggcgccgcgcgggcccccgccccttcctgccgcccccgcccccggcccgccttgccccgccttcccgccgcctcctttgtgtggccgcgggccgcagcgtccccgcgcccggcctccaggacgccccctctccgcctgcgacttctcggatgccgccccgccaggggtccgtgtcgtggggctgcgcccggaacgcgccggggagacgcgcagaccccgaggtgcggcgccagcccgggcccagctgcacgtgggtctcccggatgggggtgtgtgaggtggcggggggaataccagggctcgtaccgcgtccctgagacgcagggcatgtcgtcttggctgccccctggaagagacagagggcgccctgagacagcgctcagtcctccgggtgatggggaaacggtgccaggacgcggccgggaaggggcagataacccctcgaggcgttttgcagggtgtcctagagctgacttctccctgcctaggggacagaggaacggcggcaagtcgccttaggcaaatacagacgaggggaaccagaaaactggattcccggctatggtgatagcatgaggtacccgcagcgtcctgggaacccagcccttctcagccggtaaccactgctgctgggacccggtgcgcgatagacaggcacataccccaggggcctgcaacaaatgaccgtcccgctccgggctctgttacctggacctctcttagttggttcctcctttgcctctagttaggtttctggggacccaaggacccaactttaatgacagtaatttatgtagccgttagtgtagaatcgtcgctagcaggcagacggccccaacagcgaggaagaaatgtaaatctccctatacacagccctggattaagggtacagctactgatgagagccacttggaagatcagcctgcagtcaccccttggcatgcaggtggccgtgccagagtgtgcacgtgtgtgttggggaaggggttgctctgaaaagtgtaaaatctggaccagcctaagggtgttctcagtctctcatagagggaaacaggctatgggaggcttggtcctaaaataaggagcaaacagtctacaa

SEQ ID NO: 5823 - DNA, 1090 bp, Artificial sequence
  DNA replication origin
gtcgcggagcgcgacctgaagccgccgccggggaggggacgagcaccatgtcgaatctgagcaaaggcacgggcagccggaaggacaccaagatgcggatccgggcctttccggtgagtctctcctcggcgtccgggaccccggggccgggggccgggccgagagccgcacgcgaggcccgggctgaagtcccccaacaggccgcaggcccggcctcccctcccccacgcccgccggccgcggggcgcgagccttcccggcaaccgggcggcgcggggccccggcgcggccgccctcccgggccgttccccgcgccgggagcccgggcctggcgccgcgcccccgtccgggagctgctccttcagccgctccgcgggcgtcggctgcggccggggcccctcggccgccccacgcctccccacgttgccggggttgtaggcccagtctccggcgctgctagcagccgcggagtcctccctgtgtggggcgtgtgtggaacttttcacgtggggtttcgctacactttgaaaatttacccagcctagcttttagggtgatgaaggggctgccctctctctctgcccccctccccaggaaggtctatgccatcaacctgcccccgacgcagtgacagtggttccacggaatgctccgtggtcataaactagtaacattgggtgtatttatagcgtctttcatcctacaagcttcctaagcactttacaaactcttgtgcaggattgcctcgccactcggaggaaggccgggtgggggggaagcaacagagagcaaaccggccaattggttctccatttctcagccttgggagcccaaagaatgagtgtagtcgccttgcggagtagctttgtttcatcgctttcagtgacagcaaacgtgttctgctcagaaactttttcttttttggcattacgttgagtcgtacccttgcgatgtttagtatataggatataactttgggtgtcaaatctggttcagcttccccgtggcaagcaattaaaatgtactgttaacgaactgggcatacttgcctatgtcgctacaataaaaggcatacgtcaagacagacgaa

SEQ ID NO: 5824 - DNA, 1189 bp, Artificial sequence
  DNA replication origin
aggctaggggcgacgctgggggcggcggcggcgcgacccccgggcagggctggggagctggccggcccctgggcagccgcggcggcggcgggggcggcggcggcggcggcggcggctcggactctggcgactccgatgcggctggggggctgcgctggcgcggcggctccgcggggtccccctcacgtccggctcggctccctttatcgcgctcctccgcgatggcggcggcggcggcgacggacaaacatctcactgcgcaggccgaacgtcgtcctcctcctcctccttctcctcctccgcctgagcgagacgagatccggcccagagggtggaggggggaggagggagggaggagagccggagagtgagagatgccgggggagggaggtgggaggacgggagggggagcccggcggccgccgcgggggacgctcagatctcgcgagaagagggcgagcgcgctgcccccctggtgggcggggcgaagcccgggagagggtgggcgccaccggaggggaggaggggaacagggaactgaaggaagtgggaggggccggcggggcggggaagcggaaagggggcgtggctgagggcgggaggattaagctgcctttttgaaagtggagcgccaggtcccgggttctgggtggaggtggttgctgattggtggagctcggagcggcggttgggagggtcctggtcacatggtggggagtgggaggggggaagttcggagagcgggagcgggatggtagtgggctgggccccactgggctgggacagcaggaggatagtcttgaggaggagcgtggggtgctagatgtgtaactacgtcccgaactggttcctgtgtttttctagggcatgtggactagggatgggtacttgagtagaagcctgcaacttgaagagtttgtgcaggagttagctgcagtgtcggaaattagtgtcctgtatgctcaacaaggtattcggactgggtgtgcacaccacagctctcaggactggaaggtggaaatttaatctacgaagttcccttaaactgcataagcttcgggacctcttgattcactgatattttctggtggacccagggcttattcatgttaaaacctgtttttcattaccatcagaataaactgacagctccattaatgaaatgcagcatttggtaaataatgttaag

SEQ ID NO: 5825 - DNA, 1424 bp, Artificial sequence
  DNA replication origin
cttttaaatgaatatatgttaattaatatataaagtacttcttaaaacaaaacatcacaaacagaatttcatagattattgcctcttatatgtcttcagtccatgaagcacaggagaatgaaatgccctaaaacagcaagtttccacttccagccatctgcttcctttagtctgtgcacctcagtagttacagggattctcaggtgatgagtctgtgacatccatggtaccaacagctgagatctcgtatattgcacatcccccaaatcacagctattcatttaaactgctctagattagctgttggaacagataagaatctccaaacccatcctcagtattggagaagatgggtagggaggggtcaagggagttttgtcttccgagttcacagaccttgctggcagctctgccaccaagggcggcgtccttcccatcattccttctcttccaatcctggactcttattttctccaaatctctcctttcttcactcctgatgtaagtgcaggacattttattttgttcacttataacctcagtgctagttggatacctaaatgattctttgttgaatttattgactgtgtgtacatgtgtattccataagaggatgagagtgtgtgggagcatatatgagtgtgtgtggggtgtgtgtgtgtgagcatgtgcaattgggtgggtgtgtctgtgcaatgagtgtgtggagtgtgtgtgcatgagagtgtgttgcatttgagtgcgtgtgttcgtatggtgtgtgtatgtgttatgtgagcatgtgtggtgagtttgtggtgcggtgtgtgtgtgtgtggtgtgcgtgtatgtgtagtgttagagtgtgtgacgaatgtgtatatgtgtgagtgtgtgtggtgagtgtgtatgtgtatgtggtatgagtgtgtgtggtgcgtgtgtatgtggggtgtgtgtatgtatgtacttgtggtgtgtgtgtggtgtgtatatggtgtgagtatgagtgtggtttgggtctgtgagcatgtgcaattgagtgtagtgtgtatgtgcaatgagtatgtgtgttagtgtgtatacatgagtgtgtcgcatttgagtgcatgtgtatgtgtaatgtgagtgtggtagtgtatgtgtggtgtgagtgtatgtgtggtgtgaatgtgggcatgtgtggtgtgtgtgtggcgtgtgtgagtgtgtgtatatgtatgtgtggtgtgaatgtgtgtatggtgtgtgtggtatgtgtggtgtgtatgtgtggtgtgaatgtgtgtggtgtgtgtgtgtatgtgtggtgtgtgtgtttgtggtaagtgtatgtgtatgtgtgatgtatatacgcacagggtgtgtgtggtgagtgtatgtgtggtctgtgtggtgtatgtgtggtgtgtgtgtgtggggagtgtgtgtatgtatgtgtggtg

SEQ ID NO: 5826 - DNA, 837 bp, Artificial sequence
  DNA replication origin
tgagagagagggatgcagtccgtggtcctcgccctggttagagctggggccccccgacgttaactatcgcagaaatagatgtacttggaacagccctcccaccgcagggtaaaaacccacaaaccacttaatactcctccagaaagggctgaggaacacaggctggaggagacgtgggtcattaggtctccagcggtttctgatatttttctaagatgtttcgcggggttctcccaccagcaatgctttactggttacttccttattgaaacggcttctaagtgctgggtgatttccgcgggaagtccctggggcagcagccagcatctgatgctaggatcctatccataccaacccagatgttcctgcgttgcagtaggtccacactgccggggagaggtggcaagagacaaatcaactctagtggaaacgggaagcgagtgggaacaacagcctcacagcaagaccggggctcagcagccgcgctcttggcctgcgtttggtggaccggaatccgggttgtgtgtttcattttcttttttgccagaaaatatcattaggaactaaacggctctttttaagagtgtgaaagtgttactcttgccagtcaccaatgaggagggcgccaaaagcttcccagagccagttcccacagccaggactattctctaaagccagaggtcggaaagttgaacagaacggaagcaaattgcctggcagagggaagaggcatcgggtgcccagggggtgtagagcgggcgggggtgattggagtgtgaaacgaattggtggccagggtgccttctcttgcacttacactagctgcagtccgcagtt

SEQ ID NO: 5827 - DNA, 1038 bp, Artificial sequence
  DNA replication origin
aaaaacccgcctcttgcgagttgagcgaggaagaggggggggaaggctccgagttccgcttcctgaacggcgggtggatagagaaggttggcgcggggaagaccggcgggaggcgcgccccgggcccgcggcgcgattggcgtgaccggcgatggccggtgagcggacccgcaggttcacccggagcctgttgagacctgggcaggcggccgagctccggcacagcgccgcgtccgccgccgcggtggcagtcagcagccggcagcagcagcgggtgagtgcggcgcgtcctccgcgccttcccgcgcgccccaggcgcccggggggaacggagcccagcttccccaaaagctcggcgggcccaggtccccgcagctcacgggtcctctcctccgcactccctcccccgccgcctctgcgggctcccccggcgccacctcagcgaggcagcgccaccgacgcgtaaggaccgggggcgcgtttgtgcacgcgggacgctcagaggagcagctgcgtgggtagcagaagcgcagcgtgggagaggatgtgcaggggctttaatggggcgcgagggggccggaatgcaccgccagtcacactggtgctaagtgatacgagtgccagagaccccgggtggggtggggggatctacagaacagaacccctgagtccggaggtctgcgcgtccctctcaccctccagtaaacagaccagtgcgctgagagagagggatgcagtccgtggtcctcgccctggttagagctggggccccccgacgttaactatcgcagaaatagatgtacttggaacagccctcccaccgcagggtaaaaacccacaaaccacttaatactcctccagaaagggctgaggaacacaggctggaggagacgtgggtcattaggtctccagcggtttctgatatttttctaagatgtttcgcggggttctcccaccagcaatgctttactggttacttccttattgaaacggcttctaagtgctgggtgatttccgcgggaagtccctggggcagca

SEQ ID NO: 5828 - DNA, 1088 bp, Artificial sequence
  DNA replication origin
cctcccgccggtcttccccgcgccaaccttctctatccacccgccgttcaggaagcggaactcggagccttcccccccctcttcctcgctcaactcgcaagaggcgggtttttctctcttgcacccccactcttcccacccccttccctcctctgaagcttctcgaagactttccaaactctgcgctcccccgggcgcgcgcggccaactcggctggcggccgggccctgcagcggcgcatctggagcgggcgtcgcgggacgcgtgtggggcggctcctgcccgcgccgcccacacgggctcagctggccggccggggctgtccacgccgcccgggggaactgcaggctgcgggggagggcggggggcggccgccgaggggctccgggcggggcctgtccaaggccgtcgcctgtccaaggccgtcagcctcatttggaggttgctgggagagttggagccctggatgcatttgccgtttagacttctattttctgggtccggctagtgggtgggggccaagctcggttcgcccttccaccctcgggaaggggtcagaggcttattaaagatctggtggctgggatcccagcagcatcgcccaagccagcgtttggaaggctcccttgccagaagtccatgttcagggccttggaataagcttccccattcattcactccttcaatgagtatttattaagcgcctactatatgccagctcacactgttctggaaactgaggatacggagaggaacttagcaactacactttaaggctgtgtagagctgataggttttttcggggtaggggtgggagacagcaagtaaccaagcgaacaaataaacaaatacagagaaatcaaggagacagtttaagctactaacacgaactcaaaaccaataaatcagcgttctgggggtaagagactttgggtggcattaggatgagtaggcaagaaccaactggcagggttactatgtagggtggtcaggtcgggggtggatttcacagttatgctgtctctgctcttctcttgcccatacccatctagcctgcactttgcctctagataggtatctgatgaaag

SEQ ID NO: 5829 - DNA, 877 bp, Artificial sequence
  DNA replication origin
caggcaggccctgcacacttactctctgcaggctctttggagcgccggccactggacgacttgcgcagcaggctgcggccggaggagaagaggctggtcagctcctccagcgggctcgtgggtgtccgggaccgggagccacccggggctgccccgtaggtgttcaccgcggcgttgaccatcttggccccatcttgcgacacgggtctgggggtcgagtgaggcactgaaggagagctccttgagaggctgcccgaatgcacagcgtcgtaagggggaggccttttgaggctcaggggagtcagggacctccccatgctgacgggggagggagaggtggagtgacttttagggtagccatggggagactgggttcggtacagcgtagacgggggtgggggcgacgaggagagcgcaggggtggcagaggcaggtcccagggccgcggcctgctctttctccagtttcgcatggccggggacgtgggacggcagcgtggagggcgacgccccggctggctgtttcatgtaagacacgttttccagcacgggaagcttcgtgacctccagaggggtaagcggggactcgtcggagttgggggagcaatgcacgggggcggggggaaataccagcagcgggggtctgtgagaaagcaggttggggaagggcggagggatgtcgcaaagcagccccttgggggggcatggcactgaggccttggcgaagtccaagtcaggcaccgtgggagtagcacactgcgaagaacagctgtgatggtcgaagtcacatttggcgtcttggcccaagtcgtcaaagatagggtacttcatttcctcgtagacggcctcgctctggtcatcgtcctccttcctgaagt

SEQ ID NO: 5830 - DNA, 1332 bp, Artificial sequence
  DNA replication origin
cggagggaggaaggagggaaggaggaaggagggaaggagggagggaggaagggagggaggaagggagggaggaagggagggaggaggggagggaggaggggagggaggaagggagggaggaagggagggaaggagggagacaggaagggagagaggaaggagggaaggagggagggaggaagggagggaggaagggagggaggaggggagggaggaggggagggaggaggggagggaggaagggagggaggaagggagagaggaggggagggaggaggggagggaggaagggagggaggaagggagggaggaggggagggaggaggggagggaggaggggagggaggaggggagggaggaggggagggaggaggggagggaggaagggagagaggaagggagggaggaggggagggaggaagggagggaggaagggagggaggaagggagggaagaagggagggaggaagggagggaggaagggagggaggctcactcactaaaaagctcagtatttgggtcagatctaggacacaaatggcatcattacagctcaaacttgctctcctcatccctggactccaattttatcttgtgtggccttcactctcagtcaagcatttcattttgtgtggcaacagactttcaagaggtacaccctatattcttaggaacctccaaaagaaaaatagtgttttttccctaatatgttcaaggaacctgaagctccttagcctggatttgtctggctggggtcacctgtgcattcctggagctccactgataccacatgactgtagagaaggttgcccaaagagtaaagaggccctgataccataagaggaggtgcattttagaagagcagaaataacagaataaatattttttcgggtcactgtggtttgaggatgagctgacatggagagtttagaggaagttggtctggttgtctgctgagcatcctatctctgtcttcagggaacaccatctttatgtgcggaacttccctacctcacaaggtctagtggaactgccaatcacaaggctctgatcacagcagtgaatatgtgactcgagttagccaatcagttttcctctcctggaaaatgtaatctttagtactgagacacaaagcgtggttgcagctgtgttatccaaagatagagccccaaatggagggcaagacagcctgtttctaaactgccagttacccagtggtgcctcagttcctgcccttccagaaggctagctgctcaactcttccttcaattctgtggcttactcagtgtgtacccataggtgtcctattgttgcttgtgttagggccagttt

SEQ ID NO: 5831 - DNA, 1224 bp, Artificial sequence
  DNA replication origin
caatgcctgttcgcatgtcagcatagcttacaggggcagctggcgaggtgtccacgtagctctgacggggacaactcatctgcatggtcatgtagtcaccccggctgctgggcactgcccgggtaggcctgcaaatgctagcagccccgggaggtgcagggcccagtctgcccatctcgaccccagtgctctcctgccaggctgccctccggcccggccccaggtccatcttcatgtactcctcagtgccagtctcttcctctctgggagctggctggagctgggatggacacctgacagaaggtgagctgtggaaagccaccgggccagacaagtagccagactgatcactcccaaattcaatattgacatattcccccgggctcttgggctctggagggtgcagcaagggctgctgctgctgctgctgctctcgggcccgaggtaaggtgctggccttgggatcccccagggacagcctcgtgggccgggccaggcggctattggtctgagcagctgtgtccacctttcgaggcagatggggctgcagaacctgatggtggggatgtggaaggctgggctccagcctagccccgcagtatcccccacccaggctgtcgctgctggtggaagaggaagaatcatctgctgttgcagcatagagaaggcgaccagagctagtggaaaggcggaggtgctgatgccgggcaccctcctccggctccccggggcgctgggtgtgcttaaaggatcttggcaatgagtagtaggagaggactggcttgtgctgggggtcctcagggccgtagtagcagtcggaggggctgctggtgttggagtcccccactggtgacatgttcatgtagtcacctgtgcaaggtaagagcttaccaccgctgctctccactgggggtttggggtgaggcaagacatgagagtggtggccccctaccccgtttgtccacagctttccatagctggtcccggaagggacggcgttgctgctgctgctgctgctgctggggccacctccaatgtcaggagagcagccaccgctgggggacatcatcatgtagccattggggtccactctctggggatggcgtctgatgggattgatgatctgctgtggggcagatacgctcttggggctcatgggcatatagtctccactgccctttcggccactgggcactggggccacccctggggacatgggcatgt

SEQ ID NO: 5832 - DNA, 1643 bp, Artificial sequence
  DNA replication origin
gtcccggaagggacggcgttgctgctgctgctgctgctgctggggccacctccaatgtcaggagagcagccaccgctgggggacatcatcatgtagccattggggtccactctctggggatggcgtctgatgggattgatgatctgctgtggggcagatacgctcttggggctcatgggcatatagtctccactgccctttcggccactgggcactggggccacccctggggacatgggcatgtagccatcatccgtgtggagggtggagctgtctgggcggtggtgccccccccgacgctccaaggggtgcatttccagaccctcctctgggtaggagcgggtgggcacgaaggcggagtgcctgtgtcccggcagtcggcctccactgccacctcctggtgggtaggcaggcatcatctctgtgtactcctcaatggaagccactgaggactgggacggggtcttctggtgggtaatggtaggggatgtgcctgccgagtgagttctctttcggaaccgattatccagatctgcagcactggctgcttcatccccagccaaggctggactcgtgcccaagcctgttcctggggtgcagcggtggccattgccaccccgagacaaaatgtagtgaccgttgggggcggtcagggtggagggccccttgccacccatgcagatatagttgcttagctcctcctcaccgcgggctggtggggtgtggcccagggaatccggagtgacactgcggaaggaactccggaaatcgcagggactggagccatactcatccgaggagatgaaaccgccatcgctgggggaaccagacaccgaagcactagatcgccgtgggaagagacaatccgaggtggagccatggccactggtgctactggacgacagactgaccgggctggtggccgaaggcgagcagcgggaagccggcatggggatggagcggctgtggttgagcggggggtgcagccgggcgctgccccgatgccggtgggcgtgggttctgttggtgctgggactcacagggctgccgtccaccgaggctgggcgggacatggtgccttcgccgtcactggaggcgcggacacggaaggagcctggcttcccgcccaccatgctggccggggaggtggcggtgatgctctcagtgcgtgatcggcgggtcagccccacctggctgggcgggggattgttgagatggtgccggcgcagggggacgctgatggggttagagcagttggacgaggactggctcttgctgcgagggcggaactcatcactcatggcccgcatggcctccaggatggtctcgtgcatgttctgggccaccacagagtcatccacctgcatccagaactccccgggccccgtcacggcagaacggcccacctcgatgaagaagaagttttccgagtggccacagcgcctgatgttcatcagctgcagcaccacggccgctgcctccgagttcagcttcacgaagctgatggtcttgctggtcaggcaaaggcggtagataccaatcaggttctttgtctgacccaggcccttgggcttcaggatcacttgccagacctctttgaatgcgggtcctgggggcacgtcaccgtagctcaagtcctcccc

SEQ ID NO: 5833 - DNA, 790 bp, Artificial sequence
  DNA replication origin
aacctccctcccgtgggtcagtcttacctgataggtaagaggcagcccagctccggcgcccccgcctccccccggcctcccactcggggctctgtagccgcagtgcccccccgtggccccccaccctcactcctgcgtcttcccgagctcgccccctcccgttttcccagactcccctcgtgctttcgggtagccacccaaacacccccgcctgcgcccgccgcggggattcctgcgggccgggggcgccccggttggcgcgcgtgtagggaggcgctgcgccggagctggcggccgcgcaggggcgctgtcctagcgctgcgccggggtcggcgcgggcgccgctgcagcacggctggggggcggagaggggcgggcgcggggcgggctcggcccggaatgtagagacccgggcgggagcctcccggcggcggctgcccggctgccgagcgcggaggctccgtcacgtgtttttctcctccgagtgagacggcggcgcggtcggagggggccggcgcgcagagccagacgccgccgcttgttttggttggggctctcggcaactctccgaggaggaggaggaggagggaggaggggagaagtaactgcagcggcagcgcctcccgaggaacaggcgtcttccccgaacccttcccaaacctcccccatcccctctcgcccttgtcccctcccctcctccccagccgcctggagcgaggggcagggatgagtctgtccctccggccggtccccagctgcagtggctgcccggtatcgtttcgcatggaaa

SEQ ID NO: 5834 - DNA, 951 bp, Artificial sequence
  DNA replication origin
gcgcgccggccccctccgaccgcgccgccgtctcactcggaggagaaaaacacgtgacggagcctccgcgctcggcagccgggcagccgccgccgggaggctcccgcccgggtctctacattccgggccgagcccgccccgcgcccgcccctctccgccccccagccgtgctgcagcggcgcccgcgccgaccccggcgcagcgctaggacagcgcccctgcgcggccgccagctccggcgcagcgcctccctacacgcgcgccaaccggggcgcccccggcccgcaggaatccccgcggcgggcgcaggcgggggtgtttgggtggctacccgaaagcacgaggggagtctgggaaaacgggagggggcgagctcgggaagacgcaggagtgagggtggggggccacgggggggcactgcggctacagagccccgagtgggaggccggggggaggcgggggcgccggagctgggctgcctcttacctatcaggtaagactgacccacgggagggaggtttctagtcaaggctgtttcccccaggaaatttaaaagctagatttcggcttcagggcgataggccatggtgaggggatctgtattttttaaggtttttctaaaggacttctgggccagccttccaccttgggatccccagatttgctgccgtgaggtacctggaaggaacagagggacgcccaagggcagtgactgggggcagttatggtcactacaaaaggagaacagggatccccaggaagtgtctcacgtccggcgctgtggaattagttgctgatcaagtagggagaaaatgtaaatatcaccttttctcctgctccccttgcccatccgtgtgacggggggactcacacctaaggctgagggcatgggggaggggaaatgagaggtcccttatcatattccgaagtctatccgtgactttaaaaagc

SEQ ID NO: 5835 - DNA, 1578 bp, Artificial sequence
  DNA replication origin
gacgtggctcaggtcccgccctcataccccctccctcccaacttaccaggcagtgtcccttctacccgggcatcgtgcccaggaggcgagaaagggctgggcgcctgaggggcaggtgggcgcggatccagggtaaggggttaaggaggtgatgctcccaaggtccgggggcccaggcggggaagtggggtgcggtcggaggtggggcgtttgggggtgtgcggtggggaggtggctgcgcggtggggaggtggctgcgcagggtggagggagtggccagcggccctgcccagattaagcgggaggcgcgccgggcgtctgcactcgggaggccccgcttgttccccgcgcccgcggcggtccgcgttccccgcctccagcccgcctccaacttgcggccgccgggcttggctgcgagagcgccgcgaagaggcagcggggcgcgggtggattggggctggaggtgcgcgtcccgtggggtggcaaggcggcagctcctggcgctgcgggcgtccccacaggtaaggcgcccataggtggggcaaccgctgtcccggggccccggcacctgcctgggaggggcagtggagggagcgtggcattcaaggggtggtggcgggcccagctggggagttgtggcccgggggtcaccagaggagagcgcgtctggctcctgggcttgtctgcctgggctttaactgggtgctgtgtgttttgattaatttggaggctcgagttaccggcctggcagtcggggcactccaaaatgccaagagaaagaggcagctgaggagaaagagaaagcccatcttattctccgctgagttgaactgcttttcaggccaaatcttatctgcggaaatgcagggcaaaacaagactcagctctggtcagggtgcgctcttcctgggggtggcctgcgatgcaaatgtgccagggcacggtcctccagccggctctcgccgtttcctgtgctacggaccacactggctctggtaaagcaattagactgtttctcagaagaatgttgtgaaatgcataaaatacaattaaatcagaatcagttttattggaatgcaattatggaagtcctcaagtcgtgatatagtaactaacacaggtgcatcatcattattgcattaaatagcttgatttaacagcaggccgattaagcaacagtaatgtcaaagtagtgatgtctgcaaatggtattttgagataatagcccaaactgaaatgtgacatgaaaataccggtgggtgcaaattatcaagaactgccaatactactgtgctctgttgcctgtgctcataagggaaggacatgttgaacttctgtgacatgttactaaaagtaaagatgcaacttattttcctatgtgagtttcctatacagatcacctgaattccatcctcaggttaagaatctttgctttggaacagtgttgctgatatttgctgcaattggcttcagacaccaagtatgatcatgcagttggtcactgattttagggaaccacttgcttgcagttaaatttgggatctattggtatcttagaactttgtagccatgcaggta

SEQ ID NO: 5836 - DNA, 1141 bp, Artificial sequence
  DNA replication origin
aatattcatgatgcaaagattagaaataaaatcctggctgggcacggcggctcacgcctgtaatcctagcacttggggaggccgaggtgggcggatcacaaggtcaggagttggagaccatcctggccaacatgatgaaaccccatctctactaaaaatacaaaaattagccaggcgtggttgtgcatgcctgtaatcccagctacttgggaggttgaggcaggagaatctcttgaaccagggagactgaagttgcagtgagccgagattgcaccagtgcactccagcctggtgacagagtgaggcaaaagaagaaaaaagaaagaaagaaggaaggagggagggagggagggaaggaaggaaggaaggaaggaaggaaggaaggaaggaaggaaggaaggaaggggagggagggagggaaggaaaggaaggaaggaaggggagagaaggagaggagaaggagaagggaaataaggagagagggagggaggaaggaaggaaggaaggggagagaaggagaggagaaggagaagggaaataaggagagagggagggaggaaggaaggaaggaaggaaggggagagaaggagaaggagaggagaaagagaagggaaggaaggagagaagaaggaaggaaggggagagaaagagaaggagaggagaaggagaagggaagtaaggagagagggagggaggaaagaaggaaggaaggaaggaagagtcctatgggttatgttccaaagagtcttctgaagaaaatgcatacctgttatatcatcagcatcccaataagaaacccacgacacactcacaattggataatttgagaagtttatttatagagacactgtttacaaaggtgaggttcaggtaaaccgtctgagatagttcaacagacaagttatttccaccactgctccctttcctggatctaagaaagagagtggtattgagttggccacaatcaatgagggctgaggggtgaggggctgtgagggagggaccaggtgctcaaggtagccctgcagggagggagccaggaaagtagaggccctgacctcgctctgctccttccctctctctgatcttttgccagaagcctgaaagctcaggacccccttgtgggagcccctttctgtgg

SEQ ID NO: 5837 - DNA, 847 bp, Artificial sequence
  DNA replication origin
gcgctggtcgcagtcgaagcactttcggttgtgcgggaggccggtcatgtcccgcagcatcttcaggtgcttctcctcctgcttccgcttcgcgctggccgccatggccgcggcgccaagggaggaggccggcagggccgggagccgggcagcgctgcgccgggggcccgcggtcccacgggccgccctggccgcggccgccgccctccgtctgcgcgcgccgcccgcgccggacccggccgcagcggcttggctgtactgggctcgacgcggcccgggcgctgtggtacgcgggctgacgggccacaccaaccggcacagccgggacaaccgccgccgccgccgccaccttcccgacttctcctgaggggaaaagacgaggaaggggacggcaagaggaggcccgccctgggcggccggtagccaagtgtccgctggcgccctctgctggccaggaggagtcactgcggcctcgctgaggcatgggccgggtctggagccaagtagggtagacacaatggtgataataatattaataatagacagtatttattgagcgcttatatatgcaaagcgtttcacatgggttaccttccccttctgtttaaaactcttcaagggctttccactgctttgagtataattccaaattcctcaccgtgccgtaaaaagtgctccatagtctagcccagtctacctcattcttcgtcgtcctcactcagccacactggattttgagttttctgaacacagcaagctcctttctgactcctgcaggacctttgcccttgctcttctctctttatctttgggccagctaatttgggggggcttggggtgtcctgtg

SEQ ID NO: 5838 - DNA, 945 bp, Artificial sequence
  DNA replication origin
ggcggccgggcgggtgtcgggcccttcccgggaggtgggggagcgggcggcgggaccgggacccttccggggctgggaaagagccgggtgccgtgggaggcggtcgggggcggccgttgggcgccggctggcgggcgcggcgtgggaggctgcgggctggatgcgcagggcccgggcagccgggctggggatgcgttttcggttttgccgggcgagggtttacgttctgggcagccttcgtgggtgggacgtgggcggggttggggtcagggagggggcgaccggggcgagcgtccctggtctccgtcgagcctgcggccgccgccctcgctctccagctacccggggcgccgggctgtggggggtgggggaagacgctaggaggccgggggggaggtccatgcgggtcctttgtgtgccccgcctctcagcggcccgggagccgcggtgcggagcgaggcacctgctgggcgctcctgctgggggtcggggagaagctggggtgggagggagggacgcctgcctcgcccgtgccttttttctgggtcgagagtacctacgtaactgggaggaagcaggcacttaggaatagtagcaggatgaaagcatcttgatggcagatgtgaatcccctgggaaaagttcgaaaggattaattgcgggagggggaggcagaggagcagatttgaagctgtgggattttagttttatggtccgaagagagtgttgaggagttgggggaaagttttaatggcaataaggtacccactaggagctgtgtgattctaaatatgatggagttatctgtgagatttatctgtatctcgctatcaatacccgagtgccctggctgtacacagaaatgaggagagctagcaagtcaccatgatttcagaaagacactaccgtcctgagttactgggatgatttgtgtttgttgttcttt

SEQ ID NO: 5839 - DNA, 1647 bp, Artificial sequence
  DNA replication origin
ctggggtcccgctttacatctggggtcggtgtccgcgggatgtgcgtcctggcgctggccaccgccgccgggtgggcgtagggggctgcgagcaggaggaggcgcggcgctcagctgccggcaacttgtgggcacggccgcgcgccggctgtcctggcgcagctgcgagaggactgcgcagctccgcccgggcccggcgagcgcgcggcggcggcgggggcggccgctccctcctcccccgccgccgccgcccggacctgcgcgctctgagcatgcccggggcgggcgcccaggggccgcgcggggcgggagtgcagcgcggccgactctaaatcctagtgaggggtgaatggggaggctagaacagccggcccttccctgcaggaagcccccattgggttggggtctgggaaaagggacagactggctgaggggggaagggcctggagccgggggtggtgggggcagcggggatgtcgggggtggcgggggtgggggaaattcctaaaataaggaaaccgtagccccgggggtcccgggtttccatataacaggcatctctgaagtgcctgtgctgtgcctggcgctgtgctagggagacacttccattcattcttcccactccagttaactgagcatctattaggctccagcccctatgctgggttctgaggatgcagcgacgcagaatagaagacaagagaatgttccttctctctggagcttaccttctgctttggagagagagtcgtgactgagcaaacacatcaacaagccggtgctatatcgggtggtgataaaacagggcagatgtgggaagaaggggagaggagagcttcttagacaagggccctggggaatgcctggagtaagacctgagagatgagagggattggccacgaagaggccatgcttcatgatggggagaggactcgactcctaacctatacaggggtgaggagggccatgcagactcccgaatcactaactcatcctgagatctgccaggtgcagcaggaggctctcagaacccaagggaaagccgctctgggctcgcaggcctggaggctccccggctagtgccggccaccatgagatgacttcctgtcctaaacaggccagcccttcccattctcttgacaactcggcaaaataactattaatattttcaccatgtggatcaaacaaatgaggcttataaggtttaggtcacttgtccaggtcacacagccagtgagtggcttagagagtgcacagtcagatgacttcagggcaggagatgtggccctgcgcctctaactgaccatggaaacccagtggaaagagcatccgtctagggctgggggttaaaggcacttggcaagtcagggatactaagctgattctcgagctgatgaagagtgggagaggagaacatggtgggaagaactcaggacatagaatgaccaaagagaggagcagagagaacacaatgtttgtggggagccctaggctcctacaaggcagggtcctgagagcagaggggtgtgaaagagaggcatttcatactgagacagctgcacagcttgggccgtgagctactcatgcaatgtcaaaatccacactccatgtctggaaggaggatctgtccattttccttgttctgca

SEQ ID NO: 5840 - DNA, 1309 bp, Artificial sequence
  DNA replication origin
cctcccggcccagctgggctttgcggtcagccaggccctggcttcgtaagtatcacatcggcagctgtgagtaaggcagcatggcctgcggggagggtgcaatcacccaggcggcagatgccaacagcttgaatcagggcattggtaatggaagaggaagagccagggcagatggagagtcatcataaataaaggaaacttggtggcactccaaagataactgagatgagggcggcgagcataatggccgagcttccagcccaagtgaggagggagatgatggcaccactgatagaaactagggatgcatgagaaagccagactgcaatcaagtgtgggatcaaaaggaggcagagagaggccggcaacatgactgggtgggtgtggggggcgcggacagagggaaggaaggtggtgaggaggagggggaggaagaggaaggggaggaggggaggaggagtcggcagacacattgctgcctggtgcaggcaaagtgctgaggtgaaaggctgggctagaaggggtctggaagccatccaccttgaggtgatggctcagaaggagccattgctacccaaggcagaggagagcagctgaagagggaggggaggaagaagagggtgggagaggtctcaggagagcaggcacagtgcagtgctctggaagccaggtgagaaggcttctgaaaaatgatcaacttcagcaggataaggatgaggaaggagccctcgaaatcagtgagaagggcaccactgatgaccttggagaagcactcttatgatacagagagaaaagcagcatgagggagtgggtagaaaattatgagttgaagatggaccaatatgttgcagtaacgaggaagagagagtggaagagaaagaaggggagatcaaagtggaggacaagagggaagaggaggagaggaggaagagacaaaggaggaggagaaagcggaggaagtggacatatggaaggagcagcaaggaatttccaaattactgcttgtttgcaggactggttttaagatagagaaggccagagaatccttgtgaacaagaagccaggaaagaagcagggagggacagggaatatagcagaaagagggagacaaggttagaagcacatgatcctggaggaaaattgaagagggagtacatcaggctaagtgtcttagtgtcttggcagcattattcacaatagccaaaagatggaaatactccaagtgtctgtcagcgcataaagggataaacaaaatgtggtacatccatacaatggaatattattcaggcataaaaaggaatgcagttat

SEQ ID NO: 5841 - DNA, 2593 bp, Artificial sequence
  DNA replication origin
atagatttgaattgagaagggcttagaggactctctgaatgacctccatgctttcatcctggcattgctgttttctcagggagcaaacttttccagagcctcttcctcagacttctaacaattctaagttccacttaggacctgccgtacattgagtgtttatttcctccccaaattcatatgttgaaatcctaacaccgaatatgaggagtgtttgcagctggggcttttgagaggtgatgaggtcacaggggcagagccctcattaataggattagtgtccttatgaaagagaccccagagagcttcctcacttctcctgctatgtgaggatacagtgagaagatgaccatctgtgagccaggaacgggccctcagtggaactcaatctacttgtacttcccagcctctagatctgtgagcaataaatttcctttgttttaaagccatcagtctatggtcattcattacagccaccaaactcaataagccaggactccattttaaatacatgttggttgcttatgttgctggtgatgatgatgatgatgatggtgatggggtgatgatgttgatgatgatggtgatggggtgaggatgatgatgatgatggtgacggggtgatgatgatggtggtgatggggtgaggatgaggatgatgatggtgatgtggtgaggatgatgatgatgatggtgatggggtgatgatgttgatgatgatggtaatggggtgaggatgatgatgatgatggtgatggggtaaggaggatgatgatgatggtgatggtgtgatgatgatgatggcgatggggtgaggaggatgatgatggtgatgggatgaggatgatgatgatgatggtgatggtgtgatgatgttgatgatgatggtgatggggtgatgatgatgatgatggtgatggggtgaggatgatgatgatgatggtgatggggtgaggaagatgatgatggtgatggggtgaggaggatgatgatggtgatggggtgaggaggatgatgatgatggtgatgctgtcatgatgttgatgatggagatgaggtgaggaggatgatgatgatagtggtggggtgatgatgctgatgatgatgttgatggggtgatgatgttgatgatgatggtgatggggtgaggatgatgatgatggtgatggggtgatgatgttgatgatgatggtgatggggtgaggatgatgatgatggtgatggggtgatggtgttgatgatgatggtgatggggtgaggatgatgatgatggtgatggggtgaggatgatgatgatgatgatggtgatgggatgaggatgatgatggtgatggggtgaggatgatgataatggtgatggggtaaggaggatgatgatgatggtgatggggtgatgacgatgatggtgaaggggtgaggaggatgatgatgacggtggtggggtgatgatgatgatggtgatggggtgatgatgttgatggtgatggggtgatgatgttgatgatgatggagatggggtgaggaggatgatgatgatggtgatggggtgatgatgatgatggtgatggggtgaggaggatgatgatgacggtgatggggtgataatgttgatgatgatggtgatggggtgatgatgatgttgatgatgttggtgatggggtgatgatgatgatggtgatggggtgatgatgttaatgatgatggcaatggggtgaggatgatgacgatgatggtgatggggtgatgacgatgatggtgatgggatgatgatgttgatgatgatgatggggtgaggatgatgatgataatggcgatggggtgatgatgaagatgatgatggtgatggggtgaggatgatgatgatgatggcgatggggtgatgatgatgatggtgatggggtgaggatgatgatgatggtgatggggtaaggaggatgatgatgatggtcatggtgtgatgatgttgatgatgatggtgatgggatgaggaggaggatgatgatggtgatggtgtgatgatgttgatgatgatggtgatggggtgaggaggatgatgatggtgatgggatgaggaggaggatgatgatggtgatggtgtgatgatgttgatgatgatggtgatggggtgaggaggatgatgatggtgatgggatgaggaggaggatgatgatggtgatggtgtgatgatgttgatgatgatggtgatggggtgaggaggatgatgttgatgatgttggtgatggggtgaggaggatgatgatgatggtggtggggtgatgatgttgatgatgatgttgatggggtgaggatgatgatgatgatggtggtgggatgatgatgttgatgatgatggtgatgggataaggatgatgatgaagttgatgatgatggtaatgggataaggatgatgatgaagttgatgatgatttatagtgtccttacataatgcttgcactttcctaaaaactattctgatattaagacctttaatcataacaaccaccccaggaaatagatagtgctattatttttattttagaaagaaggaatccaggacatgaagggtataactaactctctcaaagtcacagag

SEQ ID NO: 5842 - DNA, 949 bp, Artificial sequence
  DNA replication origin
ttgggatgggggttgcaggaagacgatgcgggaccccatcccccaggagtgggtcgaagtcacgggtgtgtccagaagcagccctggtacagggagccaggcgacgctggggcaggaaaggggctggagaggtccacgagtgagggaagcggggctttgaggggcttccagagccgggagcaccgagtgcgccccaaggcccgggcagggcagggcgcgggaggcggcagggcgcctcaagggaggggcggcgcgctcgcagcagccacctttggcctcttggcgcagaatctgcgagaccgccgcggggcccggccttgcctcatcccccgggactgctccccttcccacagcgcttctcccggcaccccaagccctcccgcccggccacggaaccctgcgcccgacgcttgctcagcagccgggttcgcctggaagtgacctcgcctccgccaggcggacccggggcccttgtccttggtgctgacccagctgtctcattctcgccggccctttccagagcgcggggccttgccgcaccactaaggaacgtctggccgcgccgtgtgaggccgggaagaggccttggtgtaaggctgtccacccctgtcgttgaacctagggggaaactgaggcccagaaagtctggattcgaatccagtgggtcaattgactcccagcccagaacgcccgaaagaacagttcaaaagcccaggttggcagaggcgctgctagcggcaggaatcgcaacaggggactctgcataaaaggagcattcgctgtgacctacttcggaggggatggggggggcgggctcttctacacgtcctggctgggctggctggtgctgcgaccgccaaggaggctgcactccgctgaataaagcgcatccagccttgtctcctccacctgacctttcacaatctctattacctgtgggttcccaggt

SEQ ID NO: 5843 - DNA, 1311 bp, Artificial sequence
  DNA replication origin
gcgcccctcacctcccggacggggcggctggccgggtggggggctgacccccgccacctccctcccagacggggcggctggccgggcagggggctgacccccccacctccctcccggacggggcggctggcctggcgggggctgacccccccacctccctcccggacggggcggctggcggggcgggaggctgagccccccgcctccctcccagacggggcggctggccgggcggggggctgaccccccaccttcctcccggacggggtggctggcctggcgggggctgacccccacctccctcccggacggggtggctgctgggcggagacgcttctcacttcccagacagggtggctgccgggcggagggtctcctcacttctcagacggggcggccgggcagagacgctcctcacctcccggatggggtcgggccgggcagaggcgctcctcacatcccagatggggcggcggggcagaggcgctccccacatctcagacgatgggcggccgggcagagacgctcctcacttcctagatgggatggcggccgggaagaggcgctcctcactttccagactggacagccaggcagaggggctcctcacgtcccagacgatgggcagccaggcagagacgctcctcacttcccagacggggtggcggccaggcagaggctgcaatctcggcactttgggaggccaaggcaggcggctgggaggtggaggttgtagccagccgagatcacgccactgcactccagcctgggcaccattgagcactgagtgaaccagactccgtctgcaatcctggcacctcgggaggccgaggctggcggatcactcgcggttaggagctggagaccagcccagccaacacagcgaaaccccgtctccaccaaaaaaatatgaaaaccagtcagtcgtggtggcgcgcgcctgcaatcgcaggcactcggcaggctgaggcaggagaatcaggcagggaggttgcagtgagccgagatggcagcagtacagtccagctttggctcggcatcagagggagactgtggaaagagagggagagggaggccgtggaaagagagggagagggagacaatggggagagggagagggacagggacagggacagggacagtagtcaaccttttaaagagattatatattgcaggccaggcacagtagctcacgcctgtaatcccagcactttgggagtccgagtcaggggtatcatgaggtcaagagactgagaccatcctggccaacacggtgaaaccccatctctactaaaaatacaaaaaattatc

SEQ ID NO: 5844 - DNA, 966 bp, Artificial sequence
  DNA replication origin
ggtcagcccccgccaggccagccgccccgtccgggagggaggtgggggggtcagccccctgcccggccagccgccccgtctgggagggaggtggcgggggtcagccccccacccggccagccgccccgtccgggaggtgaggggcgcctctgcccagccgcccctactgggaagtgaggagcccctctgcccggccagccgccccatccgggagggaggtggagggggggtcagccccccgcccggccagccgccccgtccgggaggtgaggggcacctctgcccggccgcctctactgggaagtgaggagcccctctgcccggccagccaccccgtccgggagggaggtgggggaatcagccccccgcccagccagccgccccgtccgggagggaggtgggggggtcagcccccctcctggccagccaccccgtccaggaggtgaggggcacctctgcccggccgcccctactgggaagtgaggagcccctctgcccggccaccaccccgtctgggaggtgtacccaacaactcattgagaacgggccatgatgacaatggcagttttgtggaatagaaaggggggaaaggtggggagaggattgagaaatcggatggttgccatgtctgtgtagaaaggggtagacatgggagacttttcgttttgctctgtactaagaaaaattcttatcctgttgatctgtgaccttacccccaaccctgtgctctctgaaacatgtgctgtgtccactcagggttaaatggattaagggcggggcaagatgtgctttgttaaacagatgcttgaaggcagcatgctcgttaagagtcatcaccactccctaatctcaagtacccagggacacaaacactgcggaaggccgcagggccctctgcctaggaaaaccagagacctttgttcacttgtttatctgctgaccttccctccactattgtcctatgac

SEQ ID NO: 5845 - DNA, 1813 bp, Artificial sequence
  DNA replication origin
gtaggcagcggtgccggtcccgcggacgagcccgtaaccggagcccgaggacaaagtagttccccgagggtgtcagagcaggcggggagggaggcggcacgggcggaggcgcacgccgggcgcggtgctgcggctcagctgataattgaaggaacccggagccgccgccgccgcgccgctggggggggtggggggagctagtggaagttactgccgcgccaccgagtccggaccggagactttggggcctaactaggtaattggggcgcagctctgggcggcgggggcaagccttgggggagggggccagctgaggggttgggggggcggggggaggagctggaacagaaagtcccaggaagcccggttgtgtcatcgccgcgattcggcccccgcttggcctgctcccggcgccggcggcggcggggccgcggaaggaccgggccgggggtggacgggagagacgctcgagggcggccgcggccggagggaccggggcctggcgggaggtaggggtcgctgggtccctcctccggcttcccgcaatgaggagggcccttcacagaaccggggtaaggcttgcgggtgttggggagctcggcggggaccaaggggggccggaagtgggctttggagcttggagggtgtctgggaagagagaaagtggggggccggaagtgcaggtggggggtgtgaagacggcaagggttccccggaaatgggacgaggggcccggaaatcgggaaaggggaggctccggggccgtggacggcccggaaatggaaactaggaagcagctccagtgacaacagttgtgggaagcgagggtcagagaagggagaggccagagagactttagaccgcagtaaggggtttcctgcccagggggacggcgagggacggttgagggagggcgagcccggagacggggtctgcgcggggcagttttttaagccgtgggaagttgaggctgagggaggatgatgacgaggggggcatgcagggaggcctaaagaagccgagaaacttgactgagaggaatagagtatccttttaaatagatcagaatggaaattggtggtaggtgggtttaactaggacttgggggagggaggtgggccaattgtcaccccaatcgtattagcattcagagcgagtcaggcgattaatttatttatatgtggattacataaaacctattatttacaacgtttgtccatcagttcagcccctctccttccttctccatagtgagtgggtttctagtacaggaacaagttagaggggagttcgaataacgaaggtagtaaaacctcaaatcctgtcttcctcggcgtctctcccttcctcagaataagaaatccttcatttcctagacggaaaaatgcggaaaaacataaaaacacatgtaaatcggggggaaatcacactttgaactcctggtgggggacaggagggaattggttaccttacgtggtgaggagataacggaaggggcagcttccaaacccttaagacaaatgttgtgtttttttgataatgctgttttactttgggggaggtttagcctaagcatcgagtctggtggtgggcatagtttaattgcttctttagttaattgggggagggaatgtgtttgtgtgtaaaggttgggccggtgcggggggaggcgggtacggttaatagcgcagtgaatccgttctaagtggacgtctaactgctctcctgctgtctcctttcctagtcgcggtcctcgatcttgcctgggctgccagatcacccgatctccgggctttactccgttttgtaggcc

SEQ ID NO: 5846 - DNA, 1049 bp, Artificial sequence
  DNA replication origin
caggcggagcttggggacgcgcgccttgctgctcaagctggccggggccccgcgagcgtcatcctgggcacccccgtccggctggagaagcgcgttctgcccggagcccagcctcgctgcccggctgctctctaggcccgtttgggactcgaactggacagtgatgaggcgcagagcgggggacccggggctgcgcctagggacttcgcggggtgcggatgcctctctgcacaggctgtggtgctgcagccggcccagcttccccggtgggctgctggcttccgaacgcgccgagggatgcggggtgcccgaagtggggatgtggtctcggggtgccaagggagcgggagcaccgagcgcgggtgggggcgggcgctcgaagggtggggcgcgaggccggaccccgcgggcacgatcccgcacccagggcgcgcagaggctgggcccccttagcgcttccgattgaggctcctcaagagaggctgaaatggggtgagagaccggggacggccatttcggggctaaacgctgccaaggccatgacgatgttttaggagctgaactctgctttccaattaagccattttctttctgaggaaaagttgattcgggctcattaacaaggatgactgagggccattattggggcttagagagattctcctttgccttgtctggcttctttgtttgcatgtgcgtgcgtgtgcggctgtgtgtgtgtgtgtgagagagagagagagagagagagagagagagagagagaagagaggggagagaggcagtgttgggggtgggaggaggtaaaacaggcttgggatcctgcaggcctgggttccgatttggtttccacagcctgctagtttaacctttctaagcttcattgctcccatttgatggctcagattcttcctctgtaaaatgcggacattcatgccaattggactggaggagaagccaccaagcacagtccctgacccagagcgaagcatgtatgtgttgagtcctcctaattcggtgtgaatttttcggttctgtttttctcctatgct

SEQ ID NO: 5847 - DNA, 973 bp, Artificial sequence
  DNA replication origin
gaaagaaaaaaaaaactagatatgacagtgacatcaacattgaaaataaaattcaggatgagtaggaatccgggggataaaaaggtttggggtaggaaggagttccaggtagggggagcgggctcacaggtggggggtttcaaggactgagtaggaggcaacaacctgtccgcaagaggagtgggccttgctggcccagcccaggaagttgggttttatcttgaaggtaattgaaagccattaagggaaacaagcctgtgggacctgcatttctaaaagcctcttgtgtagctcagtgggagtggcctggagggggttcctggaaggagccagccagtgaggggctaaggcagtaactggtgggagcaggtgagggccccagcaggagggaagacgtgggagcatcggagtggacctgtggttggggggacacgcacgtgggtgggtgggggcaggaggggagacatgggagcatcggagtggaccagtggtcagggggatgcacacgtgggtgggtggggagtcacgaaggtggtgaggagatgaataaccaatacggttattaataacttgttacctccagattaggaacagattttgaggcatagagatcatttgaatcaggttcctccttccctggattggggctgggtggagtttcctctcagtgttctggaacgttctccaaagtgcctcagggctgcccaaaaataaccgaaaggacacccaggaccccctcctggacagcgaagacatctctccaaaggcctcagcagagcccccgtgttttggggagcccgtcgtccccaaccctctcctggtaccacagaacagcacttacttcgctaattgtctcctggtagaaacggcacagctaacgtgaaggaacaaggcatcctaatccactgtgtggtgtggcagaatccatgacaagccacacaggtgtagggctgccgcgctgtcacacagggtc

SEQ ID NO: 5848 - DNA, 955 bp, Artificial sequence
  DNA replication origin
gctgggccgggcgttcccttctctgcctccgcgtcgtcgctgtccccgtcctcggccgccgccgcttcgggctgctcgttcggtccccgcggagtggctcggacgctcggcccctccgttgtcttccgcccgctcctgctcccggcgacgggctcccgcggcggcggcggctgcgcgggcggacggctgcccaggggctcccgcggctgccgccgcgctgctgcgctcgcttgggctgcggctgctgctgtggggcccggcgccgccttagtcttcgcctgtgcccccgccccggcgcctgaaggctctgtgtctcccaggccgcgccgctccccgaacccctcgccccgcttgcggcccgagcccggctttgacgtgcgcactgcgcagccgccgaggacgcgacgtcgggcggtgccgcaacgcccccttccgcctcgggcgcccccgagcggccggcggactcagggcgccgcaagtaggcgcgaggcccgagcgggaggggccgcagagaaaagcagaagccaagccccgcagttcctcttcctccgccgcagcttccaaggcggggctcagccctttctcctccgcctgagcgctcttactgcgggaatcgcacgcccactttcaacgaccacttcctcaactcttcaagcttaattctgcgagaggccgggatcccactttgtgcagaccgattcttactttcttggagcagatcgcttcattttagcatccagggggacacagcatccagggggacaagtgccagaacgttccagattaatgggaatattcctatttaaatcagcaacctggatttaagtcctgctccaccatttgctatctatgggctgtttcacgtccctgtgcctggatttcctcacacattaaaaaaaaaagtgtgtaataatatagtggtaccagccacgggcttctgaggatgaacgggaca

SEQ ID NO: 5849 - DNA, 1292 bp, Artificial sequence
  DNA replication origin
gggaacgcccggcccagccccgtgagtgacccccggccggccctgctcgtggtgcggacgcctgcccggcttccgcctgccccgctgggccctcaccggccccggggctgcctccattttcctgggtggcggcggccccggcccagcttgtccccggagcccccgggagcagccgggcccagcctgccctctccgcccggctcggctccggtccctcgctgagacgctccctttgccttcgccggcgtggggcgcccgggggcctgcagtccaggcgctcctgcctctccccccgtggttctctggcggggctggcggcgcgtggtggtccgggccggagtcgggcgggcggggaagtgcgggccgggtcaactgtcaccggctgcacccgggcttcagcgcctcgctcccgcccctggtaaacttcctgttgtcgggaggcagataccagctttgtgaccaattcaggaaaatgcctaactgatttctggttaggaattgggcggtcggagcgttctggagttcaatggaaccaccccaagcgcagactgcgtgcaggcgccgtagtcggcccgcaccggagggattcaaaggtgaagcgggccccggtcccctcccccgaggagcttaggctctggtgtgagagataagacgagaacacaaataactgcgataccgggaaggaggtgataagtcctgtgaaagaacgacggagtgctagaacggcacccggaaaaaccgaaccgatcacttctgcctcgcagaaacctggaaggcttcctgggcgggggatgctgagcagagtcttgaaggcctgatgggatttaggagaggaggattgcagaagaggtgtgtggaaggggtagcaaaagcgagaagacaaagcctagaaatcatggataattccgtttgttggcatggtgcagggggcggggggtattgggctaaagaggtattttggggccagatccttgaatgctgtagaggagctatttgagcagcattctaagagaaacttagagctcatttctcagtgactcatgagcccggaaatgtaggctaggggatattaaaggcgctcttgtgaaaggagagaggaggaggcccagtcaggagttgacattctgtgccttgaatgtaatgcagtttcagatcgattttgacagcttcccagataatcaagtaaatccatgcccaggctaagcaaagtacctttgcagaaagcttcattagatatcaggctcttaagaggtaatggaaaggtgtctataaaataagctcatctgcacaca

SEQ ID NO: 5850 - DNA, 1416 bp, Artificial sequence
  DNA replication origin
ggggccctctgcagggacgcggcccagtgaaagccgcagacctgggagcccgggcccgccgcggcgctgggctgagccctgggtggggccaggggtgaaaggcgcgctaagccggcttccgacctggccacgccctagctccgggtgccggacgcgtggacaggccgcggggacgcaggcgaagcccacagcccaggctccacccgggtggccatcggcgtggcctcggtgagctccctgggatctggcatcccagcgacgccgccatacgcccgggcgcgcccgggagacgcccacctcggcccgggcacacctcggggctgcgcgccccgtacctccaggagcgcgcgcctggcccttctccgccccgcggctgaggtctcccgccccccacggcgcctcccggtgtggtcctcacggcagcctagtttggagtctcgggccccaccctagaccgccagacccccgatgggtggcgtggaccctgcagtttgagaagcctgctccgagcctggccctgggcccagcagggcggaacgttctggttctaacctgtcaggggacggtggcaaatcctctttcctcgtcggcggtcctgtgactgttgatcagagcagatgggattccgggacccttggcactgctcctcaggccccaacaatgtgctctggaggttctggaggaagccaggcatttggaagagggcgcagagggctggactaatgaaaagaaatgtcagctgggcgcggtggctcacgtcggtaatcctagcgctttgggaggccgaggggggcggatcatctgaggtagggagtcgagaccagcctggccaacgtggagaaaccccatctctactaaaaatacaaaattaggcgggtgtggtgatgtacgcctgtaatcccagctactcgggaggctgaggcaggagtgaacccaggaggcggatgttgtggtgagctgagatcgcgccattgcactccagcctgggcaacaagagcaaaactctgtctcacaaaaagaaaagaaaagagaaggggaggggaggggagagagaaaggaagaaaaagaggggaagagaaagaaaagagatgtcgcagccacctctctgctacctactgctgtttggtcttggcttaatctctctgtttcttcctctgcaaaatcagaatagagtaacctgtgcttctgagtggcctgaggactgagtgaattatccctcgggaagcccttggtaatcactcaccaagcattaatgaggattgttggctgttaatgaagaactcgaatgaatggggaatctgctgtcatgggtgctttaggaagatgtagttgggtttctcagatgagtaaggacaaggttagcaatgatttgcctatcagttactagaacacttaaatgaaatctgtacgtattct

SEQ ID NO: 5851 - DNA, 1598 bp, Artificial sequence
  DNA replication origin
ccccgggctgtccctacccaagggagactcccagcggcccggagcctcagactctccgggagccaggcggcggcgccccagggctggggccttggagcctgggaaagcaaccgggggtctctggggagtcctgagcgcaggcgcccgcccacggccaagaccgtggcccagccctcctcagacctcccaagggggcctgcctgtccctgcggcctgagagcctgtccctgctgccccgacgtccagtccctactgccccgaggtcctgtccctgcggccctgcccttagagcctctccctgctgccccagagcctgtccctgctgtgtcgaaggcctgtgcaggactcgaggccgtctcccactcagagggcctgtccttgctgccccaagggactgtccctgacgcagggcctaggcctggaaagtggacactcaagagtccccaggtgatgtttggggtccgtctgccagaaagctgttctgctccgatggcggcggcagcctctgcctcccccactgagtgcaggactcagctcttcctggcttggggtgcagtgcagaaggggaccctccttgagccctggcaagcacgggaggcgcttctgcaagaggcagctgctggctgagcctggtgcccagggaggtggtgacgaggacgcactccttccagttcactgggcgactctaagggacaccaatacagggattggtgggccggccccccgagagagtcaagggaagaagcaatacacatggtgtcgccctgctcagtccaccccagaccaccaccagccaggcgtggagacaggaccagaaggacaactgctgggctctgggggtgctgagcaggggtgaaagcgtcctagaggcttggtgccgacctggacacggcccggcccaggcgtggactccccacttgggagcgtttgtgaagtgaggagaaccccatgccactgccacatggcttctgtcacctgcatccagtcacagttcctgaggaaagggtccccgagatccccgttggccacactaggtgcgagggaggaagcctgggccagtggctgtccctatggacaccgcgggtggtttctcgttgacatacatgggaacgtcgctgaggccaggaagacggcaaatcctttattccttgtataagaggtgggcctttgacccagacctgcagttgtgaaggacaaagtgttaaaaactgtctcagtgaaagatcctgtcagtttaaatattactacattttgaaaatgtgagagacgaaatgtcaagttcatgcaggcattgaagccaagtgcaatggcaggacatgtgcttcccctctccccagcctgctttcctcagctctgtgcaggccggagagagtaagagctacctcctaggtcttctgtgagcactaaataagccagggtttgtgaggacctcggagagtgcctggcttaacatatgcttgcttggaaaaaccactgggtgtcacgtgtgtagcatgaccttcaggacactgcttgccttgactcatcacccctgtttgatggatgaaagcacagccactcactggcatttactgtgctagaaacatcctggtgccttc

SEQ ID NO: 5852 - DNA, 1219 bp, Artificial sequence
  DNA replication origin
agcgagcggcagaaggaactccgacccgccccaggtgcggagcggcgcgcccggcaggggtcactgcgggccccgcgggcgggaagggggcgcaggcgcggcgggcgccggggccctcccgcggggacggggcggggagggctgggggtggggttagagagagggacgcgagcgggatccaaacttccggtgcctgcagagctcggagcggcggaggcagagaccgaggctgcaccggcagaggctgcggggcggacgcgcgggccggcgcagccatggtgaagattagcttccagcccgccgtggctggcatcaagggcgacaaggctgacaaggcgtcggcgtcggcccctgcgccggcctcggccaccgagatcctgctgacgccggctagggtgagagggtctggggctcaggcggtggggcgggggacccaggctcacgacccaggcgcgccccgtcggccctggggactgcccgaggcgcgtcagggccccagagcccggggtggagcagggttgggaagtctcgaatggttgcttatcccagaatgaggagggggcttaagtcccgtactaaagcggcagccaaaagctgaagtccgaagagtgggaggcgtctggttctggtcttcaggtggagaagtgctcgaggtctcttccaaaagtgggggccccctcgccgccttatagggggagggggctggtccgaagaagttcgaggaatgttggtgggggggtacgcgtctggttccaatcaactgggaaagccgcgagtcgagtccccaggtgggggatgggaggagggttagacgtagtttttccaaagtagggcggtgggacctgattggctggggaattgggggtgggggggtctggtaccaacgaagagggtggggccgttgatttcctccgaaattgggggctgcgagggacagaggatgtgctgctggcctgcaccggaattgacagaccagaaagtgatgaaatggaaatcagccagaaccgacggcgctgcggcctctggacgtcgggggtccgaggccgggtgcccccttcccaccccacgccctgccgtctgggcctccctgctcccctctcttttctccattcccagcctctcgctgggctgtcccccgaccccacggggagggctcccaactgccccagtgcccttgcatcctgggtccccgggctctgtgcgcgttcccccacccctg

SEQ ID NO: 5853 - DNA, 1109 bp, Artificial sequence
  DNA replication origin
tttgaaggtggggaagaggaatgtcagagagtgggcaaaatacaacaggaaaggtccaaattcaccctctgagggcccggggcacgggggcagcctgctctcctcctggggccctgttccctgtggggactggaagagaggctttgagtctagggcctggggcagccaggactgacgggggtgcagtcctagaagggtcggcagtcacggtggcccaccatggcatctccgtatccttgctgcatgctgcacccactccagctgccagagcacggaggcagagacgtgggagccgatgaaggtcgcacgccagcctcccacctgtgagacaaagggccctgtcactggaagccacgtccagcctggccccgcaggagccagggctctgcgcctaacggaggactgatgggaaagggaaggctggcagcagtgaggtaatggggtggggggtgggggtgggaggcagggggaggtggggaggacagggaggggagggagggaaggggagggactttagccagcacgcttgtcccacactgagcgagtgcccacagtgttcaagcagtcagtatgccagcagtttttcattgattacttttgttcgtgtctcgcgttatctctggggtgagtatgaatttcatagccacaaactcaggtgtccaaagtatctttattggtatctttatttttctataatagtgtgttttgtgtaataatctagttttcaaaccttcccttagtctagtggcagaatgtgtaatcttgatattttctaggtaaactcggtcatcacttcagtttgcccttttcaaagatattaatttttgccctcccttccccaccaggggccaatcatctgaatcacgttcctgtattcaggatttgcccctccaaaacagttttgatgggagacaccagccacctactattatgcagccatgcaccacataacgacgtttcaggcaacaatgactgcacataccacagtggtcccgtaaaattacaatggagctgaaaaattcctattgcctagtgacgtcacagccattgtaaggtcagagtgcaacacatcactcatgtgtttgtgttgatgctgctgtaaacaaacc

SEQ ID NO: 5854 - DNA, 1529 bp, Artificial sequence
  DNA replication origin
aagtccaagcgcttcaccaagaagtcgcggcgctcggagcccaaggccgaggacccgcgcgaggcgccaggggctcctcctgggacccccacctccgcggcagaggacacagcgtctgcacgcggggcaccgcagcacccgcctgagcggggcgcgcagctgctcctggtgttgtgccgcgcgtctgcgctcctcacgcagctgctgcggctgcagctgctcctgcaacagcagcacgcccgggaccgacgtccgcccgccgcgctcgtggggatcgtggtgcagccgcagcaggaggaggaggccgaggcgcgccgccgcatggaggccctgctcagccgagtcctcgcgccgcacagcccagccgtggaggtgcacacggccgtgttctgccccggccgccccgagggcaccctggacttccaagcgcgccgccagcaagtgcacagggtctccctgatggatcgggagacgcagaccgatggtgaggggtcggcgcggggaggggggagccccggggcggagaacgctcaaacacgcagccctggaccccgaccctgccgccccgcggggtagaggacaaagccccggagtcacggcctctctcctggcgcctccaggagttttgggtactgttttgggtggtaaggaactagagttcctcccggtgtgctcactggggcaatctcagcgtcagaggtgttcgaattaattcggagggctacgacccccactcactggccccacatgcaacttggggcatcggttcccatgacttggggtcacgcttttgtaaggtattgatttgggactttgtagaaacggggccccactccctcctctccacatcctcctctcccttgcttgcttctttagtcttctccagggaagaataataacactaaaagcacgccttttgtgagtcaggcgctgttctaagggcttttcacctggatcctcatggcaaccctctcaggtggaactccgctagactagctggccgacttcaggattctccttcgcaactcttgagaccctttctgttatggagaccaggcctgtggcccacgggattaatttgtcagtctaaggtccctgggcagtgagatcttgagggagcgccaagtcccgcaacctacctgccagctccaccctgccaggggcagcaggagggactgaggaagtgctctgtgtggcagagtccaaaggtcaggtacccaaggtctgccactctccagctggtgaccagagcaggcatcctctctatggaccagtgtccctcctgtgtgacgtgaaggtgaagggctggttgatgtccagggtgccatccagctcagagaagtcagcttcaggacaaatggtgacacacttattctaggtgcccaggaaaccagaaccatcagagaccttctgggaggaaattttcaccccatcaagaccttattctgactatctaatttccaattcccttcccctacctagtctactgcattttcacatgactggcatccctagttaggaaactccct

SEQ ID NO: 5855 - DNA, 2009 bp, Artificial sequence
  DNA replication origin
cccagccgccctcgccgccctctgcgccccgcgcgccgccccgggccccgcgccctctgccgccgcgccgcccggcttggccgcgcctggctccggcgggaacaccgcccgtgcgaagtcccgcagcagcgcgcggctctgttcgcgctcccacagctcgcccaccagcagcacctgcccgcggccccccgccgcttccaccaacgcctggaagggcggctcggcagggcgcgcaagccgggccgccagcgcctccagctcgcgctccatgctggccgccgcccgccctctgcggccgccgcggcccgggcgcacccgctgcccgcctctcggggcggtggcgccccggcacagaggacacgcccccgagggccgagcccagccggacccccgggcccccgggcggggcctctgtgtgcacgcgcccctgggcgcagcccgcatcgcgggcccgggtgggaggaagagggctttctcctcagccctccaagggtggctcctcccgaagtccctgcgcagacgcggggaaacagagagtcattcattcattcatttgttcgtccatcccacacatacttactgcgcacctactatgtgcaggcgctgggcagccgaggttgggaagacagacaattatcccctcactagataagatcgtttggagacctggagcagagtcctgcacagtttggggtcttgccgaggtggggtgggaggtaggggggtagggggcggagggcgcagaagtgggtaggaaggtgagataaaagagaacacgcaggggttatttctgccacccagctttccttttgggcttcaacatttagcaaaaactgaccgagggtccattatttccacaaatacttattgtaccaccccaggcgctggggttgaaacccagactgtttccgtaaagcagaaagtctagggggccagatgcaggacacggatggtgctctgatctgcgtggggagcaaggggccagccaggtcagaagcaggaatgcatttcccttccttctaaggatctaggtcagccttgtccaatagaacattctgtgatgatggaaaacttttttattgtctgcaccatatgtgactattattgagtacctgaaatctggcgagtgcaactgaagaactgagtattacatttcacgtaatttgtaatgaaatgtaaaattaaagcagaaagtgacaagatgataatgtacttaaagggctggcacctttctctgaatagtaccctaaagacgccgcagaagcaagaggggagttggtaaggactctgagaaaccaatgtaaaaccagggaaggcctgtcgcctcctcccctcagtgccatagaagggggataggctgagtgaacgctatacacttgtgctcttttctttgcttgcattggcctgagtagaccatttctcaaccccatctccccagcactgctgggaggcagaaaacagctgtgctagccagggatggcatatcaggctggggctagcagcacagaaaaaccagacccggcagcctcttcttcccacttcatgggtcaggaattccaaccacgagacctgcctcatgaaagaggattggccaggggagagtgcccagaagctccctgagtggggtgtctggtgtgtgtgagggtggcacatggggagtggctacattcacatttgatgccagaggcaagtcccatcacacccccattccttaagctcccaggtgggatatataggaagagcctaggttttagtctcttccaggtgtacctatcgccaaccaaagtagctgatatctagggaaacatgaattcactgggaaaaataattagacttctggggccgggcgctgtggcttgtgtctgtaatcccagcactttgggaggccaaggcaggtggatcacctgaggtcggggattggaggccagcctgaccaacatggagaaacccagtctctactaaaaatacaaaattagccaggcatggtggtgcatgcctgtagtcccagc

SEQ ID NO: 5856 - DNA, 1299 bp, Artificial sequence
  DNA replication origin
gcagagggcgcggggcccggggcggcgcgcggggcgcagagggcggcgagggcggctggggcggcgggggcggcggcggcggcggcgcgcgccatccgctcgccgctggtcttcgtgctgtgccgcgcgtcgtcgctggccgcccgggagccgcggcgccgcctgcgggagatgctgcgggacgtgcgcggccggcggcgggccggggcggcgctggtcggggtgctggtggccgaggccgggccagaggacgcggtggcgccggggctgcggctgctggaggcgctgttgcgcgccgtgttcggccgccaggcgggggggcccgtgcaggcggccgcctactgccccggcctcccggcctcctgcctggccgtccaggcggccgcctgcagggccctgcaagccgccggagccgggcaaccaggtgagactgcgcggggcccggctgggcgcgggcgggcggtggctcgggcacgtcccccaagttggacccctttggccattcccttattgagcaccgaggtaaactgaggctcagagcagggaggtgcctagagccaggcctcgcagctagcggagagcgggccgtgcgtagcggatcgagtctgtcccggaagggtccggagtgcacgggagatgcctagggggcgtgggaaagctgaggggccgagtagaaggcagagggagtgggtagagagaagggatgaatcgggcaaggccgagatctaggagttacggggtgggtgggggtggggagagaagaggagtggggaaggaaatgggaaagccttgggatgggaaagtttcaagggggtggatgggtgctaaggagattggcggtgccagaagctaaattctagggcgctgcgcagccagagatgcgtcgggagctctaggaggggcggaggggcatctccagcgcggtggaggctcgtcctggaagccctgcctggttttaggaagagggcaaggaatgggtgctcgggacttgacgtgtggggaggtgagagggactaagagtacattttctattgatttctggccacccaccaaggctgtgcacccaactgctgtgtccctcagcctcccccaggtctgctgaggccaccttttccctccacattctcctgaaaggtggaagggatttaagggtcttttcccagcccccgtgactgctgccatcagcagaagggtcaggatctccttcctcctggaacacaaggctttacaggaactctccaatgttctaggatgaaaatatgcacattaagagtagctgcatctggctatcgcaaggac

SEQ ID NO: 5857 - DNA, 979 bp, Artificial sequence
  DNA replication origin
taaaagtgaaggtggaaacttgttttcctgagtggagcagagagtggaagatggagtggagaagagtggaggagacagtgaaggagggagtggaggatggagtggaggagagagtggaggatggagtggaggagagtggaggatggagtaaaggagggagtggaggatggaatggaagatggagtggaggagagagtgaaggagggagtagaggagacagtggagaatggagtggaggaggaagtgaaggatggagtggaagatggaatggaggatggagtggaggagggagtggaggatggaggagggagtgcagcagggagtagagacagtggagtatggagtggaggagagagtggaggagggagtggaggatggagtggaggagggagtggaggagacagtggaggagggagtggaggagggagtggaggagacagtggaggagggagtggaggatggggtggaggatggaatggaggatggagtggaggagggagtggaggagggagtggaggatggagtggaggagggagtggaggatggagtggaggagagagtggaggatggagtggaggagacagtggaggatggagtggaggatggagtggaggagggagtggaggatggggttcaggatggaggatggagtggaggagggagtggaggattgagtggaggagacagtagaggatggagtggagcaggagtggaggagggagtggaggatggagtggaggagggagtggagaggacgacggagtggaggaaacagtggaggatgtagtggaggatggagtggaggaaggagtggaggaggacgtggaggatggagtggaggagagatggaggatggagtggagaagagagtggtggacggagtagagagtggaggatggagtggagcctggagtggttttgaactcaacgaaagaggagtttgctcctaagcaaaccgaaggggcccagccaaatgctg

SEQ ID NO: 5858 - DNA, 1009 bp, Artificial sequence
  DNA replication origin
gggctgcccagcctgcacctggtcaggctctgctccatgaaaaggcagccattcagggccagcttggacggcagccgggtgacgagagacagggagccctgtgctccggagaggaagcaggcctccgtgtggcctcagcgtggggctgagctgccagctcaggaggggaggcgcccgagagggaagactaagctagtgtttggggctgaggggctgaaaggaggctgtgtgtacccaggctggccgcccggtgggcgggatgtgagtcatggtggcctgggggagggtgctgcctgggcccagctgtccagggcgaggggcacaatgcccaccgcgggtgaatatgtggcagtatgtgctgggggtggggctgaggctctgcacatctggccaagccgccccaggctccctggggtgggcacaccccattgccctctgaatatggctgcccctcctccctgcccaggtctccaggctgccatgctggcgatgtggtcccgtagttgctcagccagtgggcatcagccccgcccttctgcgtgctgcccaccaggaaaacggaaaggccggtccctgctcttagtggtgccccgtgtggtgggacaggtggaggagggacagacagaggaggctcgtgcaggggaacgccagccaaggagggagcgcctgctccaagggagggggcatttgaggtgggttttgaaagatgagcaggaactcactggattctaaaaggcgggtggagagagcacatttgagcagaaggaaggctgggatctgagtgaacggagaccagggttgctggattgaggttgggggcagatgcgggtggtgttaagggtttgtggacagtgcccagagggccctgaaggtgatgggaggcacagacttgagaacttgggcaaagatcacaagggctgctcacggatgtaacagggccctgcctggtcctcagccccttcccaagggcctaccaggcagagtttcactggtaacagatgagctggct

SEQ ID NO: 5859 - DNA, 856 bp, Artificial sequence
  DNA replication origin
atcccgggagtcccggcgcccgtctgtggccacggaggagggggagccccgggcccacgcccccgcccaggcccccgacggcccccagccccactcaccacagcgacatggcggcccgggccggagcggcggaggggcgagcggctcgcagctctgggcgccacggctcgggccggcgggacggcgggcgggtggggacggagaccgggccgcgcccccgccgcgactttcctcttcccggccgcgggaggaggggccggcaggggcggtggcccaggtgccttaaccccttcggcgcccagggcccgccccgccgccgcctggcggggaccaccccatttctccgagacggcccctaggctccccaagcgcgcctagtagacagtgcatggccgaggcggggcttcggaacccacgggggtcacctccaatcccggggacgcctgtccctggcggagcctcccggggcggggggagggcggtcgccggtccctcctgtacttgtgcgaaacctgaacacccggtcccctccaagaccctggggcaccccaaggcccagccatttccctctggccccattcggacttgtctttggggccagaggcagacagggtgtccttttctccctctgctaccttctgcccctgcacctttcccctgaccagacggaccccttgcccagctgttgggctacctagggccaggagcaaagccagccactagggaaagaggccgtatgagactgggctccatgtcaggactcgcccaggcctgtggctctggaagctttttttgtgcccccaccatgtccctctcttcacctctggggttcctcccacctctgagggctccccac

SEQ ID NO: 5860 - DNA, 1787 bp, Artificial sequence
  DNA replication origin
tcccgggctttccctacgaatggagcggacccggcaggtggagcgcccgcagcccagggcctcgccgccttcccggtgcaccccccgacctcccccgtcccggcctcggtgggcggcttccctggaacccctagggctggcagggccggatccggagccctccgtttcctccccggagagctggaccttgggtcacaccccccagcctgcacctaaggtgcccctgtcttcctccaaccacatgccccagcaacctggggaccctatggggaaaatgtcgctctatggggctcagcctgcattcaccctggggcctggacctgcaaccggaccagccctcagggcaacccaggcgtctccacgggctgcctgtctctcctggcaccctgctcctcccccttggaggtcagcgccatctctctgctaggctggccctggaaggccactctgctgtccccagagctctcagcccccaggtctccactggggagggtggggcaggtgtcctggcagcccccggagggtgagatgaagagaggaggtccttcaggacaggggctcaggccccagggcttgggacgaccagcactcctggcagagagctctaatttctgcttccgaaatgggtgtggaccggggttggggtgggggggtctctgggcaagaagggtccctcaagggctggagctgcaaatgtgccccctcccagggagtagagctgtagcctcatgtcttctaatggggtgttatgagctggggatgttaaggtaggggtgaggggcagtgccatgctagaggtgctcactgcatccttgggcctccatcaaccatgagggctgctctttgttgggtgagacagactggagaagggggaggagggccagtcttcctcaggtcccaagctcgagccactctccaatgtgccccacatgtgatggagctcccgggcggcacagaggatcagagggtgccctctcaatgactctggctctgagtcacctaatgataccgatacctactgctgtgggtaggtacaccgcagggaaatgaaaggcattggggttccaggcgtggggaacagggcagaggtttccacctgaggccctcctgttaaggtgacagcattcccctaactgtgcacccgctgcctggtactttatatagcactccaatcctgtgttttagccccatttgggggaagaagaaatcgtggctcagagtggttgtaaaccactcattcagcttgtaagcgtcagggcctgattccacagtgctccttgaggagagggcagggtgggagaaagaaagggcagggtgggagaggaagcgggaccctaccctgacagcttagggactccgggactgagcctgtgcccaggtccacttgcccgtctgggaccacccagcctcccaaggggggcgccaggagagccctgggctcatcttttctctctcctctgtactgtccgctctcccccacaggaagaaaaccgtctaccggagtctgtgcctggccctggccctgctcgtggccgtgacggtgttccaacgcagtctcacccctggtcagtttctgcaggagcctccgccacccaccctggagccacagaaggcccagaagccaaatggacagctggtgaaccccaacaacttctggaagaacccgaaagatgtggctgcgcccacgcccatggcctctcaggggccccaggcctgggacgtgaccaccactaactgctcagccaatatcaacttgacccaccagccctggttccaggtcctggagc

SEQ ID NO: 5861 - DNA, 755 bp, Artificial sequence
  DNA replication origin
gggactcgactcctgacgcacgtgcccgggagcgcggcctgccacgtgggccgcgccgcgtgggtcctggaatctccagagggaccgggtgccttgggccgggaaatggcggtatcggccctagtcggagtcccggctgcgctcggatgtctccgccccggcctggcaagccgacacgtggtgggccccggaaggtggctctgccgcgtgccttttgcgctgtgtttcgggcacgtggtggcctaccaggtacccccacgtggccgcgccgcctctttaaggggcggggttgtctcgctgggaaaggcataagcttcatgagaaaatcaaggtagtcatttttttaagtgccttaatgatcttcaccgttaatttggattcagatgagggtggtagaataaagtaccgggatttgtagtattaaaacacggttgtgcttaactaaggtaacgggaggagaaatcatttcctcaggttgactttttaccttagggcaggttttctgttggtaaagcctgggaggaaaaatgtgggcggttgagagtagtccctcttgcattgccatcaggagtagtttctatgttagttgtggtgtttggcactatgagaaatggatctgaggacggagatgatggcgtatgaacactaatggcaaaatatgaatggcctgaaatgtcgaggtggaggtgtaatgatctatttgtgtccattttaggcaggtaaaaatcaaggtgaccccaagaaaatggctcctc

SEQ ID NO: 5862 - DNA, 1773 bp, Artificial sequence
  DNA replication origin
agcttcaccatgatggcggcggagtgtgaagcggacaagtggcgcagatgagtccagaagaagccaagcgacggcgatggcggccgcgggtgctgaagatcccggagcacgtacacccgaaggccagcgagagctcgagactgaggcgaaagactgagcctgcccagtaatcgcctgtggaaaggcgacgacggcgccctcgtgactccgcgccgaccaaccaaagctcgcggccgtccccatgagccaatcgcgagcctctaaccgtgaacggcgcggggcggggagtaggcgggccgaggcggccacgggagggggaggggctggcaacggcgccgtgggggcggggctcgctttgtgcaaggtccgcgctgattgggccgtgggcgcgcgggtcccggcctgcgtcgtgggactggcgtttttggcgccggctgtgaggggagcgcgggggtggtggaatcgggcggtctccggttcgccaatgtggctgggtccgtaggcttgggcagccttggagttcctcagagaccccgcgctcggtcccggcacgcactcacgccgcggctcctggtggccctggagcgaggagtccgccagcaccggaagttcagggaccgcggagttcccgttggcccttttggaggcacagcttatccctgcttgcccgcgagcatggggccggaggcaccccccggctgcaggcagtctcctgagagctgttaataaaggcagtcgcgggtctgtgcgaggttttctgtgagaaatgcacgaacctcccctaccccacagaacctcaagcgggagatatttctcgacatggggaacggcctcggagaagtaactttctggcctcacagggcagggagaggggcctgggagggccgaccgcagagccgggcctttgaccgcccacaggttccctggttattatttgggtcgaatgcgccaattaaggtggtggctgcgaagtcagtgtcaccagatggcccgggagcaggtcgagagccaccggcagggttccccggcggcagggcgaaggaggccgccagtgacttccacggttagctttgtgggtgggtctcactcgatgccgggcttagcaaaccagagcatttccctccgtccagggcctgccggggatccatcccatccataggtccagctatggatccatccatacctcattgttcctacagaaccaggatatctgcagctacggctgtacttgttaaaaatcacctcaggccgggcgcggtggctcagatccgcaatcccagcattttgggaggccgaggcgcatgaaccggggaggcggaggttgcagtgagccgagatcgcccactgcactccagcctgggcgacagagcgagactccgtctcagaaagaaaagcatttgttaaggccgggtgcgatggctcatgcctgtaatcccagtactttgggaggctgatgcaggaggatcgcttgagtccaggaacttgagaccggcctgggtaatataatgcgaccctgtctccacacaaaaaataattagcgggcatggtggcgctcgcctggagtcccagctactcgggaggctgaggtgagaggatcgcttgagcccaggaggcggaggttgcagtgagccgagatcgcgtcattgaactccagcctgaggaacaagagcgaaaccccatctcaaaaaaaaaaaaaagaaagaaaataaaattatttgttaaatgaatgaagtatttaggtagaagcagcagcagggagagccggcatggctc

SEQ ID NO: 5863 - DNA, 1805 bp, Artificial sequence
  DNA replication origin
tgtggggtcccggccctctccaggcttctggaaggccggtgagctggagacaagcatggtcagggagccccgggaaggctgagcaacggcaggaaagggacgggctcagcgcatttctgggaagtaaagtggcgggatcccgaggcagcaggagtcctggcacccaggaccacagtttgagaggcctggcgcaaaatgaaaatgcagggctcctgctcagcagtaactcagacgtcaagatggcgacagcagagcttccacccaagcccggagccccgccaggtgcaggccgcacacccgcgaacccgccctgctgcatctgcgagtggggcgcccagggaggcgaggggctctgggggctgcctggagaggcctgaccccttcctttcccggaggccgctcccgagctatgccaaacccgggctgccgcggcgctgccacctgctggccacctcgggcccctgccgcgtccctcggagagaaggaccttgtgtggagtgggcaagcggcttggtggcccggacctcaccttcacagaagagaagctagccggggagggagttcacatcggctacagcaccccagtgacggtggcagcacgttactgtcgctcttgaactgtcctgtgccttacatcagtaaggtagagatgatgaccccccactacaggtaaggaattaagaattggagttttctggccgggtgcggtggctcacgccagtaatcccagcactctgggaggctgaggagggtggatcacctgaggtcaggagttcgagaccagcctggctaacatggtgaaagcccgactctactaaaaacaaaacaaaaattagccaggcgtgatggcgggcacctgtaatcccagctactcaggaggctgaggcaggagaattgcttgaactcgggaggcagaggttgcagtgagccgagatctcactgcactccagcctgggtgacagagtgagactctgtcttaaaaaaaaaaaattggagttttctggctgccagaggcaacggagcggcctcccatgacccttctctgttctccatttctcccctgatcattctctgggtacccgtctcccccgccacaaaccccagtgctgactccctgggctggggtggggcaggtggcccaggatcacactgacattaccataactactaccttgcctgggcacaggggtgaggctgtaatccagggacagtctggggtactcctttgtgggagatggcttctgggaaagatgttttctagctccctctggactctaagatgtgtagagatgagattcattgcttgaaccacagcaagagacattctgccaccatgatgaaagctggcctgagatgacgctgacacagaagtggaaagaaagacaggaagatggctgcagggtgacacctgtgagctgctggatcaagccgggcctgcagggctgaactttgcagtgaatcccctggactgtttaagtcatgctgaccagccacttgtgatgaaaggtgtcataactgacactctgcccaaagcctcccaagttagacccaggaccgaagacttcagaggccacagtttatcccacggataatgtgctgcttggaagattaattactgtctgagaagaacagcaggggaacaggtggagaatagggcagggacttgccttgggttcagatgcagctccatacagaacagtgacacgggcagtttgtcttcacccctcccctacactggggtcctttgcccacttgcacctacctcccctagctccaacctttcccctgcctctgtgtcatcctct

SEQ ID NO: 5864 - DNA, 2027 bp, Artificial sequence
  DNA replication origin
ccgccatcacgcctggctaatttttgttttgtttttagtagagtcgggctttcaccatgttagccaggctggtctcgaactcctgacctcaggtgatccaccctcctcagcctcccagagtgctgggattactggcgtgagccaccgcacccggccagaaaactccaattcttaattccttacctgtagtggggggtcatcatctctaccttactgatgtaaggcacaggacagttcaagagcgacagtaacgtgctgccaccgtcactggggtgctgtagccgatgtgaactccctccccggctagcttctcttctgtgaaggtgaggtccgggccaccaagccgcttgcccactccacacaaggtccttctctccgagggacgcggcaggggcccgaggtggccagcaggtggcagcgccgcggcagcccgggtttggcatagctcgggagcggcctccgggaaaggaaggggtcaggcctctccaggcagcccccagagcccctcgcctccctgggcgccccactcgcagatgcagcagggcgggttcgcgggtgtgcggcctgcacctggcggggctccgggcttgggtggaagctctgctgtcgccatcttgacgtctgagttactgctgagcaggagccctgcattttcattttgcgccaggcctctcaaactgtggtcctgggtgccaggactcctgctgcctcgggatcccgccactttacttcccagaaatgcgctgagcccgtccctttcctgccgttgctcagccttcccggggctccctgaccatgcttgtctccagctcaccggccttccagaagcctggagagggccgggaccccacatggggaggacgaagaacccacgcaaggaaaacggggaccctacatgggcatggggcagccatggggaggagggggaccacgtggggataatggggccatacgtggagaggaggggaccctacagaaggcctgggttgggcagtgctgggctctcgtcggagggtcaggtggcgctggcggccggcaggaagccctgggtagcgggtggcgggcagcaggtcccgggctgcaggccccgtggagagcggaaggcgcgcggcgaggcccgggcgggaacccaaggctggaggccggccctaagagtgcttccctagcagccccggcgggaaaagaagagaacaaagtctaggagttccgggacttccccgcggtggcagaggagggggctgccattgtcaaggcggcacagaagcctcgggttcggggacctttgctggaggagctggggcagggtaggacgggggccgcaggggcctcgagagcgaacggggaaaggccgcggcgcctgcagagcacagtccatgcagtttgcccggggcgcgggcctctcgagtgtgctcaggaagccgtggctcctcggggcgtctgcaggcctcccagcatccgtcgtgcagacctgacgccacctgccacccgcagacgctgagacccggagcccctctgcccctgggctggccgcggaggctgcctctggggtgcggtttcccaggctgtgtcttttcagcgggtgcgcaggttcccgccctcccagtgtcccttcctgcggtctggacgtgggggcccgcggacccagcgtgggggcgctgtgggtgacagaaggtggtggagcagaggcggctgcagtgtggactcaaaagcacgtgggggtggggggtggggcaagagcaatcaggtggtctgcgcctgctctgcgacttcccagctgtgcgaccctgggaagttacctcacctctttgaggctcaggcttccctcatctgtaaaatggaagaataggatcgactttgcagggtatctgtggggattcttgatatacagaccatatgaaagaccttccgtaagagagggatgcttttctgcctagattttatagcctctatccttgtattaaaattgattatcaaaatgtttacgatttcccctgcccttagaaataacagaatcatggctaggcgcg

SEQ ID NO: 5865 - DNA, 1319 bp, Artificial sequence
  DNA replication origin
gactctgtttacatgtggagttcctgggaaggccggcctggtgcaggctccttgagggcctaactcccatccccaagcccagacagtgacttatggaattggggggcagtggggaggaggagggtgcaggaaagcggggggaaggaggagcctccagttgccactaaatggtgacaatcccaccccacatttcttgagtgttggccatgtgccagcccctgtgctgaatcttgacgctcagtgtctcatgtcaccttcacaatagtggcgatggtggttagcccattctacaggaaggggaactgaggcacacagagcttctgagctcacggtggcctctcggggtcctgtggctttgtaacctctcctggtgctcctcagtgtgattctggggcatggggctctccagagggcgtttgtcaaacatgaggatttctgggccttgcccaggctaaggagacaaaactctgggcaaaggccccggaaccagcattttactctgtgtgatccgtcatttctagggtccctagaagtttctgatgaaacagcttccagctaaggagctgattgcaggactagggagtgggagcaggtgaggcactgggatttgcatgtgggcagtgtgggggagcaggaggctgtggctgggcattcttaacccttccctaaattccctccatccttgtctatacccccacccttggtacagtgatgggggcagaagaacatttgaacggataagggggacagtatttggggctgaggacaatggtgaggagagggtggcccagggaggcaggtgaggagtggggaggtccacccccaggctagactttggtgtgctctttttcagaaggcagtgggggggccccaaggaagggtttcgagggggtgatggtcgttggtggctgtgggaggatggactggagggagaatagggggctcttgcccagtcctgcagggccgagcgcctggactcagggactggaggccccgaagggagcagcgggtgagaggggctgcggaggctgcaatcatgggccttgggacagaagaagaggcctggagcctgggaggatgaaccgcaccggggcatgtcgacttcaaggggctggtgggccgtccctgtccttggaggtgggtctgaatggggggcaggaggagctggaggccgcagggacaccgtgacggcgttaagctaaactcagcacgctggagggcgggaatcacatgtgagccccaggtctctcgggctcctcctctgcggctctctgaggctcagttttctcatctgtaaaacgggttgttgtgagggttcc

SEQ ID NO: 5866 - DNA, 1153 bp, Artificial sequence
  DNA replication origin
agcacaccctttagggaagctcggaactttgtttattacagttaggcacacccctcctcagccttgtgtccctgctgcagccactctctgtctccacctgctgtgatgggcactgctgactgtggtccctgctctagctgctgccacctccgggtggccacggggatctggacccactgggcctcccatggctgcttctgggtgtgtgggcctggacatttccagggctctgctctccctgtctgcatgcccccatggccacgcccaccttgaggagggcagtgcacatggcccctgcctgccaacgaggcctctttggggcggtgcgggggtggggggacctgggaaggtccttgggaacctgggtcatcgggccgactgtcccaaggggtgctctgtcccagctctcagctctcagggcagcccctctgatcaccagccctctaggggacctccagattccacgtctccccagtaatcccattccccgaatgtgtaagaaacccaggagctggagcagcacttgcagctggcgtgggaattccccttagaacacacactggatttgtttggaagaaacaggttaataagccccatggggtaggggctggggacccacacgcattctcaagttccaaaggacgctgccaccctgctttctagggagggtggatgctgttacagggcctctgtctggaagaggttgggtttgggcaggggctgcggtagagcccagttgttctgcaggagtgaggggcgaggagtggaagttcctgggaaatgggggtattggaggtgagcagtgaggccagcagtgctgggaagggggaaggtcaggcctccccgggtggagcagctgggacttggggagaacagaaacgccaaggggattttcaagttgtttgtgttgaggtccccaaggtaaatgccttgcctcctcctccacaacatcaaaaatcccaccttgcttgctcaagcttttgtgtgagcgctggcttgggggcgactgcaggacctgggtgctgttttcccctacgtgttggcttggagcaggcagagactgcccttgaggacgcagagagcagggacagtggagggctgagttacaaaatggtgctgggaggattgctaagtatttggaaaacactgggtt

SEQ ID NO: 5867 - DNA, 852 bp, Artificial sequence
  DNA replication origin
aaccaatcactgaggccacgggaatgaaatccctcatcaccgggcctggggccagggtcagaccagaattggggccttcctaggggaagggatgctgggcccaccaccagcagagtggtagcaagtgtgtcctttgggtccagctgtcttgaatcctgactccctcccacaaactgtgtcaccttcatcttcccgtgctgttttctcatctacaaagtgataatagtacctctgcataagactgttgtgaggattaaatgagttaatgtgtcaagtgcctagaacagtgcgtggcacgtagtcgagtgctatgtgggcctgatgactactgcagacgggcctgcgcagctgtgtgccagcgcattcatgacttcattccaaggggagtaaacatgggggtgcagcagctgcacattggcaattacctgagctgggtctttgctgttggagagagaagggcaaaggcctggcagtgtggtgatggtgccaccttcgtgcaggagggtgatgggggtgggggctgctctatgaggagatggtccagacctatggaactcaggctggcagggaggggtggcaaagcaaagggaaaggagacattgcaggtgaccagctggattgaggggccaggaaaacatgattcctgggtgatttgggcctgggcagttaggagacttgaggtgtccctgacaggtggtgggacatgaggaaagggttagtggaggctggtgggaaaggactggatcatgtgtttgttttttttgtttgcttttggtgtttttttttgtttgtttgttttgttttattttgtttttgtttgtatagttttttctcactatgttgcccaggctg

SEQ ID NO: 5868 - DNA, 1696 bp, Artificial sequence
  DNA replication origin
gcgggtggccgacggggcctgcaagaccggccgagcacccccagccccagcccggcccggcccagcaggcccggcccagcaggcccggcccagcaggcccggcccagcaggcccggccccgccgtctccatggcgaccgtgacctcaacgcctgggcggggagggagaggctgagccggttgctgcgcgacggcccagtgacgtcagacaattgagtttggttcccaaggcaactggccgggcagctgggccgggaactatttgtgtctgtccccagaggggctgcggagcctccagggtctggcgcagctgaggaaatgcgctcctggcccggggcaggcgggggccgggacacagaggccctttcagccccggaaggctgcgggcccgggcggggcggggcggcaccctccaggaggacgcccggccttctccccacttctgcctgggaggcccctggcccgccgggctttgtcctatttataaacgtgctcctgagtaaactccctgaagaaaggggcctctgtgtgcggcagcccggcccacagcgccgccctcagcacacagtaggcgctcagcatggccttctcatgggactgaggacaagcaccgatccttgggagctgccaggcgcctccagcacccagaacccctgacatcgagcgcctggacacctgttcccgaagccctgtgagctgatgggctacgtaacctctgggccgcaatgctagaataaaatgcatggacacttgttccaaaacgatggagggacggtgtgggaaacaggccccagccctgtcgactgagggtgaatgcacgagtgaaagtgacaatacatgggtaaactgaggcaggcggcatcagccgtagaggagagaggatgaggttccaacctggggtgtaagagaaacaagatgctacaggagcagaagggccatcagctgtgctaagataaagcagggacctaaatttgggcctgagagctggtccaggcctgccagtggcagtggctcaagacgtggggcgctgtgactgggtctcagacccagtgatgccaccaacccaggcttctcccaggctcctcccccagtagcactctgtcactacagggtgacatccaggcccttcacgatctgtctccagggagccaccacctcccccagcccaacaggccaagcactgacatccaaaccaactgactacccaggagcctgggcatgctttgtccgtctggcccagggaggcatctgcccatccctgtgaatagcagcgtctctcctcaacagtcagtgactgccttctgacagcctgaccagggggtctgagtgcgagaggcatctggcatctctgaaaaagcagctccagcctggcttccagggcagggactctccactgccagatctgcagactctccaccaccagggcgcctactgcagttgggaaaagcctcagatctatgtcctctcctgtctgggtggagcaggcaccatgatccctgtttcatgcacaaggacattgatgcgcagggactacaggacttgtccaaggatgcacccgagcccacgtcccacctaggttccccagtctctcccagacaatccctcagaaaacagtcctgggcccaggaaccagagctgctgagcaggcccagctacgtaatttgtggagcccagtgcaaattgaaaatttgagaccc

SEQ ID NO: 5869 - DNA, 1639 bp, Artificial sequence
  DNA replication origin
gcaagtgtgagggtggagggccagtggtctgaagcagccagccccaggggccagcaaaatgaggaggtagaaattcccagaaaggcaggagacaccagttgcagtggctcacgcctgtaatcccaacactttgggaggccgaagcgggtggatcacctgaggtcaggagttggagaccagcctggccaacatggtgaaacccagtctctactaaaatacaaaaattagctgggcatggtggcaggcacctgtaatcccagctactggggaggctgaagcagaagaattgattgaacccgggaggcggagcttgcagtgagctgaaattgcaccactgcactccagcctgggagacagggcaagactcagtctcaaaaaaaaaaaaaaaaaaaggcaggagaaagctctctcagagagcagcccctcagatggccaaacaagactggggagttaggtggtgtgaggctgaattctggctctgcctccccctagctgagtgaccttgggcaagttatcatacttaactctctgagcctctacaaagtggggataataatagatgtgccagctgttgggggggcaggaagattaaatgagataacacatataaaacgcttggtacaggagaaaggtggggagcgctcagtaaatggtaactgtgatgacgaataaagtgcgggctggattgggaaggccaggagggggcactgaaggcttttgagacggggagtactgcagcctgtgttttagggagataaatccagcgggtgcaccagagacaaggacaggggcatggccagaggctgcgggcagatgggaggttggtgtaataggggcaagacattgagaggtgccttggagctcagagagggggaagcagctgccctggggcagagagaggctggggcaggatggctctgggcttctaggctaggaggtgggctgagggcaggcaggctctgggagagacgtgctgtgggaagtgtctggctggggtggggtggagaggggggcttcaggggacagcagagaggggaggtctgaggcatggggaggatcaggaccagagtcagagagaaaactttcagccacaggggtttatggatgcctcaggataggtgaggctgctcccaagaaggaggtcctgagggagcaggaggtgagctcagctgcacacagaggactcagttggggagactccctcaaaagtggcagccaccctgagtcactaagtctgtgactcacctctggcagagaggaggcaggacaagtaacaaagctggtgcttcctgggatgttatctgtgggccagtccctggtttgcaaatcccttccgtgcatgaacttatctaaagccctatgaggtggagctagtaccggcactatcccatactgcagatggagaaattgaggccctgtgcggtgggggttattccagactcttcggccaggacacaggcatttggctaaacctagtgtttgtggcagggtctgttctgattggccgatgcctgtcctactggttagtcaatgttttgaaggtcaccctggttacacagctggaggaggcagaatcccaactaacccctggggctggagccctggtctgaaccaggatcctctctccgtctagcgccgc

SEQ ID NO: 5870 - DNA, 867 bp, Artificial sequence
  DNA replication origin
ccccggcggacgtgcccaggtcccgccccagggttagaatttccctccggtgaaggacgctgccggcccagatcctggtgctgtaaacctggctggagccggggaggcagcacgacgggttttttctatagaaaaggaaagtgttggctcaggttggacccagtgactcgaggccttttccagttctgactttttatgaagaaggaactgggcccagaggccataaaaggagttggtaggagctgagagaaaaccttggtgcctgttttggcctcaaccacaggctcttcctggttcaaatgtcccattgtttattcgtgctgctgcctaccgtggggtgtcgaggagcaaagcctgaccccgcggggtccctggggtggggaagggatgtcaagcaggacagggctgcagagggggctcccggctctgcccagatggggagggtgtgggatgggtggctgatgggggtccctggaaaacaatgaagcaggtgcccaggcttccagaaagttcaggttggagaaggggcagctggaattgttgctggaacacagtgggggaataggttgtggtgttggccacgactcagaacataggatcaacggggggcggggggggagaccccgctaggcaacagggccaaatgagctagcatttgcttgtggtcccattaggaactgaccttggaagcaaatgacgcagcgctgcctgtccctagcctcttgatcttacccaacatctttgggcctcaaattcctcatctgtaaaatgggagcaggcactcctccacagggctggtttgggaattgaaaatgggtatatgtaggtttccgtccccccttcccttctccctcccagtggggcagg

SEQ ID NO: 5871 - DNA, 915 bp, Artificial sequence
  DNA replication origin
ggtccaccaaggagggggaacccgcgcgcgcgcgcgcacgcacgtggcccggcgcgcccgggagacctccgtgtgatcaccgcgcgcagcagctcccgggcggaaacacctcccccctccacgggaaagtgggctcaaccgggggcggaaagcgacacggctgggggacgactacgtgctcccttaacccccttcccgctgtcagtaaggaagtggagataaaccgaagagaggccttggagaaaggagcagggcggggtgagggagttgtggggggattatttgagagtgaggtcaagctcaagagccccaggaccctctcagatcccccgtgcccgtgggaactgcgcgtccgccaccgatcctgcccgcgccgggttgagttcagtttgtgtctccgcgcgctgcgactttgcgcgcctgggggcctcccagctattgcctggctatgctggcgggaaaagtgtaagaaacgctgtttgccctgcaggagaagccagatacgcatggggtgcttcaggctggggaaaggtgcctgcctctgtggggtttttggaatcccaggtggcgcccttcctacagcccggcagaaggcagccatgccttcaggtggggaaagatctggaggtgcgggtgggaggaggacgaagcaggagggacacccggatccgcaaagggtcagagacccagagctgtcttgctgtgccaagtgagagggaatgccccgtcggcagctttgagcgccagctccctggcctaaccagtcatgagggaacgggcaggctgctctggaagggcccttcctccaggtgtcctcttgatcagctttgcctgctctttaaggtgtccctgtgtctcggccgcctcccctctcgaccctcttttttgctctcagaggcagcacaccagtcccca

SEQ ID NO: 5872 - DNA, 1308 bp, Artificial sequence
  DNA replication origin
gtaagtggtggctgggggtagtcaggaggcctagttacaaccccgagaagtaaggctgccctgggctcccaggggaaacactgggctgggtgggtgggcgctcttcagggagtagattcctcccggccaccctcagctcctagtctcttgggtgtggtagctccaagatctcaaagcccaatcgccgagcccggtggtttccgatgtgtcctaccctccctcctgctgcacatgcagcttgcattgctggggagtaaggggagatgatttccggccagcacaggcaaagccaggcagggagtcccctgaggcggcgcagcaggaggaccaccaagtgtggcccatacgcccggcatccggccctctccctgccttgtcctcagctgaggcctgaggtgaattgtaggctgggccgattccccacccctggcctcagggcggttcctcctgggtccaactgccccagcccaggccatctgggaggcaggctgggcggggagagagggagggaggacgtgtgtgagccactgcccagcccccgaggcacaaacatttccttatgtggtggctctgagtgcccgggcgacaccctagaggctgctggggagggccagggccggacacaccctgggtgatcgcagaagcagagcccctgcccaacaggatcttggcctcatcttgtggaggaacggacccccacctggctctttgtcccctggagtggcccacaatcccctaggaggaagtggtcactgcttctgtacgggatgtttccccaaattccccgtgtttgcaagagaaactgtgagattagaggtacagcagagaccccagccccgggacaggaaggggtgaagggtgggctggcaggcccctagcctcagggtgcgcctcccgcaccgccccccactcagcaccaggcacggcgctactccctttgtttccggcaggctttgggagctatatttggctgtggggggataacagggtgactcatgggagggacggcccggggtgggaagtggaggagctgtgtctctggaaatgcggctccctctgttcccaagcctgccgcaggtgctagccctccgtgagcgctgaaagcaaaacagccaacaacgccagggctcccacctgtaatctcagcactttgggaggccgaggggggcagattgcttgagcccaggagtttgagaccaacctggccagcacagtgagaccccgtctctacagaaaaaaattagccaggtgtgacggtgcacgcctgtggtcccagctactctggatgctgaggcaggagaatcacct

SEQ ID NO: 5873 - DNA, 1741 bp, Artificial sequence
  DNA replication origin
ccacaagcgggcctgtgcctggcgttggggcccggagtgcgcccggggcgggcgcagcccacacgcgtccacacggcagggtccgcgcgggccggaagccgcagggccggagcggggcgcccgggaaggcagaggggagcgggaacaaaggacgcagcggagcgggggcggtccggccaggcagtgattggaggccggggtcgggggcagcgtccgggccgggcagtgattgggccgcagcctccccggggcccccaggcgctcgccccgcccctctcggccgaaacccgagcccccagcggcggcccgggaccagcccgcgccgccgccatctgcgccggggcggggcgcgggcccagagtcgggttcccgcccagcctccgccgcctgcccccgccgcggtccggcaacctgtgcaccggcctcccccgctgccacccccggcccagctgcgctcggagtccccggggtccaagcaggggctgggccaccgctgtgggggaaaagcccgatgggcacgggacggggcccagaaagcgactccgtcctgggcctggccgtggctggtggctggactgggagagcgctcagagaacaggggacattggagagggcgggttggggtaagaccagttagtggaggaggccgcaggctgaaagacggctcagggaggggtgattcgatggccggagccccagcagctccaggagtcactgggaccgaaggcggcgccagaatgccaagcgggggcccggcagggtttggagcaggagaggttgttagcagttcactaccagccaggccactgctgcgtggttaaaggcgggatgaggggccttctccattccctgcgtctttcccagcggcctgggaggtgagagaaggggtggggcttgggctgggccgccaatcacagcctcggctccactttgaatctgtgctggcgggcgcgggctgcctggccgccaggtgtgccggcgccctctttgtccccacttgcctgcccaggcacgtcccactccaaccccacctttctggaggctctgttcctcacacagctggttcccgcctccccaggtgtccccagcctggaatgaagttggactcagattctgcccctttgaatgctggtgactctaaaccatgcctcatgcagccccatccccagtccggcacaggggtcatcatccgcaagggacagctacttccatcccctagatggccaccaagggtccggtagtgcagggaacagggcggcgtgggagtaagagctcatgatttgcggcaaaaatcatggcagagggctggcccagggaggagccgtgtgacctggggcaatccccttccttcccacgtggctcctgcagttgtaagactaatataataagggcctatctcccaaattgctgtgaagattagatgggatcctatagaaaagagggctttaggccgggcgcagtggctcacgcctgtaatcccagcactttgagaggccgaggcgggcagatcacgaggtcaggagattgagaccacactggctaacacggtgaaaccccatctctagtaaaaatacaaaaaattagccgggcacggtggctcaagcctgtaatcccagcactttgggaggccgaggcgggcgggtcacaagggcaggagatcgagaccatcctggctaacacggtgaaaccgcgtctctactaaaaatacaaaaaaagtagccgggcgtggtggcaggcacct

SEQ ID NO: 5874 - DNA, 2313 bp, Artificial sequence
  DNA replication origin
catgacaagcgcttccccagggcagggctcaggatgagtgtggcccaagaaggatttaagccttgggcttagtggggaccagattgcccagactgggccctcctgcccttcctgctgcagtcttgggagcagatttatgccctgggcgtgggtagtgagagcccagagctggggtctgtggggtaggggggggcattctgggcagcctcttcagctggcagaggctcctgccaagccatttccccgccccgccccacccctccactcattatcaacttggggtttgtgtgcaaacagcagctggtctcttttgtcagcctcccctgccccctcagcccccctactcctcccctcctccccagtgcctcccaactggctcctccatatcaggccctcctcctccgcttccccccatccaagtgatttagaagctggggccctgggggatcccagagggaaggcagcccctgaccatttttggccctgggtcccaaattcttctccagaaggtgatattaaacccatctgggataccatgagaggcagagtgggtaagtaaccaagccaaagtcactaagcagggcaagggcagagtcaggattcacaccctgtgtgcctgtttgcagagcctgtctgcagagccagcctgctcccagcctcggctgcccctctggttgcccccagggcctggcccttcttctgctgctaggggccctgggaaggtggacccactcccaacctcctcgcctgcatcacgggcttcagcgggagtaattctgtgtgcctgtagttgaaacaggaaggcaggcagggccagatggcagggctttgtcagttacacccaggagctgggctctgtcagttatacccaggagctgggactggacgctgagggcagcgctggggagccctcccggcagtgggtcctacagactggaggcagagggctaagggacagattaggagatcaggccaaaaggagaagagtgtgggccaaggcgctgcccctgggagaacagggtaggctaggcctgagagcacaggcttggccccagcatacggtggggtgccactagggtgacgaggacactcgggtctctagggtgggcagtggtgaggatggtgagtcctccacagaaatagaaacacatgtggccagtgggttgctgctgaggacgttgaatttgagaaaaactggttggaggtgtttgagggatatctccagaggacccagaagagaggtggggccagggcaaggaggtctgagattggctggcctggcagaaggtggagagaataaggggagaaggggctgagggtggggtcctgagcagaaggtgcagaggtccagggaggggactccaggagggagacagagagcaggagtgtcccctggacctggggattaggaagaggcaggggtggggcctctgtaggcaccatggctcctagctgggtattctgctcttcacagattttagggtttttttgttttgttttgtttttgagactgagtcttgctctgtcgccaggatggagtgcagtggcgcgatctctgctcactgcaacctccaactccctggttcaagcgattctcctgcctgagcctctccagtagctgggactacaggtgcacgccaccacgcccagctaatttagcatttttagtagagactaggtttcactacgttggccaggagggtcttgatctcctgacctcgtgacccgcccgcctcagcctcccaaagtgctgggattacaggcgtgagtcaccgcgcccggccagctcttttaatccttacgacagtcctgacctgggaaacagagttgaccccgttaactattatcgtgcccatttcaccgctgagaacaccgcggctccgattcagtgagtgacagagcctccacgcagcctcacacggaaccaagatcaggcctggggtgcccgcggaagcttggggaccaaggcttgttgagggccccttgcagcactgtaagtgagccctgccgggcgctggggctctctgctggggaggcctcagacccagaccaaaaagggaccactaccggggtgggggtggcgtcacagacgatgcacccccaaaacgggtctggaaggaaggctggaatgtacgtgaaaagaagttaggccatggcagcagcgtgggcaaagcaaggaggctgagagtgaggagagccgcagcccgggaagggaaggtggggcccgggctggacactgcccgggtcctggattcctccgttgccctctgcccctggtcaaagttcagtccctccaaagggctcttctgggag

SEQ ID NO: 5875 - DNA, 1134 bp, Artificial sequence
  DNA replication origin
ctgtccgtttgtgcatgcacccccctgcccctagagtctgactggcctgttggcatccccctccaggcaaagagctgccccgtgcccgcagccgcctcctgccatgtgggctgtgggcgcagctgacaggctgtgcgtgcaggagagcgagagcacgtgctcctgctgctgccgggtgccagcctagcaacggctcccaggggcccagagaggtggtgctggcaggggatggcagctctggtgccctccccaccgcgctgcctcctagttcccttgctgcttgagctccctgccaacacctgctccagaagagggtcagcctggcactgggccccaaggacagcagtggaccacagcagcctgcacaactcggaggcctcagtcttctgctggggctggtccctaagaagccaggggctgagcttcatggggagcagggaggaaaccccgctgtgtgaaccaggagccccgccttgggcagagcatggttgaggagcaggatggttctcttgggtgcccttcctaacagctcacccccttctcaaggcaagagggagactgggtgcggcaggaggggagggaggtagaagagccaggcaaaggcttggaggggcgatgagagaggttgggggagaggcacacagcgaggaggaggaggatggggaaggggaggaagagtgagaggggaagggggaggagcggcatgcagccaggtggtggagggaccttgaatgctgagcaagtagttagtcctggtgtcagtgggagccacagaagatgctgagcaaggagccaccagaggcacagagcaggagggagatcacggctacagggcagtgagaagaagccagaggggtccgcattcggggagtggtgccctcctgtaggggcagctggaacccaggcctggttccaacctgtgcttgagctgctgtgggcagctaggcagctgtgatttggggcaacatgatggcctgtccctgtttgttgggagggtcagatagtataatgtgggcagagctgtcctggaagggaattactgtcactagtagggaggaagcatggcttggattggggcttaggctcccgagtcacaaggcttagcctctacgtgtcagaaatgggcacctttgc

SEQ ID NO: 5876 - DNA, 906 bp, Artificial sequence
  DNA replication origin
gggaggaagagtgagaggggaagggggaggagcggcatgcagccaggtggtggagggaccttgaatgctgagcaagtagttagtcctggtgtcagtgggagccacagaagatgctgagcaaggagccaccagaggcacagagcaggagggagatcacggctacagggcagtgagaagaagccagaggggtccgcattcggggagtggtgccctcctgtaggggcagctggaacccaggcctggttccaacctgtgcttgagctgctgtgggcagctaggcagctgtgatttggggcaacatgatggcctgtccctgtttgttgggagggtcagatagtataatgtgggcagagctgtcctggaagggaattactgtcactagtagggaggaagcatggcttggattggggcttaggctcccgagtcacaaggcttagcctctacgtgtcagaaatgggcacctttgctcacttcccctcctgggctctgggggcagtggtgtccacagtgagcgctggtgggctcctgaggggccctgcttggcactggtcatgcagctggggccacaagcagtatgtgtccttgagcccaaatgtggcacgaggtggtgaggggaggagcttggtctgagtgggcacgtgaataggcaggaatgcggggggtttgagcaacggcccacagaggcagaccagtaaccagcgtgaggggctccagagccctaagagaggcctgggtaccaccagggaagaggcagccggggacaaggagccagcagcacaccaggttctagagggtgaatgggacttgatatgaaagggatgctggagtgtagacgttttcctcctatgcctgagcgtgtgcccacgtgcccgccctggtgcacctggatgagtgtgtgttcgggat

SEQ ID NO: 5877 - DNA, 1211 bp, Artificial sequence
  DNA replication origin
cgggggaggggaaggcggggtgctgggccgcgctcgccccgggcggtgcccagcgcagtgcccgcggaggtgcccgccccccgcgcctgggcgccttggaccaaggattgtcccagtgcaagtggacggcagccccacgacgagcaacgaggtcacgaggccgagacccgggcacctgggccgccccgtccctctgccatgccctcgcgccctcccagggcagggcacccctagtcctgtgggcaggcgacctcgattgcccaccatcaggtccggcgtccgtcggccaagtcagtcgacaagcgggcaccgtcccaagcacacacggattcatgtatcaagcggactcgatgcgcgatgccggctccagccctcgagtgggacagcccgcgggccccgcacggcatagcggtcccctcattctaggtttctagttagggtctgtcccgagcggtcactgccgtcgcgacagcctcagggcagcctcctccaggggcctgccgggccatcgagtctacccttctcccaccccactgctggactgcgatgggcacatgaacattacagagttcctcgggaaaaatcatcgtctctggagccagttgggctaatctttggggactacctgaaatttgggggaccatttagagaaccatgcggagccccgagaaaggggagcatcaaaacgccacactcaagatggcgccgggctcggcaagcgtggcgtgacgtagcgatctagctcacgtgggcgatccgagaacaacaggctacgctggccttatcgccaccgcacttagctgtcgaactaagaaatcggttgtgtgggaaaaaggaccagaataggtggaaagatagtccagaaatttacctgtgccacacacaagatggcgagacgtagggttcgtccctgtgctgccaaaagggggcgcccgacacggaaggcgggactccggagacacgagcgcacattggccgagagtggcgggcgaacacaaagttgacgctttgcgtccttccattggcagtttcttccgtctgtctctcggttgcagccgagctgggaatggggaaaacccggagtgtgggatcgtggagggcggacgatgccaagtccagcagagcttgcgctcggggctagaagagagactgagtctcccttctcagtttcattaggtaatgggcgacatggctccgtctccacagcgggg

SEQ ID NO: 5878 - DNA, 1719 bp, Artificial sequence
  DNA replication origin
gggacggacagaacagccgtacagaccagtagttctcagcgcctttgcttaccctgggttgctcagaagacttactggttactggttccttcttcccttttgaaggacttaaaggagaagaaggaagttgtggaagaggcagaaaatggaagagacgcccctgctaacgggaatgctgtgagtgtctgctttgctcctgagccctggcagctaccgccccacaaaatttttcctgttctactttaaacatacctatatatgtgtgtgtatgtgtatatgtatagctttgcacagtggcagtatcgtagccaatgagctttacccgaggcgcgattattgctagttaaatatttataaaaacctttcgagcagcgcctgaacaagaataggttcagaggagactccggtagtctgagtttgggcttggcccagggtggggaaaagcccttgtcctggggcagttaatgtgcaggtttcatgatggagcctggagggtgttgactggagaagggtctctggggtgggcttggcttggctgggctgtagatgcagccgccagcctctggtgggaggccgggcatcaggagcaacgctctgtccagcctggggccagctggtaatgacatggcctgttttctgtcgaggagaatgaggaaaatggggagcaggaggctgacaatgaggtagacgaagaagaggaagaaggtggggaggaagaggaggaggaagaagaaggtgatggtgagtagccttgtctatcttccccttttcaggtactttttcctggccttgtctggcagaaggggaaggaaggaattggggctcctgggagtgggacaatggtacttggggccagtggaccacatggccctgggcacccacctgtagagtcagggaaggtctccctgacatggagttgtgcccatgcccactcacactcactcgcacacctgaaagtttctttcgtgcagctctgaaagccactgatctattgggctggccttttggggtgcagctgcttgggcctctctcctctggagagtcccacctgtgtagtgggcgtgggtgccctgattgggcccagttgcaggcagtagaggcagggcagggaccttgcagtccactacatgttcctcgggatttccccaggagccacagtaggagggaagtgtggtttacctggcctttgattctctccaggtgaggaagaggatggagatgaagatgaggaagctgagtcagctacgggcaagcgggcagctgaagatgatgaggtgggttctggcttgagaagaaggggggtttggcatctgggtctccccacctgcctttagctgaggtgctcaagctgcggagggactgtttctgactttgtaggtggccactgtgtggtcctgaatcttaagaacaggaaggaaacagggctgggctcaacttcccagaggccttgggctgtggagctgggggtccctggttcttgctctgccagcaggagctgaggcagtgggctggatagggctcctggggttggaggggcctttgacagtctttctctgcttaggatgacgatgtcgataccaagaagcagaagaccgacgaggatgactagacagcaaaaaaggaaaagttaaactaaaaaaaaaaaggccgccgtgacctattcaccctccacttcccgtctcagaatctaaacgtggtcaccttcgagtagagaggccc

SEQ ID NO: 5879 - DNA, 1171 bp, Artificial sequence
  DNA replication origin
cgggctgcggctccatcctcggctcctgggcaccgtctgcgaggctccgccgaccagagtgagaaagccgcgggcggcgaccgccgcatcatgtcagccaaggacgagcgggccagggagatcctgaggggcttcaaactgtatccgtccgggagcggggcggggccgggaggacttgggaggcggccgctcactgaggagactggccgggggcgggggccgcgccaggtgggccccacagaagaagggccgcgggaggggagaggaaaggaacagcgtgccgagcacccggcgggacccggcgcgagaggcgccccaaggggcgtcctgagggaggaaggggacgttgacgggagcgccggggggtggcgggtggagacgggggagcctgggggacggggctgcgagaggtgccgggcgtcggaaacgctgtcggagaagccggctgggttccgatccccggccgggacccagaggccgggatggggctgcggcccgcggagaagggctgagggggcgcggtgggctgatctcgaagcctagaagcctctttggctataagcctacccggggagcggggaacagtgacttggagcgggcgaccttgtgtgggacaaataccagtgcttttaaaactctctcaggtcccccaccgcaccgcaccgcaccccacccccgtctggtttccacaacttctcttccaaacttgtggcttcttccaggactggagtagttgggggaggtggggaaagagaagtccaagatcgacctcgtcttaacactcttggccttctcaggcattggtcactgcttccccctcagcgcctcagttttctttccagcaagatgaggaccataggcttaggtgtggggtgcctcgcgctgggactcctagccgaggtgtctttgctcgctcctgtcggtgcggttatgcctagctgtggtggagctgtccagcaatggtgtgatgtcgctggggccacggtaggatagagtggggtagagaaatcattgcctcgggcctgttgtggtgccccttttgcatcctctccgtaaggaagctttgtgttttcgtggagtgtgttagtctgtcaccatatgatgcagatgaaaaaatgcaaacttggatattcaaattttccattctcctgccaactttaatctcttcatg

SEQ ID NO: 5880 - DNA, 1665 bp, Artificial sequence
  DNA replication origin
accgcccttcccaaataataataaaacagctggtgttgggcgtaagccggtgttgaaggtgtcgacggtaagtgttcatctatgctaagagagctggtaggagattattgaacccccctgatcaaaggggtcgagaattcttaacaatgtggattcctcctacacagcatctttcaccacccgtttggccatcacttggtgaccacagacatccaggcccaagaacaaagcccctgtggggatgcgcattccaggtacgaaccaatggagagtcactaacatttgctcaggttctaaagtttgaacttgatgcttaaatcaaactgaaaatttgaggcctcagactccgtctctttgttgtttagacaggagagaagagagcaaaggcattccaagggtagctactgaaggctggtccccaagtgtcagaatcattcttctccctgtgcaggggagagtcaagatcacagacaactacagcctttgcagaactggggagaggcccacagccgagtgaggtctggctgcaaagagaggaagggcactggttaaaacctcgggcaggtgggagtggccatgggccagggtgtgctggtttctctggtcattgacaaatatttccacgagtctgttcggggtgcagtgggtcctagagtgccttaggccagcacttcgcccttaagctgttcaatatggagaggtgaatgggttcacaaactgtgaaaaagtgttctgtactgtaaaaaagagacagtgtgctggacaggcgctcttgtttccctccgggagaagatccgacactgacaagggtttctggggaggagacagcagcttgcccgtagcctgggatgggacagtcaaggtgtgggacaggcagtggcagctgctgagctggaggcaagaaagcgagaaagccaggtaagcctgatcctaacgcacatgactgtcaatgtcagaggctgggatgttattcagtgggcacgggcaggcggcaggaatagagaggagggaaagaggagaggtgaggctctctgcagcagtaaattaccaccacgcggcacccggcagggggtggcggtagggcagaggtttccagccctagtgcggggtgagaccccacaccagaaacggagcccagagcaccggttgggtcgggacagggttggtgagggactctgggacgtgttgagttcgaggctggggcaaataatatttactttagtgtctttcctattccctgaaatagtgccacaagcactgagattcacccccgaagccaccaggctgcagctgcctcaggaccctggacagaccagtttgcccactgcctgggtttagagaagggacaggaatcggagtgtcccaggcagaagggcgctctgacagtgccagcagagggctactctcactacagggggcatggtggccagcagatgatcgatgtcccctggacttgtgggtgtaaccttccttctctgctcccacaaacccatgatctcctctcaatccccccaccagctggccaataggggccagtgctgctagttcagctacggttcaggggtgggtgagacaccaccaagcctgtttctgcttctccagaagaagccaggtgggttcaaccaggctgagccgtttctgaccttgccaaagttccccgatcac

SEQ ID NO: 5881 - DNA, 1860 bp, Artificial sequence
  DNA replication origin
agggagagcagcgtgagcagcagggcgcaggccagcagctgggagagatgcatggtgccgctggggtcgaggggcgcacacgggcggcagcgagggcgcgcaggtcggcgggcagaccagcagggggatgcggagcaggctggctgggctgcagggcgagcagggtcccagtgctgcgcggcgccggctgggtgcgctctgagcccgtgactctgctcgcgcctttataatccaacctgccgctgatgtcatcctcccgcccaccgggccgcccgggccaatgacaccacgcacgcggccgcgccgagggccgggagggggccgcgggggctcccctcccttatcccaccccggagggatcccgcggctcggcgggctcgctccaggctgcacttggagctgcagagctgagcgcacaggggaactccatttgcagcgagcgcgcgccctggcctgccgagcatcggtgcgcctggtgccctgtgcacccactaggtcctcatcgcactcactctacctggaagggatacgtagccctctttgcaggtgcaaagacaggctcagaggaatgaagtcacttgcccaaagtcatacaggcataaagttggcgctgcccgaaatccacgcagccctgcttgtcgccaaactcttccctgggcacctgacagccgcgggatggcattgcagctccgcctttcacctgccggtcagggcgggagcgcagaccacagcgacgtcgttaggttggggaggcagaggatggggttggaggactggggtgggaggcgcagggagagcggggttcgcctgggccgcaggggggagcgcaagtcttccacactggagagtgcaggggtgtcgccagcctgagtgtttgagcgcaaggcgggaacgaggggactgcgagcgcggaaccaagatattcatgctcatgcgtgtgctccgcggcatcgtatgctcgccagttactgctctaggttcacgttcagccggtttcggccacacagaacgtcccggggtctgactccgctggtgaactccctctgtgggaacaatgcgcacctgaccttgcctgcacccacgcgaggatccgctgctgggggaagcccgctccagtatcctgtgcactttcacaggctggggagagagcttcctagccagcggcccagtccagcctctgccagccgtgacaggtggtcaacttcccgtttttgactgtagagaggtccccgtggctctcgggacatggccacatatccctaccactcacgaacttgctctccttgcactgggcttctcggtcccttggacactaaggagtgtggtgggcatttgggcactgcggtgtgggccgcagaggcggagagcccagatcccccgaattgattgaagagcaggaatctatgactggctgctgctgagcaggacgcaggctggagagagaacaaatgttgccgcaggagtgcagtggctgtccccaggcgtgaaggcgattctggggagacagtagcccagacgagattttccagggagaggaagctgtgcctgaggcaggaaggcaactggagtgaagaggggcttggagaaccaggttccctccaagcctccctcttccctccgtggtagtgagcctggtcccagagctgctaaggcggccgcatcatggtctgctctgtcggcacctttctcaggctaccccttcccactctcataccctgactcacaacattggagcaaccactacacaggtcactttgcttaggaaacagctaacacctgaggtctgagtttggggcagcaaagtttcctgatctccaggaagatccagacatcaacagggcaccttctgtggattctggt

SEQ ID NO: 5882 - DNA, 994 bp, Artificial sequence
  DNA replication origin
cggtcccgagggggtcgtgcagcactaggcggtgcagggggcaggcgagtgagggcctcaccgtttctccccggaggccggcgccgccgcagtcccgcagttgctaaggagaatgctcttccgggtcacgggcgcggcgttctagagagcgacggtggccgggcgaggccgagagcgaagcgcgcggggtgtgtgcgcggtgcaggagctcgtagtcggcggttcagctgcgacaagggcgaaatggccaggccaggggccgccgcgccttctccggcctcgctcgcggggacaactggctgcaacggttggctcccagtgggcggcctctgagacgccttgtgccaggcgccggctggctccgggcccctcttccaccggaaggagccttccagacccggctcctgaacctccaggctctgctccactgggccaggtcttgcacggcagacgccgccggcccctttcctgttacaaggctttgctcattctttcatttactcactgctcatttattggacaactgcttggggcgaggtgcagtgctggcactggggatacagagatggacaacccccgcatggtccctgccctcaggatgtgaggctgatggcagagcaagcagatgacgtcctgcacgtggggatgatcgaaggaaaggagactaggggagcctgcccaaggggcccacccagacacgggtggggagcagctgatgttggagacgtcgacctagtataaagggttgggaagagggtttcaggtgagagaggaagcgcagccgagaaagcccccgacagttcagcccgcccagggaagcgtgttgagaggaaacaatcgttaagtacgggacctaggaaacaccaatattgtagatgtgagcaaaggaaaaggaaatccaaagagcagccagaacgttcgggagagcacaagaggaaagaatgccagtgaggggatggccgccattctcaagctatggagatcaagtgtccat

SEQ ID NO: 5883 - DNA, 1824 bp, Artificial sequence
  DNA replication origin
gtgaatgaggtccgcagctggggcctctgtacccagacctgcgtccctcctcatggtgcccgggagctccgtcaggctgcggcgcctcctgagcttgacactgtttttcccgcagctgcgtcccggggccaagcggaggcccacgaggaggccggcggccgcgcgcatcccgtagcccaggtggcccagggctgcaccgcggcggcctcggcgccttggagtcccggtattcgctgagggcgcactaccacgagttccaggaggtcaagtacttgaggcactgggggcctgtgcggggcctctctgcccctcaggcttctctcgggaagcagcgccaccggggctgggccgggctgcagctctggaacccgcgcgaggtgagcctgctgtcggggctggtattcgccgccggcctctgcgccatcctgggggctttgctggcgctcaggtacctggaccggtcgcggcgggcggcggcgcctgccccgagtgcaaggccttcgcgcgcgccgctcgcttcctggcggccaacctggatgccagcatcgacccgtgccaggagttttactggttctcagaggaagaggaggtgctagtgctggcgacggactaagtgtagcaggtgacccagctcatccactccgcaccccatagggacggctgcagatccgctagcccctgtccaccggcctctaggacctgtctgctgggtgggctttgaattcccacctccacctgtgtccggtagccacactgagggaggcagctgttgagcactagaatagaaatccagagccctaggttgacatcctggctctccccgctgctctgcattttctgggatgacctcctgccccttctttgtggggttgtctgggtcctgggtccagccacaggctggggggcacaggtgggggtggtgcccttggtggcccatatgcacgtctgtctggacatccactggcttcacctggcccgaggatcctgcacaactacctagtgtggcgcgtggtggtggttctgagtgagcacctgtccctgccattccatgaggcactgcaggagttggcacgggagacagagggaagccacaagctgcaggagctggccgaggtctgcctgggccaggccaaccaccactttggtatggcacttggtgccctctttgtacatgaacacttctcgactgccaaggtgggttaccctggtttaacgtggggaggctggtgctgaactgagggtggatccctcctgaggccatggtcctaacaaggggagccccacacgtccccctgcagccagtagcaccaggccctgctaaaggctcagcctattctgaggctccaggctgctcctccacaggcctcctcctccaggaagcctacctggtctgtcagcggaaggtgacccactccacgaagcccctgcccagccttctcagccttgctcgggaggcatggccttaagggatgtccagggtggttactggggcagtttcctcttctagcctctgagcttattgtcgggggtgcagggcctggatccccatctccagcgtttcctcttggtgctcagaaccaagctctgggctttgtaagtggtgcctaaagatggggacactcctcatgccaggagcgatggaccagagtgaaaggctgctgggctgacccttgctccccgacccgactctgcaggtgtggcagctggtggaagacatcaagtatgtcctgggccagcgcctggaggagctggactgcacagacgctgagattagagtttaaatcagggaggactgtgtcccggccccttcccttgttgccagct

SEQ ID NO: 5884 - DNA, 1202 bp, Artificial sequence
  DNA replication origin
ggaccccgagtcaccgactgcaacccgcgcacgaccctcgggagcctgtctccgcggccgccaacccacgtccgcgctgccgccgctgtgccaggcggcccgagggtcgcagaaggaaggaggggagcgcggggcgggcgaagaagggtggagccgccatcgcgtccccctcctcgggccgacgggcgggcgggggtgaggcagaagaggcagagggcgctgagagacacaggcaacggcgccgctccaggtcctgccttgggtgggcacctgccggctaggtggccaccacagcggccacctccgccgcccttgcggccgctgcgcggagcctcctggcttcatctacttcctcgcggctcaggctgcggctcccaggcttcgctctcgggctccacggactgagcggcgcggctccaggactccgggcgcacccggccagcccgcgccccgcgagggggtgaaacttcacccaagtttgggttctggggagaacctgttgaagccgggattggcccggggcagagacagagacgagggtcggggagactgagccggtctcgggttctccatcagggccgtccagagggtgggctgtgtattcgccaccctggggcgttggcgcgcgccggtgaggaaggggcgggtgagccgtcgggccaccgagtagaaggagccagcgagcggggttggagtggtcgatcctgcggacttctgcgaggacaaagtttggttctttggccactttgtggagcgtctgtctgggtccagcgcggagagctgaaagtgctgcatagacgggcccctgaccgcacctcctcacttcagcctcggctccttccctctcaccccacccggccttggctggggtaggtcgtggacaagaaaggcgaagggaagagggatggcctttcaatgaaggcccactacgtgccaggccccgtgcccggcccctcccgcttcccatcaaggccctcccaacccagggaccgacacatgtgtgcagggaggggacaggggagaagactccactgtgcacgcggggttcgtggccccgccgagccctcctcgtccctggtttccgcggtgaatgaggtccgcagctggggcctctgtacccagacctgcgtccctcctcatggtgcccgggagctccgtcaggctgcggcgcctcctgagcttgacactgtttttcccgcagc

SEQ ID NO: 5885 - DNA, 1832 bp, Artificial sequence
  DNA replication origin
caatcccggcttcaacaggttctccccagaacccaaacttgggtgaagtttcaccccctcgcggggcgcgggctggccgggtgcgcccggagtcctggagccgcgccgctcagtccgtggagcccgagagcgaagcctgggagccgcagcctgagccgcgaggaagtagatgaagccaggaggctccgcgcagcggccgcaagggcggcggaggtggccgctgtggtggccacctagccggcaggtgcccacccaaggcaggacctggagcggcgccgttgcctgtgtctctcagcgccctctgcctcttctgcctcacccccgcccgcccgtcggcccgaggagggggacgcgatggcggctccacccttcttcgcccgccccgcgctcccctccttccttctgcgaccctcgggccgcctggcacagcggcggcagcgcggacgtgggttggcggccgcggagacaggctcccgagggtcgtgcgcgggttgcagtcggtgactcggggtccagctgcgtcccgggacaagtgaaggcagcgggtagtcccgggaggagtcccctccgatcccaggtccccactcggagccgcccaccagcctgctggaaaggggctggagctacgcagctgggggccgtcatgccccagcccacagccctggagcaccgcccagggaggactcctcctaaaggataagggggccctgatggagtgcccgggctgcccgcacagcgcctgcgcggagcgcaccttcaccagggagcttccttgtcctcctgggaaaccttgtccaggatcagctctccccggggggtctgggcttctggttggcctcgcccccttcccccagctcctgatccagggagagcaacggagagccctgccagaagaaggcctgggcctgcgagtgcggcccccatggtaccaatgcacagttgacccagagcacagcaatcgcggccaataggaggtgacgtgggtttagcctctgaccacacagtcctggtcaccctgcacagactgcctttattgggggctccgaggcccagctccttggctcttctgcagtttcacataaagggaagcagccagccctccggctccctcactcttttggggtcccccacccctaattgctaaagtgaccccttgactcacaagcaagagaatgataggccacagcggtgcccagctaaactcagccaagccctgagtgaggcagctggatacgcagcgtgggtgttggcggtaggggctgggggcagtgggggtggaggctgtggccagagctgccttggagagagaaggcccaggagggtgcaaagggcagaggtgagaggttccgaatcccaacctccgtctcctccctgaggaaggcagatcccagccagtcttgcctgtgaaagttgtcagaaaccaaatggagtcacttttcttaaaaactctgacaaatagaggcaggaaaggccatgagtggagagtcctcgggcacaaaacctgatgaaaactatcacaaaagactgcaaacaaccacttgcgcaaaggccatggcaaccttcacaaaaaatatacacacttttgcaaagacatctgcccagcaactgcctgtccagcctcagactggtgccacccgtgtcctggtagacaagaataatcgtcacaaaacaatcctgtgattctcccttttcctttaaaaacacatgcagacacatacttgaacacacatgcacacacacatgcagatgcccacacatgcacacatgtgcatatacactcacacgtgcatgcacacatacatgcatatacacacgtgtacacacatacacac

SEQ ID NO: 5886 - DNA, 1514 bp, Artificial sequence
  DNA replication origin
ccgcaccggggctgcaggtggagctgcctgccagtcccgccccgtgcgcccgcacgcctcagcccttgggtggttgatgggactgggcgccatggagcagggggtggcgctcatcggggaggctcgggccgcacaggagcccatggagggggtgggaggctcaggcatggcgggctgcaggtcccgagccctgccctgcgggaaggcagctaaggcccggtgagaaatcgagcgcagcgccggtggtctggcactgctgggggacccagtacaccctctgcagccgctggcccgggtgctaagcccctcattgcccggggccggcagggccggccgcctgctcagagtgcggggcctgccaagcccacgcccacccggaactccagctggcgcgcaagctccgcgcgcagccctggttcccgctcgcgcctctccctccacacctccctgcaagctgagggagttggctccggccttggccagcccagaaaggggctcccacagtgcagcggtgggccgaagggctcctcaagtgacgccaaagtgggagaccaagcagaggaggtgccaagagcaagcgaggggctgtgaggactgccagcacgctgtcacctctcaccggggccgaggaacaggagcaccgcagaccttctggtaactctctgccatcggattcccgggcaagggcacctctgagctccctggcaggcgagccaggagaatgcagccattcctgctgcagaaatatctgcatgatttgtcatctgccttcggtcaggccatcagcacagaaatgcttcagatgcacacaatcatgcatacttttgccctctcgctccacaaagattaccatgtgccaggcacggactttctccccatggagtcggacaatcctcctgggcaggagcatccaggctgtttcctggtgccccttccccctccagcccagctgtaggcctaggggaagaaggacacctggagcttccaggccgaccttaagctgcattttgcagtgtggccagcaggacgcagcatggccccagatcgggcagcactgaggctgcaggctaaggaggccaccaggcgggcagggtgaaagagcagggctgtgtgaggtggcccctggttactcctctgtgcccatgccccaccctctatgggtttaggaactgaatatctgggggcctctcagggctgagccaggctcctgctctcagttcctgcaggcgctctccacatcccttctcatggtcttcagtaaacacgaggacaaggacaggagggaggggaaagggagagggtggggctgctgcggaagcccctgccaagaccacagacctcaggcaagctgcttccctggcaactccgctgcctgccctccctggaccccagcacagtccccggagtcacctctgccctcgacagagaacaagtgcactcttggtgaccttgaacgtgaagcctggtgaggctttggaggagaggcccaccttgccagggcccttggtgtggct

SEQ ID NO: 5887 - DNA, 1523 bp, Artificial sequence
  DNA replication origin
gctgcactgtgggagcccctttctgggctggccaaggccggagccaactccctcagcttgcagggaggtgtggagggagaggcgcgagcgggaaccagggctgcgcgcggagcttgcgcgccagctggagttccgggtgggcgtgggcttggcaggccccgcactctgagcaggcggccggccctgccggccccgggcaatgaggggcttagcacccgggccagcggctgcagagggtgtactgggtcccccagcagtgccagaccaccggcgctgcgctcgatttctcaccgggccttagctgccttcccgcagggcagggctcgggacctgcagcccgccatgcctgagcctcccaccccctccatgggctcctgtgcggcccgagcctccccgatgagcgccaccccctgctccatggcgcccagtcccatcaaccacccaagggctgaggcgtgcgggcgcacggggcgggactggcaggcagctccacctgcagccccggtgcggaatccactgagtgaagccagctgggctcctgagtctggtgggggcgtggaaaatctttatgtctagctcagggattgtgaatacaccaatcggcactctgtatctagctcaaggtttgtaaacacagcaatcagcaccctgtgtctagctcagggtttgtgaatgcaccagtcgacactctgtatctagctgctctggtggggccttggagaacctttatgtctagctcagggattgtaaatacaccaatcggcactctgtatctagctcaaggtttgtaaacacagcaatcagcaccctgtgtctagctcagggtttgtgaatgcaccgatcgacactctgtatctagctgctctggtgccagatttgtctcctggagagaggcatgggcacctgtggtctccccgcctcctggcctccccttgggtgcccttatgcagaaagggtcccggccccaggcttgcttggctttggggactgttttaaaagggacatgaagaaagaagaagccagagaatggtccttggccactctggatggagtgtccgctgagcagtaggaagagaactgtccctggctcgtctccttccctgagtgactgttgattcacagttctctctccaaggggacatgggcctgtcctaatgctgccttaggggcttggctccagctgaccctggggtctgcaggtcaccacctgcccctgtgcctggctttgaatttcctaacatccagagtgccctgggagtacagtgtccagcccgttgtgtgtagtaaaccgggagctgagcagaagaggaacgacagagtccacccgttgaccctcggggctgtgtgtcctgaagttcaagcctagctcaccctgcagtgggtccagccccacctgtactgacagatggcaccagcagggagcgcagtgctccactgccacagttctctgtccccacttcagtgcagtcagccctggaccccccaccgcctgctccctgtagcacacacagccacaggccctc

SEQ ID NO: 5888 - DNA, 2217 bp, Artificial sequence
  DNA replication origin
tcagcggggcgcggggtctgggtgcttcttttccccaggaagggagcctgcctggtacccactgggctgtaggtggtggctggatggcctgagccccctcctttcctggggtgcaggcagccacagggcacaacctgcagtccctggggttggggtagggagtccgagagcagccaaggggcaggtttggtgtcatgggctcagtccccagagcgcacggggaggggaaggttccatggcaggacctctgtatagggactccggggatgacgactcgggctggaggccaggcaggacgacaggaggtggggagcaggagaactccgggatggggaagcaggagccccagggacgggacactcagggagcagtggccgtctccagcagcagcagggtcccggccagcagaggaagcaacgcggggaccacggaccgccccgggtgcgcggcgtcggtggtgccggcggggggcgccaggtcgcaggcggtgtagggctccaggcaggcggcgaaggccatgacgtgcgctatgaaggtctgctcctgcacgccgtgaaccaggtgcgcctgcgggccgcgcgcgaacaccgccacgtcctcgcctgcgtgggtctcttcgtccaggggcactgctgactgctgccgatactcggggctccctggttggagggttcagttccggtaggagggttcattcagttccaggcagacaggaggtgaccccttcccgccagccccccatccttggcaccctggtccccctcagggggccaccccgcggcactcaccgctctcgctctcggtaacatccggccgggcgccgtccttgagcacatagcctggaccgtttccgtataggaggaccgtgtaggccttcctgtcccgggccttgccaggggccagccctgcagagagaggggtccctgtggttgagctgaacacagctgtggagtgtctcccacgtgctaggcaccgccacgttttgcctggtcaggggcttagtcctcaggagaccctacagggctggtgccagcattactcccatttgacagaggaggagactgaggctcagatttcacccacttaattgctgcagcagcacctgccactctccccaggcctaccgaagatggagctccctcgcagggggtagcctccgaaggagaagacgtgggagtggtcggcagtgacgaggctcagcgtgtcctcctcgctggtgagctggcccgccctctcaatggcgtcgtcgaacatgatcgtctcagtcagtgcccggtaagccctgctttcatgatgaccatggtcgatgcgaccacctgcaggaaggccagaggggggagatgctgagcctgccctgctccaacccccaacccccactccccaggggccaccacgcaccctccacgaagaggaagaagccgcgggggttcctgctcagcaggcgcagggcagcctctgtcatctccatcagggaggggtccagtgtggagtctcggtggatctcgtatttcatgtctccaggctcaaagagacctgtgggacaaggggtcctgtggtgactggcaggctgggggtgggcgggtgctggcggatgtgcacacaggctcagaaggtgccatctgaggccatctgagggatgccagggcaggaagggggtcattacccatgagatgggtcacagacgggtccagggaagcctgcatgagctcagtgcggttccacacataccgggcaccctgtggggagggagagagccaggcctcagcccacagccctgagccccacacctctgccctccccctgctgtgccccctgcacccgccagcccccatcacctggcgcttcgccagccattcctgcaccagattcttcccgtccagcctggtcccaccttggctgtagtcatctgggtactcagggtctggggttcccatgcgaaacatgtactttcggcctccacctaggatcacctgggaacagaggatggggcaggtggatttggggccctggctggccccgtgccccctcctcatgcacagcccctgactcccctccccaaggctgtgggaatggcccagcctgggctgcaccttctacgcccacaaccccacctccagaccctgctggcccagataaggcttttggttgcctgggtctgagctagtgccccctccctgctactctctgcccagccccagcccttggcctgggggtcgc

SEQ ID NO: 5889 - DNA, 777 bp, Artificial sequence
  DNA replication origin
gagggacctttggctctcgaccagtgtcctgcacccagggcttcccaggagctcctcggatctcagttgggtgctgaaattggcatgtgggggtatggaacgtctgagaagttgagatttggggcaagcctttgccatgaggcagagggccccctgggggggtacaggggtgtggaattagcttagtggggggcagccgaaggctgtgtcaaaatccccctggtgatccccaccccaggagcctccttggccagcagggtggcaggaaaccacccttctccaggcgtcctgaagatcccgagtcctcaagtcccacaggtgattcaaggactgaagcaaagatcagcggggcgcggggtctgggtgcttcttttccccaggaagggagcctgcctggtacccactgggctgtaggtggtggctggatggcctgagccccctcctttcctggggtgcaggcagccacagggcacaacctgcagtccctggggttggggtagggagtccgagagcagccaaggggcaggtttggtgtcatgggctcagtccccagagcgcacggggaggggaaggttccatggcaggacctctgtatagggactccggggatgacgactcgggctggaggccaggcaggacgacaggaggtggggagcaggagaactccgggatggggaagcaggagccccagggacgggacactcagggagcagtggccgtctccagcagcagcagggtcccggccagcagaggaagcaacgcggggaccacggaccg

SEQ ID NO: 5890 - DNA, 1356 bp, Artificial sequence
  DNA replication origin
gcactttgggaggccgaggtgggcggatcacgaggtcaggagatggagaccatcctggctaacacggtgaaaccccttatctatgcgcctgtagtcccagctacccaggaggctgaagcaggataatcgcttgaacccgggcggcggagattgcagtgagccgaggtcatgccactgcactgcagcctgggcgacagagcgagattctgcctcaaaaataaacaaataaattttaaaaataaataaataataaaaggaagtgttagacaatgtaatgccagtactacttcctaggaggaaaatcatgagtgcctgtgggcacagtgtctggaggggtggataacgcaggccaggaggggctgctgaggagcagatgattgagcaggagacctaaacagagtggggcttgagcaaggcagaacagcagtgccaaggccctggggcagcgccagcaggtgctctgggaggccaagggctggatcagagggtgggtgggtagaggggtaaatctgagggtcaagagggtgggtagtgttggggagtgtgaagtctgagtagagggatgtggttggaggtctttaaggagtgctgtgacccgccctgggtggaaaataagtattctggctgctgccagaagaagggtcttgtcttttgggtggatggtgggggtggtagagggtagcagggagaggtgagaactggggaaggaactgactccaggtgtttctgatctccgtccgaaagcattcgggagcacccatcccaacacagccatgcttggtgagtaccacacctgccccaaaagaacattgaaaagaattttttttatttgaggcagagcctcactctgttgcccaggctggagtgcaatgaccttgtctcggctcactgcaacctctgcctcccagattcaagccattatcctgcctcaccctcccaagtagccaggggtcaacaagtgtgcaccaccatgcctggctagtttttgtatttttagtagagacggggtttcaccatattggccaggcaggtctccaactcctgacctcaggtgatccacccgccttggcctcccaaagtttgggattacaggtgtgagccacgtgtctggccgaaaagaattaaaggtgaaatcagccacattttccagcaaagtttacactattacaaaaaatacaaaaattagccaagcctcgtggcccatgcctgtggtcccagctactcaggaggctgtggtgggaggatcacctgaagtgaggagtttgagaccagcccagccaacatggtgaaactaaaactggtctaaactaaaacacggtctctactaaaactacaaaaattagccgggcgtggtgg

SEQ ID NO: 5891 - DNA, 1806 bp, Artificial sequence
  DNA replication origin
tcaatgaaggcccactacgtgccaggccccgtgcctggctcctcccccttcccatcagggccctcccaacccagggacccgcacgtgtgtgcagggagggggacaggggagaagactccactgtgcacgcgggggtggtggccccgccgagccctcctggtccctggtttccccagtgaatgaggctcgcggctggggcctctgcacccaggcctgtgtctctcctcgcggtgccccggaaccccgtcgggctgcggcgtctcattagcctgcctctgtccttcccgcagctgaggccccaggggccacgcggaggctcacgaggaggccggcggccacgcgcatcccgtagcccaggtggcccagggctgcaccccggcggcctcggcgccatggagtcctggtattcgctgatggcgcactacgatgagttccaggaggtcaagtatgtgagtcactgcggcgcggggggcgcttgcggggactttctgcccgcaggccaccgggcccaggccgggctgcagctctggaagcggcgcaagttgaacctgctgtcgggctggtgtttgcagccggcctctgctccatcctggcggctatgctggtgctcaagtacctgggcccggtcgcggccggcggcggagcctgtcctgaaggctgtcctgagcgcaagacttcgcgtgcaccgctcgcttcttggccgccaacctggacgccagcatcgacccatgccaggacttatactcgttcgcctgcggcggctggctgcggcgccatgccatccccgacgacaagctcacctacggcaccatcgcggccatcggctagcagaacgaggagcgcctgcggcgcctgctggctcggcccaagggtggacccggcggcgctgcccagcactaggtgcgctccttcttccgcttgtgcctcgagatgcgcgagatcgaacgactgaacccgctgctcatgctggaggtcatcgaggactgcgggggctgggacctgcgcggcgcggcggagcgccggggggttgctgcgcgatgggacctcaactggctgctgtaaaaaagtgcagggcgtgtacagcgccgccgcgctcttctcgcttatggtcagcctggacgacaggaactctttgcgctacgtcgtccgtgtgagtgcgcgcgttgagcgccccgccagctgccgtagacccggggcgcagtggccttgcccaggggtccctgagggcgggaggagggtgcgcgagaggagaggaagggaaagcaggggaggggagggagcgcacagtggcagcgcgcgggaggaggtcataagtaatttccccggggtaactgcggtgttcagcggtgcagccatttcccagccctctggcaggcagtggggagcgggtggggtgcgcggcaatatattcaagcttatgtacaaagcatttgaggtctagttgaagaaacaacttgaagaatggtctcgcagcaattacaaacaaatacccttcagcaattacaagaaggctttcaatgactgaacccgaatacttggttgtctgggttaaacatacgcatttgggtgatggccgctatattcttttttgtatctgattgctagggtgatggccgctatattcttttttgtatctgattgctaggcttctgtaaatggctctgtgctgccacccgaagcatctatgaccagggaagaaggatagaagcttattttgcgttggataaccagcaagctctaagaattaaagaagggggagatgtggggggtgcacgacgatatattcaaacttatgtacaaggcatt

SEQ ID NO: 5892 - DNA, 1071 bp, Artificial sequence
  DNA replication origin
gtcgatgctggcgtccaggttggcggccaagaagcgagcggtgcacgcgaagtcttgcgctcaggacagccttcaggacaggctccgccgccggccgcgaccgggcccaggtacttgagcaccagcatagccgccaggatggagcagaggccggctgcaaacaccagcccgacagcaggttcaacttgcgccgcttccagagctgcagcccggcctgggcccggtggcctgcgggcagaaagtccccgcaagcgccccccgcgccgcagtgactcacatacttgacctcctggaactcatcgtagtgcgccatcagcgaataccaggactccatggcgccgaggccgccggggtgcagccctgggccacctgggctacgggatgcgcgtggccgccggcctcctcgtgagcctccgcgtggcccctggggcctcagctgcgggaaggacagaggcaggctaatgagacgccgcagcccgacggggttccggggcaccgcgaggagagacacaggcctgggtgcagaggccccagccgcgagcctcattcactggggaaaccagggaccaggagggctcggcggggccaccacccccgcgtgcacagtggagtcttctcccctgtccccctccctgcacacacgtgcgggtccctgggttgggagggccctgatgggaagggggaggagccaggcacggggcctggcacgtagtgggccttcattgaaaggctgtccctcttcccttcgcctttctggtccaggacctgccccagccaaggccgggcagaatgggggtggggggtggagaagcggaggctggagtgaggaggtggggtcaggagcgcgtctatgctgcactttccgctttccgcgctggacacagacagaggctccacaaagcggccaaagaaccaaactttgtccttgcggaagtccgcaggatctaccactcaaccccgatcgctggctccttctactcggtggcccgacagcccacccgctccttccccaggggcgagcgccaacgccccagggtcgtggatacacagcccaccccctggacggccctg

SEQ ID NO: 5893 - DNA, 1339 bp, Artificial sequence
  DNA replication origin
ccacccacccccattcccagtctgtgaccccgacccgagccactcccggcttcaatacgttctccccagaacccaaacttgggtgaagtttcacctcccgcggggcgcaaggagacgaagccgggaggctccgcgcagcggccgcgatggcggcaacggctgcagggattcggcgccatttaccccgcaggtgcgcactcgagcaggaccaggactagcgggcccgctcgaaaccagagcctgagcctgagcagaactgcgtgggcagccgctgtctcccagcgcccgctgccttttctgccgccgagctgccagcccgaggggtccagccgtgtcccaggaccagtaagggcagcgggtactcccgggaggggtcccttcggatcccgcgtccccattacgagctgcccaccagccggctagaaaggggctggagctacgcagctgggggccgtcatgccccagcccacagccctggagcaccggccggggaggactcctcctaaaggataagggggccctgatggagtgcctgggctgcccgcacagcgcctgcgcaccttcaccagggagcttccttgtactcctgggaacgcctgtccaggatgaggtctccccagggcgtctgggcttctggttggcctcgctcacttcccccagttcctgatccagggagagcaacggagagccctgccagaagaaggcttggggctgcgagtgcggcccccatggtaccaatgcacagttgacccagagcacagcaatcgcggccaataggaggtgacttgggtttagcctgtgaccacacagtcctggtcaccctgcacagactgccaataaagaggggtccgaggcccagctccttggctcccctgcagtgtctccaaaagggaagctgaggctgtgggtgagtgggtgatgccagtggtccaggcccagttccaccttgcacaaaggccttcttaacctttcatcgaaaaatatttctgcaaggacatctgcccagcaaccacccgtccatcctcagactggtgccacgcatatccttgatccttgtagccaaggataaatatctcaaaacaatcctgtgatcctcctccattttcctttaaaaacctttgtcttccttcacctccctaaattcacacgtgctttcctatggcctgcttattcccaagcaatacctatttccaaagaaagttcattttattttagagtctttctgtatttgttatgcagtgtcacatagcggagccagaagtgggaccgaagtgaattcatcttggatgaatcagcgtgtcctggaatctaacgcagtgttgactgagccccccgcaga

SEQ ID NO: 5894 - DNA, 1120 bp, Artificial sequence
  DNA replication origin
ttttccctgatttaaacccaggcagcctggagtgcagctcatactccatacctgggatttccgcctcgccgctctccgactgcttccagacatgcaggggccctgggtgctgctcctgctgggcctgaggctacagctctccctgggcatcatcccaggtaatgaggctcccccagctgcccctacacacacacacacacacagggcaccccccagcccaggctgacctgatctttgctctccccctggccagttgaggaggagaacccggacttctggaaccgccaggcagccgaggccctgggtgccgccaagaagctgcagcctgcacagacagccgccaagaacctcatcatcttcctgggtgacggtgagtgagccaggccttccagccccgcagccctcacagccccggcgcccggaccctcagtggttccaggacagccctggggagcaagcctcacacacttctgctccttcagggatgggggtgtctacggtgacagctgccaggatcctaaaagggcagaagaaggacaaactggggcctgagaccttcctggccatggaccgcttcccgtacgtggctctgtccaaggtaagtgctgggctaccttagagtcctccaagcagagaaggggaatcctggctatggagtgtggtaggagggagggaccctaaacagctggggctccaataaggagctggaggcagttggaatcccagaggacagagatcagggtcttgtttgtctgccccagagaagagctcagagtgtctctgtccccagacatacagtgtagacaagcatgtgccagacagtggagccacagccacggcctacctgtgcggggtcaagggcaacttccagaccattggcttgagtgcagccgcccgctttaaccagtgcaacacgacacgcggcaacgaggtcatctccgtgatgaatcgggccaagaaagcaggtgagctggggcccgctgtggggtcagggccaggtgacagacctctatcgcatatcctgacctctatcaccctcaggaaagtcagtgggagtggtaaccaccacacgggtgcagcatgcctcgccagccggcgcctacgcccacacggtgaaccg

SEQ ID NO: 5895 - DNA, 2240 bp, Artificial sequence
  DNA replication origin
gctggggctccaataaggagctggaggcagttggaatcccagaggacagagatcagggtcttgtttgtctgccccagagaagagctcagagtgtctctgtccccagacatacagtgtagacaagcatgtgccagacagtggagccacagccacggcctacctgtgcggggtcaagggcaacttccagaccattggcttgagtgcagccgcccgctttaaccagtgcaacacgacacgcggcaacgaggtcatctccgtgatgaatcgggccaagaaagcaggtgagctggggcccgctgtggggtcagggccaggtgacagacctctatcgcatatcctgacctctatcaccctcaggaaagtcagtgggagtggtaaccaccacacgggtgcagcatgcctcgccagccggcgcctacgcccacacggtgaaccgcaactggtactcggatgccgacgtgcctgcctcggcccgccaggaggggtgccaggacatcgccacgcagctcatctccaacatggacattgatgtgcgacccccgggccaagggctggggctgggcagagagtagcagggagggggcaccagctcagacccaggcaaccaaaagccttatctgggccagcagggtctggaggtggggttgggggcgtagaaggcgcagcccaggctgggccattcccacagccttggggaggggagtcaggggctgtgcatgaggaggggacacggggccagccaggcccccaaatccacctgccccatcctctgttcccaggtgatcctaggtggaggccgaaagtacatgtttcccatggggaccccagaccctgagtacccagatgactacagccaaggtgggaccaggctggacgggaagaatctggtgcaggaatggctggcgaagcaccaggtgatgggggctggtgggtgtgctgggcacagcagggggagggcagaggtgtggggctcggggctgtgggctgaggcctggctctctccctccccgcagggtgcccggtacgtgtggaaccgcactgagctcctgcaggcttccctggacccgtctgtgacccatctcatgggtaatgacccccttcctgccctggcatccctcagatggcctcagatggcaccttctgagcctgtgtgcacatccgccagcaccctcccacccccagcctgccagtcaccacaggaccccttgtcccacaggtctctttgagcctggagacatgaaatacgagatccaccgagactccacactggacccctccctgatggagatgacagaggctgccctgctcctgctgagcaggaacccccgcggcttcttcctcttcgtggagggtgcgtggtggcccctggggagtgggggttgggggttggagcagggcaggctcagcatctcccccctctggccttcctgcaggtggtcgcatcgaccatggtcatcatgaaagcagggcttaccgggcactgactgagacgatcatgttcgacgacgccattgagagggcgggccagctcaccagcgaggaggacacgctgagcctcgtcactgccgaccactcccacgtcttctccttcggaggctaccccctgcgagggagctccatcttcggtaggcctggggagagtggcaggtgctgctgcagcaattaagtgggtgaaatctgagcctcagtctcctcctctgtcaaatgggagtaatgctggcaccagccctgtagggtctcctgcggactaagcccctgaccaggcaaaacgtggcggtgcctagcacgtgggagacactccacagctgtgttcagctcaaccacagggacccctctctctgcagggctggcccctggcaaggcccgggacaggaaggcctacacggtcctcctatacggaaacggtccaggctatgtgctcaaggacggcgcccggccggatgttacggagagcgagagcggtgagtgccgtggggtggccccctgagggggaccagggtgccaaggatggggggctggcgggaaggggtcacctcttgtctgcctggaactgaaacttcctactgaaactgaaccctccaaccagggagccccgagtatcggcagcagtcagcagtgcccctggacggagagacccacgcaggcgaggacgtggcggtgttcgcgcgcggcccgcaggcgcacctggttcacggcgtgcaggagcagaccttcatagcgcacgtcatggccttcgccgc

SEQ ID NO: 5896 - DNA, 1154 bp, Artificial sequence
  DNA replication origin
acatgcgcgagatagagctactgagtcctcggcccatgctagaggtcatggaggactgcgggggctgggacctgggcggcgcggcggagcgtccgggggtcgcgggacctcaaccagctgggacctcaaccagctgctgtacaaggtgcagggcgtgtacagtgccgccgcgctcttctctctctagatcagcctagattacaggaactcctcgcgctacgtcatccgcctgagtgcgattcccgagcgcccagccagcggccgcagacccggggcgtggccctgactaggggtccctgcgcgtgggaggagggtgcgcaagaggagagaaagggaaagcaggggaggggagcgcttggcggcagagcgcgggaggaaggcgcaagtaatttccctgggttaactgaagtgttcagccgagccgcgggagccgcaatttcccagccctctggaaggcagtgagggcagggagggagggacgcgccggcgggctgggctgacatctccgtgagggctggggctggcgccaaagccaggaaccccaagggtcagtgcggcactgcgcaagtgcccccgacaggtagggaaagtgcaggctttcaggggtaagctgagacagtcagggatggggctttggtcatctcgtctgggtggaaagaggggctggggtctgcgtgcttctgggtctctacccatggatgtctggtcgctctctgggcattggggtgaaaattccatctgtttggggagtctggcatgtggatctctgacctctggcccctgtctccctccctagattgaccaggatgggctcaatctgctagagaggactctgtacctcgctcaggatgaggagagtgagaaggtgctgggacatgggatggggaggcagggaaggcctggggccccaggatgggtgtccctaggctaggcctgtccctgtccctggatgagccccttcccgtggtgcagatactggcagcacacagggtgttcatggagcgagtgctcagcctcctgggtgctgatgctgtggagcagaaggctaaggagaccctgtggctgtagtgggggcagctgatgacaggggaccatggggcaaggctggctcagccctgattgctacgcccacccagatcactgtgtcagagtat

SEQ ID NO: 5897 - DNA, 1083 bp, Artificial sequence
  DNA replication origin
cctcggggcagctctcgggacaggcgccgccgcccgccgcgaccgggcccaggtacttgagcgccagcatagccgccaggatggcgcagagatcagcggcgaacaccagccccgaccgcaggctcacctcacgcagggttccagcgcggcagcccaggtcctggtggcgctgctccttgagagaagcctgggcggcagaaaggcccttgcacgatccccgcgccacagcagcttaggtacttgacctcctggaacgcgtcgtagtgcgccgtcagcgaataccgggctccatggcaccgaggccgccgcgatgcagccctgggccacctgggctatgggatgcgcgcggccgctggcctcctagtgggcctctgcatggccccggggggccaaagctgcgggaagagcagagtcaggctcaggaggcgcagcagcccgacggggctcccaggcaccgcgaggagagacgcaggcctgggtgcagaggccccagctgccggcctcattcactgcggaaaccagggacgaggagagtctggcggggccaccatccccgcgtgcacagtggagtcttctcccctgtcctcctccctgcacacacgtgtcggatgctggattgggaggcctcttatgggaagggggaggcgctgggcacggggcctggcacgtagggggccttcattgcatctctcttcccttcgcctttcttgtccacgacctgtcctagccaaggccaagtggggtgggggaaggagcagaggctggagtgaggaggtgcggtcaggggcgcgtctatgcggcactttcagctctccgagctggacacagacagacgcttcgcaaaacggccaaagaaccaaactttgtcctcgtggaagtctgcgggatctaccacttcaaacccgctcgctggctccttctgctcggtggcccgacggcccacccgccccttcccaaggggaacgcactattgctccagggtcgcggatacacaacccaccccctgcacggcagtgatggggaacccgagacctgtccgtctctatcccctttccgctccactcctggcttcaacaggttctc

SEQ ID NO: 5898 - DNA, 2178 bp, Artificial sequence
  DNA replication origin
tctatcccctttccgctccactcctggcttcaacaggttctccctagaacccacacttgcgcgaagtttcacccacgctggggcgcgagctggccgggcgagcccagagccatgcaggcgcggcgcgcagtccatggagcctcagagccgagcctgggagtcgcagccggcggatggacgcaaacaaagccgggaggctccgcgcagcggctacgaaggtgacggaagtggccgcggctgcagggactcaggcgccacctacccggcaggtgcgcgccggagcctggcagaggcggagcgggtcgggccgaagccgctgcctgagcaggagcgaagcggcgctagcggccggtgtctccccgctcccgctgccttctctgccgccgccccagcccgccgcccgcctgcctgcctgcccgagggagaggacgcgccggtggctccaccctcctccgcccgtcccgcgctcccttccttcctcctgcgaccctctggctacctggcagcgcggcggcagcggggacctgggtcgggggccgcggagacaggcttccgagggtcgtgcgcgggctgcggtaggggactccggatccagtcgcatcccgggactagtgagggtagcgggtacacccggcaggagtcccctccgatcccgtgtccccactcggaaccgcccaccaaccggttggaaaggagctggagctacgcagctgggggccgtcatggtccagcccacagccctggagcaccacccagggaggactcctcctaaggattgagagggcgctgacggagtgcctgggctgcccgcacagcgcctgcgcagagctcaccttcaccagggagcttcctttacctcctcggaacccctgtccgggatcagctctccccggggtgtctgggcttctggttgtctcgcccccttcccccagcctctgatccacggagagcaacgcagagccctgccagaagcaggcctggggctgtgagtgtggcccccatggtcccaataggcggttgtcccagagaacagcaatcactgcctataggaggtgacgtgggtttagcctctgaccacacagtcctggtcaccctgcacagactgtcaataaagaagggtctgaggcccagctccttggctcctctgcagtttccccaaaagggaagctgaggctgtgggtgagtgggtgatgtccgtggtccaggctccagttccctcactgtggggtcttcccctacccctgtgatatggtttggctctgtattcccacccaaatctcacctcgaattgtaatccccataatccccacgtgtcaagggcgagaccaggtggaggtaattgaatcatggggctggttccgcacgtgctgttcttgtgcgaatgagtgagtctcgccagatctgatggttttataagcgtctgacatttcccgtttgcgcgcattctctctcctgtcgccatgcgagaaggtgctttccaccatgattgtcagtttcctgagggctccccagctatgaggaaatgtgagtcaattaaacctcttttctttataatttacccagtctcaggtatttcttcataggagggtgagaacggactaatacaccctgattgcccaggtgaccccatgactcatatgcaagagcatggcagaccacagcagtgcccagcgacacccagtgaagccctgagtgacgcagctggatacctgatgtgagggtgagcgggtgggtagagtagccagagctgccttggagagagaaggcccgagggggtgccgggcacagaccaggcacagaccgtgagggcttcagaatctgactcgctgcctaccccctgactaacgacagatcccagtcatccagcctatgcacctcgtcagaatcaaaacagagttccttttgttaaaaatcctgagaagtaaagccaggaacatgaaggggatttatcatgcacaaaacctgatatcaagaactatcacagaagactgcaaacaaccagcttgcataatggccttcacaacctttcaccaaaaaatacttctgcaaggacatctgcccagcacctgcctgtccatcctcaaactggtgccactcatatccttgatccttgtagccaaggatgaatatctcaaaacaatcctgtgatcctcctccttttttctttaaaaacctttg

SEQ ID NO: 5899 - DNA, 1837 bp, Artificial sequence
  DNA replication origin
gcacctacgcacacacagtgaaccgcaactggtactcagatgctgacatgcctgcctcagcccgccaggaggggtgccaggacatcgccactcagctcatctccaacatggacattgacgtgcgacccccgggccaagggctggggctgggcagaggggaaggtggcacaggctcagatccaggcaaccaaaagcctgatctgggtcagcaggttctggaggtggagttggggatgtagaatgtgcaatacaggctgggccattcccacagccctggggaggggagccaggggctatgcatgaggagggggcacggggccagccaggcccccaaaccacctgccccatccattgtcctcaggtgatccttggcggaggccgcaagtacatgtttcccatggggaccccagaccctgagtacccagctgatgccagccagaatggaatcaggctggacgggaagaacctggtgcaggaatggctggcaaagcaccaggtgatgggggctggtgggtgtgggaggcacggcagggggaggccaagtgtgtgggtctcagggctgtgggctgaagcctggctctgtccctgcagggtgcctggtatgtgtggaaccgcactgagctcatgcaggcgtccctggaccagtctgtgacccatctcatgggtaatgacccccttcctgccctggcattcctcagacaacctcagagggtgccatccgagcctgtgtgcccatttgccagcaccctcccgctcacagcctgccaatcaccaccaagctccttgtcccacaggcctctttgagcccggagacacgaaatatgagatccaccgagaccccacactggacccctccctgatggagatgacagaggctgccctgcgcctgctgagcaggaacccccgcggcttctacctctttgtggagggtgcgtggtggcccctggggagtggaggaaggcggggcgcggcagggcaggttcaagcatcacccccctctggccttcctgcaggcggccgcatcgaccatggtcatcatgagggtgtggcttaccaggcactcactgaggcggtcatgttcgacgacgccattgagagggcgggccagctcaccagcgaggaggacacgctgaccctcgtcaccgctgaccactcccatgtcttctcctttggtggctacaccttgcgagggagctccatcttcggtaggcctggggagagtggcaggtgctgctgcatcaattatgagggtgaagtttgagcttcagtttcctcctctgtcaaaagtgtgcaatgctggcaccagccctatagggatcttgtgaggaccgagcccccgaacaggcaaaaagtggcggtgcctggcacataggaggcactcccacagctgtggtcagctcaactacagggacccgcatctccctacagggttggcccccagcaaggctcaggacagcaaagcctacacgtccatcctgtacggcaatggcccgggctacgtgttcaactcaggcgtgcgaccagacgtgaatgagagcgagagcggtgagtgaggctgaatggcccgtgcagggggaccagggtgccagggatgggggcattcgcgggagggggacgccgcctgcctgccctgaagtgcactcaccctcctaccagggagccccgattaccagcagcaggcggcggtgcccctgtcgtccgagacccacggaggcgaagacgtggcggtgtttgcgcgcggcccgcaggcgcacctggtgcatggtgtgcaggagcagagcttcgtagcgcatgtcatggccttcgctgcctgtctggagccctacacggcctgcga

SEQ ID NO: 5900 - DNA, 1461 bp, Artificial sequence
  DNA replication origin
ggcaccatcattggacatgagctgacccacggctacgacgactggggtgaggcctgttggggccccaggggatggcccggagggggcaggacaggcagtggagaggcagggtaggggatggcctaactggggctggtgggtggggaggggagggggctcaggtgagggtgggtctcagcctgctgcactgcccacagggggccagtatgaccgctcagggaacctgctgcactggtggacggaggcctcctacagccgcttcctgcgaaaggctgagtgcatcgtccgtctctatgacaacttcactgtctacaaccagcgggtgagacccccacctgccccttgtgcccctcaggcctggtggggcacgggccgggagcatcacgcacacccttgcgcacgtgcacatgtccaaacaaaacctgtgcccaggtccctgcacacacattcggttcccacgcacactcacgtggacagataatgagtgtccgcagacttacggaggacaagggggttgggaggaaagagtagggttggagccccccctcaaactctctgggcaagggaaggagaggggtggtaggaattaggggctggggcccagggtatcaatgcctgagggaggccagctgggccccaagcagccccctggcctcttcccttcccggcaggtgaacgggaaacacacgcttggggagaacatcgcagatatgggcggcctcaagctggcctaccacgtgagcggcctgcctgtgctccacccctgctgcaggagggacgggggctgatgaggactccagatgagggacagagctgcctctccctgcccaccctgctgagctctggcctggggtggggcagggcatgtgctggggccacggtccactggaagaggaaggattcacgggccccccttcacagggagagcagggagggctacctagatggaggacagagaagaagcggtgcccagggtgggcgggcatagcaggtccatgctctctgtgtccccaggcctatcagaagtgggtgcgggagcacggcccagagcacccacttccccggctcaagtacacacatgaccagctcttcttcattgcctttgcccaggtgggctgggtgggggattggactgggagccttggggtggggacacggcatccagggtcagtcccagtcctgccttgcccaggcttcgcatggacagcctgtctgtcatcacctgtcccgtcagaggtgatggtcctgtggtgctgagggggcctaccgccttgtgtgctgggtggggggcaagggggcggatgcctggcttcatctccccctcctcccctccaccccgctcctggacccagaactggtgcatcaagcggcggtcgcagtccatctacctgcaggtgctgactgacaagcatgcccctgagcactacaggtatgcccacctgcccgcctggccttgtccac

SEQ ID NO: 5901 - DNA, 1827 bp, Artificial sequence
  DNA replication origin
cgccatccccgacgacaagctcacctatggcaccatcgcggccatcggcgagcaaaacgaggagcgcctacggcgcctgctggcgcggcccgggggtgggcctggcggcgcggcccagcgcaaggtgcgcgccttcttccgctcgtgcctcgacatgcgcgagatcgagcgactgggcccgcgacccatgctagaggtcatcgaggactgcgggggctgggacctgggcggcgcggaggagcgtccgggggtcgcggcgcgatgggacctcaaccggctgctgtacaaggcgcagggcgtgtacagcgccgccgcgctcttctcgctcacggtcagcctggacgacaggaactcctcgcgctacgtcatccgcgtgagtgcgccccctgagcgccctgccagcggccgcggatccggggcgcagtggccttgcccaggggtccctgcgcgcgggaggcgggtgcgtgagaggagaggagggaagagacgagcaggagaggggaggggaggggagcgcacagaggcagagcgcgggaggagggcgcaagtaatttccctggggtaattgcggtgtttagaggagccgcgggagccgcaatttcccagccctctggcaggcagtgagggccaggagggagaggcgcgccggcgggctgggttgacgtctccgcgaggtctggagctggccccaaagctaggggtcccaactgtcagtgggggacctacgaatgccccggacagataaggaaagtgcagacgtacaggggtaagattgggcatccgcaggctgggacagtcagggatggggctttggccatctcgtctgggtggaaagaggagctggggtctgcgtgcttctgtggctgtactcatggatgtctggttgctctctgggcattggagtgggaattccctctgtttagggaacctgaggtgtgggcctctgacctgtggcccctgtctccctccccagattgaccaggatgggctcaccctgccagagaggaccctgtacctcgctcaggatgaggacagtgagaaggtgctggggcatgggatggggaggcagggaaggcctggggccccaggaggggtggatccaggctaggcctgtccctgtccctgggtgagccccctcccctggtgcagatcctggcagcatacagggtgttcatggagcgagtgctcagcctcctgggtgcagacgctgtggaacagaaggcccaagagatcctgcaagtggagcagcagctggccaacgtgagcagaccaggactggaggctgccctgggcttgagggagggcatcatggagcagggctgggtcagctgtgatctctccccacagatcactgtgtcagagcatgacgacctacggcgagatgtcagctccatgtacaacaaggtgacgctggggcagctgcagaagatcaccccccacgtgagtgtggcccagtcctcgtgggcaggcagggttgagggcaatgctgctgctgggactacagggtcatctctccccagagatgggcaaaccgttccttggccatggactctcatgtcccctcgctgcctctctctgccccctccctgtcttctgtggcccctgccaaccctagcctcactgtccctgtccttggtctcacagttgcggtggaagtggctgctagaccagatcttccaggaggacttctcagaggaagaggaggtggtgctgctggcgacagactacatgcagcaggtgtcgcagctcatccgctccacaccccaccggtatggctgcagatctggcattttctgcccagcggtcactaggtccttcccctgcacc

SEQ ID NO: 5902 - DNA, 1189 bp, Artificial sequence
  DNA replication origin
acccacgtccgcgctgccgccccactgccaggtggcccgagagatgcaggaggaaggaggggcgcgcggggcgggcggaggagggtggagccgccggcgcgccccctccctcgggccggcaggcgggcggcgcggcgggctcggcgcggcggcagaggaggcggcgggcgctgggagacaccggacgcccgctcggctgcgctgcggctcaggcccccgctcgggcccgacccgctcggtcaccgccggctcgggcgcgcacctgccgggtaagtggcgcccgagtccctgccgctgaggccaccaccgcggccacttccgtcgccgccgccgccactgcgcggagcctcccggctttgtctgcgtcctctcggctgcggctccggctgcggctgcggctgcggctcccgggctcggctctcgggctccgcggactgcgccgcacggcgccggggctcgggggtcgccagccagctcgctccccgccgggggtgaaacttcgcccaagtttgggttctggggagaacctgttgaagccaggagtggctcggggcggggacagagatggtgggagtggggggagggaacccgtctcgggttctccatcagggccgtccagtgggtgggttgtgtgtccgccaccctggggcgttggcgcgcgcccctagggaaggggcgagtgggccgtcgggccaccgagcagaaggagccagggagcggggttggcgtggtcgatcccgcggacttccgcgaggacaaagtttggttctttggccgctttgcggagcgtctgtctgggtccagcgcggagagctgaaagtgtcgcatagacgcgcccctgaccgcacctcctcactccagcctccgcttcttcccccactccacccggccttggctggggcaggtcgtggaagagaaaggcgaaggggaagagggacgacctttcaatgaaggcccactacgtgccaggccccttgcctggcgcctcttgcttccaataagagccctcccaaccctgcggccctcaagtgtgtgcagggaggggacaggggggaagactccactgtgcacccgggggtggtggccccgccgaaccctcatagtccctggtttccgcagtgaatgaggcccgcggctggggcctctgcacccaggcctgtgtccctcctcgcggtgaccctgagcccca

SEQ ID NO: 5903 - DNA, 3144 bp, Artificial sequence
  DNA replication origin
cgacccccgagccccggcgccgtgcggcgcagtccgcggagcccgagagccgagcccgggagccgcagccgcagccgcagccggagccgcagccgagaggacgcagacaaagccgggaggctccgcgcagtggcggcggcggcgacggaagtggccgcggtggtggcctcagcggcagggactcgggcgccacttacccggcaggtgcgcgcccgagccggcggtgaccgagcgggtcgggcccgagcgggggcctgagccgcagcgcagccgagcgggcgtccggtgtctcccagcgcccgccgcctcctctgccgccgcgccgagcccgccgcgccgcccgcctgccggcccgagggagggggcgcgccggcggctccaccctcctccgcccgccccgcgcgcccctccttcctcctgcatctctcgggccacctggcagtggggcggcagcgcggacgtgggtcggcggccgcggagacaggctcccgggggtcgtgcgcgggctgcggtcggggactccgggtccagccgcgttccgagacgagtgagggcagcgagtactcccgtgaagggtcccctccgatccagtgtccccactcccagccgcccaccagccggctggaaaggggctggagctggagatgaggagccgaggactcctccgaagggctgggggcggtgtcagtagtgcctgtgtctgccggcacagtccctggcgcagagcgcaccttcactaaccggcttttttgtcctccttggaacccctgccctggatgggctctccactagggcttctggttggcctcgctcccttcacctagcccctggtgaagggagctcagcggggactcctgcaagaagagggcttgccgcccccttccccatcctccccagccttgggtggccctggcaccacggctcagggagtccctggcccaggtaggaagaaaaggccaagagaagaatgagcgaagtctccctgctggagccagggaaggctggagcctgccccctctggccagcagccctaggcctcagacaggccctgagcctcaagaccctggtatgtggactgatgggagggcaggctgggtgcagggactctgaatttactcaccgcctgccttcttccaggtaaactggctttttaaatgtggggcctccccactgcctggaggcaaagccctcttctacctgcctgcctgccttggccagacagcctggccctaatgggacacagagaacttggggctccttggaagactgatactgtttctggagtctctgctttctctgccctaccctgcctctggtgtctctagcaggagaccccacaaagcaccagccctcccaggtctgccggctccagcccgtaggattggcttaaacaatgtgtgagagccatggagcaccatctaataaaaatcacaacaaggtagggactctgataacctacccatcatcctgttctcctcctcagggtctgtgcatctgcccagctcctgagccctggccctgagtgccggcctctgcccctgtcttgcctctccctgcctcttcatctctccatctctaagcccccactccggataccctgcctccatctctggccaccccagggttgtcctctgccccatgcatccttcttgggtcctattaattctaaagaggaaaaatggaattacttataatgtggcgattccatgaaggggggaggggagggcagggaggtggcaaagtggctctttgtgcttttaatctgcatttttccctcaatgttcccgtctccaggaggataattttccagccttttcaggccctgattggtatcatttctccagcaaggacagcttttattttccccgaaatgaatgccatgaaatttccaagaaatgtaaaaatggatattgtctcagagagcctcttccgacagaaaggcacagaggcaaacacgcttccctagggactcttctgctccagtcccgggggtggggtggggggcagcccccaggccctcagtctctcctccctccttttgccctccctcatcccttcctcctccctcccgggtcagctctgggaccccccttccagccaccctctcccagactcagctgctattggtctgctcatgggcctcccgactccctgccgggcgacctgcctggctccacctcaccttttcttttcacatcgcatcccccagccccgggctgagagcagcaaccagggcctacaggagttgacttggaattgggccctctgacccctcagtcctggccaccccacacagactgccaataaagagaagtcagaggcccacctccttgactctccggcaccttctctgtaagggaagctggcactgtaggggagtaggcaccagtggtctggcctgtagcttgctcactcttttgggggatctcttcctacccctaattaccaagatgaccccatgactcatgagaaagagaatgacaggccacagtggtgcccagctaaacccagccaagccctgagtgaggcagctgggtgcccagcttcagggagcagttgggtgctgccagagctgccttggagagaaaaggcccgaggggatgcaagggggcagagatgaggggttcagaacctgactctctgtctcctccttgaccaagggtagatcccagcaactctgccgaacagggcatcacttggtttgggttctggacatagagccctccctgaggacagtgtgctgtcaccagtagcttgcatctgttgcacgttcaccatgtgggctgctaagtgccctgctctgaggtggggctgcccacctaacgccgggcctggtcctgactggagcccatttgtggtcggacccgcctctctcctgcggcctgcacgtgggtggggatgaaccccttgccctgcctcggtgtgctgcagcagggtgtcagctccaggacgagccccgccagcctccaccctgtccaaccaggccctactcctcccctgcagatctgtggtatcttctgagccctaaaaacacgcctccagccagcttcctgtcctccacccggcctctcggggctcatcccatctattattcacagcacaaaatggatttttaatttgagaaatgaaatgactctcccaagt

SEQ ID NO: 5904 - DNA, 979 bp, Artificial sequence
  DNA replication origin
gggtgggagggtgccaggggctgtagggaaagcccccaaatgatgagggctgcttgggcaagtggggcctccttctgcgcagacctcgagggtggccaggaccccatctctctggggtctgcgtgcagaccacagggctctgcatccacaccacgtgtgccctggcagtgcccgtccctgtgtgcatgactggcacgtgtgaacacccgtgtgtgcacgtgagcctggcagcaacctggggcggtgcaaccctcaggatgagcaggttgtgctggacaggcagcgcattctcctgcaacaggcttttaaaataattgcctgtgaccctgagcagtagctctctgtccgctggctgcccctgccccaggcgcctgctgccaggggtcactgctctgtccatctgcagagacttgggcacctgtgctgtacttggggatggggcagggagggcgggtgaggtggccccgtgggtggcctgaggctgggggcggtgggtggtgggtggctgattgaagggataattgcaggcagcaggccttagctaatgcatgctatgataaagccccattactgagggaggccgctgaagcatgggggtggaggctgggggggaggccgcctatggggcgctgacagcctttctcatgggagggggagtgggcagccactgacacctctgcagtcccctaccttccagagctgcagccagatgagtggggagagccaggccccaggggtaggagggacccgccccacagacacgcacgaccacccccgggcaaaggtctgcaagcctccactcagttgtctaggggcccagcccccatggaggagcagcagtttcctggccattaatcttggggttcctgtactgtggagcctcccagcctcaatgttagggagtatcatcactgggttgtagaggtcagactgggccaggtgaggtggctcacgcctgcaatcccagcactttgggagg

SEQ ID NO: 5905 - DNA, 877 bp, Artificial sequence
  DNA replication origin
aactgttctgataggacatgacacccatggaggtgctccccatcattgaagcaaaagggttgaaagcccaggctctgaagtcagagtgatctggattcaatcccagcgccaccctccactagctgtggacaggttacttagcctctttaggcctcaattcctttgccccaaaatagggacagtaatatctacccaggctagatttaagtgagatgacttccaaagagggcagagaagagccttgtccccatcatgggcagctagggagtggcccagtgtgggcagtccttgtccaagcccacccctccctccaggaaggagggaggacagccagaagccctgagcttccctccccattctcctccaggccctgatcacttcccacacccatcatttctccccacaaggagaaactgggcacggctgaccccaacgagatgaagttccccagccagctgctccagggcagtgagaagacccccagggcagggccaggaggcagggatgagggcagagactgcaggatcaaggatcatggggtgtttggggccactgggacatctgggaaggggccccacagaggccagtggagtcccagagcagagggtgagttttctccctgctacctgctgagtgaccctgcttgagcccttctggtctctaagcctccatttcctcatctgtaacatgggaataataacaggaccaacctctcagggctgtcatggggtttatgaggtgatgctgtgaaagtctcgagtggtagcatgtctggcacacagcagggccttagccacacacgcacccacacacatgcatacacatatatgtgcagaaacacacacagggctggctctggagccccttccccctgccc

SEQ ID NO: 5906 - DNA, 1050 bp, Artificial sequence
  DNA replication origin
cctaccgcccacccccaccccacctatccattcctccaccccaacacacacagtctccaggagcctcggctgtgtcaccagcctctcagagctccaagggcaggggatccctatcagtgacacatgggcctcatttccttctcgggctgaggatgctgtcacacctcaaagacccccagagccagctctttctctgcagggagagagccctgggcaccacaattgctgggcatgggcagggttcccagctcctggctgggctctcctctcctgcccaggctgtggactgaggtgtcctggccagctgtggctttcagggcccctcctggggtcagtgccagggtggacgtgggtatcagctgtgtcctccattaaacattcagggcccttctgggagcaaggaggcagatctgccagggaatgggggaggggtgggaggagggggaggggagggctgccacgggcaaggggagggggctgcggagctccgtgcattaagcgatcagagagcacaatatttcattgccggcaatcgcagccaagacatcaactacttggggagagcagccttaaaagccttttgattttatttcttccactttatttttttttttcctttcccttgctggtgtccttgacaaggcttcccttccccctatcctgccccttccccaaccccagctgtaatgctcctcaggggcccagaaacctggctggggaggggctgaggctatgggctcggcttctctaaggctgagagggtccccctggggcctgcagcacccccagccagacccaggactgtgtgtgcgcacgcgtgtgtgcaggtgttgcttggagactcctgtgcccttgcgtgcatgtatgtgtccctgggcaccacggcgtgcatatctgaagtatgctcctgctgacacacacctgcgtgcgcacaggcccccgtgtgcacacgtgtgtgcatgcttgggtgtcaatgttcacgcgtgtgtgcgtgcgtcctcaccgtgcatgcgcccacagaaaataccaccgaagtaagagacggaagag

SEQ ID NO: 5907 - DNA, 983 bp, Artificial sequence
  DNA replication origin
attcccgagcccggggagggagggggcgactgttccagtcaacacttccccgcgctcttccccgaccctcccagagcgttcccgctgctcagggcgaggagcagctgcggccagtttgtcctagcggtttaggaggcagggaggtttcctccagcctggagctctggctcgggccctcgggccccaacaccttcccgctgagaccgcgggcgttgtccctgggtctctctgcctccatttcccccacctccattctggttaccccttccccccactctttccttcctaacccatgagagcactggaaagatgctagaaagtcgggcttctagagccccagccctgcctcttgttcctgcgagactgtgggcaggtaatttagcctctcagcccctttcatctgacgctgggaagtaatgaggagaccccacttctctgggaagttcaatgatatgcgtaaagggcttagaattagcagattctggtagccagtgcgttacggttttgcactggggaggcagagctgccgcgggagtgtggcttctctagaaagatccctgggcacttcagtgatgaaagtaccacagtgaggattgtggtgatgcaaagggcggaagagtctggtggggctgccaagtgggccaggctggggtccctcgagatggagtcccttgagatagggaggctcacccacaccagggatcccaccccaaactcaggcttcgcctccctctgcttctaccaggttgtgacactgacccactgggcttttcacattacttccacacctttgcttggcccttcccgctttcacccattggcaacttaattttgaatgcttaatccatgaacagtatcatccccatttcacagacaggagaaggttcaaagaggcagaggttcagagaggttaagtgacttgccaaagacctcacagctatgacatggcatagctgggatttgaacccagtgctctggcctca

SEQ ID NO: 5908 - DNA, 1259 bp, Artificial sequence
  DNA replication origin
gcccgccttctgctgcctttcggcccccgggcactgaattcttgtccctcaaatcatctgaccccgttctcttacatcaaaattacccgcctccctggtcagccctcacctggcccttaactcctaggagcccacaggggaatggggctgcagggtctttatagaggacagcctgggggaggggtgcacgggagggtggccaagactgggggaggagtggggtagtgggcttgaccttcacctctgaagtctcatcatcccagctccgagccccccttctgtcaaaggagcccttgtttctgcggctccatcaaaggggccaagacagggaagaagggctgacggttgggctgcaggccaggcagaggggggctgctgggtgggggcgggccctggctccagggctgggatggggggggatccccatctgcctctaccccctgaggagcttacagctatgacggggcagacactcctggagggaggagggcagggggtgtctggggtttctcagcagccccaccccctgaggaagccctggagctccccacccctctgcccctaattgcttggcagagtccctccccaatgtggccatttctaaagatgatcaaagcagcctaattagcgccgtaattgccgcactgggggtggtggggtgggaaggggcagaggcaggcagccgcaggagtggcgcggaaagggaggcgggagatgaaaggcccacagtggcccagttccgggaggacaggccctagcagcttctgacgctctcccagaccccctggccctgcacagtgcccgctctgcctgtccggcattgttctgtgaccctgatctggcagtgggattcttctggagtcctctggagtctcatgggcagggccacacagctctcctgggactgagttaccacctggggtaggatagtgcccgtctgcgctgcccaggctccccaattcatgtgaggtgaactggtgggaatatttatcagcaaatgctatgacccggggctctttccccctggagagccagctgttccacagtgaccagcacaccatgctaaggagccctttccccagttaccaccgcacctcgccatgacaatacctctacttcaggaatgctctgaaaatactgtctgcggatgattctggtgagtgaatttggtgaagttggaaaggactctattcaccagagtatctgtccatcttgcagggtatctttttatccatgacctccacaatcttggtagataa

SEQ ID NO: 5909 - DNA, 1357 bp, Artificial sequence
  DNA replication origin
ggctgtgctgctgctgctacccctcccaagctcatggtttgcccacgggcacccactgtacacacgcctgccccccagcgccctgcaaggtaagtccaggctggcccgagagccgcggggttgggaggaatgtagaggaagtgggaccctgggcgggcggggacagaagagcttgtcacccccactcataaggacctttggctccttctgcccaccctgctgcgagaaggggccaagaactgagatataggtgggagaggaggggtgtggcgggaaagggaaggggagctgttgagcatgccgaaaggaatggagagaaggccccaagaagcagagagaaacggcccggggcagcaccctgcccttggctgtcccggccgaaggtgggccactcaaacacagctactttcagtcaataaagctgagttctgcgatgtctgtatctttggggtggtgtctttaaaaaaaattgttaaggaaaagcacctttcaaagatcccagtccagctcagttgaattagggagacatcttgggctgagaacctgggagcacgggctctgagtgctgggcccagcgtccccggggctcacttgcctcctcattctgtcccaggctggtgggtctcccgaggcagggctcagggctggggccaggaggatgaggctgaggctcttccccaaccacgcatgattgtgtgccccctgtcccagcagttctgtcggcccaggggactcaggcgttgcaggcagcccagaggagcgcccagtgggcaataaaccgagtggcgatggagatccagcacagatcgcacgagtgccgaggtgcccaccctgccccccgtgccccagtgagcttgctgcctaccctgggcccattctgctgcctctgtcccttcccttcagtcttcactctcctcttgggggcagagactgtgttgggccgcaacctagactacgtttgtgaaggtctgtctctccgagtggaaaggacacgctaggcttggggcatggcctgtgcaaaggcagggaggcggaaacactctgggctcctgtggtgaccaggagaagttcatggttgctgaaatagaacccgtgtgggctggagggctgagcgcgaaaggagagatggggagagagaggctcggcccagcctggggtgaggacaggcgagagggcagcagtgagactcaaaggtctgtttctctgcaggatctgggcgccccaggcctcaagctctcctccaggacccacctgagccaggtgaggttgaaaaggctcgagggggcaggcctgagagccgggtgggcctcgaaggcgaggatggccagaacatgtccctcgtgacaccccttgcccc

SEQ ID NO: 5910 - DNA, 830 bp, Artificial sequence
  DNA replication origin
cctcgaaggcgaggatggccagaacatgtccctcgtgacaccccttgcccctttctagggccgtgcggcgagaggcgtccgagcactgccaatgtgacgcgggcccacggccgcatcgtggggggcagcgcggcgccgcccggggcctggccctggctggtgaggctgcagctcggcgggcagcctctgtgcggcggcgtcctggtagcggcctcctgggtgctcacggcagcgcactgctttgtagggtaagtaggacccccaggccttgcccagctggggtccccggcgctgggccccgcacctgccgggttgtccggcgggcgacgcgcgggaaaggtggtctctgctgccccctggcggcggccggccccgggcttccccatctcaaggcgccgcgcccgccccgccaggatgccagcccggagggggtggcacggccgggcgagttcgccccctctgggacgggacccctccccggcccgccctccgtgcccccaggtggagaaagcccggcatgcgggcggaggggcagggtctccgaggggcctgcggggtgtgcccctgtccttcctgcgtctcagctgccgctcgacccgcagcgccccgaatgagcttctgtggactgtgacgctggcagaggggtcccggggggagcaagcggaggaggtgccagtgaaccgcatcctgccccaccccaaggtgagaaggcagtccccaggcccccaaggctgggcaccgcacccccacccgtgcttccttgaccctgcgccgcctccccctcctcagtttgacccgcggaccttccacaacgacctggccctggtgca

SEQ ID NO: 5911 - DNA, 1398 bp, Artificial sequence
  DNA replication origin
ggcggagaaagtggctgtgccgcgcgggtggggccgggccagggctgggctgggctggagggcgcggggtacctgagtgaagccgcagctcccgggcggggtgcagaggagactccctgagcgctggagcggggagagccagggcgggggccaggcgccgcagtcccggacgaggcccgagcagctcctgcgcgttccgcagcaggcccagcagcgtgtgcgccagcgagcgcagctctgcggaccggacaggagtcggagcggcggtcagaggctggccaggccccctcccctctgccccccgtccgggtccgggtgaacagaactgaccgcatcgccgccggcgctgcaggcactgctggtgcgccaggcgcgcacaggcgccctgggaccccgggcacaggcgggcatagaaggcgcagagccgggcggcgtctgcctgcagctcctggggggggtcccaggccagaagctccctgcagctgggctcgcggctggaggaggctgctgcgggcgggacaggggtcagctcaccctctgtttggggccctagccccctcactccttccccggaaggagacaggctttcccgaggcagaagggagctgggaatgggcatgggccgggtggaaacgggcttgtcccacggttgtccgttggggcactggggacggggcattggaaagagggcgctcaccgctcatctgctcctggagccagtccttgaacactgccacgcgggtgtagaccccgggcttccctggctccccgcagccgtccccccaggaggtgactccgaacaggacctctctagggcgggggccaggctcagaacaggtcagggggcctcccgagtcaccctgcggggccaagagagaggacgctgcattcacctgccccctatgacgcctgccttacgcctggcaggtgtgagcttgccacttgtgtccattttagggatgaggacagagaggctcagagaagtcgagtgacagacagacgtggaaggaaaagaggccgtagtggccctgggaaggctcagccggccttttctcatcagactgggttcatacctggcacgagtcaacgccccccgccaggtacccggcgcagagcatggtgctggggcgcagcccgggccccagggctcttcggcaggtgtcggtgctgagcaggggaacacgggcctctctcactgcttcagcctcaggcccgtctgcagggaaggggtggaaggctcaggtttggagggcaagagccccgccttgagggtccccttcccaccaccccccttgattcctccccctttgaaagagcaggcagcatttttccaaggcaacccggcctccctacactctattacctcggacccccagttcttcccaccacgcgccggct

SEQ ID NO: 5912 - DNA, 792 bp, Artificial sequence
  DNA replication origin
caccagcagtgcctgcagcgccggcggcgatgcggtcagttctgttcacccggacccggacggggggcagaggggagggggcctggccagcctctgaccgccgctccgactcctgtccggtccgcagagctgcgctcgctggcgcacacgctgctgggcctgctgcggaacgcgcaggagctgctcgggcctcgtccgggactgcggcgcctggcccccgccctggctctccccgctccagcgctcagggagtctcctctgcaccccgcccgggagctgcggcttcactcaggtaccccgcgccctccagcccagcccagccctggcccggccccacccgcgcggcacagccactttctccgccgaggcggtaccctaaccctgtgcctccccaggatcgcgggctgcaggcactcggttcccgaagcggaggccggagccgcgcggagaagccaacggtaatgacgccccctgccgaccttcaggaggggataggctgagggcctggacgaggtcggaagcgcttctactgcagctccggaaagggcttaccccatggggcaacagggtggactcgttctcccctccccgccatagagcgtatgactcttttggagtacttgtggttttagctctcatcagtgtcaaacagagatgctttgcctggtgttactgcttaacttctccgagcctcagtttccccacctatagcataagaggataagtgtgtcccctgggaggccatcctgaggtgctggtgggagtgccacccccagttccataccgcaaccg

SEQ ID NO: 5913 - DNA, 798 bp, Artificial sequence
  DNA replication origin
cctgggagtggggaccccagaaggcggccccccacagggagagatggcagagtgggagtggagtgagtgaggagccatgcggtgtggggcctgggtaagcatcacgggggaccccagggtggggagggtgtcttcccttaccacacaccgccagggcagccagcagccccagtgtcagcactggcccctccatcccatccctctgactgggacgtgcatctgcccctcctgtctacagggctgtggaatgagggtgggcgggagaggggacaggtgttgggggaggagggggtcaacgggaagaggcagccggaaacacaatctgacacctcatggcggtgggggacgggccagccagggcaggagcccaaggacatgaggcaaagatcccaggctgggactccccgcagctcggaggcggggggtggggagggagggccgggggggtgctgggcggagacgctgggcactggggccagcgctgggcagccatgcacgggggcggggcaacaggcaggccagctgctgctgcttctcaggaggcaggagataggctcagataggggccttacagcccctttccagcatctgttacccttgccaactgcttccagaggcagccctgcctgggccccacccctgagactgaatgtccacccaccaggtcccatcccaagaaagctccagagttgtttccgtgtattataaataacatttattaaagcagctgtgattctctgattgtaaacctgggaagacacggggggcccaggacccccaccccatcccacccacaca

SEQ ID NO: 5914 - DNA, 880 bp, Artificial sequence
  DNA replication origin
ctgcccttctgtgtctagctgcgtgtgtgaggagctgtgtattggtgtcctaagtgtgtgtgtgtgtgcacgtgtgtgtctctggggtggacagggccagtgtgtctgtgtgtgtctgagggacctgcccacccactggcggctgttcccagcacctgtgaagccttcaggatcaatgatgatccactccacggggtaggtgcggttctccttggcatcctgtttcaggctcagggtgatctctttggccgtatacttgagggaactggggagggcaatgggcagagagtgacactcggccagtggctggggccacagagtggggaagggctggtaagggaggaccattgtggggagggcagcactaatccagacagggcaggggcctctgtctgagggtgcttcagtcaccttctttggcctctggcagggtgctttggggtgaggggtggctggagaaaagggcacacctgaacttgagggagcagttctgccagtcgaaggggaaataggtgacagagatggggcaggaggagcggaagatggcaggtggcagccagtacacgaagccgtagtggtagacaagcacgttgcaggagtaggagatctggaaggagccgtcattgctgggggacagggacaagaaccatagtgagctctggccactcacgactggcagagttgggggaggcagaggaggcttaaggaaaggaggcagggtgacagaggggaggtcagggagggcttggctcaacttgttctccagcacaatctctgggagccacaccatgtccggggggaggcgcaggacactgatgtttccaaattcttcagcattccacttcagccggttgtctgtccagccctggaatcccaaagg

SEQ ID NO: 5915 - DNA, 1252 bp, Artificial sequence
  DNA replication origin
caactcaaagaaaaaaaaaaaaacaacttttccataaagctccagtagacatcccgcaggtcaaaacatcacatggctagcctatctgaagggagactaggaaatgagtatcttgctctaccagccattataacagagggtggcaaaggagaagtagtgttagacaattctacagatgattttctctgaatgggtcctgtccctgcacacgtaacccctgcaagaaacttccattcctcattgatgatttacccttcggagaacaccaagaaggcttctaggccatctctcccagagcagagaaagggagaaaacaggagggtggagggtaggggatgcagggacaggtggtccactgtttggcagtgcttcctgatcatggaggccattgaatttggtaaaatgtgggcatggaggagagtaaagaggtggagagaaactggtctgcaaaagaggataagaaaactgcatctagggggaccagagggcaaaatggaaaggcaaggctctcagaagtgagaaggaaacgagggctttgtaaattccaggaaaagtgggccacacagagagaagctcagtgggggggatgcccagggagggggaagctcaggaagggggaagctcagggaggaggaagctcagagaggaggaagctcagggaaagggaagcccagtgagggggaagcttagggagggagaagctcagggagggggaagctctgggaggaggaagctcagggaaagggaagcccagtgagggggaaggtcagcgagggggaagttcagggagagggatgctgagtgagggggatgccgagtgagggggaggccgagtgagggggatgcccagtgagggggatgcccagtggcaggccaagatgggtggatcacttgagttcaggagttccaagactggcctggccaacatggtgaaaccccgtctctactaaaaatacaaaaaagaaaaaagaagaagaagaagaaaaattagccaggcgtgttggcgcatgccagtagtcccagctactcagaaggctgaagtagaagaatcaaggtggaggttgtagtgagccaagatcgcaccactgcactccagcaaaaaacaaacaaacaaacaaacacaaaaaccctcacatgcctacccaacagccttcacacccacccaaatcctgactccctggagggagtaggaggcagtccacctcagccctctctggagccgctgtcaggttcctcggcgacctgccttccc

SEQ ID NO: 5916 - DNA, 1103 bp, Artificial sequence
  DNA replication origin
cagacacccagacaccggcggcctcctcccaccaggctggcagtcgctgagccctggcgcctccttaaagccgcagctccgccccgaccgccccgcccgccagtccgtcctcagaccctcccaaccgccgggtccccgccgcctcggcggagtgttgtagagcctcgagcctgcgaggagcgcgccgcccgccagctccctgcgtcccgtcccgcgtccccgcgttcccgcgtcctgcgatccgccgccatggccagtgaggagctggcgtgcaagctggagcgccggctgcggcgcgaggaggccgaggagagtggcccccagctggctcccctcggcgccccagccccggagcccaagcccgagcccgagcctcccgcccgtgcgcccacggccagcgccgacgcggagctgagcgcccagctgagccggcggctggacatcaacgagggcgctgcgcggccccggcgctgcagggtcttcaacccctacacggagttcccggagttcagccgccgcctcatcaaggacctggagagcatgttcaaactgtgagctcccgctgcgcgcccttcgcccccgggaccagggagggagcgggagggctttctggtccgaagtcccgggccctgtttgtgtggggaggggtcccggggtgcaggtagcatttggcccaacgcagccagatcttgcgtgctcgggtctatctcggcgcggtgggggacggggccgaagaggggggacaccaggagcaggagctctccgggacggagcccaaaagttctcggcggctgccgggcccgagttccaggtcccccaaccccgaccactggtcccgccccctccgcccgccagtccggagatttgctccgaaagcaacttctaggaaagggagccgtcgccgcgcctcacctgccagctttcactgtatccccccaagggaaaaattagcccctgttggccttttatcttttaaaacaaaaggggaaagttaatccttggctgcagcgcggggtctgatgaatgagcggaggccgagaacggggagtttggtaaagtcgttgtaagagattcaggactttcctggagcaggcgcggcccgg

SEQ ID NO: 5917 - DNA, 1524 bp, Artificial sequence
  DNA replication origin
cccaacgcagccagatcttgcgtgctcgggtctatctcggcgcggtgggggacggggccgaagaggggggacaccaggagcaggagctctccgggacggagcccaaaagttctcggcggctgccgggcccgagttccaggtcccccaaccccgaccactggtcccgccccctccgcccgccagtccggagatttgctccgaaagcaacttctaggaaagggagccgtcgccgcgcctcacctgccagctttcactgtatccccccaagggaaaaattagcccctgttggccttttatcttttaaaacaaaaggggaaagttaatccttggctgcagcgcggggtctgatgaatgagcggaggccgagaacggggagtttggtaaagtcgttgtaagagattcaggactttcctggagcaggcgcggcccgggagcctcctgggggcgcggggagggggggcggttgtgggaaccgaacttggccgctggcaccggtccggcgggggctcgttgcggtcctgctctgtgagccccagtgcgcggggagccgctcacctggggagacactgagccagaggcaggcgatagagacccactagtccacctcgtcgcctggaacctccggggatctcagtttcctcatctggagagtgggagcagtaacagtccctgccttttaaggccgaaaagtattttgcacccggtaagctcttaaccgagctattaatatttccagaattgagccgagaccggaaaaatgcctgggggagctgaggccgccggccaggtcatgcttgggcgtttttaaaagcgcatggaatgtgtttgccctccgcgtggaggttctatttaaaggcgctgtgactggcgctgcgtcgcctgagcctccgctgcccctgcatggaggtttgcagagccggcacttgggagcctccgcctcctctgcctccctgacaccctggtttctttgtctggcttccaggcactgatctgtggcgttttctgggtctagtttgggcagttcaggaaggcccagtgcgctaaagaatgcggctggggcgaaaatggaaaagcaatgggtgaggcaaggtttgttggagccctttgatttctctggggtaatgcctttcatgggaagactgccctggccgggctgctcccagaccccaccagttcctcccagtccagctggattcaggggatcttggggagggacctttatcttcaagttttcttgtggccactcaggcttcttttgtttttcctataaaacaatctttggaaagatcaacttgtagttgactacctaagagtgataaaaagagtccatatgctcagagggtcttgggagacgaagcaaggtggcatctgtgagcaaacaggtactggaccaggatcacgcaaaggggagccgggcacagtggcttacggctgtaatcccagcactctgggaggacgaggcaggcggatcacctggggtcaggagttcaagaccagcctggccaacatggtgaaaccccatct

SEQ ID NO: 5918 - DNA, 1013 bp, Artificial sequence
  DNA replication origin
cgccacggaaggagtctcctccgtccagatgctctgtggggaaggcaggagcgcacctcccagggaccaggtgtggacaggagagccggcaggagcagctgtctggccgcagcagctgttaccgggccaccccgagactgggcgggtgtctggcgcggagaagcaagcagaggaaggcgagccctccagctccgagcaagccggcctgacactgcccaccccacaaccctcctgccttgttcggctcccctcgcaatgccaagaggccctggcctaggggcttctcggctcctcgcggccgtgacgcgccagggccctcagcgcccctcgcccaggaggaggctccctccggccctgcacctgacctgtcccgtcgcctgacggcccaagccggccggagcggcctgtgggtgtccatgcggccgggccagctcgggcaggaggagcaggggcgcgaacgcggaccggagacacaggcggcccgggacgcggcggcggggccggggcgcggagcagagccgggcaggggagcgacacggaacggctggttacctgcggtccgggacagggagtctcagaaccccagtcagtcctcagcctcaacaacacaagatggccgacacgtcgccacgcacgtcacgtgaccgcgctcccgctccgccacgccccctgctccgcccccgccccttcccgcttccctccccactctccagtctcccacgacatccttcctttccgccaccacccgcccctctgcccagacacgcccctgcccgagacccggatgaaaggttggaagagggcggggccgtggcagtgcgcaggctcccgctgaccccttggcagcagccgggtacctgcccttgagttgagtggtgttggtgtccagggttgggcccggaccaggcaccgtgtgactcactgtcctgtacgcccagagctcttttgcagttcaaaagcctctgcatcacttgcgggctggttttccaaattagaacttttccacagctttt

SEQ ID NO: 5919 - DNA, 1029 bp, Artificial sequence
  DNA replication origin
taggttgaaacattaaattcagacttcactaagcacacccctgtctagaatgtggccggatctaatgtcatactcacatcttgcctatttagtctgacaccttagaattcattcccacaccatgtttctattaatataaattagcaaaattcgtatcttactaacttgatactaatttattgctagcataaattaacagtagtttttagtttgtgcttatttcctcctaagtcagactttgtgcttgctctccctaggaatgctgatacctgattctagttatggatatggaggcaaggagaagttgttagggtaggtacaaggtaatttcatataaatacgcatgctaaaaagaaatttgaagtgatggggggattgaggggctgacttatcaagctgaggcttgaatggaaggggtggccacataatcaccacaggactgccttctgggaggagaggggaacatgcaaaggcctgaggcaggatctgggggtttgttgggggagcctagtcacggccagtggactgaaacatagagctcgtgggtgggaagctgagcagggccgaggcaagcccttagcgcggtgggaaaccatcaaggtgtgaagtagggggcgctgacagaactctgagggctcagacgtgggaagtgagggaaagagacacctttgatgacttcattgtgtggctagaacatctgggagcggggaactgggattccactgactgagtgagggaaggggcagtagagtcaaggtttgctttggacactgtaagttgtagccgctcgtgagataccctgcggggctgttgagaagcagtgggcagtggggctaagttctgagccaggcccagcctggaaatggatgtcataagtgcacaggggtctagggaggcagagagcgaaagaggaaacaggagcgttttaggaaagactagagctgcctgagggtttggatcaaaactgctttaaaagtccttcttcaacaagcactgagcacctactccgggccaggcatggagaaccca

SEQ ID NO: 5920 - DNA, 1712 bp, Artificial sequence
  DNA replication origin
tcacgctctggcacacctgcatgcgcggacacgcacgcgcggacatacaggcgcgtgaggagtgcagccgagtcgcgccgcggccgggcgcggcccctttattcgcttcaggaggcagaaaactttctcagcgcgacgaccacgagcgccagcaccacgcaggtggccagcagggcggcgatcacgatggccgcgatagcgccgggccccagcgaccctgcggaggacggaggaccatgtcacctgctagcccccgcctggccggcccttctccccgcgccccccgccccccgcccctcctaatttctccctctcccctccctcccccgccccgcccgtaccgccgccctggtccagccgctcctgcgcggtgctgtcctcgggtcctggcgcgacggtgggggctgggggaccggtgtccacgggctcccggccggggctggtgctctccacggggccttctcccgacggcagctcggccggctcgttccacagcgtgggcacgggctcctgtggaacatcgtctgcaaagccaaggagaggtgctggggccccaggtgacggggccgacagggacgtcaccccccacctctaggttaagcaagttgccggtagcgctgtgtgaggggtctgggctcagcgctgcactagccctcacatttcccaggctaagaagctgaagccagtgcgttgctgcctcccattgggcagggccggtgggtgggcaggaggagtgtctgttcagtgtaagggaggtgccccccacaaagcccttctctgcttatagggttgggagttggcaggatttggggtacccagggaccagagagcagaaaggagacattctcagtcccacagaaagcacaggctgagacgcctgcatgataacccccgccctgtatcctcaccagccagcccaccccagttgtcctcccctgaccaccactccaaccctgggccatccatccccggcaaccagacaggatgccccagaaacgctggaaagctcaacatggggatggtaggtcggctcttggcctctccagcccagccagaccatctgacatcacagtgttagcagggcaggcctgcccatgtcctaatctctctctctctctttttgaaacagagtcttgctctgtgcccaggctggagtgaagtggtacaatctcggctcactgcagcctccgcctcccgggttcaagcaagcgattctcctgcctcagcctgcggagtagctgggactacaggcacctgccactacacccagctaatttttgtatttttagttgagacggggtttgccatgttggccaggctgattttgaactcctgacctcaggtgatacacccgtgtcggcctcccaaagtgctgcgattacaggtgtgagccactgcggccggccccatgctctaatctcaactgggatagagactgtgatccagggacactcgaccctcaagccggttccctggatgagcttggggatgtcccaacacctcatctctttgactccagctactctgtggtgtgggaactgcttttatccccatttcagagacaagaaagccaaggcttggggataaggtgccgtggtggtgagcacaggtgggctgaaggccttggacagttgcaggagcggttgtgctgcccagaaacagtgcagggaggctgccgttctgtgaacagaccctgccggccagccggcgac

SEQ ID NO: 5921 - DNA, 1599 bp, Artificial sequence
  DNA replication origin
ctccacttgtaggactccagaaacagaaagggctgtttgacggagctggggacgcccctctgctgcagtggaaatgaggacacagctttggaagaccgtagaggccccgaagtgtccatggtggggggggccctacaggggatctcaccacaggcatggggctgggacttcctgcactgcccagaaacaggccctgggcccttcacaccttcagttacccagagcgcaccccctcccctcgccccagctccacctcagtgtgctgaggggtcctgtgtgcccaggaccacgatctctgccaggacacagtttccctgctcgccagaacaggcctctggtttagatccagtgggactttgtagcgtcttcccacaggccacagcagggtgctcggacctcagaccctctgagaatcacagagatgcacaggcatgtgacactggttccaccggagagggaggccccctggtcccagtgaggggctgtgatgcacccgttggtgggggagtgcttgcagagtggggaaagggaaagagggggccatctctcgtccctggaggggagggttgggaaggagttgggtggccattggtccccgtgccttttgaggatgggaaacagcatgttgggttggatcgtccgctctgatgaaggctttggttactcaaggttatgtgagatgaagtcagttaaccaattaggaaaataggtcagtttcatagcactcctttataagcagaatcattgaactcacagtgtattttggggagactggttgagtgggaagctgttaacagacttggatgaggccttgaccctatcccccagtgtgtgagaggtgcgcgggcaccacctgggctccagtgtccaggaggagaaagtcacggcaggaaacagtgccatggggagctcagggacaccaaaggggccaaaacagctgctagagaaaatgaatttttaaaaaagagaagcagcttgccctccagcaacattcccactcaggaatcttcagatacattaagctgtccccaaggggtctgctggcctccaaactgtccaacccttccctccaaaggccctggggactggggtagggaccaagttcccacttcctgctgtgctgagcaggttaaatgatcaaaggatcaaagtttacatctctaaatgcttccgaggtggggaccctggaccaggctcctcaccctcactccgccccgactctctgagggtgaagtgaggtgagtagagctgggaaagccgttttctctccctgaacaaaccaaccgtgggcgtgggggctgccggcccccagccaggcctgggggtgagagtaggaagcaggggcgggccgtgtccggcgtcgactctcgactcatcctgctcctgaggctccctgggcagaggggggcttggggctgctggtctgagcccgcggatggggccctggctgcaggactcagagtcaagacgtcccccaaaaccacgcggcctctggctgggagagccgacggcccctgccctccccaaccccggcctcaaggagcggcgggccccggggtctctgtcggcctctcctgccctagcgcttacctcctcacg

SEQ ID NO: 5922 - DNA, 814 bp, Artificial sequence
  DNA replication origin
ctaggaagcaaactccagaaaacacatgcgtgaggcatccctcctcctctgtaggctggacggaccggcagggctccgggctgttctccccacagccccctgggtggccacccaggcaccaagggacctaaaaatcccacgcttcctggggctcccgaggactcgttctgaaggaagacaattctgcagtgacacatggggcccggcacagggccaggctcgccgcaggctctcagggcacataaatgagcaccatgtccagggaagtgtgcgcgagggcctccctgccatgttgtctggagtgagaaacacgctcgccagcctcaacagccatcagtggattcgattaaaatagttatgatctatgcagatacgcaagaacagaaatccaggaaagaggcagggactccacctgcactcgaatgcggggcaaagctgtttctaaaccacaagccctttttgtaaagaatacagtggtgtgtgtgctgtgtgtgccatgtgtgcatgtgtgtgctgtgtatatgcagtgtgtgctgtgtatgcatgtgcggtgtgtactgtgtgtgatatgtatgtgccatgtgtgctgtgtgtgctatgcatactgtgtgtgataagtatgtgctgtgtgtgtgtgcagtgtgtattgtgtgatatgtaggggccgtgtatgtgtgtgtgcgtgctgtgtgtactgtgtgtggtatgtgctgtgtgtgtgtgcagtgtgtactgtgtgatgaggggccatgtgtgtgcggtgtgtattgtgtgtgatatgtatgggcgtgtatgtgctgtgcgtgtgccgtgt

SEQ ID NO: 5923 - DNA, 716 bp, Artificial sequence
  DNA replication origin
tgtgtccccagccaggagaaggcagctttccgggagctgatcgcgcagctagagctcgaccccaagtgcagggggctgcccttctcctccttcctcatcctgcctttccagaggatcacacgcctcaagctgttggtccaggtacagcctcctccacctgacccacagacggggcttcccaggctttgctgtggtcattcccgggccctgtcagctttctaggaggtctactggttcaacagatactaagctcctcccatgtgtgccaagcacgttcctgggcagtgaggatgcagcgcctgctcccagggagcccatcgcagaggggagagaccgaaccatgcacagccaggaagtgggcatggccctggggacagccaaatgggccgacacgacaggggtggctggctggccactgccagttgcagcgatgggggcgggtcaggaaagacacgtgacgtgtaagctgagacctggctgacagggaggagctggtgggggcaggtagaggaaagaacattccacgcagagggaaccgcttgtgcaaaggccccaagactgcaaggttcatggacagaaaggccagcagcgatctcgggaacatgacggggacgggagtgggtgtggagatggggacagaggcagttccagggaagacattgggtcctgtcctcagtgtgatgggagtcacctgatcggacccacttttaggagct

SEQ ID NO: 5924 - DNA, 1338 bp, Artificial sequence
  DNA replication origin
gagtgggggtgagggtaggggttggggtgggggtaggggtgggggtgggggtagggatgggggtgggggtaggggtgggggtaggggtgagtgcaaaagtaggggtgagggtgaaggtaggggtgagggtgaggttaggggcgtgggtgaaggtaggggtgagggtgaaggtaggggtgagggtaggggtaagggtgagggtagggttgagggtgggggtgagggtgacggtgggtataggggtgagggtgtgggtaggtgtgagggtgggggtaagggtaaaggtagggatgaggtgagggtaggggtgagggtgagggtacaggtgaggatgggggtagtggtggggttaagggtgaggtaggggtgcgggtgagggtaggggcgagtgtgggggtaggagtgggggtgaggttaggggtaagggtgggagtaggggtggggtgaggggtgagggttgggatggggtgggggaaggggtgagggtagggatggggtagggggtggaggtgggggtctggccccttccccagggtcctgcccatcccctgcctcactccttttagggccgccctccggtttctccactcatcagagccctgacccagggcccagggctttggcatgaaagcaggagctccagggttagaggcatttgttcccagaacacagtgggccctggagtggtggggttttgcaggctgtttcacttaatcctcccaggtcccccagaaaggacagacagaagctcccattttaccaaaaggaaacagacacagagaagtgaagttgcatccagaaagtcacatggctggatgctggaggagtggagatgctgccacctcccaggtagcgcaggggtttgctgggcatttgatgcccgcctgcaggagctctcactgctgcttccctgcaaagctctgcccacccacccacctggcagagcactctaaaataagggacgaatctggaagctgggaacaccccacagagagttcacattgatgtcactccagggccagcggccaactgcagaccccgaaccaccatcagtagccagggcccacccggcccccagtgtctgcacctcacttgagacagtgacagtcagagatgagacgctgaaatgagcctgtggcctctccgtggccatccccacgtcgcatctgcctcatctacctaaaaagcagccacagcaagcacacagcagcacctcacttgagacagcgacggtcagagacgagacgctgaaatgagcctgtggcctctccgtggccatccccacgtcgcatctgcctcatctacctaaaaagcagccacagcaagcacacagcagcg

SEQ ID NO: 5925 - DNA, 1136 bp, Artificial sequence
  DNA replication origin
ccagtaggggctgccgggcagaggcgcccctcacctcccggatggggcggctggccgggcggggggctgacccccccccacctccttcccggacggggcggctggccaggcggggggctgacccccccacctccctcccggacggggcgggtggccgggcggggggctgagacccccacctccctcccagacgggacggctgaccaggcggggggctgaccccctcacctccctcccggacggggcggctggccgggcggggggctgacccccccacctccctcccggacggggcggctggccgggcagaggggctcctcacttcccagtaggggcggccaggcagaggtgcccctcacctcccggacggggcggctggccgggcggggggctgacccccccacctccctcccggacggggcggctgccggacggagacgctcctcacttcccagacggggtggcagccgggcggaggggctcctcacttctcagacggggcggctgccaggcggagggtctcctcacatcccagacagggcggtggggcagaggcgctccccacatctcagacgatgggcggccgggcggagatgctcttcacttcctagatgggatggcggccgggaagaggcgctcctcacttcccaggtgggatggcggccgggcagagacgctcctcactttccagactgggcagccaggcagaggggctcctcacgtcccagacgatgggcggccaggcagagacgctcctcacttcccagacggggtggcggaccggcagaggctgcaatctccgcactttggggggccaagacaggcggctgggaggtggaggttgtagcgagccgagatcacgccactgcactccagcctgggcaccattgagcactgagttaacgagactccgtctgcaatcctggcacctcgggaggccgaggctggcggatcactcgcggttaggagctggagaccagcccggccaacacagcgaaaccccgtttccaccaaaaaaatacgaaaaccagtcaggcgtggcggcgcgcgcctgcaatcgcaggcactcggcaggctgaggcaggacaatcaggcagggaggttgcagtgagccgagatggcagcaggacagtcca

SEQ ID NO: 5926 - DNA, 1109 bp, Artificial sequence
  DNA replication origin
cccgcccggccagccgccccgtccgggagggaggtgagggggtcagccccccgcctggtcagccgtcccgtctgggagggaggtgggggtctcagccccccgcccggccacccgccccgtccgggagggaggtgggggggtcagccccccgcctggccagccgccccgtccgggaaggaggtgggggggggtcagccccccgcccggccagccgccccatccgggaggtgaggggcgcctctgcccggcagcccctactgggaagtgaggagcccctctgcccggccaccaccccgtgtgggagggaggtggggggggtcagccccccgcccggccagccgccccgtccgggagggaggtgggggggtcagccccccgcccggtcagccaccccgtctgggaggtgaggggcacctccctccggccacccctactgggaagtgaggagcccctctgcccggccaccaccccgtgtgggagggaggtgggggggtcagccccccgcccggtcagccgccccgtccgggaggtgaggggcacctccctccggccacccctactgggaagtgaggagcccctctgcccggccacccctactgggaagtgaggagcccctctgcccggccaccaccccatctgggaggtgtacccaacagctcattgagaacgggccatgatgacaatggcggttttgtggaatagaaaagggggcaaggtggggaaaagattgagaaatcggatggttgcggtgtctgtgtagaaagtagtagacatgggagacttttcattttgttctgtactaagaaaaattcttctgccttgggatcctgttgatctatgaccttacccccaacccagtgctctctgaaacatgtgctgtgtccactcagggttaaatggattaagggcggtgcaagatgtgctttgttaaacagatgcttgaaggcagcatgctcgttaagagtcatcaccactccctaatctcaagtacccagggacacaaacactctgcctaggaaaaccggagacctttgttcacttgtttgtctgctgaccttccctccactattgtcctatgaccctgccaaatccccctctgcgagaaacac

SEQ ID NO: 5927 - DNA, 1247 bp, Artificial sequence
  DNA replication origin
gcccgcaccccatcgggtgggtgttgagccccggcccgggcccctgggaccccggtccctgcccggagtctcctccagcgccctcgtcctgggcgccctggtcgtgcgcgtcccgctcggcatcccctttccgcgccgtgtggcctggggacgggaggatcggagtccgaaaggggccgggggtcgagtgacggcgaggggcgccgagtggcttcctggccgcgggacccgtcgggctgtcggagcggcgccggagagtgggcacggtgcgccaagtttccaccgcctgcccgggagctccaaaaccatggaggtttgggcgggctggtgtggaaatgcatcacccggtcgcgccctggtgcggtgacagaaagggcttttggggcccgcccggccgggaggggcggcgctggctgcggccgctgcccctggacggtcccgggtaaggtccggctggctagcagccgcctgtgcgcacgcccctcgctagccagccgaggtgaatccttgcttaaaaataaccagcccctgtcctcctccctctctggcagtgagtcgtcctccaccccgggaaatggggccacgcccgaggagtggccggccctggccgacagccccaccacgctcaccgaggccctgcggatgatccaccccattcccgccgactcctggagaaacctcattgaacaaataggtgggtgtctccgcagtaaccgggttttatttgggaaacgcgggtccctggaggactctgagggtcctcctgctcatgggatgccgttgtgtttcatacgaaggactgcgtctgacatgggtaaggaaagcttttgacatgtttggctctaaatggttccgcaggcaaaactgctgcattttaatagcgctgcacaagtgggctttagcaaacatttctgtcctgctctctgcggagaggtctatttgcccagctcttgtctggtgggagggctctctgaccccttatcacttctgccagaaagaagggatgaagcagcgcggctgagctgtgcagcggggaggactccactatcccccatcaaggaagacctggaagccaaaccggctgttgggagcagagttgggctagaggaggaggcgtgtgaaggggggttctgggaaaagcctggtgcgattcaagaagaggaggcggtggccaactttgcacagggaaaggaaaggcgaagtagggaggaagcaagagccccagaggcccttggcttaggaaggga

SEQ ID NO: 5928 - DNA, 913 bp, Artificial sequence
  DNA replication origin
cgccaccgctgccgagcactcccgcgggcgggcgcgcgcctggaggctcccggggttgccacggcaacgagggaggcgggaggggcgcgcgcggcgggggcgaggccgggcggcggcggggcgggggcgcccgggctgggcgcgacccgggccccgcgagcgccgactgcgggctggggcctgccgcgggctcgcgccttcctcccccgcgccgccgtgccccgacccggagaggggcagagctgcggaggccctggagctgcgcctttgcctgccccgcccactcctcacggcgggggaagcctggaaggggcgggcgaggccaccctcggctccccagtgcccgcagacctccgccttgcccacgctgggcaccccctgcggtctcccgcagggtcgcagctcggcgacccgctctgaagctccgagcccggcctcggggaatgtgtccccgctggagggggtctccgtcttgtctctgctccaggcggagactggggtctcaggggctccttgcaagcccgctcctgagcctcgcggtggggagggggccggcgcggaggtctttcccgggcgagtctggtcgcaggacgagccacgctcagctacgcacgaccctggcgggtctgggatgggttcgggggcaccagaggaggagaaaccaagtgcccgaaacctctcctgggttgccctgcccggtgacatcgactcctggactctgcgccttcgcgttagctgggtcagtccgctcgcggatcagaaagagcagaaaggacagtcggaagagcgaggcctggaggtgcctacgggccgagccaagccgccctctgctcagggatcatgctgtctgctcaggtgtggcgaggatatctagcaagatgccccccgcctaccctcgcgaaggcccctggcg

SEQ ID NO: 5929 - DNA, 1077 bp, Artificial sequence
  DNA replication origin
agtctggtcgcaggacgagccacgctcagctacgcacgaccctggcgggtctgggatgggttcgggggcaccagaggaggagaaaccaagtgcccgaaacctctcctgggttgccctgcccggtgacatcgactcctggactctgcgccttcgcgttagctgggtcagtccgctcgcggatcagaaagagcagaaaggacagtcggaagagcgaggcctggaggtgcctacgggccgagccaagccgccctctgctcagggatcatgctgtctgctcaggtgtggcgaggatatctagcaagatgccccccgcctaccctcgcgaaggcccctggcgcgctgcccggtgtccttttccggaggccagccggctcacctgggtgggcccttgggtgaccgcggcctgcgcctgcagccgggcctgtcctttttacggccctgaggaaaccccaggggcaggggtggagtgcggagcatagtcccccgcacgctccaacccacccggcatttgtttaaattagcaaattcttcgttgggggggatgcaaacattcctggtggcagcggtgcagttactcgttaattgtttggctttaatggatccttaaccagtcttgaataaggcaggtgtgatcaagggagggttggggaggaagctgagaagcattaagctttttgcctggaagggagctctcctccccacgtggtctgacttccccagctttgactctagaaaagggtgttcaggtagactcaaagccagtctctaaagctgccacttagccctggtgccagaacgggcaggtctgatctcttcatgccctttggggccagaacgggcaggtctggtctcttcatgcccttaaggcctgagaatattcgagacaaccatctggtcttttcccaagccaagcaccgcccttccttgactcactcccatggacccaggtatctccaggcagccacctcctgcccttagtgtgttgctctgctcactggccatctccatctggccatcccacatcttaggctgtcctggctgctataacaaaataccatagactgggtgtgatgtggt

SEQ ID NO: 5930 - DNA, 961 bp, Artificial sequence
  DNA replication origin
tcgggagggacgaggtcaccattgtcacccatctgacctctgggagcctgggggcagaatgagacccagagacaatgatggccttgagctcagtgtaaggcggagaccatgagtgtccgagctccccagagatgggggtgctgctttgggggctgacgtccctgtcactggagctgtccagatggaggctggaggcgctgttgaggttttagagttcagtgaggcctgcctgccgctggcattgccttctctcttctttccccggcccctgtgcctaccacctcacccaaacccttgcattgaggctgctttcagtgaagagctggacctgtggacagtgataggcaggggtcccgtggggtgggagtgggggtggatgatgtaggcattcattgtgttttggtgccagtctgtggaggcctctgactgctggaccgaggagctcacccagcaaaccctgctggtggccagagggcctggcaggccccgagcaggaggcacaggcggggtggtgggggacatagagcacgtcctgagggggatggcacacaggtgagtacctggacaggtcagagctgcagggaggaatgggaggaattgcaggtcagtgacttgtggtggttttgagagcagcggacaagggagctggccccctgtttgttgtgggcctgggtgcctggcggaatgccactcctggtctgggaagcaggagtgaagccaggttggggtcagagcacactggttttgcggtgttgggttgaggaatctcccaggagaaaagtttgtggacagaaatccctaaccgacactggactgagttgctaacaggcatcttccggctctgacaaggggacccccggggcctctgtgttgtgatcctaacatgaactttttttttttttggctttcaaggttattattactatcagtatcgtcattattttaggctgtatcttaaaaa

SEQ ID NO: 5931 - DNA, 1207 bp, Artificial sequence
  DNA replication origin
gcctctgccacctgcatagctgggattataggtgcccgctaccacatctggctaatttttgtatttttagtagagacagtgtttcaccatgttagtcaggctggtctcgaactcctgacctcaggtgatccgcccgcctcagcctcccaaagtgctgggattacaggcttgagccactgcgcccggcagccttgggccttttttctccctggatcaaagtggggagagtgagacaggaggatttagacagaggaaggagacacagatgaagtttctggcttggcagaaaagtccctgcaagggaaggagctgggacagtggccccagaagacgctctgtgtccgaggaagacctgcatggcatggatctctaatggaacccttgacagttgtggaaaaggtggagaagccaatcaatcacacagggagacagctgtcaccctgccctggggatggctgcccactggggcattttggtgttctgagcgtgaacaaaggtgagggcgagagaaagatcctggaaaaatcttaagtggaaattcagaaattggggagccagcagtggggaggggcagtaacaggaaaggggctggagaagggaaacttggagcaaggccgggaagcctagaaagttctgtacctgggggtggggggagcccctactacgccgtggccacttgggggcgtcggcttcgggaggtagagaggagggtccccgagcggtgagggaaggaggaggggaccttttaggaccaagaccagggcagaaggcagaaagcagcagtttggtgcctgaggggtgaatggagaccctcctgaggatggaaatacctgaagcaggtcggggtgggggtgcagggttagctgagaggtcaggggtgcctatctgagcagaggcctgcaggagggaagccagggagccttggctcaagaaggagaaaagtaaggatggcccctggctttccttaaggctgcagaactcattaacacgctaggagaggaagcaagaatgtgcgggggaagccagtctgagctcagagggagagaagttggacttggaaatggcccactgtgccccggtctcggtctcgtgtagggttgggactaacctggaaggttaagtatgaattacaggaacaactcattgaataccagtttaacaatcgtaatttctaatacaaacaacatctcttttagagacgagaatg

SEQ ID NO: 5932 - DNA, 1381 bp, Artificial sequence
  DNA replication origin
gcacattgggggcatccatgtgttggtgctgatccatgctaatggttgcccgcagaatccatcgaggacaacgagacccaatctaggttggaagggaaagtgtgctgtgataggttagcaatgtctgtcctgacgaaggagtagagaaaggtggtccgtgtgtatctgatctgccattcacactaggaagaaagtcttttttttgtttttggtttaaatttagggggcacgagtgcagttttgttacatggatatattgcacagtggcaaagtctgggcttttggtgtaaccatcacccaaattttgtacattctatccattaagcaatttgcctcaaccaaatgtccacacagccccgaagaaaggcccccagcaggatgaggaagggaaattgaggcaaagccgagcctgattctcagcgatggggggtgaggggagagggagcagggggaaggggagggaaggtaggggccagtaagggcaggtaaggcatttgggctgcttcctaaacgccttcaggagtgttgtgagcatgggtgtgacgtgatgcactatgtgtttttccacaaaggaccaggtttgggtgttttctggggttcccagcagttacctcatctttctgccctgatggccttgacaagcactccacactagaatctagacaggaagaggaccctggagggcagagcagattccagggggctgaagggcagctcctagcccagatcagcctggagtcaaggccaagaagtgctgctgctgcgaccaggggatggggaagggctggaggaggccatgagagggctgcagctgtcccaatgacatgctcaggtgtgtgggtgcaggtggaaagcagggagcatgggaggggtcattgggaagcagagcagagggaggagtccccagaagaagggaaggggtgggagaagccggacaggtgcctgcagggctgcagggtcaggggctgctggagagttcctctctccagcctccagctttctcaaggaccttgggtacaaggacagaggggcaggtgaggtgggaggctgggggaactagagaagttatgacatgatcgtgacagagatcaagggggtgcttgctgcagaaatgaagtcggcttgctggcctgtcttgcagagtgactgaatcactgtgacatctgtctgccctcacccaggcaaggaggtcagaaaactccaacatgcattaaatgctgggtctgttggttaaaaaggcaattcaggggccacacaacaagggccaagttggagcaacaagctcgggccaggggcacaaccaccaatatcgggtacatgtgatttgaacacctgcagtgtgtgccaagttctggaacatccgagatccccatggctggga

SEQ ID NO: 5933 - DNA, 989 bp, Artificial sequence
  DNA replication origin
agaagacccaacatagagtataagctccaggagggcagggggttttgttccctcctgcatctctggggtccaggacagggtctggattcatggtagattcttagtcaatatctgttgaatcaatgaatgagtagacatatgtaaggtgccaattcagtaatactggagcccagagtgagtgtgggagagggaggaggagaccaggaaaggcaaatgagatgtggggctggaagagcttggtgtgacctgccacggagcttgcatttcatcctagggcgggggacaccacaggcgatgtaacctaaagaagtggcaggctcagatttgcattttagaaagagatacctggtaggcatgcagggacagagtcagagatgcgagtggggtgtcctggaggaggaggcgggaggaggatgggctagcaaaggccctctcgaaatagtccaggcaacaaagaaggctgggactgtggggctgccgccaagggaatggattccaaggagctccagaactcgatgatccatcagatgtgggtggtgagagagggggcagagatgaagatgttggtggtttctggcttgggagaagccagtttggtgacagcaatctagataggcgatgtgtgtggaagaacaggttttcggtgtaaagatagaaaattcagatgacagagcttttaagtgtctatagggtgtcctcacaggcagcaggaagtgtggatctgaaggaggtcaggaccggaaatacagatttggaagccacaagtgaggaaaatgctctgggagagtatggaggagacaaaagggatgaccaaggacaaaagcctgggaagaagggggctcagggaggaaggtgtagaacttgggggagcaacaggaaggattttgagagggagggagaggcctgcagggttgctcactgtagaggggtcatgatgatgatggggtgctgggagaaagaagctgctgcaaaaggttttggtgggaggg

SEQ ID NO: 5934 - DNA, 1288 bp, Artificial sequence
  DNA replication origin
gcctgggaagaagggggctcagggaggaaggtgtagaacttgggggagcaacaggaaggattttgagagggagggagaggcctgcagggttgctcactgtagaggggtcatgatgatgatggggtgctgggagaaagaagctgctgcaaaaggttttggtgggagggttgggggtggggacaaggctgctgtaggaggctgagtgaggacaatttattccaaaagctccccaatttattccaaaatcacccaggtgatacccagacaagaagaaagggcagggagctgtggctctcagtcttggccacccaaggcactcttctggggaggtcctggccccaccttagagatttttatttaattggtctggggtggggcctttcagactttcagccaagactgagaacctttgtcagggaggattttttaagtttttattttataacatggaaaaatcttaagctcgcttataggatgaggggaaggagtgggtggggaggagagggagaaaatccagaggtgtgggggtggctgtgggagccaatcccagccacaggaggggagaatctggaggagcccctggggacaatgggatggaggcgggtgtggacgcattggaaagcagcctgggagacccatctagcatctgtgggcagaatagtgaggggctttaatgtttggtggcttctggaagtgagctagcctgaggagcgtggggaggtgaggtagggaagcggggtccactggaaaaatgcaggctttggtgccgcagccaacggagaaggcaggggagaggctggaaggctctggtctccatgctagtgggaagccgggttttgtcctgggctgcgctgcctggcagaggcatttctctggccacaccagcagcccctttggctgggtgtggcgggagaagaaggagctgtgagggagttgaggggcatggggaggacaaaggttgtgcagatgtgtgtgatggagaggagggaacaggaggtggtcagggcagggcttggggctggccagagatgaaaggggaagcaatcacagcccgagggctggagtgtgattgggaggctaaggtttgagttgctggcactccctgggctgcagctacaatgggtagagttggcaggaggtgctggatccaggtatggagtaaggactcctgccaagttctcaggggtggaatggaaataagaaaaagtcaggaaatggtcagattccagtcttgtaagtactgtcaaggatttcacactttgtcctacaggcagtaagcagctgttgg

SEQ ID NO: 5935 - DNA, 1012 bp, Artificial sequence
  DNA replication origin
tatttggagattgggcttttaggaggtaattaaagttaaatgaggtcacaaggatggagtcctaacctgacagggttggtggccatagaaaaaaaggaggagaggagggaaggccacaggaggacaaggtgagaaggcggccacctgcaagtcaggacgagagccctcctcagagcatgaccatgctggcactttgatcttgggcttccagcctccagacttatgaaagataaatgcctgttgctgaagccatccagtctatggtacttagttatggcagcctaagctgacaaagacaggtgcgtactgcctggcagcatgagccggatgctgctgcagcgtgcaatgaacaagacagatctgcattttcccagaggtgagaatctaatgagaggagaagagaggtgcacacaaaatagtgcaagtcgtgataggaaaaggctctaagagaagagcaggcaggttgtgcaggctagggcgggggcggggcagagtgggggagataaaggagtgctgatatgccacggagtggcggagcatcagagaaagacacctgcttcgggtagcctgcaaggctggaatggtccagggaagaggtgatgcttccgggtaggggtggtggcagggatagttgctggaagggcaagagtggggagccatttcagagatgtttccccatagttttaggagctggcgaggatgcagtcaagaaaacctggggcttcctgagacccagtccggccaagtaggaggagggggcaggaggaagaccatgctgggaagcagattctgatggaaatgaagctgggaccaaccaggtggggtgtttttgtttgtttgtttgtttgttttggcacattagttcagagaactactggctgaagaagcagagaggaagaggaacagaacgtggagctgggaagaagctgccacgtaattgccacggaaagagtggctgttggcaggaactgcatttaggaagcatggtagtgggcctgccaagggaggcggt

SEQ ID NO: 5936 - DNA, 1104 bp, Artificial sequence
  DNA replication origin
cctccaaagtagctgtagctgcgattataggcacgtaccacacccacctgattttttttttttttttttttagtagagacagggtttcaccatgttggccaggctggtctcaaactcctgacctcaggtgatccactcccctcagcctcccaaagtgctgggattacaggtgttagccactgtgcctggccactctctagccattatttgaagtcttcattgataaatcactatccctcacatgagtttgtgaattttgtaatacgttaaaattatttatattgactggagacctacaaaaaaaaaaaatccacccaccaaaagggcagctctgatctagatactgggatttcctgaatgtggagggcagaagggtgggggacaagccagctgaccatgctggatagatcaggcaattgggtggaaaaggaagcaaagttgggatgggccttaaaaatgagggaagagtgcccgtgtggcgtgtgtgccaggggatctcactctgtggaatggcaaggaccgtgggaatagaggtgtgagaggtggggggctgggggtttgggggaagctctctaagtagggcagtcttggcatggtaggggtctctagagatgagtgggtggaggtgtaaagggaccagtattgcaaatggatcctcctggtggcgtggtccaggacttcatggatgttggtggaggccagcagggaagtgagaagggtgtgaaggtacacaatgggagcataggagatgaccccataaggagggggtggacaggtgctgagtggaggcgtgggtggggaatgagaggcctccacactgggctgctgcagaggtggcgtgctgcggaagggccggagcatggaggccagttcccatcaccactctatccccacgcctggctcccagcctggccagaggtccttgactgggagtgctttgtctgccctacagactcgcctgccatgtgtgttgctcagcggggaggtgctgggggccctgttctgggacaaccatcagtgtgacacatgttgagcccctgggcacatgtgagctcttttacgagctacgtccttcaagttagacaagaagaaaccaaggccgag

SEQ ID NO: 5937 - DNA, 1902 bp, Artificial sequence
  DNA replication origin
  misc_feature (675)..(675): n is a, c, g, or t
  misc_feature (681)..(681): n is a, c, g, or t
  misc_feature (701)..(701): n is a, c, g, or t
  misc_feature (1819)..(1819): n is a, c, g, or t
tgggctagcccccaattcacatctcaggtctatactagctgtaaactcaccactctgactctattcccccatcagcaaaacaaggattagaaaaatcaagacatgtgaggattagatgacttaatatatttcagatgtgcttggcatagcatacaaactcatcaaatcatcattaggcagaagtatggggaaagctccagcatttttctaatactttttctttcaagcacgaacgccctgtttgtcagtaacttcatttatgttctctaagatcttgttatatctcccctcccaaaagtcacaaatccaaagagagagccggtggggggcgggggacctgcaattgcattggtgactgcccggggtgaaggcaggtcattccaaatgttctctactgtgaaaaggaggaggcttgaatctgtgttaccgtttcaattatttatgagataaataaccctaaaacaagggaatcctgaactatcccatctcctgaccagcttttcttctcaaccaacaggcagccattctgttgttcccttccctgagtcttagcaccacctcttcaagccactttcctgattgacaataactaaagaagaattgtaagctttattaagaagcaagggaaagaccaaaaagtggttagagaaagcactgacaattattaactgctgngatggnggagtgatggttattggganggggaatggtgtggtgtctaagggtggtagtgatggtgatgacagaggtggtcatgatcatgggagggctggtaggagtggagatggtggtggtgatggtgatggtgatggtagaggtggtcatgatcatatgggagtgataggggaggagatggtggtagtgatggtggaggtggtcatggtcagggtaggaatggtgagggtggagatggtggtggtgatggtgatggtgagggtggagatggtggtagtgatggtgatggtggaggtggtcatgattatggtgagagtggtaggggtggagatggtggtggtgatggcgatggtggaggtggtcatgatcatggaaaataataggtgtggagatagtggtagtgatggtgatggtggaggtggtcatgatcacggtgggtctggtaggggtagagatggtgatggtgatgttggaggtggtcatgatcatggtagaactggtaggggtggaggtggtggtagtgatggtgatggtgatggtggaggtggtcataattatggtgggagtggtaggggtggagattatggtagtgatgatgatagtggaggtcgtcatgattatggtaagagtgggaggggtggagatggtggtggtgatggtgagggtggaggtggtcatgatcacggtgggagtgataggggtggagatggtggtagtgatggtgatggtgagggtgaaggtggtggtagtgatggtgatggtggaggtggtcatgatcatgataggactggtaggggtggagatggtggtggtgatggtgatggtgagggtggaggtggtggtggtgatggtgagggtggagatggtggtagtgatggtgatggtgagggtgaaggtggtagtggtgatggtgatggtggaggtggttatgatcatggtgggagtgatggggtagagatggtggtggtgatggtgatggtgagggtggaggtggtagtagtgatggtgatggtggaggtgggcatgatcatggtgggagtgataggggtggagatggtggtagtgatggtggtgttggtggtgattgtggtggccatgctgatgactctggtggtgctgttgaaggggatcctattgatcatgncagtgccattgatcattgtgcagaggcagcagtggtaatggaggtggtgatagtaaaagtagtatactaaagtagctgggtgg

SEQ ID NO: 5938 - DNA, 1021 bp, Artificial sequence
  DNA replication origin
ttgtctatcccacctaatggacatcttgctcatcattgcagcctgaggccctggagagggcttgtcatatagtattaatagatactgtttgagtgattggataagtaggtagacgggtgtgtgaacggtcaatggatgagtggatgggtgcgatggatggatggatggatggatggatggatggatggatggataggcgaatggataggtgggtgggtgggtggatggatggatggatagatagatggatgtgtgggtgggtgaatggatggatggatggatgggtggataggtggatggatgggtggataggtgggtgaatgggtgaatggatgatagccatatggtggtagtgtggatgatgatgatgatgatgatgatgtgtggtgtgaggatgataatggattgatgatgtgtgggttggtggaggatgataaatgatgataggtggatgggtggatggatggatggctagtcggtgggtggatggatgggtgggtgggtggatggatgagtggatgaataggtggatgggtggatggatgaaatggacaggtagttggatggatgggtggatggatagatgaatgaataggtagataagtggatgggtggatggatgaatgaataggtgggtaggtggatggatggatgggtgaatgagtaaagatgggtagatggggagatgaaaaggtggacagatggatgaatagaactgggggtggaagctgaagtgtgttattaaagtaagtgactgcagaaagtgagcagagactgagctgaaaatacaggtgggggttcatctgagtcagaaagaaagtaagagaaggtgaagatacaagggatactgaagtagtcaggaggatatgtgagggaatacagcaaggtgagttatcttagtctaaagaagaaggcgtggcagtggagtctggacttgagccatgtgaaaaaagtttaaagccacctacagggaaattctataaaaagccaacagccgatgaatttgaggattacagaggcc

SEQ ID NO: 5939 - DNA, 911 bp, Artificial sequence
  DNA replication origin
agataagtggatgggtggatggatgaatgaataggtgggtaggtggatggatggatgggtgaatgagtaaagatgggtagatggggagatgaaaaggtggacagatggatgaatagaactgggggtggaagctgaagtgtgttattaaagtaagtgactgcagaaagtgagcagagactgagctgaaaatacaggtgggggttcatctgagtcagaaagaaagtaagagaaggtgaagatacaagggatactgaagtagtcaggaggatatgtgagggaatacagcaaggtgagttatcttagtctaaagaagaaggcgtggcagtggagtctggacttgagccatgtgaaaaaagtttaaagccacctacagggaaattctataaaaagccaacagccgatgaatttgaggattacagaggccaccagttaatctgttcttttactgattaaaaaaataataataagaggcattttttaaagcctatgactttgatttgcagatgaagtacaacttgccttcctggtgtgaccgagtcctctggaagtcttatcccctggtgcacgtggtgtgtcagtcttatggtgagttcaaacactggggaaagcagaacaggatcagagaatggcaccaagctgggaggtgtgactgccctaaaatctaagggcttcagtctgttgatgtgtcaaagggaggaattcactgtaaccctaatcaggcgacctggaaatgttgatgcttccctgcctgtcttgtgctgccacctaatccatatcccctgctttaggagacatttgaattatagagcactttttttctttttctttttgagacggagtctcactctgtcacccaggctggagtacaatggcatgatctcatctcaccacaacttctacctcctgggttc

SEQ ID NO: 5940 - DNA, 1321 bp, Artificial sequence
  DNA replication origin
aacctcccagtgcgttccctgggtggttcagatttcccaaaatgggaccttcgtgggtggcagtgtctgtgggggtgagaacacacatttgcattataaagggtctctgtcagagtgaaggctgggagctgagtttgctgccttgcagaaagcttctgggccttcccatagctgggtctccatggaaatttgtttgccaagagaaaggagctattttaaggacatgcaaagatgagaacctggtaggctggaaccagggaaggtagctgtgggagagagcttttctgaatgactcactaatttctctcctatccgggtggggaaaatggtgtggaaaaagaatggaaatgcaggaaggaggaggagcccgtggctgactctgtccctgcaggtggcactggctgcaggcgctgccctccaggctgcgggggggtggggggggggctgcggtggaggcactgggaagagcgctgctagagactgtccatcatgagggtaacaccttcctgtcggcacaaactctgctgctctcaaccagccttcatagcatcaagcagagaaggaaaaaaattacctctgaaaaggaacagtgactgtagcagcatctgcaatctcagggggcggtgaaattcatcctaggaatggagcactttgatgagagctggctaattgacctgccttcttgattagggagcctggtgtaggtgaattacttggaggtgaattatgtaggtgataaggaggtggggatgtctgggttccccctctgccagaagggggaacctgggtgtttggaatgcctagaattgtcaggaaaggagagacaggagagagacctggtcaaggtggaacccagatgatcacggcagcaaaaagcctagggagaaagtggtccgggacctctcggggtgggtgcagggtagagagatggaaaaggcaaggatgaaaattcttgcattccacagcgtttcctgttctgagcaccaggtgggcctcagctgtccgaccacgtgcaatcaaagccaggtcctcacagcagccctgggtttgactgtggtgggggcactgcatttgcttgagtgactggaacccagagcaggtgacggggagcatgatgtatgccccaaacagttgctctcctacccgtatctcctgggaacccacagaaatgctggggagtgcctagacatccatcctaagtgggcatggggccttgggcttgacattctccctgtgggtgagcagatgatggcacttgtgtagcaggccagcccaccccagcagccagtgggttccccagggaccatgggcatccatgcct

SEQ ID NO: 5941 - DNA, 2484 bp, Artificial sequence
  DNA replication origin
aaattagaaaaattagccaggcgtggtggcacatgcctgtgtcccagatactgcagaggctgaggcaggagaattgcctgaatctgggaggcagaggttgtggtgagccaggttcgcaccactgcactccagcctgggtgacagagagactccatctaaaaaaaaaagagagagattacttagtgtctcatgtgtccgtgtgaagagaccagcaacaaggctgtttatttcacctgggtgcaggcgggctgagtccgaaaaaggagtcagcaaagggtggtaggattatcattagttcttagaggttttgggataggcggtggagtttggagcaatgttttgggggcagggggtggatctcacaaagtacattctcaagggtgcggagaatgacgaagaaccttgttaagggtggggagaatgatgaagaaccttgttaagtgtggggagaatgatgaagaaccttgttaagggtggggagaatgatgaagaaccttgttaagggtgggggagaatgatgaagaaccttgttaagggtggggagaatgatgaagaaccttgttaagggtggggagaatgatgaagaaccttgttaagggtggggagaatgatgaagaaccttgttaagggtggggagaatgatgaagaaccttgttaagggtggggagaatgatgaagaaccttgttaagggtggggagaatgatgaagaaccttgttaagggtggggagaatgatgaagaaccttgttaggggtgggggagattacaaagtacattgatcagttagggtggggcagaaaaatatcccaatggtggaatgtcatcagttgaggctattttcactcctgtggatcttcagttgattcaggccatctggatgtatacgtgcaggtcactggggatatgatggcttagcttgggctcagaggcctgacattcctgtcttcttatattaataagaaaaataaaatggtaaagtgttggggtggcgaaaattttggggggtggtatggagagataatgggcgatgtttctcagggctgcttcgagcgggattaggggtggcatgggaacctacagtgagagagattcaactgaagaaagattttggggtaaggggtgatattgtagggttgttagaaggagcatttggcatatagaattattggttggactggatgcggttttgtatgaattgagaaactaaacgaaagacacaaagtccgaataaaagaaggagaaagataggttgaaaggactaagaattgggaggactcaggatgtccaattagagagtgtccaagggggttcaacgttattgtttgcttggttggcaagtttttgggctctatccttgagtttttttatgttgtcatataccaggccagattgatttaggtaaaaacaacactcttcatttaaaaatatacagtcctcttttttagcagtaagtaaatcaaggcctcagtgattttggaggaaagagaaatgcaaagccagcaactgtttgttaaagaaggattagaaacggctaggagagagtgactgagattgacagtgtggtggagatagctggggaaaggtggagggtggcataagaacgggaacgagaataagagtaagtataaaagcaaagaataggacttcatcagggtgaaagtattgaagtgcactttgtcactgaagatcttctatccacttaaagagagacctaagggtggcagtttgaggtaaaaccaggtgccactgaataccaagagcctgagaaactgctcaggtgatttgactagtaaaggccggtccattatctgactgtatagaggtgggaaggccaaaccgaggaattatgtctgacagaagggaagaaataaccacggtggccttctcagaccctgtgggaaaggcctctacccacccagtgaaagtgtctacccagaccaagaggtattttagtttcctgactcgaggcatgtgagtaaagtcaatttgctaatcctgagcgggggcaaatccccgagcttgaggtgtagggaagagagggggcctgagaaattcttgaggagtagtagaatagcaggtggaacattgagaagttattttcttgaggatagatttccacgatggaaaggaaatgagaggttctaagaggcgggctagcggcttgtaacctacatggaagaggttatgaaatgacgatagaatagaatgggcctgtaagcctggaaggagatattttccttggtccaagaaccatttgccttgtgtgggaagagattgataggtggaagtttcagtgggggagtaggtgggagtggccagatgagaaggagaaaaactgctgtgagggatagaagttgaaagctagctgcttttttagctaccttatcagcataagcattgtcctgagcgatgggatctgatgccttttgatggcccttgcagtgtatgactccagcttcctttggaagtaaagcggccttgaga

SEQ ID NO: 5942 - DNA, 1453 bp, Artificial sequence
  DNA replication origin
gcggtgacgcccgcgggaccccgggccgggccgagccgggcctgggcggccgctcgggcagggccacgggcctcggccggggctgccgcggcgtgaggggcgcgcgcccgggccgccgcgccgcgggctcaccttctgtcggatctgacccgacgtggacaccttgcggatgagcttctgtggggagccgggctccgcctcgggctcgctgtcggacgactcctcgggcggcggcggcggaggcggttgcgggggacccggcggaggggcgcccgccgccgccgccatgctgccgggccagcgcgcgcaccgcgggcgggggcggggcggggccggcgggaggggcggggccgagggcgggccgggccgggggcggtgggggcggcctcccgcctctccccgccgcgccccctgccggccatgcgcgcagctgcagacggcgccgcgcggcccctccccgcccccacctgaagcgtcccgggccccccgcccacctctccgggccgtggcttctgtgtgttatttctggaacgccgtttgtgttcttgtttctatattcacttcttaaaacatctctactcttccgcatcagaatgtaggtaacctcaggcaggctggggctgtgtctgtcctgcccagccttgtgtggccgagtttggggcgagctcgaatgcgcgcgcgcgtgctggaaagagaccccggtactgggacgggcctcgggacgccagagctgggatgcaccgctccatctgggaaggcttcctggagaaaacggttcttaaggagagatggaaaatgtgagcaggagttgtgactagagagggaaccatgttctaggcagagaccagatttgtgcaaaggcctggaggcaagaaagaacgagtgttgggcgaagacgggggaagaaagggaagctggtgcttagagcaaggaaaatggcattaagatatgagcctcggggcgggcaggtcgaagcgggctttggaaaccagataaggggatggaaggcagcaggaagcccttgagggatttaaccctgggcggggctgggtcaccacgctggggcctgtgatccgggctttgaagttatcagggcaggtggacgccctggattaccgaggggctgagagatagagacgtggactgagatccaggtggggagtgaccagcgactggagggagacagaggtgaccagaacgagtcccatgtttcccaggggggctgctggatggtgggcgggtggggtccagcgctgctctgggcagaagaggaggaagcgaagctggagatgagatcagctaagtttttggtgccatccaggtggagcagggcttggtgccacccagaggaaatgctgtccatctgtctgccctgctctgaggggcaaatcagtaagggactgcccaggtgtgccctctccctgtcaaagggctgccgctagagacctcgcct

SEQ ID NO: 5943 - DNA, 1482 bp, Artificial sequence
  DNA replication origin
gcggagcccggctccccacagaagctcatccgcaaggtgtccacgtcgggtcagatccgacagaaggtgagcccgcggcgcggcggcccgggcgcgcgcccctcacgccgcggcagccccggccgaggcccgtggccctgcccgagcggccgcccaggcccggctcggcccggcccggggtcccgcgggcgtcaccgcccctgtcgagcgtgccccgccgctgtaacgggccggcgccccgggcggagcgcgcggcccccgacggacggcgggcggctgtggggccgggcggggggcgcgcaggtgggcgccccgggcgccgcgcgctgggcggggggcgcgcgccgagttgggccgcgaggacccggaggaaactgaggcctagatgcaggggactgcgctcgtgccaccgagcgggtcccacgcgggggctcccggctgcgccccgcgggcgtccgcggtccccaaaccccggttctgcacgtttctcaggagcggtcgggtggtgtcccgcgagtgccctgcagacttccctgtggtgccctcagaagtccgctcggacccgggtgcgagggatcaccccttcaccccttcatcccaaaagggaaggaagggatgcgcgttcagtgaccgtctctctcagcaaagccgggaccgcgcacccgcttggcacccaactctccacggagaactcctgacgctaaatgttagataaagacgcacgtcctttttgcaggaggaaagttgcaccgtttgttttcccattgtgcttcctattgaaaacagcttacggtttttgctccaggtgagcccgcccggttagaacactgcttcctcaggcaggtggctggacaggtggctgcgagcaggctgggtccctggggcagctctggcagatccggttggcacggactttctcctcctgctgcagtgcgcttttcctccggggcggattaggttcagccgttcccttcaccgtgggagccttctcttctgtcagcctttgatacctgcgatgggggaacctgaggtcctaacatgttacaaacaggtttgttgtgaagtgctccagttattcagcaaataggtaccgaacacctgctttgttccgggtataacagtagcagtagtgatgataatgatagcaatagcaaataacaattctttaataagccttctatgtgccaggcactttcttgggttagctttacagcacttgacatggttagtttattagtactggtgagaacccaataagttggatgctatcatctccgtcttttggaattggaatagaaatagaatcaaggttaaatgacttgcccagggtgtcacaggtcgtaaatgtggatgtgtgttggaaccatggtcaggaccgtaagatggaaggcagtttctacacctagggattctcagtctagttgggagatggacgcctgtgcacctgacatgacaacattgtaagtgccgcggaaactcggg

SEQ ID NO: 5944 - DNA, 1014 bp, Artificial sequence
  DNA replication origin
atgctttgtttcactagctcttattcgattcataccaaaccatgaaaatgaaaaaggactgaagaacatggaagaaaaataatgcaaaatggtctgttttccagaaaggaatcaaatacgatattttattagtgagctccgagaacatagtatttcccaatgttggtgttgcagggggttgtcgagagcaggctcgatgctgttgctgtctttgaaggcatttctgctcggagactcagagttgccttctctcttgtgcaatgcgggtttgctaactggttggtctgggatagagcaagcctgatttcttcctcactccagtttgggctttccagctttgaaaaactgttttttccttcttttctcttacacttgaaaaaacgaattctggttcatgtgctttgtcttgttctttgggaatttggctcgtttatttagtcattgttttggcaagcattttttttggggtctaccgtgggccacacaccatgctgagtgcggtgggtagaaatggagaggagccactctgcatcaagcttatattctcgtgggagatcagataagcacatacatagaaccttagttacaggctgagacaagctccgatggaagagcagtacatggtgcctgatatgtggaagaccccacctggccttggggaggggctgggcagtcttctcagaggaagtgaggtctcatagctgagacatgaagaatgatagtggtaaatccactgagggaagcatgagcctgagagggtatgtgtgtctgtgtgttggtgtgtgtctgtgtgtttctttgtgtgtgtctgtgtgtttcttgtgcaaataggcacctcggggatggggcaggtggagggaccagcagtgcgaagaccttgggatggggacaccacgtggagtgtgcaaagtggtggaagggccagggtggctgatggaggccagagcaagaggacaccagaggggaccagcgtggctggggggggccagagcgagaggacaccagaggggacca

SEQ ID NO: 5945 - DNA, 1345 bp, Artificial sequence
  DNA replication origin
tctttgtgtgtgtctgtgtgtttcttgtgcaaataggcacctcggggatggggcaggtggagggaccagcagtgcgaagaccttgggatggggacaccacgtggagtgtgcaaagtggtggaagggccagggtggctgatggaggccagagcaagaggacaccagaggggaccagcgtggctggggggggccagagcgagaggacaccagaggggaccagggtggctggggggggcagagcgagaggactccagaggggaccagggtggctgggggggggggcgccagagtgagaggactccagaggggaccagggtggctggcagaggccagagtgagaggacaccagaggggagcagggtggctggcagaggccagagtgagaggacaccagaggggaccagggtggctgcggggggggccagagtgagaggactccagaggggaccagggtggctgggggggggggggtgccagagtgagaggactccagaggggaccagggtggctggcagaggccagagtgagaggactccagaggggaccagggtggctggggggggggccagagcgagaggacaccagaggggaccagggtggctgaggggggcagcagagtgagaggactccagaggggaccagggtggctggcagaggccagagtgagaggactccagaggggaccagggtggctggcagaggccagagtgagaggacaccagaggggagcagggtggctggcggggggccagagcgaggcgagaggacaccagaggggaccagggtggctggggggggggggcagagtgagaggacaccagaggggaccagagtggctggcagaggccagagtgagaggactccagaggggaccagggcagagcttgggacttactcctcaggacttgggctgctgttgaatagttttatttggtgaaattctcagatttgcaggtgtcagaaagttctactctggctgtagggtggagggtgaactggaaggggagggaggtttgtaggattgttaggagagagtggagtggagagtgcggaggtgtctagggggcagtgggcaggctagtgatcaggtcagaagggggtggagtagatgaaggtgtcagggcttctgctgagtacagcagcaggctggttaagtgagctcaggagtccagaagaggggctgtggggtggtgggggaggcttctttatcttccatgtctgtcacattctttagccttattttatttaatttgttggtttttttcctagttctagttatcaaagtttttatattgtttgttactacatttacttgcaacctcccctcccagctcccaccccccac

SEQ ID NO: 5946 - DNA, 992 bp, Artificial sequence
  DNA replication origin
tattgcctcatttagtttttgaaatttcaaaatgcagcaaaaaggaatgaaagcagtgggctttattctcaccctccctgaccctcctggagagtcattcctacctgtattccatttggtcttatttatttataatatatgctacatgagagcaaggatttttgtctgttttgttcatggctttacaccaagttcccagcacacagtaggtgcacataactctttgttgaagagtggcttggtcacctccagttccagaatgatttgggccctgcccctcattgttcggctctgcaggaagcttcctgggaccagatgctgggcctggctgcaagatcaggtcttccttcctgcagggcacagtccatgtgcatcccagcagccacggcagggctggggaggaactgatgtgggttgcttctctgggcagggcatgggggttccctgcctgtggtgggggaagggggtacgtggctgtggggtggaagggatgtttcttgccagagggagtgggcgtgggaggtgcgctgggtgagcagcctctgaggcaggaagtgctttccaggctggggtgggtttgggcttttttgtcagagctgtgggaagccattaagattttaaagcagggtggtaaagttgggtttttgttagaagagtctgtctgctgctggaggcgagatctgcagggaagagttggctaggtggatgagaaggggtgcagaggggcctttcccccaacatgaggatgtggacagcctggatgtgcttatggaggtgagagatggggcctgaggagagccatgcactgcaggcgggcagggtccatgcttctgctgttgttggtacttttatttgttttgggtgactctgagaattaaatattaataacagtgttgaaggaacatactgtatcattggccatgatgcatgcctcctagaaagcagcgctgtacacagtgacatgatcacagcacccctgcaggactccagat

SEQ ID NO: 5947 - DNA, 1165 bp, Artificial sequence
  DNA replication origin
accatgtccgggagacccaggcacagccctatgagccacatacctcttcgtcgccgggctctgcggactggcagagccacggggtgtctgccagcctcctgagctgtcggtccatctcggcaagagcactccccagctgctccttctgaggcggatccagctgctgctccaggcggagggagggagagagaaatggagagtgtgcactgctgatcagcgcgaggcccaggggggtgaggtccgctccagggctctgctctgctctgatcagggagctcactttccagaaacgaagtcccagagcaccagaaaaggaaccaaacccagaacctcactttctaagtagtgctggtgagagaataaaactgtccatcagtcaacgatgaattcacatagagcaaggctgacaactgacctgcttgtgtccctctgtcagaaatggggtcggagccattcacctgtgtcaagcagtggaaatgctgtgggaagcaaagtcagcagtcgaaccttgcaggaggcagcaggaggtgtgcagtgaggacacgcgtgtgaccacgggacgtgggacgaggggaggcatgggataaggagatgcgtagagtgaggatttctgtggagtgaggtgatgcgtggagtgaggtgatgcgtggagtgaggagatgcgtgcagtgaggacatgcgtggagtgaggagatgcgtggagtgaggagatgcgtggagtgaggagatgcgtggagtgaggagatgcgtggagtgaggagatgcgtggagtgaggagatgcgtggagtgaggagatgcgtggagtgaggacatgcgtgcagtgaggacatgcgtgcagtgaggacatgcgtgcagtgaggacatgcgtggagtgaggagatgcgtggagtgaggagatgcgtggagtgaggagatgcgtggagtgaggagatgtgtggagtgaggagatgtgtggagtgaggtgatgtgtggagtgagatgcgtgcagtgaggagatgtgtggagtgaggtgatgtgtggagtgaggtgatgcgtgcagtgaggagacgcgtgcagtgaggaggtgagtggcgtgcggagtggagggctgggaaaccacacctggggcggttctccagttgcccaatctttatcaagccccttcctcctcatctttaaaaccag

SEQ ID NO: 5948 - DNA, 952 bp, Artificial sequence
  DNA replication origin
ggtgaggagcgtctctgcccggccgccccgtctgagaagtgaggagcccctccgcccggcagctgccctgtctgagaagtgaggagcctctccgcccggcagccaccccatctgggaagtgaggagcgtctccgcccggcagccaccccgtccgggagggaggtggggggggtcagccccccgcctggccagccgccccgtccgggagggaggtgggggggtcagccccccgcccggccagccgccccgtccgggaggtgaggggcgcctctgcccggccgcccctactgggaagtgaggagcccctcagcccggccagccaccccgtccgggagggagatgggggggtcagcccccccacccggccagccgccccgtccgggaggtgaggggcgcctctgcccggccgcccctactgggaagtgaggagcccctctgcccggccaccaccccgtctgggaggtgtgcccaacagctcattgagaacgggccaggatgacaatggcggctttgtggaatagaaaggcgggaaaggtggggaaaagattgagaaatcggatggttgccgtgtctgtgtagaaagaagtagacatgggagacttttcattttgttctgcactaagaaaaattcctctgccttgggatcctgttgatctgtgaccttacccccaaccctgtgctctctgaaacatgtgctgtgtccactcagggttaaatggattaagggcggtgcaagatgtgctttgttaaacagatgcttgaaggcagcatgctcgttaagagtcatcaccaatccctaatctcaagtaatcagggacacaaacactgcggaaggccgcagggtcctctgcctgggaaaaccagagacctttgttcacttgtttatctgctgaccttccctccactattgtcccatgaccctgccaaatccccctctgtgagaaacacccaa

SEQ ID NO: 5949 - DNA, 1494 bp, Artificial sequence
  DNA replication origin
gtgcagaacaaaatgaaaagtctcccatgtctacttctttctacacagacacggcaaccatccgatttctcaatcttttccccacctttcccgcctttctattccacaaagccgccattgtcatcctggcccgttctcaatgagctgttgggcacacctcccagacggggtggtggccgggcagaggggctcctcacttcccagtaggggcggccgggcagaggcgcccctcacctcccggacggggcggctggccgggtgggggggctgacccccccatctccctcccggacggggtggctggccgggctgaggggctcctcacttcccagtaggggcggccgggcagaggcgcccctcacctcccggacggggcggctggccgggcggggggctgacccccccacctccctcccggacggggcggctggccaggcggggggctgaccccccccacctccctcccggacggggtggctgccgggcggagacgctcctcacttcccagatggggtggctgccgggcggagaggctcctcacttctcagacagggcagctgccgggcggaggggctcctcacttctcagacggggcggccgggcagagacgctcctcacctcccagatggggtctcgccgggcagaggcgctcctcacatcccagatggggcggcggggcagaggcgctccccacatctcagacgatgggcggccgggcagagacgctcctcacttcctagatgtgatggcggctgggaagaggcgctcctcacttcctagatgggatggcggccgggtgaagacgctcctcgctttccagactgggcagccaggcagaggggctcctcacatcccagacgatgggcggccaggcagagacactcctcacttcccagacggggtggcggccgggcagaggctgcaatctcggcactttgggaggccaaggcaggcggctgggaggtgtaggttgtagtgagcggagatcacgccactgcactccagcctgggcaccattgagcactgagtgaacgagactccgtctgcaatcccggcacctcgggaggccgaggttggcggatcactcgcggttaggggctggagaccggcccggccaaacagcaaaacccggtctccaccaaaaccagtcaggcgtggcggcgcgcgcctgcaatcgcaggcactcggcaggctgaggcaggagaatcaggcagggaggttgcagtgagccgagatggcagcagtacagtccagcttcggctctgcatgagagggagaccgtggggagaggcagaggcagaggcagaggcagaggcagaggcagaggaggcagaggcagaggaggcagaggcagaggaggcagaggcagaggaggcagaggcagaggcagaggcagaggcagaggcagaggcagaggcagaggcgcctggtcaacaatcttaagtccaataagaatgtttcttatgaagacactacttaaaaaattcttaatag

SEQ ID NO: 5950 - DNA, 1097 bp, Artificial sequence
  DNA replication origin
ttggctgctctcttcatacccgtcacctcctgttataaacgtctatttccttgtttgcctgttggtcctttctgagcaccggagccatgtgtgtcttatgtattgtagtggccaggtacctgccacaaggcctgcatggagtaggagctcagcgcatgcttctgggatgaaaggaagggagggaggatggagaaggaaggaaggaaggaaggaaggaagggagggagggagggaggggaggggaggggaggggaggggaggggaggggaggggaggggagggagggaggggaggtgagggaaaggggaggggagggaggaaggaaggaaggaaggagaaaaagaaagggggagggaggggaaagagtaagtaaggcaggcaattaaaaaggaaaggaaggaaggagggagggaggaaggaaggagggagggaggaaggaagggggggagggaggaaggaaggagagaagaaaaggggaggaaggaagggtgggatggaggaagggaggaagggagggaagaaggagaaaaagggggagggagaggaaggagtaagtaaggcaggcaataaaaaaggaaacgaaagaggaaggaaggaaggaaggaaggaaattaaaaaagaaagagagatggaaagacagaacaatgcaggtggaggggagcaggagagagggggaagaaggatgagagacagaacacacagaatcttaacagctaagagacaaaaggactgcagacacaaaatgaatcaattttagagggaaaaagagagaaatgaaaggtaagaggaagaggtgaacatagggatagatgggaggggcagagagaggcagagaccagaagggcacactgggcccggctgagggccctcaagcccctaccattgccgttggccagcttggccagtgtgatgatgacaaattcatcagtgaggttgaggggcttgaggtggtgctgcagctcgtacatgaccaagctgaagtggtttcgggacagagccaccagtgtgtcgctggccacctctgccttcatatagccctccatctgcaggagacagaagagggacatatggcaccaccaccagccgggcctccagga

SEQ ID NO: 5951 - DNA, 1797 bp, Artificial sequence
  DNA replication origin
ccctccttccttcctttcctttttaattgcctgccttacttactctttcccctccctccccctttctttttctccttccttccttccttcctccctcccctcccctttccctcacctcccctccctccctcccctcccctcccctcccctcccctcccctcccctcccctcccctccctccctccctcccttccttccttccttccttccttccttctccatcctccctcccttcctttcatcccagaagcatgcgctgagctcctactccatgcaggccttgtggcaggtacctggccactacaatacataagacacacatggctccggtgctcagaaaggaccaacaggcaaacaaggaaatagacgtttataacaggaggtgacgggtatgaagagagcagccaaatgggcgtttgagatctggctaagggaggggacctcatctctgcagcccttgttgaggtagcgatatttcagctaagacctgaaggcagagaggaggatgtctgtgtgaagcataggaccgggagagcattccacacggagagaacattgcagaggctctggggcagagaagagcttggaatctctgaagagttgagaagtggctgtggctggagttaaggagtgagagagagatgagggggagcgtcaggcagggccttggggacgtcacctcgggcactaggaagctatcgaaggacattaagctgcagggtcgcctggtgaatgcaggttgtgggaaggcctttctgactgctgcctggatggagagtactaggaggtgggtacttgtgatggtggctgggctgggaagcatgtggtgaggggtgacaggtgggaaggggctctgagacgggacctgctgaggacgggggaaggagcagaggtagcaagccactgggagcgtgttggcctcctttcccgagctagaagcactgagagttgggagctcaagtgaagaacttcatgctgtgtgtggagctcatgttgcctgtgggagcccccaggggagaggtgaagggggcagttgatttgtggcgcggagttcagagggcaggtctgggcttggctttggttcttggtgacctcagagtgcaggtgatgttcaaagccattgatatccgggagtgaaagtagagagaggacccagcccggaggggtcctggcattggcaaggctcgggaggagtcgtaagagacagcgtggaatgtgaggcctggcacagggagaacaatctcaaggggtgcaggcccccgtgatgcccatcctgccaaggggtccagtgagataaggctggagaaggcgggaggtggaagagcttcacggcttgctggggataaaggcctggatggagtgggaggggaggaagggaaggcaggcctggaaagaggacaagggacagcagcgagggggattattatgaagtctgaagatgggggtgcactcagggtgggtgaagtggaggggcctgcctcctgttgcagggtggcctgttacggctcccttccttcatccgtctgctctttttctctgctggcctcgtgccttctctcagttccttgctctcacctgctgtctccctgcttctgtgttcgcccaagaacgtttgtgggacccctgaaggaggctggcctgtgtccgggaggatggacgcactctgggggctgcttctttctgcttcttgcccctccttccctggggctcctctgtcctctcttccctccctctctcggacctcctcttccttctcctggtcctctctcttcttccctttcctccccttttgcctgg

SEQ ID NO: 5952 - DNA, 911 bp, Artificial sequence
  DNA replication origin
ctttgagaatgtgaaatactggagaattaatctgagcaaatcatatgaagaggtgagccgtggtgctcaatgaaaatgaacttatcttccctctctgaactcaaaagtgcttccattcaagtcaaatgctcttcaagtctgaaaatgaaagcctcctgccttttaatggggagagaaattgtgtcacttaattgtggaaggatcagaagaggaaacctcataacaaaggaacctaaatccaggattctggagctctcagcagtggaaggaaaatgattctcctgacctggaaatgaccctcccttggaatgagagtattgtggttgcctgacactccgaaggatagcagtgctcaaagtcctggggctttgatgggttttgaaggggctggagggtgggggagctggggagtaggagggggctgtggagggagaaggatgggaggttctgcaggggacagagctattgcttggtgttggtgtcctcaggctgtccctggggagggggctgctagggaatggactgtggagaaacctgcagggggccaggaactcaagtcttgtcagttctgggtcactgaaggcacatggcttagaataaagcatccataaatcgccttatgcatcggaaagaaactgacagcggggcttgaaaggacatccatttctggaataatccgagagtgttgcagcttcagcagagcagattcaatggggaggaggggattttcattttgcggtggttttgcccccattgggaggtctatccagaggacgtgagaggtgaagctgaaggcaaaaactctcgccatcaacccagagggcagtttctcttgaattcttcactcatctctgaaaaaaaggaaccaaacatcatagccatttgccagtgcagaaatgaaagcaagagac

SEQ ID NO: 5953 - DNA, 1130 bp, Artificial sequence
  DNA replication origin
gggcgcggggactgcggcgtctgagcgcgccaagccgtgcgcccgcggggacgccgagccccggggccggtgcgggcggcggcgggcggggcccaggtgcgcccggccgcgtcgggcccgtgactgctcggggggcggcgccctcccgccgcagccgcagtggctggcgccgcagccaggagccatgggcaacatctcctctaacatctcggccttccagtccctgcatatcgtcatgttgggcttggactcggccggcaagaccacggtgctctaccggctcaagttcaacgagttcgtgaacacggtgcccaccatcggcttcaacaccgagaagatcaagctgagcaacggcacggccaagggcatcagctgccacttctgggacgtgggcggccaggagaagctgcggccgctgtggaagtcctacagccgctgcacggacggcatcatctacgtggtggactcggtggacgtggaccggctggaggaggccaagacggagctgcacaaggtgaccaagttcgccgagaaccagggcacgccgctgctggtcatcgccaacaagcaggacctgcccaagtcgctgccggtggcagagattgagaagcagctggcgctgcacgagcttatcccggccaccacctatcacgtccagccggcgtgcgccatcatcggcgagggcctcaccgagggcatggacaagctctatgagatgatcctgaaacgcaggaagtccctcaagcagaagaagaagcggtaatgcgcccggagcgaccggggagcgagcgagtgcgtcaagaaagaatgaatggatggatggatggttggatggatggatggatggatgagcgagaacccgcgcccgcgaacaaagagcgaaccaaagcgatgcttcgaatttttaaaacggaatctctgcacccaaatgcaggactggtgacttaaggagctgcgaagtctgatttaccggcctactctcgacctgccccccacccccagctcaggggaccttttgtctgaacgccagagctactgaccaggtcggggggccgcggtggggagtggaagagccggtcctgctgtccgccctcccagccccaggtggaaggctcagttgtcggaaagac

SEQ ID NO: 5954 - DNA, 1129 bp, Artificial sequence
  DNA replication origin
gcgcggagccggctcttcctccccagcggctgacgcgtttgcaaaaatagctctcggctcccggaatccccgcccgggtcctagcccgccccctgcccctccgggccgcagccgtgggcgacgcagcctgcctgagggagtgggtcccggggtcccagctctgtgggcgcgaggcggggcagggcggcccccagggtgactgggagagcgccgctctggggagtgagggcggcgaggctggggcctccaaaccccagaagggacgggacggggctggcctcggtgagctgccagcctgcgctctggatccagccgggcgcgtcccctcccaccctcgcgccgcggctgtcgccggccccggcccccagtgacgcccaggctcgcctcctgcctgggttccagggggctgcacccggccagcgccgccctccggagcccaggcctgtgcccagggcaccctggaggcccagcctttcttgcccggtggcggcggttggggcagggtcggacctaggccgcgatgggggattagaagacctacctgccccaagtagctcggacagctcaccctcccagacacgcctgggctacctcatttcgtccgcatcgactctgctgacatcccaggggaagcgtcagcatttcgggagagcaccccttgccacccgactttgggaactgagaaccacctgcccgcaggtgaactactccgcagaaatggcaacaccagccccgggggctgaaagaaaatgtgtctacagcttggagctggtggcgcagtgggttacaaacactgatattccacgggttccacctcctgtcacctcagttcaatggttttattctggtttgtaaacatgtaacaaatgtatatcctctctgggtgcggagaaaagtgagagtatattatggcaaacacacagatctggggagagctgctccgcaggagacagcaggccgcagcatgggcgaccgcatcttcccagctctagcttatgagacagaaacgacggaaacggggtcaagggagaagaaaatgaaaatgctaagaatttatgaataaaagctagaattttagagaaatactttatcaccttctgttcacaaaccacgaaaagacatatgatat

SEQ ID NO: 5955 - DNA, 1268 bp, Artificial sequence
  DNA replication origin
ttctggcctgtaattatttcaataaatgattatctgcagatttatctaaaaatatgtttcctgagtctatgagagaataacgagttgtactgtccactttcgatgggagattgagcgtatttatggagtctatttaattcacgttccatagatatgtgaaactggtgcatattggacatgtatattcaaatgccttctttatgagagccctggttttatctaccgaaacctgcaaaagatcatctacctctgaagtcctaagtataattaaatgactataaaaatgattgttttgttacagtagttaccttgcttagcaatttagtcagtaccccacaggggtaaaatgatgtgtttcttctgcctttaacttttaaggcaacatatgaagtgagatgtggttatggtgtgtgtggtgtggtgtgtagtatggaatgtgtgtgtggtgtgtagtactgtatgtgtgtggtgtggggggggtgaatgtgtgatgtggtgtgtagtatggaatgtgtgtgtggtgtgtagtatggtatgtgtgtggtgtgtgggggggtgaatgtgtgatgcagtgtgtatgtgtgatgtggtgtgatgtgtatgtgtggtgtggcatgtgctgtgtggtgtggtgtgtttgtgtttgtggtaggtagagtgtgtggctaggtgggggttgtgtgtgggctaggtagtgtgtgcagtgtgtgtgtggtgtggtgtgtgtgcgtgtggtgtgtgtatgtgagatgtggtgtgtttgtgtgtgtggtgtgtttctgtgtgtggtaggtggtgcatgtgatgtgtttatagtatggtgtgtgtgtggtgtagtgtgtgtggtgtgtgtgtagtgtggtgtgtgtgtggtaggttgtgtaccgtggtgtgtgcatgtggtgtgtgtggtgtggtgtatgtgtctgtgatgtggtgtgtatgtttgtgatgtgtgtgtggtgtagtgtgtgtggtgtgtgtgtagtgtggtgtgtgtgtggtaggtgctgcgtgtggtgtgtgtttagtgcggtgtatgtgtggtgtgtgtggtgtggtgtgtgtggtgtagtgtgtatgcggtctgtatgtgtgtagtgtggtgtgtgtgtgtggtgtggtatgtgaggcgtggtgtgtgtgatgtgtatgtgtgtggggtgtggtgtgtgtgatgtgtgtttctgtgtgtggtaggcggtgggtatggtgtgtgtgtagtgtggtgtatgtgtggtgtgtggtgtagtgtgtgtgtggtgtgt

SEQ ID NO: 5956 - DNA, 1236 bp, Artificial sequence
  DNA replication origin
gattagggagtggtgatgactcttaacgagcatgctgccttcaaccatctgtttaacaaagcacatcttgcaccgcccttaatccatttaaccctgagtggacacagcacatgttttcagggagcatagggttgggggtaaggttatagattaacagcatctcaaggcagaataatttctcttagtacagagcaaaatggagtctcttatgtctacttctatccacacagacccggcaaccatccgatttctcaattttttccccacccttcccgcctttctattccacaaaaccgccattgtcatcatggcccatccccaatgagccgctgggcacacctcccagacggggtcgtggccgggcagaggtgctcctcacttcccagtaggggcggccgggcagaggagcccctcacctcccggacggggcggctagccaggcggggggctgacctcccccccggccggacggggtggcagccgggcggagacgctcctcacttcccagacggggtggctgctggacggaggggctcctcacttctcagacggggcggttgccaggcagagggtttcctcacttctcagacggggcggccgggcagagacgctcctcacatcccagacagggcggcggggcagaggtgctccccacctctcagacgatgggcggccgggcagagacgctcctcacttcctagatgggatggcggcggggaagaggcgctcctcgcttcctagatgggatggcggccgggcagagacgctcctcactttccagactgggcagccaggcagaggggctcctcatatcccagacgatgggcggccaggcagagacgctcctcacttcccagacggggtggcggaccggcagaggctgcaatctcggctctttgggaggccaaggcaggcggctgggaggtggaggttgtagcgagccgagatcacgccactgcactccagcctgggcgccattgagcactgagtgaacgagactccgtctgcaatcccggcacctcgggaggccgaggctggtgcatcactcgcggttaggagctggagaccagcccggccaacacagcgaaaccccgtctccaccaaaaaaatacgaaaaccagtcaggcgtggcggcgcgcgcctgcaatcgcaggcactcggcaggctgaggcaggagaatcaggcagggaggttgcagtgagccgagatcgcagcagtacagtccagcttcggctc

SEQ ID NO: 5957 - DNA, 987 bp, Artificial sequence
  DNA replication origin
tctgggaagtgaggagcgtctctgcctggccgcccatcgtctgggatatgaggagcccctctgcctggctgcccagtctggaaagtgaggagcgtctctgcccggccgccatcccatctaggaagcgaggagcgcctcttccccgccgccatcccatctaggaagtgaggagcgtctctgcccggccgcccatcgtctgagaggtggggagcacctctgccccgccgccctgtctgggatgtgaggagcgtctctgcccggccgccccgtctgagaagtgaggaaaccctctgcctggcaaccgccccgtctgagaagtgaggagcccctccgtccagcagccaccccgtctgggaagtgaggagcgtctccgcccggctgccaccccgtccggccgggggggaggtcagccccccgcctggctagccgccccgtccgggaggtgaggggctcctctgcccggccgcccctactgggaagtgaggagcacctctgcccggccacgaccccgtctgggaggtgtgcccagcggctcattggggatgggccatgatgacaatggcggttttgtggaatagaaaggcgggaagggtggggaaaaaattgagaaatcggatggttgccgggtctgtgtggatagaagtagacataagagactccattttgctctgtactaagagaaattattctgccttgagatgctgttaatctataaccttacccccaaccctatgctccctgaaaacatgtgctgtgtccactcagggttaaatggattaagggcggtgcaagatgtgctttgttaaacagatggttgaaggcagcatgctcgttaagagtcatcaccactccctaatcttaagtacccagggacacaaacactgcggaaggccgcagggtcctctgcctaggaaaaccagagacctttgttcacttgtttatctgctgaccttccctccactattgtcctatgaccctgccaaatcc

SEQ ID NO: 5958 - DNA, 2005 bp, Artificial sequence
  DNA replication origin
ggagtaggcagcagtgggagtagggaggcagtgggagtagggaggcacggggagtaaggcagcagtgggagtagggaggcagtggaagtagggaggcagtgggagtaaggcagcagtgggagtagggaggcagtgggagtaggcagcagtgggagtagggaggcagtgggagtagggaggcagtgggagtaggcagcagtgggagtagggaggcagtgggagtagggaggcagtgggagtaggcagcagtgggagtagggaggcagtgggagtagggaggcagtgggagtaggcagcagtgggagtagggaggcagtgggagtagggaggcagtgggagtaaggcagcagtgggagtagggagacagtgggagtagggaggcagtgggagtagggaggtagtgggagtagggaggcagtgggagtagggaggcagtgggagtagggaggcagtgggagtagggaggcagtgggagtagggaggcagtgggagtagggaggcagtgggagtagggaggcagtgggagtagggaggtagtgggagtagggaggcagtgggagtagggaggcagtgggagtaggcagacagtgggagtaggcagcagtgggagtagggaggtagtgggagtaggcagcagtggaagtagggaggtagtgggagtagggaggcagtgggagtaggcagcagtgggagtagggaggcagtgggagtagggaggcagtgggagtaggcagcagtgggagtagggaggcagtgggagtagggaggcagtgggagtaggcagcagtgggagtagggaggcagtgggagtagggaggcagtgggagtaggcagcagtgggagtagggaggcagtgggagtaggcagcagtgggagtaggcagcagcgggagtaggcagcagcgggagtaggcagcagtgggagtagggaggcagtgggagtagggaggcacggggagtaaggcagcagtgggagtagggaggcagtggaagtagggaggcagtgggagtaaggcagcagtgggagtagggaggcagtgggagtaggcagcagtgggagtagggaggcagtgggagtagggaggcagtgggagtaggcagcagtgggagtagggaggcagtgggagtagggaggcagtgggagtaggcagcagtgggagtagggaggcagtgggagtagggaggcagtgggagtaggcagcagtgggagtagggaggcagtgggagtaggcagcagtgggagtaggcagcagcgggagtaggcagcagcgggagtaggcagcagtgggagtagggaggcacgtgggagtaaggcagcagtgggagtagggaggcagtgggagtagggaggcagtcggggagtaaggcagcagtgggagtagggaggcagtgggagtagggaggcagtgggagtaaggcagcagtgggagtagggaggcagtgggagtagggaggtagtgggagtagggaggcagtgggagtaggcagcagtgggagtagggaggcagtgggagtaggcagcaatgggagtagggaggcagtgggagtagggaggcagtgggagtaggcagcagtgggagtagggaggcagtgggagtagacagcagtgggagtagggaggcagtgggagtaggcagcagtgggagtagggaggcagtgggagtaggcagcagtgggagtagggaggcagtgggagtagggaggtagtgggagtagggagacagtgggagtaggcagcagtgggagtagggaggcagtgggagtagggaggcagtgggagtagggaggtagtgggagtagggaggcagtgggagtaggcagcagtgggagtagggaggcagtgggagtaggcagcagtgggagtagggaggctgtgggagtagggaggtagtgggagtagggaagcagtgactacagaaggacatggtgaggggtcccagttgagatggaaatatcctacatcttgactgtatctgtgtcaatatcctggtgctgatgttgtatta

SEQ ID NO: 5959 - DNA, 1412 bp, Artificial sequence
  DNA replication origin
tgaccaatagccctggaataacttctgtgtcatcagacgacaatgattaattttggaaatgtgttaccagatacttaatttactgcaagttcattttggaaatgagatatttaacaaaatatgctttaaatttgaccataataacacattcttgtcattctacagggattactataagcttaaatgatgtaataaatttaaaggtgcttcaaaacatttcagcactgatatgaacataatacattactatgaaggtcatttttatcttcatgattaatgtggtgtggtctcctgatacatcccacagaaaactgagaatctgaggaagtagaaaatggatatagttttgccatttattagcatgtggctcaggcaagtaatgtcactgttctgaggctccatttctatcaaaaacaaatgaggaccataatatctaccacatagggccaaaatcaatgagctaatgtacgaagaaagcctagagttccaaaggagaatggcgttggtgatgatggtagtgttggacagagatggtgttgatatgattgtgatggtgatggtgacggtaatgacgatggtgttgatgatagtgatggtgatgatagtgttggtgatgaagatggtgttggaatggggatggtgttggtggtggtgatagtgatcgagttggaatagtggtggggttaggatagtgatagtgttgagatgaggacagtgttggtgatggtagtgatggtgatgatagtgtcggaatggggatggtgttggtggtggtgatagtgattgagttggaatagtggtggggttaggatagtgatagtgttgagatgagggcagtgttggtgatggtagtgatggtgatgatagtgttggaatggggatggtgttggtggtggtgatagtgattgagttggaatagtggtggggttaggatagtgatagtgttgagatgagggcagtgttggtgatggtattgatgatggtgatgatagtgttggaatggggatgattatggtgattatgatagtgtcagtgatggggatggtgttggagatgatgatggtgacgatgatggtgataagatggggatggggatggtgataatgaaggtgctgggatgggaatggtgatggtgatgggggtgttgggtaatgggaatggtattggttattatgacagtggtgataatgatggtgatgatgatggttctggtgatgatgttgtttatggtgatggtgttaggatggtgcgtttgaaagctgacagagtgaagtgccataacttggcttagtgcgttgctcacaaggaaagcatttagtaaatttcttttgactgaatgagtggaataagtggctttgggaggccttttactctactacactttgtctcaatattaaattcagcagccaatg

SEQ ID NO: 5960 - DNA, 1718 bp, Artificial sequence
  DNA replication origin
agtgccgggcgcgctgggcccccgcctcggcgggcggagggtggtcccgcgcctgggcgggggcgggggcgggggcgggggcgggggcgcggggggcggggccaggaccggagctgaggccgcggagggggtggtcccgcgccggggcggggcttcgggagaggggcggggcggggcgcggccgtctgaggctggcgagcgtggggcgggctgggggtggtgccgcggctccgggtccaggcgggtatccagtctgggcgcctcctcttcttcctccgcccggagccggccagggtagcggggccttggccgcccggcatcctcgggtctgggtccccggtaccgagcaggtctgggtgctggcccgcgctcctgtgcccccccgcacccccatctcccaccccttctccgggaacccctagcgaggacccctggggcggtgcggtccccccgcgagcgggcgtgggcgagggtcgcgccgcgttcggagacgctttactacaccttggctgaggacagtggagggaaggcaggcgcgaggctgcgggggccggagcgaaagttacaaactaacaacagggaaggcagtccggctgaaaatcataaaaggaggagagtttcctgcgaagcggaatgcagattgaagggctctggtcggaatcgtttacactttgtctgacctgggcgcctctgggcccccggcgcgtaaaacaggcctggcacgtagtaggcgctccatcaatgcccagtgagtgaacgcaccacttaactatgtggccagcaacgtctatggaccgacacatctaatcctaaaaaaaaaaaaaaatcccaattttggctagtccatttcacacgagtaaactagagctcggagggttggttcgccacagaggagaagggtagaaccagaatctgaaccgaggccgactccagaggctggggtctaaccactgcgccactgcctggggccctcgggactgcgcccacccccaccccgggaacccggagcccaggagaaagcgcgggtctttgccggggaagaagccaacatttgttgctcctggtcctgagcgagacacacacagtcagtcctcaccattaaccccgaggcagatattgttattgtccccgtttttataggtggcttgagacgtgcagcactatgttatgatcgcatggggcgtgccagagtctgaattcaaaccgggtatgttcagactcccgagcccctgcggctgcccctaaggcctgccgctcctgccgtctgggagaccttcctttccctaaggaatctggttttctgccactccatttgaagtctgtgttgaagtttcaggagacacaggtggacagaggcaccgacctagggctcgggagaagggtggacattgctgttccgattttggtgtcatctgtgtgtagatcatggaattcctgaaaatggatacgagtatccctaaaatacatgccgcagattttgaaaggaggcagtgaggcgaaggggcaggtggaggaagcagagaagcctccgagcagaggagagtttctgggtggctaggaggtctgattggtgtagggatgtgtctggagtgtgcttgaatctctggcaagttatctcgcctctctgtgactcagtttcctaaatgagtgtaaaaatgaaaggcagcatgtaaagtgctcagcagactgcctggcacacagtagctttcagtaagttt

SEQ ID NO: 5961 - DNA, 934 bp, Artificial sequence
  DNA replication origin
aatcggggggcgcgctcggctcacgggggccgtgggggccacgggagggcgtggaggggtcggggcgcccccctcgagcggcgctggggaggagggaaggacgcgcggtctccggttaaacttgttggtgacaatgcatatttcaacttcttcggagatccctcctgtgaggatgaaattgaaaactccggtttctggcttggcgatcgggtgaccgagcagccgcgaggtgacagcgccggcggcccgcgggcggggaccggctgggatagaggcgcgttgttctctgagcgatgtttaccgagaagcccgctccgcggcacgggcgggtgtcagttgggaccccaaccctgggtcccgcggctcctagcccggggcctgcggtgtagacgggggttggggacaggcccagctggccctgaccgggtgtcgggcgcccagagatgccgcgcgggaggagccgcgggagagccgccggactcagcgagcagagggtcgtggagcctgatggatcgatgagatctgaaaaagaacactgtgcgagattgtattcctgcttattctttccaagttagtaggcagattggaactatagaatttatccgtgataataataaagttcgcataacttttgttctgattacagaaacaatgtatgctcaggacagaaagctagagataaagagaaatataaacagcaaacaggaaaccatccccaatcccacattttttaccagccttgtcacagcctggcagatttgaacattaagttagaactggagccattcttgcctaaaccagagaatccctgaatgcagccgccccttctcacccttgtgaccgtctctgagctccaaagtttgggttttttccttgctccctacccgggcagaatctctgctggccacgagtccccttcccagtgggctggggg

SEQ ID NO: 5962 - DNA, 895 bp, Artificial sequence
  DNA replication origin
gaaaggaaaagagtcttccttccaggaagtcagggggtcaggatgaagccaggcagaccccctgggtgggtgtgatgagctgttctcagatattaaagcagaggggcttactgggaccacccagatgaaggaaagagaaaccctaccgcccaaggaccatagctgaacactttgtaagagtccttgagcttgggtgcgcacataagctgattattttttctccatcataattaccagtaaaattattttaaaatgtgagagctttccttggaggcagtaagcatgtgggagggaaaagtcattcaacttcagagccagccatggtgagcggggctgggactggggagaggcacacgaggcccctggggtgcaggattcaaggaggtgctcgccctgggggggtgtctggggaagggtctgtcctgctggccagaggagggctgtttgagagagggcggtcctgggctcacttccttagagttgggcagtgagtgtggaagagctcatacatgggaacctagagtgaagagcaggggccaggatcacactgctggatcacccccagaaggggcaggaaggctaagggggagccagtggaggagcagctgggatgggagaacaagtgccctgcggggccctgaagtcaaggaggagaaagatgggggtagggggagagggggttgagagctcaaagcagacgggacagttctgagtctatcatgtgcggaggatttatgaacgggaggactggaaccctgtcactgtggtagtggagaaactcctataatagaagaaatagcacagagtggaggccacgcagaagaatgttggtgataaaagaaattggaccgtatttgatggtgtggagacagggcaggagggagccagggttggg

SEQ ID NO: 5963 - DNA, 1055 bp, Artificial sequence
  DNA replication origin
tctgaatgtcctaacttttgttagaggactgatacaatgcttctaaccacagctgttgaagaaaaaagaaaatcatccggaggaaactgtgtctaaagtcagtgggaaagggctgcttctgatctgtttattccagggcccaccgtgagggctgttgtggcaactgtctcactgagtcaatatcgatgaaggatgactttgtgcagggtccgctctgcatctgtcccgggtctcactgtctagtggggggagccagtcgcttacctgtcacatggatgcatcttaaatacagactcaggagcaggctctagaaaggagtgtggttctccctcggcagggaactgaggaatctgaccatgcctggaaggcttctgtgggcaagtggtggcagggagcaggaggaattgccttgaggaggagtctgggctgagggtgagcaagccatctgcagggctgtgtggtaggggagtcaatggggaggggaggccctcattcctgcagggctgtgtggttgcgggggcatggggagtggaggctttcattcctgcagggctgtgtggtgggggaccacgtggagtggagacccttgtgtctgcagggctgtggggtagggggctgtgaggagtggaggccctcatgcctgcagggctctgtggtggggggccatggggagtagagacccttgtgcctgccagtctctatgataatgggggaccatggggagtggaggcccttatgcctgggcctgtgaggcgaaagtgtctgcctatgggccagatcatgtaggaccctacagaccatggagaaggggtggaaacgcttggagggtcttgggtgtgtctaaacagggatggtgggcaatgagatcgctaggattattcttgcattttgccacgtttcctggagcatcagttcagaaaggaccagagggagggaggagcccaggaagggacctcgaggttttaaccggtagagactaccttatgtcccttgaaggcccttagatcaggccctgtgctgatcacatgacctcctcgttgtgacctttcgagtct

SEQ ID NO: 5964 - DNA, 1083 bp, Artificial sequence
  DNA replication origin
acattgatggcacagaggtgtgagtaggcgttctatttactgaagctcaggggcaactttgaccttcatcttcttcagaattctgcagttctgtgtgtgtgtgtgtgcgtgcgagtgaatgtgtgtgactgtgtatgacagtgtgcgagcatggtgctttgtgtgtgtgtgtgactgctagtcaacgcatgtgattatgtgagtatgaatatgtgtgtaagtgtgtctgtgtgtgtgtgactgtatgacagcgtgtgagcatggctgtgtgtctgtacacaactgaatgcgtgtgactgtgtgagtgtacgcaatgtgtgtgtatgcaactgaatgcatgtattagggagtgtgtgagcgtgccttgcaagagctggtgtgtgtgtgagtgtgcctgtgtgtgtgcctgtgtgagagtgtgcaagtgtgtgtgagtgtgcctgtgtgagtgtgggtgtgtctgagcatgcctgtgcaagagcgtgctggtgtgtgtgaatgtgcctgtgcaagagtgtgcaggtgtgtgagaatgcctgtgtcctagcgtgcaggtgcatgtgaatgtgcctttgtgagtgtgggtgcctgtgagcatgcctgtgcaagagcatgctggtgtgagaatacctgtgtgagagtgtgcaggtgcgtgtgcctgtgtgagtgtgcaggtgtgtgtgtgcctgtgcaaaagagtgtgtgtgtctgtgtctgtgtgagtgtgcatgtgtgtgtatgtgtgtgcctgtgtgtgggtgtgagtgtgcctgggcgagagtgcactggtgtgtgtgaatgcctgtgtatgagtgtgcatgtgtgtgtgtgtgagcttgcctgtgggtgtggatgtgtgtgagtgtgcctgtgcgagaacgtgcaggtgtgtgtgtgagcgtgtgggcgggtgaaggggcggggagagatggtaaccccgtgtgtgggaacagagccgaggacagtcagcttcatgaatgatttagtggaacttgtcggtttccaggaatgtgtcttgagtaaatgctgcaatccatgctctccttgaaaatctgggcttaaaggcccagaagcagcacgcta

SEQ ID NO: 5965 - DNA, 1224 bp, Artificial sequence
  DNA replication origin
gctgatattccagctaatgctactattatgaataacaaagtcctttgtttctgatctgggagtctcatgtcttctgccagcatccatgaattgtggcaggctaacttgttagcttacaagtaggggaatagctcagcccctgagcagctcttgataagagctcatgcctgtggggcgaggccagatgggagtcattggagggttttgagaaaaggcatgacaagtccggacgtaggttttgtaagtttcaccaggtaggaagcagtgagctattacaattgttagatctagtgatggtccagctagatgatcctgacttcagccgagtggtgagaagtcgtgggattctggatcctctgaaggtggagctgacaccatttgggatatgagagaatgataagcaaaaaggacagcactgaatttttcgcctaagcaaatggtggcctggagttgccgatgactgggatggagaagatttttaggagatgtagccggaagggatggcaggagttcagctggcgacatgctggacttaaacaccagctaggcttcaggaaatgttgaggatgcaggtggatgtgaatttgttattcaggggtgaggtcacagctggagatacatatgagcttcattaacctgtgtatgatattcaaagccataagacaggggcgatcacagcaaatagcaaagaaaagaggcctaaccataagccctggggccctccatatttagaggttaggggagtagaagaaaaccacaaaagggacagtgaagccagaaacacagcaggaagccctggtgagcactgggagaaggggtttccaggagcgcaagtgatcagctgctgctgataggtcaggtttggtgaggccacatgcctgcctcttggttactagagttacttatgcgtggacagcccgaggcatggagtgatgacctgtgcctaagtgtcaaggagaagacaagcaggtccggaatggtaaaaatgtcagcacatctttgggaagttgtggagcccagccagtaagccaacacggctggataccagggtgcttaggccatagcaaactgcatgtgagccggtgaaggctcagcaggctttaaacggggatgccggcccggctggctgagtttcagaaagaccacgccgatggctgggggcagggactcagccagtgtcctcaatccaggaccttgtgggaccgcccggcagccagtgcttcc

SEQ ID NO: 5966 - DNA, 849 bp, Artificial sequence
  DNA replication origin
aggtcaggtttggtgaggccacatgcctgcctcttggttactagagttacttatgcgtggacagcccgaggcatggagtgatgacctgtgcctaagtgtcaaggagaagacaagcaggtccggaatggtaaaaatgtcagcacatctttgggaagttgtggagcccagccagtaagccaacacggctggataccagggtgcttaggccatagcaaactgcatgtgagccggtgaaggctcagcaggctttaaacggggatgccggcccggctggctgagtttcagaaagaccacgccgatggctgggggcagggactcagccagtgtcctcaatccaggaccttgtgggaccgcccggcagccagtgcttccgcaaatctgaagggtcccatttgcctcaaagcggcgagacgagccttccaagcgctgctgcagtgcggtcccagctccgcggggggtccccggggatgacctaaatcggggattgcggtgggacagacggtccaggggctaaggaaccccgtggagcaggcagcggcgctcaggaggcagcagcttgagatccacggctcgatttttaaaaattgtaagggagaaggatgcctcgaaagcctctgtggtattttgtcgcatctcgcacccctgtctaaacttcagtccactcgtggagtgtggacccccacgccgcatgggctcaggaggcgcttcgcctttggaaagaaatcgcatgtattaagggaaagcacgtgtgctactttgagaaaggaggcagaaagttaccaaacgcgggaaggggaggctcgccaaccaagcgaggccgtgggacactggcgagtcgcagaggctcct

SEQ ID NO: 5967 - DNA, 1769 bp, Artificial sequence
  DNA replication origin
cgagctgctggagcgcgtggaggagccggtgctgcagaaccagatccgggagcacgtcatcgccatcgaaggtgagggccgggccgccttggggcctcgggaaggcacggacgcccgcggcgcggcgggggtgtgcgctgtgtgcgtgcgggtgtccacacacgccggccggggcacgcggctgctccgccgagggagcactgcggcgctgcttgtcttgcaaggccgggcgagcgtcgcctgcgccccgccgcgccgcgagctccgccaggaagatagatcgtcagcgttaatttgatcgtggacaatagagtctctcctgcgggaaagtggctcggtgcctccgcgtcctgggctgccggagcgtcccggcccagcagacgcctgggggcagccggcggggtcggcgccacccgacccctgacaggttaccaggccaggcctgggcgtcttgctggacgttgaagacgtgttctgagaagtgctgccgctgggggcgaggcccgggccggcgtgtttgggcggtgcagggctgccctccttagtgtgtttgcttaattcaggggtgcagttgaacttagtggatgccgagagccagccctagccgcgggagcatcgtgtccaggtgcccctgtgcaaacgctggaaccggtagtgtgctttgtaccaaccaaaagtccggggttggattagaggaagaaccctaccaggagggcagggcgtcctccagcggaagggtctcgctttcatatgtctgcagttggaggccactgaagtggagggtgctgtggttttaagaggggcaggatgcttgggcagaatccccacccgcttccctctgcatgtcaggcagggccatggccttccaggagagctacagcagcagtctgccttccggggctgtgccctctggatttctggtggctctcatttctctgtttccaggctgctgatttattttcttgcttcatccctttggtccggccaagactcacctggggcaccaggtggcatgtgcgtggacagtgtggagtcatatcttagccacagttgatcagcactttctcccttctcagcgctgttggccagtgatggtaaaaagcctgcagagtggcttgtccataatacagactggccggtaagacctctattgaggaacattgagaatggcccaaagccggcaggaatgtgcctgaaagcctggtgctggcgttgcccagcctcctccctctgtgagggagagggtatcagcccacagagaggctttgccttggcactatgtagtctgaactactaaccccgaagtgctttggtttgaaacttggccagttaggtggagaaagtggatgttgtgttgctgagcccttggcatttggcagccctgtagacttgaaccatgtcccagccaggctggatgactggcagactatacccttgggggacttgttaattccaggggaggatccgggtggagctccagccttatggggtcctagccctttgtgtgtatctgtctcccatgaggtcacctggctgccttgttggtgacttaagatgctctgtggattcctcaagagatgggctctgtctgcctctgcatgactcgtgatgagtggcggtgggacctggacccatctgctgatgatcaggtggtgttgcagcaaggttcctccagagctccagctctgcgtctgttacgggagctgtgaaggctgcacggtgctcatttcagatggttcttcctggctctctggctgcatccacagaag

SEQ ID NO: 5968 - DNA, 980 bp, Artificial sequence
  DNA replication origin
tgtttgttcatgagagaggactgctctgccctcagctggcccatggccttcccttccagagccccaaagggccctgccctcagctgggagatgggccctgggcgtcatttagcttgagcacctgcctggtcatcctctgcaagccccagtcactgtccctgggagaggttctacagctccctacccacacctgcagccttgcttctccccgtgtctgttcttgcgctgtccatctgtatgggagctgtcttttcatgggtctcaggtctgtgccagtatgcagctggggagctgtgaacccaggtgtgttttcaacctgcttcccagccggtcgcatactgtgggactggtggactatttagaggtctagggagtggtggggagaaggggctgcaggggaagagcatctgatggtggtggccaggaggaacgtggcactggggggtgggcagggtgggaattgtccactgtggggggcggctgaggaagccaaggggtctgggcctgtaggggaagtgggagaggagagaggaaaggacaaagatgaaggtggaaagggggaaggtgacagtggcctctcaatatgcggaggggcttgaaaacaggagggctgtgcactagaggatgcactggcgcagaactgagacatttctggaaggtggctttggagccagcatccttgctggtatgtaagaaatgccaggtatatgccctctgggaggttgtgtgggctgggtgacactgccagttcccttcagtctctggggctctgactcagtggggattcccacactgacctcgtgatgtctctagtgccctcagggaccctggacagcatcctgagctgcagcctccatgaaaggaggcccctgaaggtggcaggttgtcagatcgaggcccacatggaggtcattccttactgggcttggtgatgccccgccagctaacttgagggcaaaggcgtgcttgcaggttgatga

SEQ ID NO: 5969 - DNA, 1529 bp, Artificial sequence
  DNA replication origin
aaggggtcagggccagcagggaaagagcttggggactcctgagtccagctcccagtgatgtgtagagttgagctccatcctgctgatcccagcaggagatagtggcgagactgggtatggtgtggttgggaactagaaaggacactggtgtgtttagatggggaatcttgggatgcaatagaaacaacctctgttggttttcagcattggagcagatgctccccatacatcatcacatcttattgtcgcagctaccgtattgttcttgtcccgtttttgcagaaatgaaaacctgatgcagagcctcaaggtcactttcccaaggtcacatgtggtttgcatcattctggccttggagcccagcctcttagccactcagtgcaactgtggagactggagggtgtcggggcgttgaatactggttaaggaaacggacgctttattctgcaggtgacagggactcactgagggctccgaacagaattgtaccctcagactctgattgcaggagtaaggatggtttactgagagtaggctacgtctgggggtgggtcagcaaggacgtgtgtgctgtgggaatcctgagacagatgaagaggctgtgaacagtagagggagagtggactcttcgggtagttcagacagatacgcaggtggggagagattggcaggcggaggagaggcttttgttgagggctggagggagggaggagaggcaggctgtttctgttttctgttaagtgggacgtaatcgagtgttttcctctgccgcctgaaggaaaggcggtgattgtgattgagggtacagggtccatttgccaactctgagcgggagagttgggtgtgggcgggaggcaggacattgagggagctctgaagtcatggctggaggccatcctactgaggggatggggcagtgatagtttcaaggaatcctaggaatgggaaagggggctggccagggctgtgggggtgggggggctgtaggatgctggaagcagccccagcacatgtgcatctgcagcgggacttggtgatgtggacttggggcttccgatgctcgtgctagcctgaatctccgggagacatggagcatctcagggtggggtcaggttcccaggtgaagcccctgctgctgatctgtagaccgtgcttggagaacactggtccagtgcactggagttcgtacagatccgcctttggggcatgcccaggggggtcttacaggagccagggacaggtggggccatgtctggagtagacagtgatacagtgatgtcccttggcctctgctggacagagaaggaggcgccaggaggcagctctgagttgggatggaaaggatgcatgacagtcagcttccctacagctggaggggaagttccagaaagaaaggatggccaacctgggacttgtgggcagggaaagggcttttggaggccaagattgtagggcagtgttatcctgggtgagttggggtatggccataggagggggctccaggaattcagggaaggaaaagaccatgg

SEQ ID NO: 5970 - DNA, 1070 bp, Artificial sequence
  DNA replication origin
tgcggggacggcgcccctggcacccgccggcccgtgcgccgcgccgcccgagtgccggggtccgggcccggggcgccgagccatgggccggcggggccaagcgaggcggccggtcaggcgctagagcgctctcgccggcaggtgcggccgcggtgcgcagggcccagggcaggcggcggcgcccgcggcttcattgtctacgacgcggggcccgtgcgcatcctcccgctccggctgcacagctcggcggttccgcagcctccgccactccctgggctccgggacgcgcggacagctgcaccggctgcggccgaagggtggcgggtggcgggcggcgggcggcggtttaaaatggaaacgcgcgccggggcggggcgggcgacgggggccgacgtgcaagggaccgcgggccgcgcgcccagccgggctggccgagtcccgggagcgcggcggcggcggcggcggcgagcgcggcggcgtgcaggcccaagcgccgggatggatcgacgcagcgcggaccggagcctccgaggggcccagcccagcaccagcctgcaccctaaaaccacgcccactctggggcttggcctgcaagaacaaaacgaggggcatgtctcacctgctgcgcgtttaaatgaggcatctttcctaaccatgcagcctcgaagatgcaactcatgtgacttgtttaaaaaacagtctttggtacctgttaccgccaacctcacctaggaacaagtgggcttccaggaagacaagaacaaagagatgtgactgtgagggtgctgtgtacaccaatgccatcccaatgaagggccacagtctgtctcctaacataattctgtctttattgttttcattttcaattatcaataacctcaccccagataaacctccatggctacgatactgcctctgtgcaaaacttctaaaataatcttgtagggttattttaccaatgtgtggggaaggattccttacaggtaagcacttgctccccatgacaacagacaggagaatactgcggttaagagcaagcagacagacgtgcctgcccgcaagccaggctt

SEQ ID NO: 5971 - DNA, 797 bp, Artificial sequence
  DNA replication origin
gcactggagcgggcctgaggcgccgcaaggccggacactgggcggcggaaggcgccacagcagctccgggagcctggcctgggcgccgtgcgacgaggccgcggccgggaccaccctggagcccgcgaccgccacgcagcccgcctcggagaagcgcaacaccctggacgtgggcgaggtgctcagcaagaacgacgcgctctcggacctggagcgttgggaacgcagtaagagcaagaaccgcacgctggacaacagcgacctgcagcggctggagcgcgcgcgggcggcggccggggccggcgcggcctcggagcaccggctgctgcgcttcttcagcggcatcttcgcgcgcagggacgggggcccgggcggcgggccctcgccacggagcggagcctcgcggccacgcggctacttcagcctgcggcgggccccggccgaagcgcactcgtccagcgccgagagcatcgacggctccccgcgcagaggtgggcagcgtggccgggggtcccgggacgggaaggggcgtggtggggacttgccggttccgcagcggctatgggacccgccctcccgggtcgggagcctgcacgtggcctcgagggatgcgaactcgggtactgcggttttccccagcagggcgcagcggtcctgggttttctggctgcccctgcgcctggctgtgcgtgctggtgcccctcggagtccaccaccttcatcaaggagagcttgacccgggagaggtcgccttgccagccggcgccgacctccttcgcgtgctcgctgggtcttct

SEQ ID NO: 5972 - DNA, 2079 bp, Artificial sequence
  DNA replication origin
tcgccacggagcggagcctcgcggccacgcggctacttcagcctgcggcgggccccggccgaagcgcactcgtccagcgccgagagcatcgacggctccccgcgcagaggtgggcagcgtggccgggggtcccgggacgggaaggggcgtggtggggacttgccggttccgcagcggctatgggacccgccctcccgggtcgggagcctgcacgtggcctcgagggatgcgaactcgggtactgcggttttccccagcagggcgcagcggtcctgggttttctggctgcccctgcgcctggctgtgcgtgctggtgcccctcggagtccaccaccttcatcaaggagagcttgacccgggagaggtcgccttgccagccggcgccgacctccttcgcgtgctcgctgggtcttctgcgggagcgggccctgagctggctgcccgcgacacctgtggggccgccccagggagccgaggctcgccggtcgccgccgcacaggtgcggctgcctggatgggagaagccggcattcatcctggcgcccctccctgcctcgagtcgtctccctgttagtgctaccatctgtcagtgttgtgatgtggactcagctgactccgtggccctcggtattgagctggctgtaaggacacctcactacagtggtggggcctggggtgggacggaggcccctctctccacagctttcctgccaggtggcatcttaatgaggagagcgagtctgggactggattctgtttcctcataatgtaggctagcaaaagggcaggaaaaccgcagccctgcagcctgttctgaaacctcaggtctgtgttcccttaagtcctcagacagggactttgcatggagggatctccagccagatatgttattctctgcaggaatcagttaaccttttggtagcatttcggggtcagagcctccagaaacctcaaaacacagactccatcaactgcgcatcaccctgagggggattctgggggtggaagtggtgctagattgctacaccttattctcctgggagggggttgtatgcctgaagatattgtggccacagacaagaggccatgcatttttaccaccaaaaaaaaaaatattattcatcctcttatctgaattctttaacttggctggtacagataaaggtagttggagagtgggcttttgatttgcagttcagactgctgtgtaacccacctctggagagggtattcatcccaagtggacttaacaggtcagctgactgcccctagggtttatgttaaaaccaactcatgcaaataaatgactgtccttatggaaatatttttaaggtaaagtgaagataaaatggtcatgttctaatatgctcctaatgatcctcagaatgtgctagaggatggttgaaaccaagcagtggcatgtgcggtaatgttaaaatctgacctgtttcactagtgaggctacactgttgccacacttatgtttagcttgtcatggcacatctagttttaacctcccttggagcacttactttagaaggcactgtatttaactccaaccattatcccatcccttcatgtattctcttaaaatatgagaacatgatgcgtgttattttgttaaaagaattggtttgcacgaagttgctcctgtcatcattggctttcagaggaagttaagacctgaaggtctcagttctctaatagcaggcttgcatctttgctctgtggacttggaagaaaacagtaattagctgcctcggttccagacaagtttgtatcagagagagaaagaaaaacgcacagacatgatttagagagaatgcatttcattgtggtccctcttgatacaagttaaaagcatttggagtttggatagttcctctctggtcaaatggattgatagtagatttggagtagtaagggtgtgaagtgtgttggaatgtttatagtaatgctcagtttgttccttgtggtcagtccttctctgggcggaattactttggtctgagacatgatattaccagcattgtgggttgtatagaaaaacggaaatttaatgaactacattatagccata

SEQ ID NO: 5973 - DNA, 1081 bp, Artificial sequence
  DNA replication origin
ggagccaggagccatgggtttgacagtgacctcggttaactttctggtctctcaatttcctcaccataaaatagaagcatttctggtcgggcgcgaggtggctcacccctgtaatcccagtacttggaggccaaggggcgtggatcacctgagatcaggagttcaagactagcctgcaggcagatcacctgaggtcaggagtttgagattagcctgcaggtggatcacctgaggtcaggagttccagactagcctcgtcaacatggcaaaactccatctctactaaaaatacaaaaattagccgggcatggtggcaggtgcctgtaatcccaggtacttggaggctaaggcaggagaattgcttgacccaggaggcggaggttgtggtaagccgagattgtgccaccgcactccagcctgggggatagagcgagggagggaaggctgcactccagcctggaggatgggcgggggaggggagggaagcgggggaggggaaggagggggaggggagaagaggggagcaattctttcctaaggcttctgtaaggttccaaggagatgctgccaaggaggtggcaggatgcctgggaaagggcccaactacccacagaggaagctctcctattacctttgggggtaggattaaagagcaggaattgatgtcccgttgcccaggtgccacagccgggggaggatgctcccgctcagagacaggcacacatgctacctgaactcactgctgcgctggaggcacaagtgagcctggagtaacacatggcctgccaagtcctgatgaagcaaccacaccagggatggaaaaccgtggctcgggccgggcgtggtgactcacgcctgtaatcccagcactttgtgaggctgaggcaggcggatcacttgaggtcaggaatttgagaccagcctggccaacatggtgacacccagtctccactaaaaatataaaaactagccaagtgaggtggtgtgcgcctgtaatcccagctactcaggaggctggggcaggagaattgcttaaacccgggaggtggaggtggcagtgagctgagattgcgccactgca

SEQ ID NO: 5974 - DNA, 1718 bp, Artificial sequence
  DNA replication origin
ctgtgtgtcgttggtgctctgaagggcttgagaatctctctctacccttcattttcatgcacagaaaccgattttcagggaagagctgtggcccaccacggtcgcttcagcccctccccgttgcccatgtttattccttttctgcctttcctcattgtccatctggactggggatcttggtcacgtagatccatgtttcccaggcacctaaagcacatcccccccactttggtgatcgtaaaaatctgttattccatgtttgaaatatcaggatttcagaactcagtcactgacaggtcactgccacaacagctaaagaattaaaacccaaacatgtctccttatctctgctgcgtcctgagtcggctcggctgcctgcatgttcccacccctgatgggggcacctgggagcgcccgtggggtgggggcatctgggagcgcccgtggggtgggggcatctgggagcgcccgtggggtgggggcatctgggagcgcccgtggggtgggggcatctgggagcgcccgtggggttgggggcatctgggagcgtccgtggggttgggggcatctgggagcatccgtggggtgggggtatctgggagcgtccgtggggttgggggcatctgggagcgtccgtggggtgggggtatctgggagcgtccgtggggttgggggcatctgggagcgtccgtggggttgggggcatctgggagcatccgtggggtgggggtatctgggagcgtccgtggggttgggggtatctgggagcgtccgtggggtgggcgtatctgggagcgtccgtggggtgggggtatctgggagcgtccgtggggttgggggtatctgggagcgtccgtggggtgggcgtatctgggagcgtccgtggggtgggggtatctgggagcgtccgtggggttgggggtatctgggagcgtccgtggggtgggcgtatctgggagcgtccgtggggttgggggtatctgggagcgtccgtggggtgggggcatctgggagcgtccgtgggggtgggggtatctgggagcgtctgtggggtgggcgtatctgggagtgtctgtgggatgggggcacctgcgagcgcccgtggcagctgctttgctttccccatgggtggtagtctcacgctgcccccacaggcccggcccctccagtgggaacatgtgcctgcactttttagtcgaacatgtaaattaatcagcagcagtccagcctaaaaagagaagctgaacactgttcgtttgggggctcatcggctcactgccgcgtggtcagtcctggtgccgtgagcacagccaaccggactgtaccacatgttcccttctccctgggctgagcaatcgcttccccgctaaatgttcggcagcactttgccttgtacgtgtctacgtctgcaggaggggctgtgactcatccccagccaactgtattccaagcacagccatagttcagagtgaatctttatggtctgtgaattctggagtttcagaaaactctctcattcaacgttgtgagtaaaccgtaagaaaaaatattgaacaccaacatagtcatctgggtactgggaaatactcccatgcccgcaccaagatttcattattcaatgaaaagtccaaggtagtgcttacatttctggcctgacctctagatgtgtagaatttcagagctggaaggacagagaccccacctagctcgacccttcc

SEQ ID NO: 5975 - DNA, 1864 bp, Artificial sequence
  DNA replication origin
agaagaagactgcataagtgcccacaggagagagcaagcgttaagctctggccgaggtacaattaactgacttaccctgatgctgctcagagcctctttttctaattttattgcagatgggagaaaaacattttgtattagtgtttaggaagctctgctcagttaccacctagtggagaaatctaggagaaagggctaaagatgacctgagacatatgtcaggtttccttgactccaggaacaggagtgagaagatggatgccttggaggtgagccagcaggctccagggtccctctaactgagcccctatcttacccctgaaagctgtggggcttcaacctagttcttacacctctggaatggagatagattagtacttcactcatggaaaggctgggaaaatggaatgagataatactttaaggccaactttctaaatataagtctatggtaagtgctcagcatggtacctggctcagcaaaagttagggatggtgacggtgatgatggtgagaggtggtggtggtggtggtggtgacgatggtggtggtggtagcagtgatgatgatagtggtgatgatgatggtgatggtatgatgattaatatggtacagtggtgatgatggtgagaggttatgaagggggttgtgacagtggtggtaatgattgtgaccttggtgagagttggtgatggtggtggttgtgagtgtggtgaccatggtgagagttggtggtggtggtggtggtggtggtagtggtgacggcaatgacgatgatagtatgatgatcaatatggtatggtggtgatgatggtgagaggttatagggctggtggtgacggggtagtggtggtgattgtggtgacagtggtgagagttaatggtggtggtggtactggtgatggcaagaatgataatgatggtatggtgaccaatatggtatggtggtgatgatggtgagaggtggtggtggtggtgacaatgatagtgattgtggtgacgatggtgagaggtggtggtggtgatgatgatgataatggtgatggtgatgatggcagtgtgatgaccaatatggtatggtggtgatgatggtgagaggttatagtggtggtgacaatgatagtagtgattgtggtgacgatgctgagaggtggtggtggtgatggtgatggtggtggtggtggtggtggtgatgatgatagtggtgatggtgatgatggtagcatgatgaccaatatggtatggtggtgatgatggtgagaggtggtggtggtggtgatgatggtgagaggtggtggtagttatagtggtggtgacaatggtagtagtgattgtggtgacgatggtgagaggtggtggtggtagtggtgatggtggtggtggtggtgatgatgatgatagtggtgatggtgatgttggtagcatgatgaccaatatgatatggtggtgatgatggtgagaggtggtggtggtggtgatgatggtggtagtgattgtggtgacgatggtgagaggtggtggtggtgatgatggtggtggtggtggtcgtggtggtgatgatagtggtaatggcgacgatggcagtttgatgaccaatatggtatggtggtgatgatgctgattatgatgttgttgggagcaggagatgaggaacctgtatcttgatgcttccctgaatgttgggggtcaggtctgagatgtgtcaagcggggcagtgttctgacttccattcattaaacttgtaagtcacgatttgtgggtgctcctgatgtgtgcccataacaaacctgctacaccaagaacgtagttttatagtcatgagttccgaatagtctcatagaccattgatcctgcttctaatgac

SEQ ID NO: 5976 - DNA, 1237 bp, Artificial sequence
  DNA replication origin
agttcgagaccagcctgaccaacatggtgaaaccccaactctactaaatacaaaaatttagccaggtgtggtggtgggtgcctataatcccagctacttgggaggctgaggcaggagaactgcttgaacccaggaggtggaggttactgtgagccgagaccacgccattgcactccggctctggacaacacagcaagactctgtctcagggggaaaaaaaagaagaaaagaaagaaagaaaggaaagaaaggaaaaagagaaaagaaagaaaaaaaagaaaagaaaagaaaagaaaaaagaaagacaaacaaacaaggggcccaggagaaaaagatggagcctgtgctgaggtggggggcggggagtggcccagcagggtcagactgcacaggctgtgaacaaaatgaggaccagccagcccagctgcccccttgggggctaacatgccccaaactgggtgctcagggcttgtgaccaatgggtgggaccatgcctttagaaacagcagagcttggcacccggggtgactgaccagtgacctcggtgtagagatttttcctttttctgggaggcagtgggcggaggtgaggccggaggatggaacgggacagaggtgctggttttggtgagggagacccctccacgacacatgtgctgtctggagcagggaggaggcgctgtgcagggggctgagtcttctgggagtcacggtcagaatgcaggccattaatgggtcgggccctggagatgtggcacccaggaggccaggcctgggggtggggggtgggcagaaaccccggaggggaggggataggcagagccaagaggtggggcgggggcttgcggtgggagaacagaaagcaattttgaagtcttttaagacaatgacttttgaaaaaaaagttacactattagcgaaaggcaaaacatccagaatgttccagaagcagccggacatatttttatttttagtatttccccaccattttctaatctgttgtaaaacaacacaacaaaacacgggacgtttacaggaaaaatcgccagtgacacccccttaactcacaaagtctcattgtgtctctgagccccttcctgccattctccacttgcagacgtgttttacccactcggcatttaacacaggcacctttattattctgctcaaaggaagttttctttctttctttcttttttttttttttttaacagtctctcactctgtcgcccaggctg

SEQ ID NO: 5977 - DNA, 1401 bp, Artificial sequence
  DNA replication origin
agcccctgcccagtgtggtcgggagaagccgagagggaagtgaaataacagaaagcaaaggtcttcactcggcacaaagccccctgggggaaacgtttatccaccttcacaaaacagtatcctcaccagcagcatcagcccagaaatgcagattctcaggtcacgccccagaccccctgaatccaaacctctcggggtgttttaagaagccctgcaggggattccaataggcccaaggtgtgagagccgctgatctcaggctcatacactgccttggtgctgcttctgtcacttttagtgtagaagctgtccttggaaagaaaactaccaagtgagggctcaaggccatggccttggatcagtggctctcacacaccgatgcacaggggaaaccaccctactgcctgggaccagcacgatggaagcacggtctccggggccgagagcacggaccgcacgatggaagcatggtctctggggccgagagttgctttactgtaagcaggactgtaagtgagggctataggacacttggctggagctgggccgggggtggggggaagggacagccggtgcgctccccacacctgggggtgaccatgtgcttttagcttcaaactccgaaatagggggtgtgtgtggactccccagggtctccaaaccctttcagctgaggaaaacatggcaacagactcacgcaggagagggtggagactccaatgaggaggtttagcagggagatgcagcttttggaatctccagatacttggggaaggcttaagtggaaaggacagaatgtcaggaatggctgagttttttgggggaaactgttccagggcctgggaaacaggcaggtagctcccagaagccagagctgagcccagaggcagaggagaggacaaagctggggagggggtggatggggtcggaggtgtggagagtggatgatgctgatgcctgcccgccccggccccagcatcacaacctggctgagatggggctgcccgacctggccagtgtaatacatggtctcctcctggggggtctacagaggatggggaccctgctacacatctgtggggagggctaagaaggagaggacaggatgagatgagaagcttaacaaatagaagaggaaaccaacagtaaggcatgtttatgttgacccaaaggaaggaccccaggcgagcagctcctgtactttgtggctactgatgatggtttctggtttctcaaaaaagagcgtgacagatactgaaaactcaagactctgcagcaccgctagaggggaaaaaaaaaggtagggtggtgggggacaagaaatttacaaagaacagtgtgagattttacaagtagctcttgaaattttacaaggatcccaggagccaagcccagccaggg

SEQ ID NO: 5978 - DNA, 1031 bp, Artificial sequence
  DNA replication origin
tgcttctctggggaaatgagctttgaacctaaagaaggcaaaggaggagccacgggaggactgcatgaggagctaacggggcaggggccggggcgggggcggggcgaggggggaccgcaagtgcaaaaatgggaacttattcagattgttcagaaaaagcaaggccggtgtgtctgagggtggggggcaatgcacagggtcggggggggagcttgaggaggagacatcagaagaggaggcaggccagatcacgtaggaccttgcagggcatggtaagtgtcttgcttttatcctaggggtgccaggaagccgtccgtgtggcgagcacaggggtttcatgagccgacttttttttttttttttttgagacggagtctcgctctgtcgcccaggctggagtgcagtggtgcgatctcggctcactgcaacctctacctcctgggttcaagcaattcccctgcctcagccccctgagtagctgggactacaggcacatgccaccatgcctgcctaacttttttgtatttttaggagagatggggtttcgccatgttggccagactagtctcgaactcctgatctcaggcaatccgcccgcctcggcctcctgaagtgctgggattataggcgtgagccactgcacccagccgactttcactttaagagggttattctagcttccaagtgaagatgaaacccaggggcagcaggagcagcaggaaagccagcttggggcgactggagtaacgcggagctcagatttgcgggggagatgtggtcaactctgggatggatctttggagacaataggacagactgataggagggagagagagagaagtgtaggatggctcctgagcatttgggccagcatctggggagggtgagtgctgcttcccaagatggggcatatttaggagagtcgaactgggaaggaattgtgcatttccgtttggggagttacacctgaggtgactattcgccattggagacactgttgcttggcgacggcaacacctattcccggctcc

SEQ ID NO: 5979 - DNA, 1191 bp, Artificial sequence
  DNA replication origin
acaaggtcgcccgagatgggccgccgcgccccccgacggcctccctgcctccctgagtgtccgagccgccaggctggtagcgcagccgggcctcctgcctctctccctcgaggcccacggggtgcacggcttcctgcaggaccaggcctggaggcctacccctgggctaccctggcctcggtttccctcgccctagcctagcacgtgcagctctgggccgcacactggcgtccttcggtgcctgttccagagaggggatgagggtgtacccgaccgcggcacgaagcgggtgggctggggaggggggtgctgggagtcagtttaggagccctaagagtgtgtgtgtgtgtgtgtgtgtgtgtgtgtgtaggggggcctcgcggtggaggctagggtgttgatggtgggctgccgaggtggggagccggaacagcccataggccagacccgggaagagctctgaggtccaggtgggggtgggggcagtgtgaactgcggagggggtcaacccagggacagaaagcggggggtgctccatgcgttggaggtttggggtatgtggagaaagctcagaggccaaaccctggcggtggggggaaagtggactgcaggatgccgggtgggagtcacagacaagagtggtggggggtgcgagagtcctctaggcagaggagaaggaatggggggaggggcttcccgccgctgcatggatacactgagagggagcagtccacagggacgggctcaggggcacagggggcgttcagctttgctgggtgcctgggggcagcatttttggctcccccagtggggtcggacccttggctattgggaatgtggagaaacccggcaaagcgagggttggacgtgaaagggaatggcacatgcacacacacactcccactgtcacctgctcacacccacacagactcaagcagttgcgcacccgcccacacacgcacactcacaccgctgctcatcacagagccactccgtggggaccaaaggaggcgctcacagggacctttgagttcaagctggaaaatctgagcgggttccagggcagcagcaccaggcatgggccgcaagggcctgggtcaaggggcagcctctctgggggtgggacccccaccaagccatgatctgccattggccccccagtccaagaagcctgggtcctcccgcagctcc

SEQ ID NO: 5980 - DNA, 932 bp, Artificial sequence
  DNA replication origin
tagagtcaggatgtcctccgaggcaaacccgggctcaaaaaagcctgggggggccactccctgctctccatttagctgacaaggcatctgtgaaagaaccacccagggggctgaagacaggaagcaaaggctggatgcacaagcatgcactaagtctcgaaaattccagcgcaggttgggatttgagcagcttccagtgcaggtgggtcccggctgctgggaaggtagtcctgggctccttctggaaggggaagttgcttgaggcccaggaccaaactaaagagggtcctgccccaagaacagggagatggctgcggattttcagcataccttgggttctccaatggggcaggggtgcctggcttgccagggagcaaaggcagtcactgggtggagtgactgttcttgtggcccccctccgacctctgcctgggtcggtggctgcggggtgcaggcagccctgaggcgtcccagtgcacggctggggggcgcaggtccaaggagctcccaagtgtaattatttgatctgcagatgtaagtggaatttattgtaacaacaaatatagtgatgtcaaaacccaaccttggattaaagccggcagccaaaggggaagtgtattaatttccaacagcatctcaggccagagcctattagaacaagctattcttcaggcccccccatcagaattaatcattgggagttaatttgaagctcagacaagttgctgttaatttagtgcagggaggacgggatggaataaaaagctgaggtgctggccgagcctcgtgggtctcattaatcagccagctgagacggcctggcttgattacaatttgcaaaaaaattcattagggcccgggcgattgacaatttttctctctgcctgtgatgtgactcattaggcagccaaatgaaagccatgatgacggcc

SEQ ID NO: 5981 - DNA, 1005 bp, Artificial sequence
  DNA replication origin
tcttcggctgagaacctcgccgagggccgagcgccgctgcatcgcagcggctcaccggcctcccctccttcccccactcgaaaggctgaggctggcgaagccccggcttctctcgcgcttcgggctgctggcttggtggcaccacgctcacactcgctggcccgctgaacgcccctgggcctgtccgccgcagtatctggcggcgcgcttcggggtccggcagcgagcggacagggctctgagcgcagggccggggttgggacaggagtgggcttggggaccaggcacgccccaccgagatggggaggcgcgcagctccccgtcccttgcagaccgactcccagctcccctgcgtagcctctcccgttttccccctttgtggtgcggactaccggggcgtccttggggtggggcggtgcccgggtcccgccccctcgaccccgcccggagggggaggtgccggggccgggggcgctccagccagcctccgcctccgactgagggctgccgggaagccggctgggctcgctgggtttttgctcctgtcgccagataacgcccggagcctgatttatggaccctccactctgccggcaggcgagcaccgcttcttttcgggccggagatatttgtaaaggaaagacgtttcctccctggctgtagtcgatttggagcatcaggagtttgtgcaaagccaccaatacccgcactcgcttgcctcctccgggcacccacctcctcctctggccgaagtttgccggcctactaggtatcgattaggctgtgcaaaagggggagatagatttctaaggtgagaattaggttttcttaaattcgtaatcctatcggccctcttgccctcctattttaaacctggcaaagtgctgggtggctcaagtccaggatgcctaaggagacctgtttcaggggacgtttctccagtactggtcccagaccagttgcccggccacaccctggcagtgcccgggacggtcaaattctgga

SEQ ID NO: 5982 - DNA, 1090 bp, Artificial sequence
  DNA replication origin
ttccaggctgcctaacaatgtctgcttttcagtcaactcaaaaagccagaacgcaaaccaaaatcagtttaaaccccagtgcttgttcttgggtttcacgtttacctttggaaaagtatggaaaggtggctgctaaccgcgcagattacagcagaggttttgttttcttctggaatgagtggagaaattactgggtaattaagtcctataactttcaaaatactgcagctgagatccagtctatagagatatttatgtacaaagtaggatagtataataaatatttagcgtgtcttctggtgtggctgtaagccccttcaaaagcagtcttttaagcccatttagtgaatatattctcaatttgcttgggatggccacagctgggctgtgactttgttgcttcaaacacagtggagtccaccatgggttccctcgggtgcgggggcttctccaggtgggtgccaggccctggcccttctggaccctcagggccgggcctgttctagctgctgatgctgacttctgatagcgaacctgctgacgtggacagggatggggacgacgatcttagggttccgggagggctcccctgtcttggaattggcattgcctgccttcacccgtttccacttggcccgtcggttctggaaccagattttcacctgcacctcgctgagtttgagggcgtgggcgatctgcgagcgctcggtcaaggagaggtactttttgcagtggaactccttctctagctccagcagctgctcgctggtgaaggcagtccgccgccgccggttcttgcccgtagacgtggtgctgcccgcggcgccgctgctcggcggggtctcctccagcgcgtggcccgggtcttcctccttgtgagctgcctggccagtcagattgtcatccgagctgtagtccacatcgctctccagcgagaagctctcctccttgcccttcgggtcgtcttccacctttgactcgtctttcccttgccctcggacagccccgactgaaagcaaaaccaaacggcattttattacatttcgcacactggccttcctttctccttcccaccgtcatttggacattc

SEQ ID NO: 5983 - DNA, 1067 bp, Artificial sequence
  DNA replication origin
tccccggcggcttctccgcgtcgccccagcaccaggaggcggcagcggcccgcaagttcgcgccgcagccgctgcccggcggcggtaacttcgacaaggcggaggcgctgcaggctgacgcggaggacggcaaaggcttcctggccaaagagggctcgctgctcgccttctccgcggccgagacggtgcaggcttcgctcggtgagtcggcggcgcgcgcagccgggacgagggggcgggaggaggcgggggcgggccagcgccgggttcccgcgggagaccaagggggcgaggccgcgcccccgctcgacccccgcgggaggagctggaggatgaggcccggctgtgccgctgggcctccgggggacattcagagccacccaacaagcggggtctcgggagggggggcgtttagcgcccggcgaccagctgctgccctgggccacatatctatctgacgatgcgtttggccgaggccgcctctgccgctccgcggtgacctggggttccgggtaggttgcagcctctaggggagacgggttgggctgcgcgtctcagccgtgcgtgtgcccaggggcgcccagactttttaaaccccttcgctggtcttgctacttgtctgggagaaacggactgctgggaggctgtgcctgtgtgtttgtgttgggggtgtctggtgggaacttataaggccacaaaacatccctttgaccaacgttgtctgtctcaaaaaagatggtctgggatctgcacgtccctacgcctccactccggttaggaagcaattgaggttcactacattttcatggtggcggtggggggaggatgaatcgtgaatccccccatcagtcctcaaccagtccccaccccagggacaaagcgggcaatctcttgggcctcgcgcctcctgctacttctcctgacgctgccgaggctgggagggtgcgggggaggcatggcggccctttgagtgatggttctgggcaaagggccgtcgcctgtactgcctcctctcctttgagctttctcacgctccccccacccctcctctacccctcaaaggccag

SEQ ID NO: 5984 - DNA, 2199 bp, Artificial sequence
  DNA replication origin
gccaggctgggggctcgggtccaagggctgcagctgtgcgggcggaggccgggggtgcgggcgggagtggtgtccccttgtgtcctgcccgggtctggctccggccggggttctggaggccgcgtccgtcggcgaaccccagcccttggagtgttggggagggagacgccggccgccaggcgcttctcacctgggtttatctcctcccatctgctccctcggattcccgaggccccacctttcggggacttcaaacgcgccctgccacccggtgcccggctttcatctcccgcacagcaggcattgtttgcgggacttcacagagatgctaatccccgggccgcgtgaaccgcggcctgggaaccgggcagagggcacggaggggtgagggggtgcgctttggcctgggctggggaccttcgggatggcctctcgggcagccctcctgaggagcccgggtctgctaccgtgcgggcgccgcatcccgcctgcctcgtcctggaaggctgcgggcacgtcgcaatgggcctgggctggacgcagccagcgtccaacacacggagaaggaagaagcagaggccagagacgatggccggcgcttagctgtgagccccatgagcttccaatgctcgccaggagaccgtgtgtctaggagaggcaggccatggaccctatgagtcttccctggaggctggaaccccccgggactcctggacaccccaaaccaagtccccagccgctgcctccacgacggccccgacccccttcagggaagtagtattttaaagaggatgcggtctgcccggagggcacgcatttaaccctttagaaaccgcgctggagggagcagaagggtgttgaatcaacagccatgcacaccaggggcacccctccaactttagcttcttccgggaccaaatgagcagtgattgctgtagcaagaactgtttcttcttccagaaaatcctgcaaagcagagcctgaatttcctctggttatttcctcctcctgaaaagaatgtcacaagacaggggcacggcgttgggtatgaatggaaaggagagatgttggctaaatggggagtgagaattggaatggcctctgtcacttgtaacaaatgcccccaggtggaactcccaggcgaaagtcattgtaaaagtcattcaaaagtcattggaattcccagggaaacgtcactcagaaataaggtcttctgtaaaactcaagggtaggtgtgtctgtaactgatcaactagccccattgacattgctctaaaggatccctgtgcctatcagagaaagctccttagggaaatcaccctaactgacggacttttcccaggagagaacaggaggggagtgtgtgctgatgcgaggtggtggggggtccattctgttaacaaaaaagtgagggcaacagattcccgtcctttaaagaaagtaaacaggatcacttcacttaaagtagggcaccagacttacagaatcagagaaaagaacacttgccctgaagccagctggggcagacacatttccttatcggaggagcatcctagggtagatctttgctcttgtttgagagacttgaaagccctggagaaccagagccagtgatgacagactcaactgcccccacccccttcaggctcttggaaccctcacctatcctgggctccaaggtgggctgtgaggtcatggtctcacaagaggctgagccagctcctgagccatgagaaatgcaaggtaggctggggccatctcaaacagttccacagttaagtcacacctcctgatcattctctgccactggccaagaaggtcgggatgagttcacaggaaggagagcctctttgtttttagatctgcaattgttcccagtgcctcaggttctttaagtacacagccccttcttgatgattgcagaaataattgggaatggtgacctccttggcctttgaaacctttgagtttcttccatttatcatgggaaaaaatacggagaactcaatttgcatgactttgctgcaaacaattacatctccctatgggtgtggcctgaagttcccaagctttagaaaaagagggaaccaagagtgaggtcagagaacaaatccaaagatcccaaagtatttccagcgagtgaccaaaaactgctagagtgtgtgtgaaataaataggaacctgagggaatgaggagag

SEQ ID NO: 5985 - DNA, 1620 bp, Artificial sequence
  DNA replication origin
gaagcagttcaggtgatgagatggctcagtgaccagttgaaatggggcagggaaatagaaagacaggaaaatggcaagaagcaagtcatctagagcaagaccccaaataagccaaagacgactaactctgggccaagatgatcaagagggagtgccttccttaggcctggggaagagggaggcaacagctgttgtcaaaacagattctaatcagtgttgaaacagatgtgtttgcagaaggcaggcaggtgagggagttcctgggagctgcaccctgaatgaagctgatgtagacagctgaaaaggaagagggcggaagcttgaggaccaaggtcaacattaggagtggttagtggagagcaaggcatgaggaggtggccttaacactgaaagatatcagttaactgaggcccagctgagaccaaggccagctccatgaaggctgcgtcctccaacagggctcggcagacccgcagagaaaaggaggggggtgaagaatggactccggcttgaagattcggccatttgagtaggggatggccatggtcccctccattcaagggaactgaggatgcagatgacgaggtgaccacagtgctgcccaggaaaggaactgaagccaggaagggtagagagaaacgagaggtccagggctcaggtctccatagagcaaagatggcaagtaggaccaacaggcattggggagctagaggactagggctgtagtctgaagtcggcatgtttgcagacttccaaggctggagcggccttatcgatggcaggtgactatgggagcaggtggctgaagttgggggtgggcttgtgtttttccgtgtccatgaaggacaaggaccagcggagggcagagggtctgtatgactgtcttccggcttccaggctggggcacacttctcaccaggcatctgagcctaggctgagctgtttagagtgcccccaggggatgggagaggctctgaggaagcctggtgcctggggtagaggacagtcatgctcctggaggcagcagaaggaagacactcgtctctggggaagaccgcaggctcccatgggggtctagaagctcctggagaccactggggaattcaggtgcagccaatatccagtctgttcaagcagcacaggtaggctcacaacagggcctggttgtgcttcccacctaatgctccccggactgtcagaggacagggtggtgccagcctgagtcagtgtcctgagggatggggaaagtcccttcgtggtgcaaggcaaggcttgcctcacaccctcacaaagctgagcggtttccagaagggctagatgggggccgggaaagagtctgacccccaagggcctctccttagaactgtgactgccaaacccttaacctccaggtgtgacaaagagctcaggtaaccagtgcatggagcaccgtcatttgaaccacatcaccttcccaggaagctccaagcagttaaaatttccttataaattgtaactctgcacgtggattcttatggcatatcctttgctatttacaccactcaggagctggttttgccataatctctttttttttttttttttttccagtttagtttgaactcctgacgccttggtatg

SEQ ID NO: 5986 - DNA, 989 bp, Artificial sequence
  DNA replication origin
aatcagagataaacaaagcctccatttctacacccaaggagttgaaggtgccaagatttatttttttttttttttgagacagagtctcgctctgttgcccccaggctggatggagttcaggggcacgatcttggctcactgcaacctccacctcccgggtttaagtgattctcctgcctcagcctcccgagtggctgggattacatgcatccaccactatgcccggctaattttatatttttagtagagatgggttttcaccatgttggccaggctgttctcaaactcctgacctcaggtgatccactcacctcagactcccaaagtgctgggattaccggcatgagccaccgcgcctggcccaacaaatatttgaaatatggggtgaccaatgtgcctgggcacatagtgcaagacatgtgacaacacagaggtgtgacccctctacctggtggcacaggaaggcttccaagaggaaggaaagatgggactgtgtgggccatcacgtgcagcggggcaacctggaaggagcaagcagagggcatgggggcatggcacggcagagtgtgctctcagcaccatacctggtcaggcagaattgaagcatggagaggcggcgcctcaggaggtgaacccggtgagcccccaggagctggatcatgatgtgtcctgggtcctgaagagagcagtgtgggcttcgcccagcaggcagggggagtggtggggttgttggcaggcacatttgattggcactggaaaggctctttccagatagtatgcagtttgctagattgcagcaaggggcaaatgaagagacttataagcattccgagaaacgatgtggcctcaacaaaggacagtgacactgggagtggagggaggaagcagttcaggtgatgagatggctcagtgaccagttgaaatggggcagggaaatagaaagacaggaaaatggcaagaagcaagtcatctagagcaagaccccaaat

SEQ ID NO: 5987 - DNA, 686 bp, Artificial sequence
  DNA replication origin
cccacacgagtcctgtgcaaagacaggtggccccgctgcctttccgagacccggagcacacgctgggagggcgctctctggggacgggggctgcgggacccccagaccccgcgcccgggcgcgaactagctgagcggccgctgggcctccctagaggccggcacagctccgcttccgagcgggcctggaagccccgcccgaggagctaaccatttatgtcacactgtgacaattattctgcataaaattatcattaaaaaccctaatttttcagcctccaaccccgccagtggccttttagcatccccggcgccggcggctgggctgtgatcaccgcgctcattacctcggcgtggcgcctcccgcgcgcgctcgcaatcaagcgctaattaaacccgcgggggccggggccggggcgcggggcgggggccggggccggggcgcggggcgggggccggggccggggcgcggggcgggggccggggccggggcgcggggcgagggccgggaggtgccaggtctggggtcccgggtcagggatcttggatctgggtcccgaggcaggggccggggtagggacggggcggatgcgggtctggggatccagtgggcagagtcaagggtgcagggtctgggtccggaggcgggggctgggacggaggcggaggcggggtcggcggtctcgt

SEQ ID NO: 5988 - DNA, 1024 bp, Artificial sequence
  DNA replication origin
cggggccggggcgcggggcgggggccggggccggggcgcggggcgagggccgggaggtgccaggtctggggtcccgggtcagggatcttggatctgggtcccgaggcaggggccggggtagggacggggcggatgcgggtctggggatccagtgggcagagtcaagggtgcagggtctgggtccggaggcgggggctgggacggaggcggaggcggggtcggcggtctcgtggggggaggcgggcgtctggtctcggggcggggcggacgccgcgggcctgtcccgaggtccttacccgagcgaggcggccgtgcggcagaggtgcagaggcgccaggccctcggcgctgagcaggtcggggtcggcgcggtgctgcagcagcaggcggacgcaggcggtgtggcccccgaggcaggcctcgtgcagggcgccgcggccgccggggctggcgtctgggtctgcgccgcggccgagcaggtgtcgcacgcaggcggtgtggccgtgggccgcggcgatgcacaggggcgtggtgagctcacgcttgtactccagggtccagaggcctgcggggagggaggtgggatgtaaggtcagggggaggttagttgtggtggtggtgggcggtgttccttaaggcggaaagaaagtgaagccgtctcttaaaggtaggtaccaggtaggcatgtagggagaagaggatagaatcagagacgcacacagagacagagagcagagagacacactgggaagagacaggcgtagacagaggaagaaatacaaaggagagattgaaggctaaaaccgagctagagagatggggcgccgggtattgagaagcaagaggattttgccaaatacgggggtgactgggaaatggggtcagttaaaagctgtccaagcagggtgcacggtaggcgaatttaagtgaggaattcacgtgttccaggccctgagttagggcagcttgaaagaggaaagtgggttgtggaattttcccgaatccagcactcccttagctgagct

SEQ ID NO: 5989 - DNA, 944 bp, Artificial sequence
  DNA replication origin
taaggcggaaagaaagtgaagccgtctcttaaaggtaggtaccaggtaggcatgtagggagaagaggatagaatcagagacgcacacagagacagagagcagagagacacactgggaagagacaggcgtagacagaggaagaaatacaaaggagagattgaaggctaaaaccgagctagagagatggggcgccgggtattgagaagcaagaggattttgccaaatacgggggtgactgggaaatggggtcagttaaaagctgtccaagcagggtgcacggtaggcgaatttaagtgaggaattcacgtgttccaggccctgagttagggcagcttgaaagaggaaagtgggttgtggaattttcccgaatccagcactcccttagctgagctccaaacttgtccctttatcattaagaagagacaacagacaaaacaaactgacccacacatcaccaaggttgttcaagaaaaggactcagagaaagtttagctctcttgcaagtggctgagttttcagaagcacactttgatgtggtggtccacattcagcacaatcctggtttgtttctttgcgctttttaggggtgtgtgtgtgtgtgtgtgtagggttgctctttcttgagggatgaatggagcaggtgctatacatttttacttctctgaaaactttggcactttcaaaaagcccgtggaaggttgttagcggccaggagcgctcgtggaaatgggggatgtagtccctggtgaatacacatcaaggggcaggatttcacatggcaggaaggccttctgataatgatggaagaatcgatactgtggctgtaatgagccgcagaggagacccttttcacaggccacctccttcccaggacccatgctgagcagccttgaaagtccattcattaattacctacccgcatgtggtgccgagttccagccgcc

SEQ ID NO: 5990 - DNA, 946 bp, Artificial sequence
  DNA replication origin
aacctccctgaaggctcaaacagcacgttattccaccatgtgcttccaagggttgtctgggcagagctggggcattctccttaatgtacctcatgatgtgagagtcacatgaaagttgagtctccttcgtctggagactggacagtgtggatacccaggatcgctcgcgcatgtgactggagttgctgctggccgtcgtgggcactgagcggggcctatgtcgaccggacaggctgcacctggcctcagtgcagcttctcagacctggcagctgggtcccacgacgggttatctcatgagcacatgtttcaagaagttggagcagtagctgaaaggattcttgtgacccagcctcacaagccacacagaggcaccatcaccaccctctgtggtcaagaggaaggcacagggccagcccagattcgagggaggccgaggacacacgggtgtgaatgcacaggggtggctcgtggcggggccaccgtaacactgcactggcggggagcggtgaggacttggaggtaagatggcgatggtgctgttggtgttacagatggtggaggggattggcgggaggtgacagcgtgtgctaatggagacagaagtgcttgctggcagtaggggtggaggcagtgtggggtgacgctgaggaggcgggagatagggtgactgtgttgatggtggtgtgggtggctctggggagggtgttgggaatggtggcaaaggtcacatttgacactggagatgatgatggtcagtggcaggagcagcagacgtgctggtgccagtggtggtggccgtggtggcagtggtggtggccgtggtggcagtggtggtggccgtggtggcagtggtggtggtggtcagcatgaatggtagtaatacagtgattaggtcagacttggtttctgttcttccttctccaatcacgtgagcaccgcaaagc

SEQ ID NO: 5991 - DNA, 975 bp, Artificial sequence
  DNA replication origin
aagggagagcagacctgaggttgagggtgctccaaggaaatcagggtgtcagtgaggggcaccaatgacagaaagtgggagaagtgggcgggtggggggaaccaggaacggagaccgcagacagtggttaaagcagacaggtcttccgagatctccagaagatcagatggtctggagagggggaagcacccttcctgggccaggagccagggcacagggtgaggtatcctcacctggggcacatggggagcacctggcacttctggaaggggtcagaaaagtgcacggccatgctacagaggttgcttgtatcctggaggctgtggaagtcctggaaaggactttaatcaagaattttgatcctttttatgttacagaaaaatccctcttgggagtgtgtagaggaggatgtggtgggagctgtgctggccttggggagcaggcaggtgtgggcggtgggcacagtgaggacaaggcccaggcagggaggtgctgcggggctgctgtggggagaagatgagagcccgcagcgggggataggcagggcaggatggggagggcaggactggccagcctcaatgacagtgggttgtgggttgcaggaggggtctcgatgctagatgcccagtggatggtaatgagggggtcagtgccagctgccatgagcccctgggcagcagggcaggcagggagggctgctggggccagagaagaggagagaggcaagggcagaaagggcctccgaggccacagcaatggcagtggacgcctcaagaatggatggaaggaattctcgagtaaagggggacagtagatgaggccgggagagggtgacagagagcccggggccacacagggaagacgatgatagaggaggaggtccgggctgccaaggggcagcagccgtggatagaagggatgggtctggagcgatagctagcctcgaagccagggggccaatgagcaggagggggg

SEQ ID NO: 5992 - DNA, 881 bp, Artificial sequence
  DNA replication origin
aatgagcatgccttttttgtggttagtaggggctgcggcaatctaatgggataaaggagagactctttttccacaacaggagagagatgccattcatttgccctgcgttggacacctgggtatggaaggctgctctgtggtagccctggctgggagctagtgtgggggtccgtgggagtggggactgtggcggggagtgacacaaatgtggaaaagactcaggatttgctgtggagagttcaggccaggggaggagctgaacctgagttgccataatgagaacgggaggcaagcagtgagaaggtccaggagagccacagggagttcagagaagaaactgctccccgcggaggactcaggctggacttccaggaggaggtggcatctgggccagcctctgaggaatgggcagaatggtagcatgcggtgaggggggtgtgtgggcaggcttcatgtggggccgggaagccaggctggcacagggaggggtgaggagccagcggtcaggggccctgaaaggtggtcggggactgcaggtgccaggcgggtgctggctgaagccagggggccgggagaggtttctgggagtggtagaggaaggagagaacagtgctgaggacagagccttgggttgggagggggcagcaggaggcagaggagcaagggcaggtgagtggacccgggagagtgtgtggcagtgacacaggcagtggccttccagagaaagggggtggtcaccaaggtcacccagagaggtgaaaaggttggtccagggaggcctcttcaacgggggcctggctgacctcagggaggacaaaggtggacagagggcccaggagctgacaggacacacatgtgccagtgtccacagctcttcctgc

SEQ ID NO: 5993 - DNA, 1204 bp, Artificial sequence
  DNA replication origin
atatttgaggggcaacataatttgtggtcaacagaataaatgtataagtgtcaatggaaataaaatagaggagacctcacacttccatgaagcatcatggaaggcagtaagacagaaagcaccagtgagccaggcatagtggctcacgcatgtaatcccagcactttgggaagccagtgtgggcagatcacctgaggtcgagttcgagagcagcctggccaacatggtgaaaccccatctctgctaaaaatacaaaaaaaaaaaaaaaaaatagccgggtgtggtggcaggtgcctgtaatcccagctactcaggaggctgaggctggaaaattgctggaacccgggatcacgccattgcactccagcctgggcgacaagagtgaaactccatcgaaagaaagagagaaagagagagagagagaaagagagagaggaggaggaaggagggagggagagggagagggagggagggagggaataaaagagaaagaaagaaccaagagccaacaagtttggaagggaacgcctccctaatgaggttggtgtatttcacagctgcaaaggatacaaggtggtatctgtggtttccaagctggctttgaacacaccacagaagggccctcaggaagcaccccacccacaccctccctttctcactgaggaacctactgtccaaaagggctatgaggtcctccggagagcagagctggctggggcatttgttctcatgacagggcatgtgtgccaagtgtttggaatgcatagaaacgttaggcagatgaattgtgtgcacagttaagcttttgggaggctgatttacatttcatacattaaaataacatcctgtcataaaaaggaatgtctgggggctccagttgtttagatcaccttgatggtggcggctgcccagactaaaaacctggccactcagcagaggaccttgagaacatctcctggccgcttacatacttggccaggagacaccggctgcagcctggggctagggcttagactccgaaaccaccttgttagagaagaggaagcccaggaagtatctggtcagcatccacccaccctcctggaggtattactgccacgtagagatcagggagaagtgaagggtgggggcatgctcacagagcagaaaccgtgtccactgtttcatctcctgccagacccctccaggtggacgtggtccagct

SEQ ID NO: 5994 - DNA, 1138 bp, Artificial sequence
  DNA replication origin
gggtgtcaatccgttctgagctaagtgtactgtcgctggaagaaaggccacatgggccggggaccccggacaggatgctaacgtagaggaaggaaaaggcaacgcagtttttttaaaaagtagaacccgcttcgtgcgtccggggccagaatccacgaggccgccttgcagcagcctgcgccctgccccgccagccccggccccgcgcccacccacggcctgcacccagccccgcacccacacacggcctcgcgccctcccacagccccgcgccctgccccgcacccacccacggcccgcacccacgcccttccccgcgcccagacttgttccgcactcacgcacggccgggcacccggcccaggcgcctgcgagaattctggccccggggtcaccgccctcgcccttcgacgtcccccacccgtcccctagttccgccgggcggggctgctggaggcttccagacggggaggggcggaccaagcgccagcggggaatggggcggggtgggtcgggaactctggccaggctcccaccctgggaggaggagctgggtgcttggggcctgaacttggctgtctccttgggcctcccaccctgtcccagaaaacaggcctgggggaaaacgagagggtaagcaagcagggctttttgagaaaacgagattccattgccctaggacctaaaagtctcttttcaaagttttgaagagtgtctctgcttttggaagattgtgctttcagtgtaagggcagaactccacctccatcctctaggggtcccggctgggtccgagaattaaattgacataagatagatgaataggaggaaagcatagtgcaagtttcacgcggcatgggagccctcatacagaaatgcagacccggccgggcgcggtggctcaggcctgtaatcccagcactttgggaggccgaggcgggcggatcgcgaggtcgggagttcgagaccagccaggccaacatggtgaaaccccatctctactaaaaaatacaaaaaattagcccagcgcggtggcgcgcgtctgtaatcccagctactcgggaggcaggagaatcgcttgaacccgggaggcggaggttgtagtgagccgggattgcaccattgcaatccagcctggg

SEQ ID NO: 5995 - DNA, 1023 bp, Artificial sequence
  DNA replication origin
tcttcaaaactttgaaaagagacttttaggtcctagggcaatggaatctcgttttctcaaaaagccctgcttgcttaccctctcgttttcccccaggcctgttttctgggacagggtgggaggcccaaggagacagccaagttcaggccccaagcacccagctcctcctcccagggtgggagcctggccagagttcccgacccaccccgccccattccccgctggcgcttggtccgcccctccccgtctggaagcctccagcagccccgcccggcggaactaggggacgggtgggggacgtcgaagggcgagggcggtgaccccggggccagaattctcgcaggcgcctgggccgggtgcccggccgtgcgtgagtgcggaacaagtctgggcgcggggaagggcgtgggtgcgggccgtgggtgggtgcggggcagggcgcggggctgtgggagggcgcgaggccgtgtgtgggtgcggggctgggtgcaggccgtgggtgggcgcggggccggggctggcggggcagggcgcaggctgctgcaaggcggcctcgtggattctggccccggacgcacgaagcgggttctactttttaaaaaaactgcgttgccttttccttcctctacgttagcatcctgtccggggtccccggcccatgtggcctttcttccagcgacagtacacttagctcagaacggattgacacccactctgtgtttccaccgggcgcgcaggctctgcaatgcggagcgcgttctctgaaggacaggccccggagtcacggctacagccacagaaagcggaaaccgagctgcagtccagaggggatccccgtacatttccagcgggctcagacacagggtcccccacaagaaagaaacaggacagaaaaagtcaggacacgtatgctgtggagagtcgaggtctcgcctagatcttgggtgtgggtagacgcagccgctggcagttttcctttccagcgtctctggggagcctggagatgtccttggtgccgatgtg

SEQ ID NO: 5996 - DNA, 666 bp, Artificial sequence
  DNA replication origin
cgtgaagccctgtaaagacgagggtcacagtgatgcatccttggccagcaaagaagtgccaaggatgaccagtgacaccaggcacccagagaaaggcctgcaacagatgctcccagtgcctccagcacgagcacagctctgctggctccttgaccttggacttccagcttctagaactttgagacaatcaatttctattgtttgaaagtaccagcttggggcactttgttacaacgggaaattaaggagaggggtggggtacacaggctgaccagcatgtttagacagaacaggggaggacaaggtgcctgactgggtgggagtggcaggaggggaaggcttcctgggaagagaaggggagatgagttttgtggtgggggtgctggaagaaagcctaggcgagcccgtccttcctccctgctttctccaaggtcatctgcattcagaggtagggtttgagctagcgggtgggggctggagggggagcttgaggagccaggggagagctggggacatctggcagggaagggaggaggtttctgaagaagggtgcagtcgccaagtgcctaagggctctgcccagatgaaaatccacccgcttgattggcaccagtctacacgtcatgtgatttttctccagcctggaatcagtgggagtgaggagct

SEQ ID NO: 5997 - DNA, 1002 bp, Artificial sequence
  DNA replication origin
ttgacttacagtcgagataaaacatgcacaagcatacggaagaacgatagcaacggggttgcttttggcaaggatttaaacaacatgcactgtcagcctaatcatatctttaaaaaattagaggataatgagcatgcactctgtgccagacactgcacttggctcttgaaatacattatcttatttaatccttgcagcctcgtgaagtggatgcttgtgtctgcgtgttccagagcaggctctgcagcagatccacctcccgaaagtcacattcgtggctctggctatcgggctccagggcttactcagtctttccatgacgcttaactccagccaccgccaccccctactttctctgcccctcggtgaggatgaagggtgcaagggcagggcctgcctggggcagtggggccctgggcgcacgggctgcagaccctgtgcaccagccctgcttgcaggagtttgcagtgcagctgggaggtggacaggactcgaggacttacaaatgaggaggatggctgcaccttgggacataactcccaagtggtgatagagaattggaagggtgcaattcactcaggtgggcagggcagcccacttgcaggaggagatattgaagaggggaccagaaggatcggaaggagctgggcgtatgaggagcacgcaggggagggcagaccaagcacaggcagtgtgtgtgagcggggaaaggggtccctccggcctggctggcctgcagggagaagagagcgggggtgacgtgaaggctgagacagaggcagagccagttcaagcagggcccttccaatcagggcatttcattccaagccaaggccaggggtaatcactggggagacatgtgctgttaaaataggccattgtgcctgctaggcggggactggcagggggaccaggcgaagaggggcagccgccttcttgatttccatcatgtggctggtaagagtgatctcctgactgtaaactgccggagcaacgcagaga

SEQ ID NO: 5998 - DNA, 1539 bp, Artificial sequence
  DNA replication origin
taggccattgtgcctgctaggcggggactggcagggggaccaggcgaagaggggcagccgccttcttgatttccatcatgtggctggtaagagtgatctcctgactgtaaactgccggagcaacgcagagacctacccctgctacaaaccacaggttcagactcacagcaaggtccttcccatcctttgcttgtttgcttggagagacttggggtagcaccatcacacattttctagatggtccctccatttgggttcgtctgtggttgttgtcatggttagatcggggttgtgggtttttggaaagagcccgcagaggggacgtgcccctcttgtcacatcctgccaagggtataggcggttagtgtgatgtgttcctgaggagggagatggagtctgggctccacacacctgtgctaagcgtctcttgtgtgctgagcagagtggaagctctgaggatttggaagaggatgagacaggcctcatggagctcacagccatggtgtggaaaggataggagcatccacagggcagctacgcataagtcatgtgagctgagcagggcaggagttcagaggggcatacattagctgaccttgtgggggctaggaccattcagagaggatgcccgagtggggtttcaaaggatgaataggagctggtcaggcaggtagtcagggggtagtgcaggcagaaggatgaagagatgaagaggagtgaagatgggctgggaacagtggtggctttgcattcctgggatacagtgtggataaggccagggggagctgctacacagagggaggacttgcggttcatgcctagggtcctggtcttccttctgtaggcttagaggctgcccagtgttccggtggtcatggagctgcttgatgcaacatggagggtgggcttgatggggatgtgggtggtgagagagcagacagggagccagctagaagcttttatcaaagtcttcccaagagaggtggaggagggtctgcagaaggaggtgtctactgggggcaaaggagtggacaagctgagaaattcagtggggaggacagaggggactcggagtctgagtggagactcggggcaagcctgagacccaggggaggtgacaccctcactgctttggggtgcatggacggtgggggcgatatcctggccaggaactatagccaggagagcaggtttccaggagagaggaggcagcggggactggcccttctgggagagagggggcagtggtgaccagcatgatgtggacagttgagggaattggatgtgtgtgtctggagctgggatggagaacagggccagaggtcattggtctgtactgggtggggagcagggggagaaggtgagagatgtggaaagagggtcctacagtgtgagcattgcagaaagccaggagtagaagcccaggaaacatgaacaaaggaacaattcaccaggtctacacatatgcaaccacatcaacagtatttgagtatgctggataaatttcattactatgcctttaacattctggaacattca

SEQ ID NO: 5999 - DNA, 1190 bp, Artificial sequence
  DNA replication origin
catattggatcagggcccaccttaatgatttagggcaggtggaatattggcttggtgtgtgtgagttagataaagaaggggctggggatagggactctgaattggttgatttgcatttgaaaggaatgctctgtgagcaggcaagttgcttgccatttctaggaattcgctaccctgaggaggggaggggcggttcctccctgtgtctgcaagatcactggatgtcaaagcattataaaatacagaaaatataaagtgtgatgaatacgggctgcaactgtgggcttctgtccttctggcttttgcaggggtaggggtatagaaggaggggtaggggtgtaggaggagggggagggttgtagaaggaagagaagaagtgtaggaggagggggaggggtgtagtagaagggggaggggtgtagaaggaaggggaggggtgtagaaggaagagaagaggtgtaggaggagggggaggggtgcagtagaagggagaggggtgtaggaggaaggggagaggtgtaggaggagggggaggggtgtaggaggaaggggagaagtgtaggaggaagggcagggggtgtaggaggagggggaggggtgtaggagcagtgctgtaggagatgagaggacaagagcaaaattggggcagtcactctcctgtcccctccctggctggctgtgttacttcactgagtccctgcttctccagggtgggctctgcagctcaactttctccttggtttctgccccccctcatctctcctgggctatagtgctgctccttatgagccccccaaaccctccccacacttgttgggggaaactgttttcaacccttctttgaattatcctaatttgagtgtgcagtctgtgtcctgttgggacccctactaatatctgaatagtcccagaggtggactctatggccctcacaatggattctggaattgggttgctcatgtattcgacgacctcgggggtaacccacttactggggacatgattagagcagggcacgtgctggcatcatgatgatcatatcatcttcatattaccatcagtggtagcgtgggatgaagtgcaggtggaaggcaaggcgctgggagatcaagtggctgtggcacttagttgctatggcaacaatagtgatgatcaagattacggtgtcgtccagctcctgcataccaccc

SEQ ID NO: 6000 - DNA, 2806 bp, Artificial sequence
  DNA replication origin
tgatttgtgtgaacaaatgtgtgagtgtatgtatgtgtgggtgtaagcaagtttgtgagcacgtgtgtgatgagtgtgagtgcatgagtgtgtgacatttgtgagtgtaagcaaatttttgagtgcatgtgagtctctgagcaagtgtgtgagtgcgtgtgtgtgatatttgtgagagtgagcgtgagggtgcgtgtgaggtgagtgtgaatatatgtgagctgtgtgtgataagtgtgagtgcatgtgagtgtgcatggcatgtgtgaacaaatgtgtgagtatatgtgaatctgagtgggtgtgattgtgtgtaagcgaatgtgagtgcatgtgagtctgagtgtgcatgtggtgtgtgaggaagtttgtgaatgcatgtgtgtgatgcatgtgtgtgagtgcatgagtatgtgactgtgcaggtgatgtgtgagcatgagtgcatgtgtctgtgcatgtgatgagtgtgtgagtgcatgtgtctgagtgtgcatgtgatgcatgtgagtgcatgggagtctgtgtgtgtgatttttgtgagtgtaagcaaatttgtgagtgcatgtgtctgtgtgatgtgtgagcgagagcatgtgtgaatgcatgtggcttgtacgtgtaagcaagcatgagtacgagtctgagtgtgcatatgatgtgtgtaagcaagtttttgagtgcatgtgtctgtgtgatgtgaccgagtgtgagtgcgagtctgtgtgatgtgtgtaagcgcatgagtctgcatgtgatgtgcaagtgtgagtgcatgtgagtccgagtgtgtgtgatgtgagtgtaagcaagtttctcagtgcatgtgtctgagtgtgcatgtgatgtgagggtaagcgagtgtgagtgcatgagtctgagtgtgtgtgatgtgtttgggtgtgactgagtgcatgcatgtctgaatgtgcatgtgatgtctgagtgcgtttctgagtgtgcaagtaatctatgtgtgtgagtgcatgtgatgtgtgtgtgagtgcatgtgagtctgagggtgtgtgtgagtgtaaacaagtgagtatgtgcatctgagtgtgcatgtgatatgtgtgagcaagcatgtgagtgcatgtgagtctgtcaatgtgatctgtgtgtgtgagtacatgtgggtctgtgatgtgtgtgagctagcgagtgcatgtgtctgagtgtgggtgtgatgtataagtaagtttgtgagcacatgtgagtcagtgtgtgtgatgtgtatgagtgggtgagtgcatgtcagtgtgcatgtgatgtgtgtgtataactgagtgcatgtgcatctgagtgtgtgtgtgtgtgcatgtgatatatgtaagcgagtgtgagtgcatgtgggtgtgcatgtgatgtgtctgtgagtgcatgagtctgtggtgtgtgagtgtaagcgacagtgagtgcatgtgtctgtgcatgcagtgtgtgtgtgagtgcatgagtctgtatgtgcatgtgatgtgtgtgtgagtgcatgcctgcgtgtgatgtgttttagtgagtgtgtgagtgcatgtgagtctgtgcatgtaatgtgcatgagtaattctgtgactgcacatgagtctgtgactgcatgtgatatgtgtgagcaagtgtgaattgtgtgtgtggcatgtgtgtaagtgagcatgagtgcacgagtctgcaggtgatgtgagtgtaagcacgtttgagtacatgagtcagtgtgcatgtgatgtgtgtgagcaagtgcatgtgagtctcagtgtgtttgatgtaagcaaatgtttcagtgtgtgtgtgagcaagtgtgtgcatgcatgagtgttcgtgtatatgtgatgtgtatgtaagtgactgcatgtacgtctgagtgtgcatgtgttgtgtgagtttaaatgagtgcatgtgagtctgagtgtgatgtttgtaagtgtaagcaagtttctgagtgcatgttcgtgaacgtgagtggtttgtgaatgtaagcaagtgtatgagtgcatgagtgaatgtgcatgtgatgtgtcagtgattgtgaatgcatgagtctgtgagtgtgcatgtgatatgtgagtgtaattgtgtgagcacgtgtgtgcctgtgatttgtgtgaatgagtgtgtgtgcacgtgagtctgcatgtgcctgtgatgtgcaagtgtgtgggagcccatgtgagtctgagtgtgcatgtgatgtgcaagtgtcagtgagtgcctgtgagtctgagtgtgcatgcaatgtttgtgtgtaagctagtttgtgagtgcatgtgagtctgtgtgcatgtgatgtgtttgtgtgagttcctgagtgtgcatgtgatgtttgtaagtgtaagcaagtgtgtgaagacacgagtctgagtgtgcatgtgatgtgtgtgggccagtgtgagtgcatgtgagtctgagtgtgcatatgatgtgagtgtaattgtgtgcatgtgtgtttgagtgtgcatgtgatatgtgaacaagtgagtgaatgtgagtctttgcatgtgcatgtgatatgcaagtgtgtgagtgcatgagtctgtgcatatgatgtgcgaatgtcagtgtgtgcttgtaagtctgtgcatgtgatgtttgtgtgtgtgagtgcatgagtctaagtgtgcatgtgatgtgtgagcgaatgcacgagtgtgagtctgtgagtgtatgattctgagtgcatgtgatgtgtgtgaatgcatgtctgtgtgtgatgtgtgcacaagtatgtgagtgcatgcaaatgtgtgtgatgtgtgtgagtgtgagtgaacatgcttgtgtgatatgagtgcatgaaagtttgtgagagtgatgg

SEQ ID NO: 6001 - DNA, 1461 bp, Artificial sequence
  DNA replication origin
ccctgccccgctctggggccaagctgaaggggcatcatttttggccacagttgcagggcagaggctggggtcagccagtgggtggaccaggtgggccgggagtgccaggggaagctgccaggctttgtttctagctgagagtaggggggtggatgagctggatctgggcctgccgtttccaaggaaacagtgggaaactgggtgtctctgtctgtggcttcctcatgtcatggggtgtgtggtttctggagccgcctgacagcctgaccaacttggggccactgtggctgtgggaacatatatcctgagttccaagccatttagtgaggaagctgcagagaggttgggaggcgcttcttctcaccaaccgttctcacccagcacctcctacccgagggcacctcctaccctagggcttccctggtgctgctgccttacctgggtctaaggtctgaggtctagacgctcagccgtcagccccggtggcctgggttttgccccatctggtctgcctggtgccctgcctccaccaacgggaccctgaagcgagggcattgggctgtgagacttggtagttgaagggctccagcctgggagctaagcctaaactctctcctcctggcttccagtggttcccctgcatgtcctcctcctgccagccagggtctgggcaggagagaggtggcagagttgctgccgcggggacatctgacaaaggtgtgggcagagttaggaaacagtaaggcaggtgacgtccccggggaggggccgcagtaagagctgttgccgcctcgggccggagagaggcacatgagggctcggtgtctggaatgtggagtgtggagccttgagagaggtgcccccagagctgtggggtccgggcagctgcagccactgcaggcggggagggagatggggtcaatgccaggcttctctcttcctgctccccaggctcctgctgggcccctcttggctgagcccattgggaagctggtgccaaaggggcagttggtgcaggccctagtggctggtgttcgggatagagcagggtggcaaaggcgggcaaggcatcgggaggggcagacaagtgtcctgctgggggctgccaccacactgcccgggtgggtttctgagtgtgcaggagccctctctggcccgggctgctgggcttttggggcatcgtaagtgcatcttaaggagcagcagccggtggtgtgaggctctaccgcaccccaggccatctgaccacctgggccacgtgggcttctgggctggccatctgggaggcaaagggagtctgggaagcctccaaggaggaagaagtgcttgatccctttgccttccacaccgagggtgcccagcccggtggtgttcccagtggtaggccccgcgcccaggaccacgtctgcatgtggttgcctcagcaaatgctgttgtgtaagcgatggcctggacctccct

SEQ ID NO: 6002 - DNA, 1585 bp, Artificial sequence
  DNA replication origin
ccgccgtgactcctccgctccgggagggggcgacagaggccgacggctgcagccgggcgcgccgccaaagctcctgcttgtagggcgggccggggtccggggtctcggggtcctgggaggcggggcggtcggtccgctgggggcggtgaaaccgagctcggctcctgcccggcgtggcctccgtttcccaggcttctgagctcagggccccggctgggcttcgggagggtcctccccgcgccgccccggcccttccgtccgccccccgcggcccggccccgcctcggagccattctgggcgcggcctgggcggccctggggtgattactgccccggccgcagttccgcgcgcccccgcgtctgccgtccccggaccccgagacccgagatgtgcgcccccggccctccagcccttcccggggaccccggggcctcggagccccgcgcccacgcattgtttccttggaaatggagccccccagccccacgtcatgttgccgggagcccctcgttacagcaagcggctgccgggaatcagtggccactaggacctttaccccgaacgctacgcagccgtggggccgctctcctccccgcccttttgtgggattcaaagtcaaaccacactaagccataaataagtggttgtgggaatccagcgctgggcccctccatccaacagactttatccacaaattacttgaatgcctttttgtgtgtttagtatcaaattaaaaaaattctccactcttaatgcccctgcctggcgtatcggcggcccaagcctctgcgtggtcagcccctggggaatgactttgcaggggggcctgcatcgcattgcaccattgggctttctgctccctgagttctgctaggggagtccctggggtcggggagccggaagtgctgggatttcccaccatcctcaaatacaaggtcaagatccctggaccgttgcccatccaagccccaggaactccaggcctgcagaggcctccagggacccacccacagccgcctggggctctccagccagggttgcgccccatccccaaccccaaccctaaccttagcaagcactactgcttgggaaggccaagctcccagttcgtccctttctggcctgagctacccctggaagcctggcccctgccccgctctggggccaagctgaaggggcatcatttttggccacagttgcagggcagaggctggggtcagccagtgggtggaccaggtgggccgggagtgccaggggaagctgccaggctttgtttctagctgagagtaggggggtggatgagctggatctgggcctgccgtttccaaggaaacagtgggaaactgggtgtctctgtctgtggcttcctcatgtcatggggtgtgtggtttctggagccgcctgacagcctgaccaacttggggccactgtggctgtgggaacatatatcctgagttccaagccatttagtgaggaagctgcagagaggttgggaggcgcttcttctcaccaaccgttctcacccagcacctcctacccgagggcacctcctaccctagggcttccctggtgctgctgccttac

SEQ ID NO: 6003 - DNA, 1201 bp, Artificial sequence
  DNA replication origin
tgggcgcggggctccgaggccccggggtccccgggaagggctggagggccgggggcgcacatctcgggtctcggggtccggggacggcagacgcgggggcgcgcggaactgcggccggggcagtaatcaccccagggccgcccaggccgcgcccagaatggctccgaggcggggccgggccgcggggggcggacggaagggccggggcggcgcggggaggaccctcccgaagcccagccggggccctgagctcagaagcctgggaaacggaggccacgccgggcaggagccgagctcggtttcaccgcccccagcggaccgaccgccccgcctcccaggaccccgagaccccggaccccggcccgccctacaagcaggagctttggcggcgcgcccggctgcagccgtcggcctctgtcgccccctcccggagcggaggagtcacggcgggaaacagcccgaagccggcggggccccgagggggtccgcgctgcctgcccggggaccccttttcttggcagagaggatactgacatcggtctggaggccgtacgtcagtcccggggatgtcgggatcagccttggaggatgccctcgatctttatcctttcctatgtccccagtccctggcaaaaggtagtagacccaggggaaggatgcaggaagcgaggaaaggaattcccatgccatgagcaccatcctagaggtgttgacacacaaacacgcgcgtgcacacaaatcctctaaggtaaccacaacaacagaacctatgagccatttgtgaatacgccggcactcggaagtgctgtggacacactcctactccacccctgactcactgcgcctgcctctcagacaaggacccatgcctcccttcagtcctctctgaagtggggaccgtactggcatctgcctcatttagtagctgtgaggattaaatgtggttgaacccgtaaactcgcttgaacagcacctggcattgaaaggattgtagctggcaccctcctcctcatcttcctcattcaatcagttaggaatgcattcagctgcaagctcaggaaacgcaaccgacagttgcctagatgtgcaggtgtgtttttctcccataacaaggagttcagaagtcgcctgtcagcctgggagcacagctcagcgatgcgtcaggacactgggctttctttccatccccaatcctcaccat

SEQ ID NO: 6004 - DNA, 1096 bp, Artificial sequence
  DNA replication origin
tttgtatttttttttttttttttttttttttagtagagacgtggtttcactatgttagccaggctggcctcgaactcttgacctcaggtgatccaccctcttcggcctctcaaagtgctgggattacaggtgtgagccactgtacctggcctagagtgaattattttagatgtaatatatatttatgggggaaataggagatgagaggaacaataatacgagacaatacaccaatacacagcaagctctcactcactgcagatagacccgcgaatgctaaaagtaaacatttaccagatattcatcacagctgggtaacccgccccagactcagtttctcacttgtgcatggggccagtaaaagtaaccacatcacaggggtgtctgagggttaaaggagacaatagagatgaagctgaaagaggtcatcatccaatgtgagcccagagagctgtggagtcgttccatggtcagtactgtgctgggggctggtgacacagcgccaaagcagcagaaccctcatggggcttagatgccggcagggataagacactaacaaggaaatgactcactgggcattggagaagcgctaaggaggaaatggaggagggagtgaggtcccacggtgagcaggggtgaggagggcgaatttcatcgtaaatgtgatggaagctctgtgggggttatgagccgggggatgacctgatccacatttttaaggcatgagtctgggggatgtggggagaatggacaacaagacggtgagggtggagggagagaagagtaagtgtgtgtgtggggtggattcctgtggtgtccacaagaaagacagtgtggcgtgacctgaggctggcattgagggcggtgagcagtggctgtattggttgagccacgggactggctgagtgtggggtgtggggtgagagggaaggagcagagacagccatgagtcctgggaacttaactttggcaacagcctgcatccaagatggggatggggtgcttggaggtggaggagaaatcacaacttctgttttggacatgctgggacagagatgtcagtggaacactttggccgcagtgtcgtgcaagcctt

SEQ ID NO: 6005 - DNA, 1496 bp, Artificial sequence
  DNA replication origin
ttcgctggatgtttctcagtgagtagatggattgtgggagagggagagatgaatggatggatggatggatggatggatggatggatggatggatggatggtaggatggatggatggatggatggatgataggatggatggatgggtggatggatggtaggatggatggtaggatggatggatggtaggatggatggatggatggatggatggataggtggataggtggatagataggtggatggatgggcagctaaggtggtaggtgagtggatggatggatggatggatggatggatggatggatggatggataggtaagtggatgggtggatggatggataggtaagtggatgggtggatagatggataggtgtttgagtggatggataaatagatgtctgagtggatgaatgcattggtgggtggatgggtaggcagctgggtagatgtatgaaggagtgagggatgagtggtgggtggatggatagacgaatggatggataggtaggcggaggggtggatgggtaggtgaatgagtggatagatgggtggatgcatggatgcatggatggatggatgaacggatggatggatggatggataagtaggtggatgggcggatagataggtaggtggataggtggatggatgggcagataaggtggtaggtgggtcaatggatggatgggtgggtgagtggataggtggatggatggatgcatggatggatggatggatagatagataagtggatgggtggatagatggatagatgtctgagtggatggataaatagatgtctgagtggatgaatgcattggtgagtggatgggcagctgggtggatgggtagatggatgaagtcgggagggatgagtggtgggtggatggatagatgaatggatggataggcaggtggaggggtggatgggtaggtgaatgagtgggtagatgggtggatggatggatggatggatggatggatggataagtaagtgggtggatggatggatggatggatggatggatggatggataagtaaatggatgggtgcattggtgggtggatgagtgggcagctggatggatgggtagatgaatgaaggagagaggcatgggtggtaggtggatggatggatgaataaatggataggtaggtggatgggcagatgggtaggcggataagtaggtagatgggtaggtggatgagtaggtagatggatagatgggccactgattgattgagtggatggatggataaatcgattgatgggtgggtgcatggatgaaggagggaggggtggatgggtgggtgagtggatgagccactgattgattgggtagatggatgtatagatggattgatgatgagtgggtggatgaaggagggatggagggatggatggatggatgggtgggtaggtgaatacatggatggatgagccactgattgagtgggtggatgggtggatgaatagatgggtggaggatagat

SEQ ID NO: 6006 - DNA, 1019 bp, Artificial sequence
  DNA replication origin
aatgggggccaggcaaggatgatgccagtgggagtggccgactgctaggtgaagagtagccactactgtccttgcatgtcacggcccctcctccagcccctcatgggagccggactccctgagactcaagaaaatgcacccgtcctgcgttcctcctgcctggggtgacccataaggaacaccccccccttctcaacaaccacagaagataaatgccaaggggaccaccaacatgggcatggggctgtgatgccaatcttaagggaaaacacaagtaaaattggctccaggactgagctgggggcagctgctctttctgtccatgactttgaggcgggatctcgagcgtctgtctgacgggccttctgtctgctgtcctctcgcaggtttcagacattgaatccaggattgcagccctgagggccgcagggctcacggtgaagccctcgggaaagccccggaggaagtcaaacctcccggtgagtggggggcagtggtgagtggagacagtgctgagtgggggggcagtggtgagtggcggacagtggtgagtgggggacagtggtgagtggagggacagtggtgagtggggacagtggtgagtggggggacagtggtgagtggagggacagtggtgagtggggacagtggtgagtgggggacagtggtgagtggcggacagtggtgagtgggggacagtggtgagtgggcacagtagtgagtggggggacagtggtgagtggggacagtggtgagtggggggacagtggtgagtgggcacggtagtgagtggggggacagtggtgagtgggggcacagtggtgagtggagacagtggtgagttgggggacagtagtgagtggggggacagtggtgagtgggcacggtagtgagtggggagacagtggtgagtggggacagtggtgagtgggggtacagtggtgagtgggcacagtagtgagtagggggacagtggtgaatgggggacagtggtgagtgggggacagtggtgagtgggg

SEQ ID NO: 6007 - DNA, 1712 bp, Artificial sequence
  DNA replication origin
agggacagtggtgagtggggacagtggtgagtgggggacagtggtgagtggcggacagtggtgagtgggggacagtggtgagtgggcacagtagtgagtggggggacagtggtgagtggggacagtggtgagtggggggacagtggtgagtgggcacggtagtgagtggggggacagtggtgagtgggggcacagtggtgagtggagacagtggtgagttgggggacagtagtgagtggggggacagtggtgagtgggcacggtagtgagtggggagacagtggtgagtggggacagtggtgagtgggggtacagtggtgagtgggcacagtagtgagtagggggacagtggtgaatgggggacagtggtgagtgggggacagtggtgagtgggggcacagtggtgagttgggggacagtggtgagtgggcacagtagtgagtagggggacagtggtgaatgggggacagtggtgaatgggggacagtggtgagtgggggacagtggtgagtgggggcacagtggtgagttgggggacagtggtgagtgggcacggtagtgagtggggggacagtggtgagtgggggaacagtggtgagtgggggacagtagtgagtgggggacagtggtgagtggggacagtggtgagttgggggacagtggtgagtgggggcacggtagtgactggggcgacagtggtgagtggggggacagtggtgagtgggggacagtggtgagtgggggacagtggtgagtgggcacggtagtgagtggggggacagtggtgagtgggaggacagtggtgagtgggggacagtagtgagtgggggacagtggtgagtggggacagtggtgagtgggggcacggtagtgactggggcgacagtggtgagtggggggacagtggtgagtgggggacagtggtgagtgggggacagtggtgagtgggcacggtagtgagtggggggacagtggtgagtgggaggacagtggtgagtggggacagtggtgagtggggggacagtggtgagtgggcacggtagtgagtggggggacagtggtgagtgggaggacagtggtgagtggggacagtggtgagtgggaggacagtggtgagtggggacagtggtgagtggggggacagtggtgagtgggggacagtggtgagtgggggacagtggtgagtgggcacggtagtgagtggggggacagtggtgagtgggaggacagtggtgagtggggacagtggtgagtggggggacagtggtgagtgggcacggtggtgagtggggggacagtggtgagtgggcacggtggtgagtggaggggacagtggtgagtggggacagtggtgagtggggggacagtggtgagtggggggacagtgtgtggggggacagtggtgagttggggggacagtggtgagtggggacagtggtgagtggggacagtaatgagtcgggggacagtggtgagtgggcacagtagtgagtggggggacagtggtgagtggggacagtggtgagtggggggacagtggtgaatggggacagtagtgagtgggggaccgtggtgagtgggggcacagtggtgagtggggacagtggtgagtcgggggacagtggtgaatgggcacggtagtgagtggggggacagtagtgagtggggacagtggtgagtgggggggacagtggtgagtggggggacagtgg

SEQ ID NO: 6008 - DNA, 1587 bp, Artificial sequence
  DNA replication origin
ggggacggagcagggagagaggagaagaatgaggtcagaagtcagaggtgatgagggtagggaagggggcgggttacagggatttccaggctacgctaaaaaccgaactgctgctctgagtgaaatgggaaatgctaggtgccattgcccatggactctgcttgtaaacaaactcacacagctgctgtgttgagaagaacaaggcaggcacggggaggctgatcagaaggctctgcatcacccaggggagagagagcaggggagtgggctaagacggaggcaatgaaggagaggagagggaaccaggatggggaaaatggagaaggggagagggaaccaggatagaggagaggggaccaagggggggacaatgggggagggagaggggactgaggtggggacagtggaggaaggagaggggaccgaggtggggaggtggggacggtgggggaggggagaggggaccgaggtggggaggtggggacggtgggggaggggagaggggaccgaggtggggacagtggaggacggagaggggaccgaggtgggaacagtggaggtggggcatgggggactaacatggcagcagtgagaagcggctggtgatgtgtgacgtgtgaatgtggagctgaaagaacttcctgtgggttagacgtgagacatgtgaggaggagaggacacaggtgactctgggattttggcctgagcgcctggaaggatcaagttgccgtgaagtgaggcagggctgcaggtggggcaggttttgggcatcaggagcgccagtgtggacctgtgcatctgagatgcctctcgtgggagggaggcggatttgggcctctggagccggagggtggcctggatggaggcctgtgtccaagcatcgtctgtcggtccgtgtttttcatctgtggatctccaaggggggcagggagcaagaggagggaagaggcacaggcctgagaatttttgccccagtgttgagaagttttgggaggaggaggaggggagccagtggtactgggccatcaggacaggctgtcagaagcctctcggggtcctgctcaagagggtggccagccaggccgcgtggtgctcacggctatgccagcggggactgagggtttggtaacacagaggccctgggtgactgtccaggagccttctgggtgaagtgaaggaggccacagccccggtggagtagattcaagagagacccaggagagaggaagtgtagaccgagggcggaggccactctaaagggcgaaatggtgctgggggtgtggggccgggagccgtgcttttaaatttaattacaagagaagctagagtgcaggtgcgtgcccatgggaaccccctaatagaaaggacagctttggctgggagaatgttagagcagcatccgtcctagggggcgagtggccaggggctgtgcagcccagggcaagaatggccgagcttatctgccccctttctgggagaagcgccgaggcctctgcaggaagagctaaggttcctccccgagggacagcagtagcgtgaagctgtgcacctcctcagaggctgatccaggtctgatcagttcctcct

SEQ ID NO: 6009 - DNA, 1639 bp, Artificial sequence
  DNA replication origin
aaccttgactatggctttagctccagccacccttttaagagtaaattgctgggcaggtgggggagggctagtcacggaatgaaactgtaagccagaccgggtgtgagcaggtgaggtgataaaaggattatagggtggaggagcagaggctgaggaagaattgggacctagctcggcctggcgaggagcagcctggggaggagggagaggtcagatgggtctgtagaaaaggaagattagaaagactcagtgacgcttggggttgggactgagggggacaggtgggagggaaagaaggaagatttgggatgagttgcactgggtacagagactaggaagggactgatgtgtaaaagaatgcctggacgtcaggcacctcagatcatttgcccattttatgacaagaattatttagatcttgtaggatggaaaaattgaaagtgccattttccggctatttggaactgctgttgagtttgtattgaggtcaggtggcattgtagaagaaaataagatgcttagattttaggtcaggtgagagttgaagaggttttaagttcttaagaacacaggctaagggagaagaaggaggaatggagggtggaagcttgcccatagtgaaggaggcaagtccagagaaaagagtagagacacggagaaggggtggggggttcttgccctccagaaaagcagagaaggggtcggggtgcagagatacaaggttggggcatggaaacaagggatcggggtacagagatataagaggttggggcacggaaataaggaatcggggtgcagagatataagaggttggggcatggaaataagggatcggggcacagagatataagaggttggggcacagaaataagggattggggcgcagagatataagaggttggggcacggaaataagggattggggcgcagagatataagaggttggggcatggaaaaggggatcggggcacagagatataagaggtcagggtgcagaaataagggatcggaacgcagagatatgaggttggggtacttgcccttcccccagaaaagcgggacttgccactaagggggaaggagaaggggttgggtgtttcttgccccccagaaaggcggagaaggggtagagacccagagagaaggggttggggtacttgcccctcccccagaaaagcgggacttgccactaagggtgaaggaccaaggcaggcatccctgtgtggtctgacacctctgaaacctgggtgaataatcagagaggcatccctgcaatgattaaacaccaagggaagtctgccttccctagtccgtgactggcgccagagttttgggtccacagataaaacacatctcctttgtctctaccagaaaatgaaaggaattgaaattaagagaagggagagattgaagagcggaaaggagaaagtagttgagggatagtgagagaggttggagaagagagtaagaagaggccgcttacccgatttaaaattggtgagatgttccttgggctggtgggtctgaggacctgaggtcgtaggtggatatttttcatggagcaaagaacaggaggacaggggattgatctcccaagggaggtcccccgatccgagtcacggcaccaaatttcatgagc

SEQ ID NO: 6010 - DNA, 1136 bp, Artificial sequence
  DNA replication origin
ggagcgacgcgcgccagggcggtgggcaccggttgagtggggacctgagcggagagcgggggggtaggaaggctttcagaggcctgagttgccttgaggggtttgcacggaggggtgagcacaggatttggttcagcctggcgctccccattccgcggtgagtcggggtggaagtccctcgccggggtgagagctaggctctggggtcaggccgagaggtgctcggatccgcccgccaccgccgctcctgtgaccttggccagcctcctgggcgccggcttcacagcggcatggtgtggatgtgtgcgtttctgtctttacacgcgtgttctccgtgctagcatccatccttctccccgctgtctgccccctgagatcaaggacttgtcacttctctggtgggtccccagcctctaggatcggggcaggtgcgtcgcagctctctcctagttgttgaaaaagtaatgaacttacctgtgctctctgaagctcacagtctatgctccagaggtggatttaaaagtaaagcaaatcggaggattaggtaggggttaaaagcccctgcctagggcacggcaggagcaccgggtgggaaagttactggtgtgtttggggtatggggagaacttcagtgtggctggacctggggaaggatgggagggagggtagtgatggtagaggagaggaggctgtactgaagtcacctgtgatttttttcccccagtgataaggacagttaacatttcggtgtatttcccaccaagtggtgtgaccagattgctttggattcttaaggaggtggcctggaagctgtatgaaggtgggaagaggaagagggcccttccacccacagtggcagggaaagctgttggaggtttcattgcagggaaaagacagcgagtccagtgacatgggagggagggcagatccaggtgacattgctctgggtgcctgagctgacgcaggtgggttggcagggctgactgtggcattgttcatgactgaactccgggagcagaaactgcacctgcacattgtaggcactaaggaaataggtgttgactgaatcttccaggccatatttacattacttcagaggccatactccttaagtgacatagtcctccttgggggaa

SEQ ID NO: 6011 - DNA, 1067 bp, Artificial sequence
  DNA replication origin
gcgcctgcccggcccacccgcctggagccggacgcgcagtggcacagacgcacagcgggacagacggacgccggagagaccctgacagccgtccggcccccgcgcccgcccggcgccccccggctgccctcccggagcgctcacctcccgcgcgatctggttgagcgcgtcgtcctccgccgtgagccgctcccggttggggagccgcttgcgccccgatccctgggtgcccatgtccatcgaccgcgtcgcccgcagctgccgcggggcccgttgctccagccgctcgcgccgccccggcccggccccggccccggcccctccctccgccgcggcgtcatggcgtcagcgggcgctgggccggggacgcggggacgcggggggacgggggccgcggggacccgggggaagccagagccggaggtccgcagcgcgggccagggactgcaggggccagggacggcggggcgggggacgggggcggggggcggagacgccaggtgtcagggacgatgggggtccgataccacggggacgctgcggatgcccagggccgggcacgcgggacctgagggaccgggagccccggagggtggactttgcggggactgtttggcgggccggtaatcgcggagcgacgcgcgccagggcggtgggcaccggttgagtggggacctgagcggagagcgggggggtaggaaggctttcagaggcctgagttgccttgaggggtttgcacggaggggtgagcacaggatttggttcagcctggcgctccccattccgcggtgagtcggggtggaagtccctcgccggggtgagagctaggctctggggtcaggccgagaggtgctcggatccgcccgccaccgccgctcctgtgaccttggccagcctcctgggcgccggcttcacagcggcatggtgtggatgtgtgcgtttctgtctttacacgcgtgttctccgtgctagcatccatccttctccccgctgtctgccccctgagatcaaggacttgtcacttctctggtgggtccccagcctctaggatcggggcaggtgcgtcg

SEQ ID NO: 6012 - DNA, 1026 bp, Artificial sequence
  DNA replication origin
acgcggtcgatggacatgggcacccagggatcggggcgcaagcggctccccaaccgggagcggctcacggcggaggacgacgcgctcaaccagatcgcgcgggaggtgagcgctccgggagggcagccggggggcgccgggcgggcgcgggggccggacggctgtcagggtctctccggcgtccgtctgtcccgctgtgcgtctgtgccactgcgcgtccggctccaggcgggtgggccgggcaggcgcgcgccggggcgctgatccccaggcgctgcgccccggccccgatctccgaggcctgcggaccccgcacccgttctccagccccgggcccagcccgcgacgctgcgcgccctcccccaccccggccaccgtcggccgctgcgccctcgggagaggagccgggcgccgccagcgcgcgaggtggcccgggctggccgggtgggggcgagcgccccgctttgttgtgcggcatgggaggaggcgggggcttaggcccgacctggaggcagtggacggtcgccggaggccacatggccctgctgaaatggccgagtcgctcaggtgaccatttgtcatccatccatcgatgtcactcaaggtgcagctcagagatgaacttggggatcactgtgatttttctttcaggactgagcctggaaacgggtccaggcacactgaaacgtcttcattaaagtttcctggacagagtttattgtaactaagatcatgtttggtgatgaactttacctgtgacaaattgaaggcgcactagaatgggtatttgtacaaatgcctttttttttttccttccgcaaggattctaccttaaggctaaagaatgtacatgacatccagaaagccgtacagggacagagagcagcagcttgggaaaaggggagccaataggttgcggccccagggggacaaaggaagcttaatttttgactgtgttccctttgtaccatttgaactgtgtgccaggtgggtgtatgaatgcaaagaaagtctctgccttgtaac

SEQ ID NO: 6013 - DNA, 827 bp, Artificial sequence
  DNA replication origin
atggaaaatgatgggaaacgctcttcagtagctcggtacaactggagtgtaagacccccatgggagagaggcaggaaggagggggctaagaggcccctggtgccatcatatggctttaaaatgtatcccggaagctatgggagtcattaaggatggtaaggcggggaaccatagcatgagggttgtgttttctttctccttttgtgaagatggtaaggcagactttatttcagggggccatgatgacaggcacagggacagctgtgacggggccttgtcctggggagagaggctgctgttttcaatcccaaggctggcatgtcctaggatcactaggacaccaagatgaagatgcaggtgtggtggggccaatcttggaagcagatggactgggaggctgccgaggtcactatgtgaggggaggggcctcagccagcttcacgatttcaccgaggaggggaggggaacaagctcgggggagccccggctcaggcagctctgaggtggggggatgagaaatgcaggaggagcagctgctggcagggtgatgaagagtgttggggaaaggggggtgtcaagttgtcaggtggagttcaaaagaagggtctgggcaggacatgagggcatccaggggttgtaaagccaaatgtggctgcagctgctaaagggtgtactgtaaattggcataggagaaaggcgcaaacctcatgaaaacaagcagagaagcccaggaacccgggagaggctgacggagcctgagtgaatggtgttagggaagctacagggctcgggggctgggccagtcctgtgccgggaacacaactgcc

SEQ ID NO: 6014 - DNA, 2042 bp, Artificial sequence
  DNA replication origin
ccggtgggggtggggaaaggggcgtaaccgggagggaccctccgaggcggagcggcgcaggggggcggggaaggcgggtcatggggcgggggcggtggggcgagtcatggggcggggacggggcggggcgtagccgggagggcccctccgaggcggaactgcgtggggggcggggcgggccgtgggacgggcggaggcgcccgagtcccgcttccccggcgcccttccaccccgagcccgactcagcccgcggccacctgcgccccgcccctgtcggccgcgcccgagcccagcgccgcgagccgctccccggcgggctggctcctggccccggaagcgcgagcgttcacttagcggcgagtggctccgtctccgcggacagagcgcgcgccccctggcccggcccgcgaggggctcccggcgcggtccccgagcatttcccgccgggtggagcgggccgagcccggcaggatgaccagccccgcggccgctcaaagccgggagatcgactgtttgagcccggaagcgcagaagctggtaagaggaaagcgcttccgaaactttctttcgtgactgcggcggggtttcaggggcttccagctcgttccgaggtcaatggcaggcgcaggtgcccgggaggcgtggggtgggctctggcgggaccccagcgcggtgggagcgggcgcagtgggcgcgggtccgtgagtggcccggcgagcggcgtccctcatgcgctaggaagcacgctttattgtgggacgccacctccaaggacgaaaaggcacatggtctctccccgcccgaggtgatgggctgcagacaggctctgaccaggtctgcgcctggcctggagtcacagggagctgctagtttgctattttacaaaatacagcatcaaggaccgggtggccagagccggtgccctcacccgctgttggaaccaccggggagcggctggggtgctttggagcactcaacccgctcagcacctggggaccacctccgccgaggactccagacgccaaatccactttggctagtctcccgggtccgcccagcgcggacaggatcctgcctctaggattttgccgttgtccagctcaatatgcagtcgtggggctacggctgtagtttggcattaaaattgggcaggggatgaggcggagagggtttgcaaatacacattttcatgcagcttgtggttgaacatgaatgggaataaaagtgaaagggtgcactttggaaaagaaatataaaaccctagctttccacttaatcaggtgttcgtgggatcttggtaaaagtatgagccccaaacaatcactctttcatcaggtagaaattaatcatctactgggtgtgtgtgtaagatttaagatgaatcagactgccttgaccttgggagagcttattaggaaatgccagagagaggtgtagaagtagagtctgatgaactcatactgaaaagccagttctttgcttgtcagatggttgctgttttttaaatgtccattttagtgtggtttttctgtgacttcgtttaaaactctggcagtgggccagccctctggagccggtttttaccccttcaactaattagttcctaggggcctgggaagagagacccttgaatcaccatcagggaagggttcttgaaagaaggaagggtgggaatgtggttgagcggtgccagtgttctgaggagcagcctgggacaccatagatggcaggaggaggatggaggtgaagagctgcctgctggacttagagtccttggagaagggaagagtaaacattgagaacaggatgtgaggaaactagggacaggctaatcagaggagtaggtagaggcacacctggagcagctaaggcactggctacagggtctattacttaaggctgggagcctcctgggcgggtctgggttcagatgacttcgagatgctgccgggaggaagggagaggaaagtctggactgtgtccaactgagtagttatgtgatcagcccaggcccactgtccctcacccccagttccagaacc

SEQ ID NO: 6015 - DNA, 1730 bp, Artificial sequence
  DNA replication origin
gctgcgcggtccagacgagggtttcaggctgcaaagcgggaaagtcttgggggccgctctgcgctccaagacagacgcccacaatctcttctacgtcgtgcaacattcaagcaggcggcctccttcccgcgctttcgcgcccacaggctgggccaatcacagtgccgcacttttcatactgcccgacaggcggtgggcgggccgctggtgactgttacccaacaggcgccgcggctgctccggtggcgccactgactcggaggcggctgcggagagcggggcgctggcccgtggaggcggcagcggcggcggctttctagcggatccgaggtgcgacggacagagacgcggggcggcaggtcgggcggcgaagccggcgagggcgaggccatgggcttgagcggtcggggttggcgaaccccgcgtgtggccggtcccggcggcgaggcccgtcccgctgaagcacgcggggactccgaacggcggtgtaggcgaggccagcgaggcgggcgggggactggcgcgttccttgggcggcactggagttccggcgccctcatagcgggcgccgacaccgcaaaagtcgttctcgaacgaagtcgcggggccggtctcccaaacttggttatgtccccggggaaagctagaaattcgcacatatgcttcttcttgccgtggagactgatggagcctctgctgcggggcggggactctagcgagagggggacgtgaagttcgttccgtactcaggcgtgtgtgcccctgaccgacgcgtaggacgccctggaggacggcgccagctcctgacctagtgtgaggtgcccggacggtttccctaagaagcgcgtatttaagatgagatctgaagttgagcgtgaactcaaggtggggtagggggtgggcaggcgagagaacgcacagggcctgactttttgcatttttttagtagagacggggtttcaacgtgttagccgggatggtctcgatctcggtctctatctcctgacctcgtgatcatcccgcctcagccttccagagtgctgggattacaggcgtgagccaccgcgcccggccagggcctgactttttaaggaaatggaaaggagggtgtatctggaagacaccaagtgccaaggctaacacagagcccggaccgttgtagggttttacaggacttattcagattttaatctgtctgaaaacagtgacagtccgttgctgagttttaagcaggagcgtaactgattcgataagcattttagaaagattattctggccagatgtgaggtgattgtctgcatagctgtgagagtcaggagttaaaattgacaagacctcagggataagggaggtgtcaagggcgagtcctgtggtttctggcgataccattccctggagtttcgtgcactggaggaaatagttcggtaagtgagaactcaaagaaaataataaaaatgggcatgtacctaggagtggaattgctggatcatgtggttgtcttgtgtttaactttctgaggaagtgccagacttctccagagtggctgcaccatgttacattcccatcggcaatggatgaaggttctgatttctccatgacctgctcaacactgttgttactgttattgttattgtcatcctagtgggtgtgaagtgatatcttttggttttgatttgcatttccttcatgactcttgataaattgagcatattttcatgtgtttattggcc

SEQ ID NO: 6016 - DNA, 843 bp, Artificial sequence
  DNA replication origin
gccgtggggctggaggaacagggctctttggggggattgagatggcctgggagtcttgctgttgatgggtaggtagcgagagcctggcaggaggttgtgagggcctggccacagagtcttgagatgaggtttgctttggtggcactctggcagctgcatggaaaactgatgggggatcttgggtacattcgtttatgtaaagtggtgagaggagggcgctctggagatgggccggggaagcctgcggaggagcaggttttgggaggcacaggcctggcctctcggcattactggtggctggatttcacttgcagtggttccttcttgtattatcctgttccgagaactcttagcaacagtaaatttatacttgtgctaaggaatgcaccactgcccttggagggggaagaatcaccaccctggtgctgcggccacagctgtctcttttgtggtggaagctgcaagcgcacagcattgctgagtgaccatcgttttctcctaggaaagggaacagtctgtggctgagaggctgctgccacctgcagtaagctcagagaaggggagacagctgacagcgaggtcatccactggttcttctaacacaggctgggagggcactcagggccagcatgcctaccacctgtgcaggggccccaagtgttctgagagtgaggggtgagatggtgggggagggcacacattctcttgacttgattagcccttgttcttgaaccctaggagatacaccccattgggtggcctggcatccctactttcttcatttaacagacatttgtgtccctatgtgcaagacactgttagatcgacaagccctgcccttca

SEQ ID NO: 6017 - DNA, 1276 bp, Artificial sequence
  DNA replication origin
agccgtcccttccccggcgagaagcgcaacaccggtccgcgccctccgcctcccctgtgccctggggcctcccgcctggaaccggggcggcccgcgttcaagggcagcggatctgtgcgcccgcggcgcccgcccccacccgctcccacccgctcccacccgctcccctcctctcccctagaggacaccggctggccaggggaagggagctcggccgggacccctggacctactcacccaggagcagccagaggccgcgccgcgggaggcggcacagggcccgggccatggtgcacagcggtgccgagtcgagtccgctcgccacgcgccccgctgaggactgagcccgccgcggcgcgggcccggaggagacgcgccgggggcgggagcgggcgcgggagcggtgggaggcggcggccgcgcggcccggcccactgcggctccccgcgtgggtgccagggccgggggcgcccagggccggtaaaactttgcaggggggccgcgcgggcgtctccaggcccctcccggggggcggcacacttggggtcccaggaaggcctcctgaaatgttctccgagcaaataaacactttttaaactagggagggtctcctagacgactcagcgtgaggggcaccttggtctccacctggggatcttcccctcctcctcctccgaggttctgggcgttcctgcctggtgtttgccttgcaaaaggctaagatctcccagccttatctacctctccgcccaggtgcaggcgctggggagcgtggggggcaaaactcgccaccgcgcctggcgagacccgtagtaacccaaaatggcgcacacttaccaggccctggaatgctgctccagatctgcaggatgagtgggtgggcagaggcggggacagcacggcaggtgaacagaagccgtggggctggaggaacagggctctttggggggattgagatggcctgggagtcttgctgttgatgggtaggtagcgagagcctggcaggaggttgtgagggcctggccacagagtcttgagatgaggtttgctttggtggcactctggcagctgcatggaaaactgatgggggatcttgggtacattcgtttatgtaaagtggtgagaggagggcgctctggagatgggccggggaagcctgcggaggagcaggttttgggaggcacaggcctggcctctcggcattactggtggctggatttcacttgcagtggttccttcttgtattatcctgttccgagaactcttagcaacagta

SEQ ID NO: 6018 - DNA, 1128 bp, Artificial sequence
  DNA replication origin
gggcctggagacgcccgcgcggcccccctgcaaagttttaccggccctgggcgcccccggccctggcacccacgcggggagccgcagtgggccgggccgcgcggccgccgcctcccaccgctcccgcgcccgctcccgcccccggcgcgtctcctccgggcccgcgccgcggcgggctcagtcctcagcggggcgcgtggcgagcggactcgactcggcaccgctgtgcaccatggcccgggccctgtgccgcctcccgcggcgcggcctctggctgctcctgggtgagtaggtccaggggtcccggccgagctcccttcccctggccagccggtgtcctctaggggagaggaggggagcgggtgggagcgggtgggagcgggtgggggcgggcgccgcgggcgcacagatccgctgcccttgaacgcgggccgccccggttccaggcgggaggccccagggcacaggggaggcggagggcgcggaccggtgttgcgcttctcgccggggaagggacggctttggggacgtcggagagcgggcattctggaaagcgtggggtgagtcagccctgcacactggagaactagttttcagaaggaaaaacaggacgcggggttccccagccccgcacctcgtttctcaggctgtgcgccgcggtgactgccagcgcaggctcccttccctaggccgtcccgcgttgcaaaacctgcagacgggcaccttgcagaagacgcagtgttcgggaatcagaaccacagccggtttgtatggaaattagtcaacactgacaatctgtcgcctgcagcagttgcttgtttgcaaatcacgtcttttgcagaaatgaggccagcccttttcgggacacttccatcgctttttttcttttttcttttggtttgcttgttaacttggcacttttggctaatagaaatttaaagaaggacgggtcccttggtgaagtggtggaacacgtttggctttccacttggagggagaagtggagattagcggcagcctcatggccacaggaactggccacacactcggcaagaaacggtgctgttcacttcccttgtctgtaatgtgttcctaaaatgctaactcaagccccttctaaaccgcttt

SEQ ID NO: 6019 - DNA, 1218 bp, Artificial sequence
  DNA replication origin
gggacagggggtcttcctctgtgcccccagcagaccctcagggtacgttagtgtcacccccacacatgccatgttcaggcccccaggccttggctccggggaagcagctcctgaattagctgagagttctgggaaaccacgggggcaggaggggaggcagagtgacctggcccgtggcctgggccagctcactccagggggtggggtacagcttgcccaggaagccctgccccctgttctcccggaccacgtatccccacacgagtctcaggaaggactgtcttgagtctgacaccacctgggaggagaaaagtcagtgatttgcccaaccatgcgcgtgtttgcttcgtaaggcctgccgctgtcaggtaccctggccccaggccgggaggggaagaagcctagaaagcattgcctcttcaatggacacttggtgactgacacccggggtggctctctctgcagggattttcttgcctctggaggagacagttgtgagagggaagcgggggaggtggatggatgagggaatgccgggaaagcgctgcaccgtttctcctggaaacacccatctgccacctcacacacgggacacacagggtcaggactctcacacacgtgggacacccagggtcaggactcggagggggcaaaggacaggggtgcagagcagcctgctacagtagggtgtcctacacaacccagggcagctcccccagaggatgatcccacaccaaatgtccatagtgccagggtggggcagccctgctgcatgtcaaccatgtagacatgtggtgctacttaaatgcagcaggaaataaacaggagaccacggagcacagccctgaggagcagcggcagcacagtccagagggcagagggcaaggacggttgtgcaaaggccctgctttggaagttcctggaagcctttttgactgaagcatggtggggaagagggctttgagccgaagctggtgctggaggaaagacccattctctaagcattcagatctcattcctagggcagtgggaaaaccttgaaggacattaaagggggtgacaggacagaaggtgtggtttaaaggagccctcagctgtggcccccagcatgggcaggaggccaggcaaggataggagtgggagggttccagggagtcctggaggcgaaagtgatggactccagtccctgggcctggatgcaggaagtgaggcagcgct

SEQ ID NO: 6020 - DNA, 1298 bp, Artificial sequence
  DNA replication origin
cagagggcaaggacggttgtgcaaaggccctgctttggaagttcctggaagcctttttgactgaagcatggtggggaagagggctttgagccgaagctggtgctggaggaaagacccattctctaagcattcagatctcattcctagggcagtgggaaaaccttgaaggacattaaagggggtgacaggacagaaggtgtggtttaaaggagccctcagctgtggcccccagcatgggcaggaggccaggcaaggataggagtgggagggttccagggagtcctggaggcgaaagtgatggactccagtccctgggcctggatgcaggaagtgaggcagcgctgaggaatgaagaacagcacctggcagagctcctgggggagtagggagggcagggcaggggagaagagaggagaggaggggaggggagagcaggggagaggagaggaggggagggcaggggagaagagaggaggggaggggagggcaggggagtagagaggagagtgcaggggaggggagatgacaccccaggccacagccagggctgccaggaaacatgggagccccaggcaaactggaatttcagataaacaagaagcataagcctgtctcatacagtatcgggaacatgcctcaaaaaccaccgtttctctgagatgcagatttcgcagggcctcctgtcatttgctgcacctggcagccccgtcctcagcagccacatggggttcagcgttccccttggattctgaggggtgatggtacgtagacaggagtctatgcaaatcaagggttcagaaagaggtatggccaagagaggtgtttctggcggcagcagggcctggcctatgtcaaatccttgcttggaggggtgaccggtgagagtgggtagaaacaggcccaggctccttgtgagaggccagagaggacggccagggaggacagagaaggaaacgggccccaggcaccactgggcaccttgacatgattggtggtggagggaggcagatggcagggtcctttgcaggagaggcagcggcgaaagctgcccttaggaggcagcgaggaggtgaaaccagagagcatgcctgtgtaggtttcctccagtgccttatggttctaaacacacaaacctttgatgcatctggaatttaccttaatttcctagcaatttttatcaatggctcaatatttgggggattttcatggtaattgcactgaatgtattaactggtcagggaggattacatcaagaccaccggctcgagaaacagcagtctgttcctccacccccacgt

SEQ ID NO: 6021 - DNA, 765 bp, Artificial sequence
  DNA replication origin
aaggccatgggtgctctgagcagaaaacaaacaggccaaatcccttcttcatgggtcttagacggcagtagaggaggccagccagcagggaatgagcactcagaggaggcgtggtggggaaggaagcaggccgagtgggccacagggagggctggggctggatggccaaggagggcttcacgctgggcacagacctgaggatggtgaagggtggaagaagtcattccagacagagagaactgcaggtgcaaaggccctggggctgtgcttggctcacttgaggacaatgaggtggtaggcaagctgcctggtgtaggaggggcagacagtgaatgggatgaggtcacagtggatgccaaacctgcgccatgtagaaccttgcaggccactgcagggatttgggcttttactctgaagtggatgggaagccactggcgggatctgagcagagaagacatggtatagctgctcttttaaaaagattactctgagggctccaacagactgtaaggaagaaaggtgaaaagtaaggagagtaaaagcaggattacagcagctgttttggtgtctcggaatgtggtctttgtggtgtaggcaatgagaagtgatcagattctgggctgactgtgaagatggagtggacacgatggactgatggggtggagaggggtagaaggggaagagaccagttgagctggactctcagttttgtggtctgtgtgatttggaggatggcggtgccgctgctgaggcaggggagaggca

SEQ ID NO: 6022 - DNA, 1539 bp, Artificial sequence
  DNA replication origin
caggtgaggagcgaccgtgcggctctgcggcggggcgaggtgcggccgccggtgcacgggctggcctgcgggccgggcggagggcgcgggcggtggcggggccgcctcgggcccgccgggttcctcacgccgggggcctggcgggcgcgggcacccggacgcgaggccgagcggcgtgaatgggaaggggccgcgggccgcgggccgcgagccgggggtcggaggcggcgtcggcggccggggcgctggcctcgcccggcagtgagtgaccgcggcggcggcggcgggggacggcccgcgccgagcacctggtgtgaaccaggccctgggccgagcgtggcacagacctggccgcgctcacgccccactcgcgggatcggctgcctgccttgtacggaggaagcggggcgtccagcgcctggccaaggtcaccggcccgacgtggccgcagaaaccgggactggactcccgatcggggcaggagtcgcgctaggccgtgaggagcgggggaggtgaggggagtgacaactcgcgcccggtcctcgtacctgcagcgggaagagtaagtatggacgcttacctacaactgggggcggccaggctagtttggaaaatttttaccacagcaaaggagacgaggaaggaagggcatcttggaacaattagtgcagcagagtcttggttccagacctagttctgctggtgtgtcatcttgggtgtggccttcccctccctgggctcagtttcctcatctgtcacaggagagaattgggtccccccactctgcattcccgaccgcctggaagtgggggcaggatgggttggaatagccagagaaagcttcttggaggaggagatgttgggatgtaggtaggaatcttccccttaaggaaggggtaggattcgtttgtgaagggaaggagggcattctagacctgggtatcagactgaatagaagcttctggaaatgaacagggtgttgtgaaggaacaaagaggaaactggcctgcctggtgcagaggaatcctggctgaggagtgagatgaaggcaagggggagcatagaggtgggagagagagagagattgagagacagaatcacaccaagcttagtgctgtggggcttgaggaccccccacctggacatacctgcctttcaggtagtaggcagtgcaggaaggggcaggtttactgctgaacgtaaaaggggctgggctccaaagatggtcggtcaaccagcgtactcctgtgccgagcaggaggttcctgggcactggcattctgtagaagagtgggatgtggactttgttgtgccctgatcggggcccctttggctggggaagttgagtgtcccctagtgacccgcagtcccatcctttatgcttggattgagacgtctccattcggaaggaattgtaaataagtagccccctcaccttgagctgactggcccctggtgtccctgcacaagtgacatggcctggttttgccattgcttgcagggatgctgagtaaatatcacttgatggcactagtaagt

SEQ ID NO: 6023 - DNA, 1033 bp, Artificial sequence
  DNA replication origin
gggttttggcaagtaagtaaaatttagtcctgcagagttaggggaaaagaggagtattccaagcagataaattagcaatgtgcgaaagcacagtgcatggaaaagcacagaaaccagacagcatccagtgtggccagaacaaaggtcccaaaacaacagcagagcactgggaaacaaagtagaaaaacagaaacaggagcgtggagggagccattggagatttctgaacagaagtttctaaactttgcttaaagaggacaatcttagaaagggcaaagtggaggccagtgacctaagagatgggcagcaagcacctggcaaaggcagaaaagtgtgggggcttcagagcaaacagaatggagaggttccagcaactctgagtgggtggagggggtcaaagatggcacccagaggtgatgtgctgggatgcgggagtgccagaaagccacgagagacaaagaggaggagtaggggaggggtaggaagaggaggagtagggaaggggtaagaagaggaggagtaggggagggggaagaagaggagaacaaggctgggagcacaatgagggcaaaggtgaggggttcctgcaaagtgatgccacctgtcatcatgagactgggtaaggtcaacaaaagggagaaaaaaggaccttggagaaagcaacggccaaggaacagggaaagttacagatgagaaacatgccgaaaagcaggacagccatcggggatgtggtgattcagtgaaagagcacagagggtccaaggggaaaggccattggaagtggatcagaccttgctgattcgcattcaaaacagcaggaaagcaggaagagagatggaacccagagtacgaagtgaagacgcaaatgtgaggtcaaaacagctgcagcacaattccttcaagaagtgaagtggggaaaggaggcaacgggaaggggcaatggaggccagaatgctcacaaagctgaccaccgagtggaggaatgaaaaggctagctgagggctctactctgaggctcagggttcaggagacc

SEQ ID NO: 6024 - DNA, 794 bp, Artificial sequence
  DNA replication origin
ctggcactgtggctaatgcctgtaatcccagtgctttgggaggccgaggcaggaggattgcttcaggccaggagtttgagaccagcctgggcaacacagtgagaccaccatctctattttttttttttttttttgcctttttccacaacctcccaacctcttcaaacaaataaacaaacaaaaaagagtcaggcgtggtggtgcatgcctgtagtcccaattactcaggagtctgaggtgggaaggtcacttgaacctaggagtttgaggttataatgagcaatcatcgcctcactgtgctccagcctgggcaacaaagtgagaccctgtctcaaaaaaacaaaacaaaacaaaaaccttcttgttgcacaccttaaatatttacaataaacagctaattaattaaaaacaaaaacctgcagtttagcagggcatggggaagggtaccctctgaaataactgacccggcaacgtcctctgtgcctcagacagaaagtagtgtgctctggggtctttgggacagggagattctctccagctgtggggactgaggaaagaggaagtttctgagttgggttttggcaagtaagtaaaatttagtcctgcagagttaggggaaaagaggagtattccaagcagataaattagcaatgtgcgaaagcacagtgcatggaaaagcacagaaaccagacagcatccagtgtggccagaacaaaggtcccaaaacaacagcagagcactgggaaacaaagtagaaaaacagaaacaggagcgtggagggagccattggagat

SEQ ID NO: 6025 - DNA, 976 bp, Artificial sequence
  DNA replication origin
ggagaggcatggaagttagaatgcaaagatgggatatgaaaaaatgaagaatgcagtcaactcttaaaacggttgagaaaggaggaattaaaaaggcgtataagattacaggcaagctgggcgcggtgcttcacccctgtaatcctagcactttgaaaggctgaggtgggtggatcacctaaggtcaagggttcgagaccagcctggccaacatggcaaaactccgtctctactaaaaatacaaaaagtagccgactgtggtggtgcatgcttgtaatcccagctactggggaggctgaggcaagagaatcacttgaacctgggaggtggaggttacacagtgaagctgaaaccatgccactgcactccagcctgggagtcagagtgagactccgtctcaaaaaaaaaaaaaaaaaaaaagattaagagcaaatagagactgaacatgttcataggctaaagggagttagccaacaggacgtgcaaggaagaggagccaaagtcctggaggagacgataggggatgaagttaagagtaaaggtggctagggaagttgataggcatggggagaattcattctctaaatctgtttggaaggctgtaaggataggagcccaaggacaatggacaaagtgacgattcatcccaagcactccttgggccagttaggcagcaataaggtttgtgtttccaggtgaacatagtgagtgtagtggtggagtcagacaagatagtgtccaacatggctggtgataccccgaaagaattgagtacaaacatacagaagcccaggtgctgaggtagcccagctgaaaacagtttagggtacaacacgcagcagcagctaccaccattccaagtatactggtcacacatgcaacagatgacctaccaagatgtctctaatacaaacacaagtgccccatagtggccagacatttgaggaatggcatctccatgaagatagtgagaggt

SEQ ID NO: 6026 - DNA, 969 bp, Artificial sequence
  DNA replication origin
gcgacgcccgggcgcgtccggattggctgagcgaagcaccccagccaatccacccgcttcagagggccgccgagcccccagcggggaggcgaggctgcgctgggtcaggtgacgggtgggggcggggcttagcgcgtcacagagcttcccgggaaccgggcgctagaagccgcgtctcctgggccggcggatccccgcactttcacttccgggggagccccgtgacctttgctgtctgcggcagggccgccatcgggccgcggccggttagtcggcgtaagagcaggcggggcccgagctggacctgaggagcagaggcggctgggcagtcctgcgggtgcctccctctagccgcatgagcgcgggaccgtgcactccgggagagccggggccgcgcggccttgttccccgcgaaccctcgaggggaagtgccggggccgcggcagcagggccagggccccgggggtctcccgcaggccaccctggacagtgatgagcaggtccgctggacctgcgcgtccgttagtcggagcggctccataggggacctggatggcgtgaagttaagagtcacgcatcgaggatggacttgaggggatctggagtagaggatgggagggcattgagaaaatagggccagagatgagggactctaagtgggcgtggaaacgcaggaaagattaattcaagatctgtttaggccgttaaataggaattggggcatgagggacaggaaggaagcaaggattagacaagtgactgggaagatgttagtgcctttatctgggtaagagggaagacgggagggggaaagatgatgggtttagctttggacatgttgagttgtctgtgagacagtcacaagtgtaaacatccaccaatggttggtgtcccgccaaccattaagaaaagtcagttgagaaagtggtagaaatgagcaaaaatcctcacgaagccatcctaccgtca

SEQ ID NO: 6027 - DNA, 1357 bp, Artificial sequence
  DNA replication origin
ggggatccgccggcccaggagacgcggcttctagcgcccggttcccgggaagctctgtgacgcgctaagccccgcccccacccgtcacctgacccagcgcagcctcgcctccccgctgggggctcggcggccctctgaagcgggtggattggctggggtgcttcgctcagccaatccggacgcgcccgggcgtcgcggccccgcctcctccccggcgctctgggcccgtagcgctccgcgggaaggaggctggatgcccggcagcagtggggcggggatggaggcggccgtggcgccggggagggatgcgccggcacccgcggcgagtcagcccagcggctgcgggaaacacaactcgccggagaggtgcgcgcctttagggcagggctggggagcggccggcgcctgtcgccgattgtcccgcgcgggaggacgaagggggctcccggcctgtggccgctctcgcgtggggcgtcccgcgcggggatgtccgcgaggtcggcctaagtcagggatgcgagcttcaaggaggagcgggtgcgagctgtggccccgcaagggcccacggagaggtgactttggggccgaaacccgagtgacttccaggggtgaggtttgcaggttctggggaagcagagcctgccaggaagagggcacagcagatgcgaagggcaggggacttgccggaggtgaaccggcagagcccctgagcccgggaagaactttggggttcattcggagccttatggggcctcggaagttgatcacggggcgatgcaatttaagtgttttgaaggagtccttctggctgcttcctagaaagtaggggcgcgggtaggcatgggacgagaggaagccgggaagccagttggggatcttgtaacaacctaggagagagatgtggtgtgcgcccagaaacggatgcgttggtaggaagctggtgcactggggcaggtgaaagggaatcaagggttctcccagactgctggcccagctgcaggaaacgggatggccaccgctgagaagcgcggagacccgaagcacgtggtatccatactagttaagtccgagaagagcaggaggcaggggtatgcattttctggtttgtgtgtcttctttccagacccctctttttcctttttgtgagctcattcgctacccatgcttagaatatgagggggtccaggcctaaagcacacacatttggcattctaccttggttggaacaaagtgaagggatctgggaaaatatcccctagggaatcagtggagcgagattcccaagattttttattttttggttatgaagctaacaaagttgagcctgctcatccaatactgatagcattttaaggaa

SEQ ID NO: 6028 - DNA, 1176 bp, Artificial sequence
  DNA replication origin
ggagggccaaaaagctttcaacggtacaggtggcatttcctgaaactgctcattctcctgacagtcacagacagaccatattttttgagtgctgccatttggagggtgtggaagtgccccagaaactgacttcaccaggtacctcctgacagcaccaggcactggagatgcctcagcaaagcagccctgaaagggctccctcgaggagccagcatcccagagaggcagacggacaaaagcaggggaagaggggaacagactcctacccaccagttggcgctgtgaaggcacctcgcaggcccaaggtggggtggtgacagagatggctgtacaagggcagggaatggcgtcccagcaagggctttgcaggggacagacagacattctgtctctagaacagaggggcctggcgtggcgggtggagagtgtggagggggtgaaggcgcagggacagatcgacaggccctgcaggcccggccacggggcagacgcagtgaggctgagggagggatgcgatggtctgactggcctgtctgttggtcattctgtggccgtgtggaaaatggcagcagcaggcccccaggaggccatggcaggcatccagacccttggtctagggttggtggccatgaaaatggacatgaggccggtagtgggtgtattctggaatccagacagacaggaaggtgctgcattggaggcaggggacgatgacaaggagggactgagggcatcccccggacttcagaggtgagaacctggatagcaagaggtgcccagggtgggaagagggttggaggagagcagtcgggacaggttttgaactcagaggaatggatctctcaggacatgggccagggcctagctgagatgtcaagtttaaaggcaggagcacaagctagcatcacagtgacaggacagacggacccacaagggctcaggtgcagggctgccagcacgcaaccaaggcagaaaggaatgggtgagggaaagcacgctggggagggcgtgtgcaggatggagtctaggctgggtggcggaggggggctgtctagagcgctggtggcattggggtctgggctgggcgaagctgaagaaccagtgggggtgtggtgctgtggctgggacccagctgtggcacttgtgccattacaggtgcagatgcagctgcaggag

SEQ ID NO: 6029 - DNA, 1523 bp, Artificial sequence
  DNA replication origin
cagagggagggaagcagcctgcgcccagcaggaccccgggaagggacagaagggcaacctggctggagccccatctcaggggcatgtgctctgtctccgcaggccacgtggtgcttgcgcagtgccgagtgctgatggccagtgtgggggccgcgtgccactcggaccacggggaccagtaagtgctcttcacaaacccagtccagggcataggggtcctccgggcactgggtgtggtgggcaggcggcaggatccggccactgggccgcactctggctggtgaaggacagccctgtctgggccctaggaggggcagagggagggcttcctggaagaagtgacttccaagctgccatctgaaggactaggacttgtgcgggagaagagggcttctcgtgctcagttctgaaggcggagggagggcagggcctggagggccagcgtggccggggctggggagggctggggcgggctggggtgggctggggtggggatggcctgagtgtcagtgcttacttaaacctcatggaagtgggagccctgagggccatggtgtgagcagactcaggtgtcagatcagccatctgcaagatgcagcagagattctcagatagcagggcccgggtgagcgggtgggctgcctggcggagactgtggggtagagggcgtggggtgcccgagcagcggcctgctggcagcaggggagaagtggttctgggtctggtctgctgaaaacgtgaggcccctgtgggaggtcggagtggacgcaggaggaacactcagggttctggggagagagcggaactgtagccagcagcacgtggccatcaaggtcagggcagagggattgtgcaggagcacctggagcgagacagtggtgggcctggctccagggaaaaggaggggcaggatggggccctttgttggggggacagtgccctgctgcaggaggggcaggggaggaaagggacccgggtgtgatgaggtcaggccccttgacagagcccacatctcgagcctccaacagccttgcttcaggatgtccccacgcagtcatctgttcatggctagatactgactgggtccctagtgtctgcaaagccccatgctaggtgccatgaagttaccaagtggctcaggtgggccgcatgggtaaggcactgtctgtgtcggcatccgtgttctccaggacctcagacccctcaaggacaggagagcccctggccccagagctcagtgcgagagggaggcagtgtcacctgggagtgccaagtgcaagagaactctgcagggagaacgggggcgactttgagccacaccttgatgtgggtgatcttaggggtgtgcttggtctgggagtttagcaggaggtggatgccaggcgaggcaggcgcacatccgggtgggcagagccccactaggggagtggtccagagcagggggggctgtgtctcttccatgtgccctcagcagcagctgcagctcggtctcgccctccccaggccgtccccagtgctgctga

SEQ ID NO: 6030 - DNA, 1528 bp, Artificial sequence
  DNA replication origin
gtactctgatcctccgtggctcacacctccctggttccaccccagccagcttcgtggagccaggctgccccatccccgctcacctgcagaccgcagcccccctcgcggaccagccagcacagctcggccaggctgcccgtggcagcggcgtcatgcgctggggtggccccgttgtgggcccgctggttgccgggcagctgggcccgctgcaccaagaacttgacgcagtccaggtggccagcccgggtggcgtggtgaaccaggccggcccccagagcatcggtgatgcccgggcccagggcgccagcctccagcagccgctccaacgtcgccacatccccatccttggcggccacgagtgcccgctgcttctccatcctctggcccgggctctcagtggcgactcatgcacaggctggggcttcctgtttcagacgtggatgaagctgccggctctggttacccgataagctgccacagggcagatgggaggcggtggggtggggtcgggtggggggacaggccttgaggacctgcccaagccactcccacagtgtgagggtgccaggtgcctggagctgggaggatggagtacagggcacagggaaaggcccacaccaggctaggtcagggctgggtatggccagcagagaaaggaggctggccctgaggctgctcagatctgtccagatggcaggaacttcatctgtggagcgagggctgaggatacacgccactgagcttctcacaggagccccgagtggcctgggagacagttcccccaactctcacagaagggcagacccccagccgccaccacagtgtgtctgaagtaaagggtgcccagtaggtctacatgtttggctgtgttgacacccacagagctgagcgccccgcctctgggtcccggccctcggccctggaggctcctaggaatctctggggacacagtggctccacggggcctgcaatgggctcaggaccctgacttgggtgtgtccaggcctctgaggcgagaaggtgtcagcccctgcctcggccccctctccaactacacggaccaagtctctgggctgcagccccaagggcccaagtacatttaacccctttccagattgttctggacaatccatagttcttctttagggaagtcaggaccaccacagcctcttcctggcagcaatgggaagctgcagatgggggacccattacatttgtaggggcttccggagacacagcctcaagctggatttctgggctaacgcatcatcacacaatggtgacctgggggctgctgcacccctggcttccccccgacaggctctgtcagatgactttgtgcccaagcgcagtgcccactagagaaaccacaggatccccaagtcgggcactgaaatcttttattcgttaatttagtttctggcaagtgtttcctcaaaatcatcaagtagttccttgaaccgtaaaaccacacattaaaaatgttattccactgaaaatgactcctatgcaaatatcgacatgtgat

SEQ ID NO: 6031 - DNA, 1226 bp, Artificial sequence
  DNA replication origin
tactccatcctcccagctccaggcacctggcaccctcacactgtgggagtggcttgggcaggtcctcaaggcctgtccccccacccgaccccaccccaccgcctcccatctgccctgtggcagcttatcgggtaaccagagccggcagcttcatccacgtctgaaacaggaagccccagcctgtgcatgagtcgccactgagagcccgggccagaggatggagaagcagcgggcactcgtggccgccaaggatggggatgtggcgacgttggagcggctgctggaggctggcgccctgggcccgggcatcaccgatgctctgggggccggcctggttcaccacgccacccgggctggccacctggactgcgtcaagttcttggtgcagcgggcccagctgcccggcaaccagcgggcccacaacggggccaccccagcgcatgacgccgctgccacgggcagcctggccgagctgtgctggctggtccgcgaggggggctgcggtctgcaggtgagcggggatggggcagcctggctccacgaagctggctggggtggaaccagggaggtgtgagccacggaggatcagagtactggccaccccgggctccatggccctgggccctttgtttctcttggggactcagtcagtggttaccgtctctgccccacgcctctcagagcacaaaggcttgagagccaagaacacctcctaaattttcttatcaccttccctgccaggaagctgggcgttgccagtgggggtcttgccagatatcaggacccctgtctctgatcaggcctggtccacagggcctgcctcccaaagggtctagaaagggatccttacagaagcactgtgggaacttgggcttgagagctgggagcctagccctgggggacgggagttagggctgctgatggtgatcgtcttgtccggatcgtttctactgggcccccctcccctatcctgcctgcccagtcccctttgtgcaggcgaggcccttagagctgtcgctcagccctgtggagctttcagggctgagggtgagcaggactgaccggccttagaacgccgccgcccagaggtcagagttgaggtgggggccggtggggcctgcttagactgcggagcgggaaggttccccagcacctggctcgccagagcacctgagagtcccggcccagcatcctgttcctgtcggcccttccgccaaacccaaggg

SEQ ID NO: 6032 - DNA, 1433 bp, Artificial sequence
  DNA replication origin
cttctccacactggggacgggcccaggagagggcagggttgccagaggtggcctcccaagacctggacctgagtcctggccctcctctcacctcagtcccagcagggagcacctccctccatgttgcaggcagaaacggagggaaggaggaaggagctggaagccccttcactgggttgcaggcagtgtgagccctcgcccagggcccacctccggcagctggctctgacctcacggcctaccccccactcactgacctacccggggcttggtaggaccaagatgcctcgggcgtctccccgctgcacctggccgcccgttttggacacccagtgctggtggagtggctgctccacgagggccactcggccacgctagagacccgggagggagcccggccgctgcaccacgctgccgtcagtggggacctgacctgcctcaagctcctgacagccgcgcatggcaggtaaggagcccaaagtcccgcctgggggggcagcctggggcgagctggccaaggggaggctgcaccatggagggccaagaggacaggctggtggcctttgaggtgaatcctgcaggcgggcatgctgtcactgtgggggtgagctggcaggagccaagggcaatgaggcctctacccacaggccaggcagtggcagtgccatgccagggcccaaggggacacaggccagtgcttcagcttggagagtggctgggggcggtgacgatggcaagatgctgctgtgatgcccagggcagctctggccccacctgggggcatctcgggacctaaaacagctggggacgtgggcagctggcaacctgtgagggcaccctcccatcacctgacaggagtggggactgtctagtggacttggggacacagaggctggagctgcctctgcactgccccacccctgtgctgggacccctagagccgggcgctggcctcatcgtctctggggccctgtgccccctgctggaattagtggatgggcaacgaggaaggaccagggtcaggacagccagtaaggcagatggcctccctccccacctggaagctcctccagtcctcgccctgcttacaaaggtcactgttgtcataggaacaggccctctgcctcctactgtcttggctgagggcgaaccttcctgtcccccagggacccacctacctctgaccacggctcttctcttttcgaggcagcatctcattttcctgtcgctgccccagaggcctcagtcccccacacccccttagctccaggacaagccccgacagcttgcttgtggaatcgggttctcattcccgggtgttcccatcctggactgcttggcaaaggcctttgggattcgcttctgtggcttttctccagagcgtccacaccaccctcagccttggctggccacagtctctctcagacccacac

SEQ ID NO: 6033 - DNA, 896 bp, Artificial sequence
  DNA replication origin
gtccctctctccctggaagtcctggtaggcctcccaggtgctctcacagttggtggtggcccgggtgctttgtctgcgcccacaccagcagtgcccagtttgggccactcgaccacttgttcaggccctgccgcctgagatccccaggccagcccccaccttcctccacttctggcctctttggggaaggaagacctgagaccccagagcagagtggctgaggttggggaggtgccatcttcaagggggggctggggacttcctgcctctacaacagaaaagcagagcaggtgggacctgtaaccccagctactcgggaggctgaggcaggagaagtgcttgaacctgggaggcggaggttgctgtgagccaagatcacgccactgaactccagcctgggcaacaaagtgagactctgtctcaaaaaaaaaaaaaaaaaaaagagtagaggaggccctctttgaggaggggacttgggggcagaactgaggatggacaggaggcggccggacaaggagtggggcccaaagcaacttcctgaggggggcacaggtcattcagaggcggggagagcctggcccatggggcccgggggcgggcaggaaaggcagacagaggcgctgggaggaccggggctctttcctgagggtcctggggagccacggaaggctcggagccaggagcagtaggatctgactggcatattggaaggtcactgtggctgctgatggagaagtgagagctgcctgcccccagacctcccatgcttgcctggggcctcctgtctcctggctcccacccactcagtccagctccttctccagcaagccaggctggctctgcccccggggcctttgcatgcactgcaccctgtgcctggcacacagctccccagc

SEQ ID NO: 6034 - DNA, 1039 bp, Artificial sequence
  DNA replication origin
gatgaccctgcgcctctaagctgcagactggggtgtctgctcacgcactgcctgccttcctgggtgccgtgctgccctccagagagtaagcagctcagcccgggggccgccggctctggcacaaatatgcaaccctggtcgtggtgcgaaagctgccacccatagcgtggccgggtgcccacaaggctttatttgtgggcactgacattttaacttcagatgagtttcatgtgtcatgagatgtgattctttttccttttccccatttaaaaagggaaaaactattttgagcttgtggggccacacaaaatcaggcgtgcgcacaccccttccccgggggctgctgggaggcttgaaccagataacgcctgaaggctcctggaggcccagaagggctgagccagtggctggtgtggctgaggaagcaggaagcatttgtcagatgtgcaaggacaccggggctggggaggctggggcaggtcgctgaagccagtcgctggagagaggcactgctcccggaggctctgggctgggggaatggcaaaggtttgccagggcgcggtgggtgtgtgggtgggtggaggcggagcgtccccaaggagctgttgctgggaagaggaggccaggatgcggaggaggggagttacggggtctgcaggagtatgaggggtgtcacggcagaggaagggggacaagtgtcagacctggccccaaatggtgctggggagagagggcaaagccctgataggaacagagccatggggaggaggaagggaacctctcccccagagtgacggaccccatcaccgctgggattgtcagcagagggtgggtagtgacagacagaactctgtctggaagtctgtgcagaggccacagcagtggaaaagcaggtgagcagatggatccactccagggaggagagaaccaggtgggtcagaccaacccactgcccaaggacgtgaaacacggattcactgtaaaagtcacctgctgacagcctcagtaaggtaacgcagaagtcaggagtgacacggcc

SEQ ID NO: 6035 - DNA, 2841 bp, Artificial sequence
  DNA replication origin
cacctggtttgtgtcgtggtgggtcacatgtgtgccctcctcactgcagtgctgccagaccctagtctcccaccacgtggacccctccctgcgggatgaagatggttacacggcggcagacctggcggagtaccatggacaccgggactgcgcccagtacctgcgggaggtggcccagccggtaaggctcagggtccccagctgccctggaggcatggggggtgggcccagaccccagccaggaccccactgctgaacctgcagcatagtcagctgggaagctcaccatgtccaactcatacatggcattggagccaggagcaagggcctgggcaggactgaggcgccacagggcagccagtgctagggccaggctgtaacaggagctgtgacaggggccaggacaggggctgtgacaggggtggggccagggctgtgacaaggacaggggctgtaacaggggtcaggacagagggcatgtgacagggcctggggccatggctgtggccagggcccggcctgggcttgtggctggaacttggccaggccatgcctttcgtctgggtcacagagaccacatctgtgactcaagagcctcggtggccagagttcctcgtgggtgatgtgggtgatgtgggtgatgtatgtcagactgaggagccccaggagtgggaacggaacctcccagaggtgatcgcaaggcggccaacagccctgcagcagccggaaggcagcagattccagccctggctctcgtctctcagcctgggaccccacagcctctcatttccccatttgtaaggacacggatcttgtctatcccactggtccccagcccttagaacgtgacagagctcaacaagtgtttgctgaatgaactaatgagcaaatggacagaaaagcaggtggatgcatgagggtgagcagaggaagggatggatggggagggaacagacagaggaggaatgaatggggcagggaggccaaaggagtgaaaaatgaggagagggatacatggaggggggagagctctggagggtggacagaggagagatgggtggaagaggaatggatgaagaagggtggaaggaggagggtggatggaggggaggtggacagaggagaaatagatggaggaaggtggatggaggaggaatggatggaggagggtgaatggaggaggaatggatggaggagggtgaatggaggaggaatggatggaagaggatggatgaaggagggtggatggaggagttggatggaggagggtgggtggagaaggaatggatggaggagggtggatggaggaggaatggatggaggaatggatggtggaggatggttggaggagggcagatggagcagcagatggatggaggagggtggatggaggaggaatggatggaggaatggatggtggagggtggatggaggaggaatggatggaggagggtagatggaggagggtgggtggagaaggtggatggaggaggaatggatggaggaggaatggatggaggaggtggatggagaagggtggatggaagagggtggacggaggagggtggatggaggaggaatggatggaagaggtggatggaggagagtgaatggaggaggtggatggaaaagagtggatggtgggagatggaggagggtggatggagaagggtggatggaggaggaatggatggaagaggtggatggaggagagtgaatggaggaggtggatggagaagggtggatggaagagggtggatggaggagggtggatggaggaggaatggatggaggagagtggttggaggagggtggatggaggaggagagatggaggagggtggatagaggaggaatggatggaggaggaatggatggaggagggtggttgcaggaggatggatggaggagggtggatggaggaggggagatggaggagggtggatggaggaggaatggatggaggaggaatggatggaggagggtggaaggaagagggtggatggaagaggacggatggaggagaaatggatgaaagagttggacggaggaggtggatggaggagggttaatggaggaggaatggatggaagaggattgatggaggagggtggatggaggagggttaatggaggaggagtggatggaagaggattgatggaggagggtggatggaggagggtgaatggaggaggaatgaatggaagaggatggatggaagagggtgaatggaggagagtggatggaagaggatggatggaggagaagtggatgaaggccttggatggaggaggaatggatggaggaggggagatggaggagggtggatggaggaggaatggatggaggagggtggatggaggagggtggaaggaagagggtggatggaagaggatggatggaggagaaatggatgaaagagttggacggaggaggtggatggaggagaaatggatgaaggagttggatggaggaggtggatggaggagggtgaatggaggaggtggatgaaggacgtggatgaaggagttggatgcaggaggtggatggaggaggtggatggaggagggtagatggaggaggggaggtggaggagaggaggttagatgaaggaggaatggatggaggaggtggatggaggaggtggatggaggaggtgggtggaggaggggagatggaggaggtggatggaggaggtggatgaaggaggaatggatggaggaggtggatggaggaggtggatggaggaggggagctggaggaggggaggcctggggcagttactgtgacaaatccctctaacctagctcggtttctgccacacctcttttactggtcatcc

SEQ ID NO: 6036 - DNA, 1271 bp, Artificial sequence
  DNA replication origin
cattttcctgctgcaccggggccggactgcagtgaagttggccctgcctgagcaaatctctggcctccctaagcctcccttgctcatggacaaggtggcacaggctgcctcccagcaaggatgctgggtggcccctcggccacctcccctccaggaccctcaccccactgggccacggggaagggaacacagtctgaaagcccatctgcccggcccccacgcacctcactccttccaggaatctgtgcccacagcccaggaaccctggtgcgcggtgggctggggagcaaccgcccagccccagccccggaggccctcagacgcgaactgcagagtgcagggagcacagctgtcctgggacaccgggggctgctgaggctgccgcccccaggagtgggaggtgtcacatgaatatttgaaggccgaggtgtcaggtggccaggcgggcttgggccgggtgtgggatctgttaccacggaacctttaactgtccacagagcaggggccggggaggggatgctctgggagatggaaggggacctgagatccctgggccccatgagaagagagaccacccagaggaatccccagccccacctacggtacggcccccagggcacagatggggaaattgaggctcagagagggcaaggggctttctcaaagccccacagccgggctgccgcagagccgggatgagagtctcactggagacctcagtctttgctccctccagtgcccctgaacagctgcttccttggtgggggacaccacagaggtcagcctctagggaaagaccaagaacacaaagcctggctgtcctttctgggccacttctcagggctgtgtgtgcagggagcgactgagggactaggactgacttgctgtctgctgagcaacggcgtgttccccagactcaacggtcctcagaggagatacagacctatgcggcacagctgccatcgggacccaactcgcaccacctgggactcgggggcaagggaacgcctcaaagcatgatgtgtgctccctgccgtgctgaaggaaggtcctccgtcttggacccaggagtctggtgtctttgtccacgttcaagacatagcgagaggctggcgtcgctgcttcaagcagggcagagtcagactccagaccagacgcggccagaaaagccagacacaagtggtgtcaccgacagaggtgggctgagccctgcctggagtgggcccctcaacagcaaggccaccccaatgcccccgcactgtcccctgccc

SEQ ID NO: 6037 - DNA, 1853 bp, Artificial sequence
  DNA replication origin
ccccaagtgggccacccagggcatgggcctgggagagggtgccactggcctcccctccgaggtcctggaccggtgggcaagtctgcgggcagccgggcaccccatcaccctccctccccagttgcttccaggtttccttgactgtctttggtgctttggaaacatgaggattagcattttccgtggtgggcacttacagctacagcaacttatccaggggtaaaagcggggagacgggccggttgggcccaggccccttgtggatgggctgctgtccctcagaccccagcacacctcgcatgcatgggctagcagggcaagcaacagtcctcacgctgtgggccaccaccattaggggtctgtgaccagcttggagtggagtggagtggagtggagtggagtggagtggagtggaatggaattatcaacaggtgccacaggtagtgagggcgagcttcctccacgggccctgctgcggccctgtactcacatgtgggagtgtgcttctgtgtgtgattgtgtctgtgtgttctgtgtgtgatacacatagatacggggacccttctctgtgtgtgattgtgtctgtgtgtgattgtgtctgtgtgtatctgtgtatgttgtgtctgtgtctgtgtgtctgtgtgattatgtctgtgtgtatgtgtgtgattgttcatgtgtgtctgtgtgtgactatgtctatgtgattgtgtgtctctgtgattgattgtgtctgtgtctgtgtgattgtgtctgtgtgcatctgtgtgtgattgtgttcgagtgtgtgatcgtgtctgtgattgtgtctctctgtgattgtgtctgtgtctgtattgtatgtatgtgtatggtgattgtgtgttctgtacatctgtgtattgtgtttgtgtttctgtgcatgattgtgtatctgtgtgtgattgtgtctgtgtgtctgtatgtgattgtgtgtgtgattgtgtctgtgtgtgtctttgtgattgtgtgtctctgtatgattatgcctgtgtatgtgtgtttgtgtttgtgtgtctgtgtcagtgtgtgattgtgtctatgtgattgtgtgtatctgtgtgattgtgtgtctgttctgtctgtttctgtgtgtgattgtgtctatgcatctgtgtgtgattgtgcctgtgtgtatctgtgtgattgtgtttgtgtgtgtctgtgattgtgtctgtgtgtatctgtgtgtgattgtgtccgtgtctgtgtgtctgttctgtgtttctgtgtgattgtgtctgtgattgtgtctgtgtgattgtgtgtatgtgattgtgtctgtgtatgcttgtgtctgtgtgtctctgcgtatgattgtgtctgtgtgtatctgtgattgtgtctgtgtatctgtgtgtgattctgtgtgattgtgtttgtgtatgtctgttctgtgtctgtgtgtttctctgtgtgtgactgtatctgtgtgtgattgtgtctgcgtgtgtgattgtgtctgtatgtctgtgtgattgtgtgattgtgtgtgtatgatcgtgtctgtgtgtctgtgattgtgtgtgtcactgttattgtgtgtctgtgtgtatgtgtgtgattgtgtctatctgtgtgtgattgtgtatctgtgtgtgattgtgtttgtgtgtctgttctgtgtgtgtttctgtgattgtatctgtgtgtataattgtgtctgtgtgtatgattgtgtctgtgtctgtatgtgatgtgattgtgtctgtgtctgtgtgattgtgtctgtgttgtgtgtatgtgattgtgtctgtgcatgtctgtgtgtgattgtgtctgtgcgtgtctgcctggctgtgatgcagacgtgttcttcactcgaggttgaccct

SEQ ID NO: 6038 - DNA, 984 bp, Artificial sequence
  DNA replication origin
cccatcccagagtggaagcggcaggtgatggtgcggaagctgcaggcgcgcctgggcgcagagagctccgcagaggcccaggtaggcccccggcaggggcgggaccagtgggcggggcggggccttttccaggtaggtggaagtggaagtcagggcgcccgaagcccagaactgaatccaagacccaggggcccctctcctctgtggcctcagctgctgcttccgccggaggatgaagtgaacctgaccagaggactctgagcagagccccttcacctgctctggaggcatgggtcccacgtatccttccacttggcggatttgtggcacatgcctgcctgtgccaagcgttgttctaggccttcctgggcgcagcgtctagcagggaagacggtggcccatgggcaggtgccggcaggtgtgtggggtgcgattcccactgctgtggagaaagcaaagcagttgggggactatgatatatgggtgcttagggggccccctctggggacgtggccttgagcaggggccagagggaagagagggggagccctgtgggaatttggggcaagcacctcctaggcagagggaacagccagtgcaagggtcctgaggccgggctggccgggggaggagcaggaggaggcgccctggcatggagtgggcgcctgaggttggagaggaacctggctgggattattgcacctctgtgaggccgtggggagccactgagaatctgagcagagaagggctgtgatgtgccttggattttaacaggctccccgggctgctgtgcagacaggagttcaggaattatgtcctcagagtcctatgattttgtcaagatgattgagttctgtgcccccggcccagcgctgtgtccagcgcaatcctgccagccacatgcagccactgaaattcattacaatttaaggaaagtaaaagtcctgcccctccgtcgcaccagccacctgtcgtttctgtagc

SEQ ID NO: 6039 - DNA, 1151 bp, Artificial sequence
  DNA replication origin
gccctcctcagccccagagcctgggtgatgacccattctcctggctgccatcagaagctggggacaagccacaccctatgccagccatgcccagcaccatgcccaggaatactccgcagcacccagagcccccgaggacggaatccatctcccttcctgtatccctccctccagtacccaggcccctgtgaagaggtgcactgtgggtgacacccaggtgccctcacggagtatccacgcccccctgaggtctggctgctgcccacccctgccggcattctcctctgtgtgcagcagcctttgagagtgggcaccagccaccctgcctggaggactctctcagccactgctactcccacgtccctgctctccagccttgctggggcccacgactaggccagggctggtcaggctggaggacaggggccccatggggagcctcctttgaggaagcagggcctccggagcaccctgggctggggcactggcctggcgggcatcggtgtgtgaccagcagggatggcctggcaggaaggcctcctgcccatggaatctgtcctcggaatcactccagctcccccaaattcacagatgggaggtgaaggggtgtgacccaaggtcagcaggagaaacaggggcaggaccagggcctggggccacctcagactcacatgaaagatggatgtggccgaggccaccagcaccacagaaactgagggacaggacgccaagggaactggtgacactggggaaggacaagtgagaaacaggcagcatcccaggtctcgggggccggctgggcagaggtgccctggactggggtggcccattgcctcacttcaggacctgccaaggggcttcctgggtgcagtggtgagaaggagtctgagtcccagctcggaggagaaccatgccacaacagaacagtcccgcagcctccgataactggtaggactggaggcagccttgcccggctcacctgaacaccaagggtgtgagcaaggaaaagaaaagagaaactccaagtcacccccaaaccacattctggaaagcaggctgccagtagggtcattctccaaagttgaacatctcagcttccttctccttccagaaggcaaagctgcggttgatgtagccgcagatgtcctcac

SEQ ID NO: 6040 - DNA, 1312 bp, Artificial sequence
  DNA replication origin
cttccccagtgtcaccagttcccttggcgtcctgtccctcagtttctgtggtgctggtggcctcggccacatccatctttcatgtgagtctgaggtggccccaggccctggtcctgcccctgtttctcctgctgaccttgggtcacaccccttcacctcccatctgtgaatttgggggagctggagtgattccgaggacagattccatgggcaggaggccttcctgccaggccatccctgctggtcacacaccgatgcccgccaggccagtgccccagcccagggtgctccggaggccctgcttcctcaaaggaggctccccatggggcccctgtcctccagcctgaccagccctggcctagtcgtgggccccagcaaggctggagagcagggacgtgggagtagcagtggctgagagagtcctccaggcagggtggctggtgcccactctcaaaggctgctgcacacagaggagaatgccggcaggggtgggcagcagccagacctcaggggggcgtggatactccgtgagggcacctgggtgtcacccacagtgcacctcttcacaggggcctgggtactggagggagggatacaggaagggagatggattccgtcctcgggggctctgggtgctgcggagtattcctgggcatggtgctgggcatggctggcatagggtgtggcttgtccccagcttctgatggcagccaggagaatgggtcatcacccaggctctggggctgaggagggctgggcccaagcccacagggactttggaggtggggctctgcagctgtgagatggcccagcagggagtggcagggacgggaggcttcaggaatattcctcctggcatccaggccccctgggacagaggagggtgcagtcaggcgacaggcttatcaggactccctgcctcaatccctggggattgtccaggcaaaacctggagggcagcgggcaagctgttggatggaacagagagaccctcgcagctgactagggcccaaggggacggacactcaagaagatgtaaaattgggaggggtggtattggccattggggcaggcagggccgggaagggaagtagcaccggccgcagccccaagccagtggcttttccacaagggcctatcctgcagccggcccgctccggcttcctccactgctgaagaccctgctgtagagctgaagctgaacatgtgtttgctaaataaagattcccattcctagcgcaccccctctcttgcacttgttgttcacccatccctgagagccgcctacgccctcacagagcccggtaccaaa

SEQ ID NO: 6041 - DNA, 2111 bp, Artificial sequence
  DNA replication origin
agctagggctccccgacttcccgaccccggtgccacctcttgaccccagagcggggaagcacctgggagcccacagggcctcgcggaccaacccgggctcgcgcacagggcagctcacgtggccggggccccacaccccagcatcccggccggtacacgaagtacccacccaacactgcatgcatggggttcctgcctggcccctccccaggaggcgctggccccggtgaaggcggctctgccctccctgggcagccgggagatgagctggggcctgagtaggtgacagggctgtccctgggccaccgcctgcaggcctcacattcccgtcattgttgtgctcccttgggccagctgctgccgggcgatgggcaggcacgcatgagcgcccccacttcccctgggggcctcggggtgcctgctgacacctgtcaccctgcagtccctgcatgggtcggggcttcctgagggtctcagagcctcaccccagtgcctgcccaggcccggagtgaggaagccgagtgggcaggacaacaaaaggcctgagcccagccaggctggcgactgtggctgagtggccctggctgccatctgaggggtggcccagcctccccctcccacctctccggctgggacatggagggaaacctgtctcctgagcccccaccctgaggagcctggcttggccgctggcaagggccagggggcgtctccaaagcaccctgctgtgatccctggcctcgggggcctaacccaccctccccgctgctcctggctgggttccccctgccctctctgctgtcccctgccccagagccccctggatcctacctctcactcagcctggacctcgaagctgagaacacagacccgagagagcaggactgcctagccggcagccaggggacacggaggcctgcagggcggggcagggctggtctggtggccacgtggggagggtatttttagcctctgtctgcagggcgaggggagggtcaggcagtgagggctgggctggtgggggaaggagtgagatgccggctccttggtgactgttagctcagaaagcccactgaggccttccagggacttgtggcctaggacagacatcaggaagggctccagggcaaggacaggtgaaagctgtcgcggttgggctggctggtgggggcagggatgcagcttccccacctgtttcctcgtctacaagttgagtacagtggagcccgtggtgggggcctggggtcacagagaccctcagcccagggccaggacaccgacaggtgctgccctcgctgttgatgtcagcggcacctatgtgtcctcttgttctgttgtcacgtgggaaaacgtgattatcatgaataagcacaggttggtcagcagaggctttccgagcttggggtccatggtggcggtagggaaactttgcccagagaggggaggtgccacactcagttgccccgcccagctagcgtggataggggagatcttggggctccttgccctgctaccccatggccttggcctcggggctgcccaggacggctaagaaacagggtcacctaaaaatacagcagtggactatcagcctcccgtccagcacttggttcacggtagtcgcagggggaagctctcacgcctgggactgaaatgggctcagaaccacaggccctgaccaaggtcaggtgggttgagttggggacccaagaggccactggacatttctcacaccagtgaccagagcagagctttgtggctgagggacttcaggtgcatgggagagaagccctcagccctcagccctctacccatcggccatgtgggcctgagcagtatgaccatttccaggtgtgctgcgacctggaggaactggggagtattgggtctggctgtggcctcttgatgctactagggattgtcctaatgctcttacagaccagagaggtccaggcggcccccagggagacagaaccccactcctggtcctgagatgcacacagcctatggaggggaagctcacctacaaattactgccaagtctgcaaggtgcccttagggttaccttccatagagattccctgagtccatgcttcctctacagcccagcc

SEQ ID NO: 6042 - DNA, 1511 bp, Artificial sequence
  DNA replication origin
tcgccggccagacaagtgaccagccgctctcggggaagctgcaggaactcgtcctcacgtgccacagcctcaaagttctctcgcaggaaggcccaggccttggcagccacgcccagcagcccttgctgctccccgaactcacagatgcccaggcagttggcggcatccagttgctgctgcaggtagcggccgcagaccttctgcaccgaggggaagtgcaggcgcgcagccgtgcgtgtcagcgcctccacgttgccctgcgtgatggtcagccggcctgtgtacacgaagtccaccagttgtcccaccacggcgggctccacgtcccgcagctccacgcgcgcagagaagctctcggcgaagtcacccgcaaacatggcatggaagtaggggctgctgagcgccaggaggccgcggtggcatggcagctcccggccgcccaccagcagtgtgacgtcggccagcttgggctgagagcgcaggcgctgcaggccatccagcatgtcctgggcatgcgagggcaggtggaaatccaggtcatccacgttccgcaccatgacgccgtgcccaggggacctcagtagtccacccactcaagggaagaagtgcctggagccgcccgagctcctaggagagaagagagcagggtcagccaagtggggatggtctcatcctcctgagcaacccacccggtctgtccatcagccctttccaccccttgataaacacaggatgggcatcgaccatatgccagtcactttaccccccatctgcctcaagccacccccagaaccctgcaaggtagggcaggtgtcattcccatttgcagtgaggaaattgaggttcagagagggtgggagacctacccatggccaggcattcagggcagaacagggttggcaaaagaacccatgccctgggtgtcatctgcaaccctgggctacactgagcccaccccccagggaccccggagacacccaaactcccgggaggcgtcctccgtcccagatcccacattgctggggaggccatttgggggctgcagcagctcctgctcccgcggtgctcccaggtgccaggccacgtgccaagcatgcagagaagctgtgcattcaccactcagccccacaacagtcctggagggtgggtgcaatcattgcctcttttacagctggggagactgaggcacagaaggtttcagtcacttgcccaagatcacacatttaggaagtggtggagctggaatttgaactcagagctaggcttgggggcccaggctctgaaccctgcattccacgtggccgggtggaggctgctaaacagaaacggccagccaaaggcagcgttctggagggtttcgcgtcaccacgcccgcatggttgaagtcagcaaggccgctttcaggctcatgtaattatgtgcatgtggtttatgtccttctggtatcgcaccctaagacaaccatccctaggagagatcaagtctgtgcacaagccttcgacccgggtcac

SEQ ID NO: 6043 - DNA, 1499 bp, Artificial sequence
  DNA replication origin
cagcttgtgcactcgggcacacgccatctccagcaacatgcaagcacacatgcactcacatgctgaggcctgcccaggacacgcgggggctcagggcatggggacacattgctgttgccctgaccctggcctcccaccccacaggcaccactcgccctccagcagaagctggaggaggtcctggtggtggtgggcgggcaggcgctggaggaggaggaggcaggtgaggagcccacccccggccttgggaactttgccttctacaacagcaaggccagtgagtacccctcccgcgtccagacccacctgctgtctctctgtcccagcgggagccgctgtgtcctccttgcaggtggagcgcatgaggctcgcagaggaccgggagctgtgtgaggcccctgtgaggggcgtgcctgggtgggcctcacctgggggctgcagaggagcccgaggtaccccgggagggggaaggctggcgggcactgctgctccctctccctgcagccggagcccaggactctggtcccttttaggccctggagccggtgtacaggcctccacggccaagactgcaccctgtggggtgggcggcctggccgctgcctcctccccatgctccctgctcagtgcacctgccgagggaatcgagaccccaaggggagagtggggtggggggtgaaggggtgcaggcagctggaggagcgagaactcagcttctgggtcagcccaaacggggttgtaatcccggacctcaaacaggtgacctcacctctctgagcctcagcttcctcatctgtgaaatgggctcctgctgcttcctcacacagttgtagggagccctgaagtgggcactgaggccaggtctgccatttggcgggaaaggaggcatgaggggccccgcagcggctctggaggccccctgcgctggccccaagaggtgctctggaaagggctgatgcaggctggctggtgtggggccaccaggcaggtcgccaaccatctccttggcgtcagcggctggcaggctccaggaagcctgaggccagctgttcgggtcaggggctgaagagagggggtttggggctgacatcaggagggagcagctgtctctcagacctggccgggaggtggggacgctggcaggaagagcctgttgacggctgggcaacccccaccctggggtgacagagccatgagtcatggggacacggtgcctgcccacagtgccaggctctgctcccagggaggcctggaattccgcatctcccaaaaatggtcataaatagtaaacagagtcttcctaggggacatcccaaaggcctgtgtctcttccacaaacatccaaaatatgtccatttataggactttaccatttccacatttattgtcttgattttccaaagcattttctcatctcttgcctcagtttacctcttgtagctccgagaggcaggcctgacttgggcacattgctctgccccacgaccctaggaacaata

SEQ ID NO: 6044 - DNA, 989 bp, Artificial sequence
  DNA replication origin
ttgggtagaagaacagccaggcagctgccaggtgctgggctcagatcactggcaccccacccccacccccagccccagcccactgctgccctaaggcctgagcaggacagacgtgcagctcgcctctgtgctgggactctgcggagctgacgcagtgggtccctgacctcttaggcccctgccttcctccacatcccctcctctttgtgagaggcctgcggccgccggctctctccaccccgggccccgtctatcctcaggagccccaatcctcaccatcactacgagcggactgtcgcctgtcagaggggcctgtggtcctctatcctcggtccctgagccccacccacctgtgacagggttgtagcactgcagggccagggcgttgtacttgcaggcgctggagcccaccaggtagagccggccccggcagccggcagccgagaagttgctgacgtatttgagggccgggctgacgggcgtccagctgtccgtgtaggggtcatagctctccacctccaccacgtccagggtggtgcctgtggggtgagggcgggggcagttcagggctggggaggagaggggaggcctggaaactcaggggctggggctttgtaaggcagcaaagtggtgggaggtggggtgggctccccatttcacagacagggaagctgaggttctgagaggtgctggcacctcccaaggccgccccgccaggaagtggtgggggtgggggtggacactcgggcctagaaatgccccactcctgagctcgagctggggctgatgtttgggaacggggtggcggggagctgtcaggaggctgcccgcccccaggcccctcatgtgctgggagtcatttcctggggtgctctgaactggaatggaggatgccagccctgggagggcgggttgcgagaccctggagctgtaggcagctccctcccagtcccagatacaatctgggtgtggcagtgatggggacgcct

SEQ ID NO: 6045 - DNA, 1427 bp, Artificial sequence
  DNA replication origin
cagcagccctcgggggtgagggcgggctcggcctccacgtccgcctcccgccgccccgagccggggcgtgcgggcgcgggctgggtctggagcgggcccgggcgtcttaccggcggacgagcggccggccccgcgcggctctccccggggccccggggcagctcgttcccgggcggcggctccctgcgggcgcggctcctcgagggcgccccaggctccggggaccccaggcccgcggcggcggcggccagcaggcccgcgtagacgagcagcaggcgggctccggcggggcggcgggccggggccatgcgggcggcggttccctcgcggctccgagcgcggcgtctcggacgccccgggctcctcgccttataacgcgcttgaatcccccgcctcgcccgagaccgcgcgcccgcccgcgccccctcccggctcccgtgcgcgctgcatggggatggggggagtgtccgggcgggggagggggagtgggggagggggcacggggagcggggcagggcagggagagcgaggggtgttcccctgctgggcgcgtcccccctgcaactcctggttctgggatccctccttcgcgctgtccagcgcttctgcttcctggggagcgaggcgccccttctcccagccctggaccctcggccctcgcgaccccattttctttgcggggagccaggcgctgcctcctcccagacggctcgaggcatcctttctccccgctctgtcccccacgtcctctgcagggacccccgaggtaccccctccccattctcctggctgcgccccgcaaggcccaggcctctatgacacaggtggagcaaatctgagccgggagaccctcagggccccttctcagcgcccctttcccaggcgggaactcccctttccaggccgccctccgtccatggctggcgtgctctgagcgcagggattcactgttcttccccacctgtcgcacctgccgggacccagaagacgcagggagccaagaaacaactcaggacagccgccctgccctggtggggctgagcggggcctgggctgggagaactgacccctatcgtgccctagcgggggtgtgggggcagaccagaccggaagccaggctgcccaccgcccaccggaatcagtgcccccagaggtggaccagaccctgcaggcctcggagaaggtggcagagaggcctctgggcggccctaccaggaaagagccagccccagccccaccctacccctggctttgttatatcgcatgcccttttgactatctgccccaccactggacgctaagccgaggagggtcgcacacttggctcgcttgccccacccccgaggcacctgcccctggtgggtacacagtgctttttgttaaagaacgggagaaggctccgctggaaaagtaccttacactcacac

SEQ ID NO: 6046 - DNA, 1426 bp, Artificial sequence
  DNA replication origin
ggcgcgggcgggcgcgcggtctcgggcgaggcgggggattcaagcgcgttataaggcgaggagcccggggcgtccgagacgccgcgctcggagccgcgagggaaccgccgcccgcatggccccggcccgccgccccgccggagcccgcctgctgctcgtctacgcgggcctgctggccgccgccgccgcgggcctggggtccccggagcctggggcgccctcgaggagccgcgcccgcagggagccgccgcccgggaacgagctgccccggggccccggggagagccgcgcggggccggccgctcgtccgccggtaagacgcccgggcccgctccagacccagcccgcgcccgcacgccccggctcggggcggcgggaggcggacgtggaggccgagcccgccctcacccccgagggctgctgcatcgcctggcaccggggctccggggctccgcagagactcagggccgtgtagacgccgccctcagcccggcggggcagccttgactttggctttggggtagtttgacttaaagcaaggttctactaggtcggcgaaaccccccttttcttttgggacagaaggaagttgggaaatagataaagtgtaaataacttgatttgaggaaattgggaagaacgcatttgtaaaaagtgtaagcgaattactgccaccgcccccaatctatttggtgcaattatctggaaaacaaaaagtgttttcctgcggatctggggtcggggggctgtgcagggtggggaatgacatgtggctttgagtcaagtgatcaggtggcttttggccgtgagtgggtgatcttgagctctgccctgccccctcctctccagggttttggagcctggactgctgagcagagggtggtccggttggggaggtgtggcccaggcctgaggaggggagaacttcagaggagccctcagtgtggccgggccttgggtcagggagacagggctgccccagggaagccggggtgggcggccggtgctgtttattctgaagatgctcaggggcagtagaggggagagccaggaacgcatctactagagaggacaggggtgcagccaggcctggggtcccccagagttctctatcccggccccatcacacccagccacttcccagggactgaaggcaccccctccccgtgcagttggccaaaccacccaggtgggcacagcagccaaatgtcagggcactgtcagcaggaggcagacggggctcaggggcttccaggtggagttttggccttggaccctgtttgtgggggacacagtgacaccagaggtcctcccaggctccaaggcttgtttctgagagaccccttgtggctggaaccagggcagctgcccaatacccacccccattgctggggccgtctcctgggacgccaccttctgcctgtta

SEQ ID NO: 6047 - DNA, 2807 bp, Artificial sequence
  DNA replication origin
tgggtgccaggctgagctccacctggtgctgccccatacactagcctctgcctttcgctgggctctcctgacttccaggcagggcataggcgctggtccctgagcacccgccatactgagtggccaggtccaccttcctctgtgaagccttctcctggccatggttcccaacccccagccatccccagccctgacccttggcagacatgggccaagatggggcagagactggacctggccagctctactgtccttgagtccagcccagagcaggtgcctccttgggtgcccgccgaagtgttgaggttggccctgtcagctcctcgggacaccctcccaggccctgctcacagcggggtgtgtgtgtcccagccggtgcacacccctacctttcagcagcagctggaactccttcagcagcgcctcgggtgggatgatggggcctggggggccctggggaccgggaggcccagggggccctggcaagccgaactgaaagggaaccttggcagtgaggacatgtgaggagcaggctgggagccacagcatcccctgtgcaagctcttgccactaagaggcaggcaacagagctccccagtgggctccaacctccagccaaggatctacctcagtgaaagcttctcctggagtgagtacaaggactgtgctggaggtgggggccctcggggcggggctttggcagggaaggactctgctctgagtggggaggcagagggctgaagcccgctcctgcggccaggcctcgtggagggaagaagactctaggctgcttttggggacttgcatctcagggtctgcactgggcccgagtccaccatcagcaggtccccactaggctgggttgggacccgaaccagaagccagtgagccccctgtggggagaagcttagggcagggccaggaggctgggcagaggtagaaggccaggccacgaggacagcgcggcctgtgcacctgcctcatgcactccgagctggccttccatcgtgtgttcagatcccaggcaggtgatactggcccccaggggacagagaagcccacaccccgtattttccattttgggggctccaagcaggaggcagcaccaggaccaagcaccaagtttctgcccaggccaagacctaaggctgagtgagggtgagagggaccctgtgcccctagtccctgggagccaggcactcctgcaggcccctccagtgtggacaaggttctcaccacagcctgggctagcccagcctccctggcctggatgcagagggaggagaaaagagggagagcctggcattttaggggtgtggggaaatggttgggaccaggcccctaactcggggctccccctggggctgcctgggttctctctgttctctgtccccaggccgaggcgtgaggggtgtgctattggaaatgttcaggatgtaggagtgggagtggatgaggagcgaggaggcggaaccccccacggcctggcactgacgggatgccggcctcaccttcagcttcttggccttgcccctgctcctcttcttgccattgacacccttgtcactctgcctgacgaagagcatccaggcgtcccgggggtcgacgctgtgtgcacgctcagcggtgggctcctggaacacagccagcccagcagggcggttggcctcactgggctcctaccaagcaggtgggacactttgcaggaggtgactgtgtggccttctgtactctgggaccctggtccttgtcacctgtggtgccctcaaaggcagctcccaaaggggccccaacccctcacagcttctcccccggcccgtggaggatgactcctagggaacgggccacacctcggcctggacttggcactcatgggagaggcagacccaagatgcctggagggaaaatggggtgcagggcttggatatcggggtgaatccccgtactgctgggcctccttcctccagaggagctgcagtgatcacaccgtcctccagtcaccaggaggatccgaccactggagcacccataggtgctcaggaagaagcaactgtgattatcagggagcccaactactagccaaccctcctctgtccatcctcccccagtgtcagaagttctaaggaggcaaattcagctctcacagctgcctcgggttacagtccagtgggggagaggaccaggcgagctgtcatgacgcgaggcctctgtgtgagactttcatttcctcagcacttctgagacactgacacatggacagtgatgcttccggaagttcccattcctgtccgcgctgcatcctgactgatgctgacactgagcacagttttgggagggaccttcctgggagaggccttgggctatctgggctccaggcaaggctgccagctgggaaggaaaccggcccaagagggcttagatgaggtcatgggtgctgacgctgggggctgacggaaggaccctgggattttagagctgactgggcccttttatcagagacaaagccggctgccaagtcactgcctttggttcctggctgatctggggggatgcagggccttcttttgggagctggctgaccaatgcgcaggccagggtgttgtggtgggaagatgggggctgcggtgccgaggagcctgtggttgggcggagaaagggttcaggggcccagggccctcagcgctgctcagtgcttccttgtgccttagagggtcaactgcaccacctgctggctgatctcccctctaccccctcccaggaccctcttccacttcctgtgtgccctccgtggaaacatggggcgagga

SEQ ID NO: 6048 - DNA, 1289 bp, Artificial sequence
  DNA replication origin
caccctcggcgtcgggctgcgaggggcacggatggtcaccccggctcccgcccggccggactcacccgccctcccgcgcgccggcactcaccaggtagtagacgccaagctcgtgcagcgcgcgccgctccaccaacgcgtcccggcgcaggcggcagaggaaagcggcctccacgcgcggcgcccgcggccccggggccaggggcgcggccagcagtgccagcacgtcccccaccacgtcgtcgtcgtcctccccggcggtggccgagaccggggcgaggctcgcagcgaccggcccggcggggccacacgtacagggttcgggctccgcgcgctcccgctgccgcaccgcacctggcacagagcgagcggtggccgcgcgccagggacccctcacccgcccgccgcgtgggtccagccctgaacgacaggtgctagcgagaccaggggcctgccgggcgcaggggtggggcgagggcgacgtcccctcggcctgaagggcctcggagtctttgcgtcctgaccctgcagcggctcccgtttccctcaagatttgggaagctcgggcagaagtgccccagcgcccttggcctccagcctcacctctaccccacccacattttccaaagacgctgggggtaaaataagcgattgcagctttactggaagtacaaggaggttcttcagcgcagaaggtgctatatttaaacgaacaggacattgaactaaaaggaaaaaacggctcaattctaatgactaatgtgagccgccgctctgcaggaggcctcagtgtggactccgcggctccactcagccctgcctcctccagggcaggctgccccagccctggccagtggtgactgtgggtgccaggctgagctccacctggtgctgccccatacactagcctctgcctttcgctgggctctcctgacttccaggcagggcataggcgctggtccctgagcacccgccatactgagtggccaggtccaccttcctctgtgaagccttctcctggccatggttcccaacccccagccatccccagccctgacccttggcagacatgggccaagatggggcagagactggacctggccagctctactgtccttgagtccagcccagagcaggtgcctccttgggtgcccgccgaagtgttgaggttggccctgtcagctcctcgggacaccctcccaggccctgctcacagcggggtgtgtgtgtcccagccggtgcacacccctacctttcagcagcagctggaactccttcagcagcgcctc

SEQ ID NO: 6049 - DNA, 2051 bp, Artificial sequence
  DNA replication origin
cggtcgctgcgagcctcgccccggtctcggccaccgccggggaggacgacgacgacgtggtgggggacgtgctggcactgctggccgcgcccctggccccggggccgcgggcgccgcgcgtggaggccgctttcctctgccgcctgcgccgggacgcgttggtggagcggcgcgcgctgcacgagcttggcgtctactacctggtgagtgccggcgcgcgggagggcgggtgagtccggccgggcgggagccggggtgaccatccgtgcccctcgcagcccgacgccgagggtgccttccgccgcggcccgggcctgaacttgaccagcggccagtacagggcgcccgtggctggcttctacgctctcgccgccacgctgcacgtgggtgaggcccggggcgtgggaggatcgcccgctctgtcgcccaccccgccgcccgcccgcttgaccacgtcccaccctcccccgcagcgctcggggagccgccgaggagggggccgccgcgcccccgggaccacctgcgcctgctcatctgcatccagtcccggtgccagcgcaacgcgtgagtgtaccccggcccggaccccacacccgcattcgctcggcctccacaagctggaggtggttaaacaggcactggacggggcttccgcccgttcacaccccaccgtggcctaggtgaccccacaccttcttccaggtctcccggtctacttctgcccctatcaggccttcccttcacagcaactgggagctgttaaaaatgacctttccagctgggcgcggtggctcacgcctgtaatcgcagcactttgggaggccgaggcgggcggatcacgaggtcaggagatcgagaccatcctggctaacatggtgaaaccccgtctctactaaaaatacaaaaaattacccgggcgtggtgggtgcctgtaatcccagctacttgggaggctgaggcaggagaatggcgtgaacccgggaggcggagcttgcagtgagcagagatagcgccactgcactccagcctgggcaacagagcgagactccgtctcaaaaaaacaaacaacaacaacaaaaaaaaacctttccaggccactccctgcccagaccttcacctcctccccaggtcctaggaggccgggctcctcctagcctcccaactccttcccacctcagggactttcatcttggggctcgaagcaccagtgttacttcaagaggcctctccagacagctttctggaggccccctcctcagtcgccctcccactcctcacccgggaactttcttccccatgatcgcatcccttgctcctgcaccatctggcccacgagtgcagtgactgtgagctccctgtctccccacacccagaagggagcccaggtacagcggagataccctgcgggtaggatagctggagcagacttgaatgaatggatcaagtccaaaacttcttagtctgcctttgaacccccagagtgtgttggcctgaactaacttagcatcacctgccaccacatccccacttccggctgcatcagccagtgtcctgtttcccatcagagccagggctttgctgcctcttgctgggccctcgccttgcctttcccaatacagcaagcatgcctctggccctgtgtccttcctcctcttggggactcggttcagacaccacctccactggaagacctggccagggtcaggcactttgctgggcatgtgttggctgctggcaggattgtgtgtcgtaggtgaagttggtggggtctcatggggcaggctgaccctccctctgttttgggtacagctccctggaggccatcatgggcctggagagcagcagtgagctcttcaccatctctgtgaatggcgtcctgtacctgcaggtgagtgcggcaggcttgggcatcgaggggcaccgcctgggcatggccacgggtggctgggtgcagaagggtgctgttagatgctcaggatcactgggtcgggtgcagcaccctcagactccaggcctgggagagggtccaggacatgccaagttctcacttt

SEQ ID NO: 6050 - DNA, 949 bp, Artificial sequence
  DNA replication origin
ccgagcgctcgccgcgcccggctgccggtaagcggcgttgccgccgggccggccagggaagggagagcaggcgggatgggggcggcctgaggcccggggcggctgaggcggcgcccgcgctgggaggcggcgggcggcgcgggctgcacggggcctgctcctgcctggccaggccccgtccggcccactggcggccctgtcggaggcccggtcgctcgcggagctcggagaggccgctccgccattttcgctacgcaggaaggaaagggccgagccgtcgtggccacggcccctctgcgtggcggtgaaaggcgccggcgcgaccgcgtgggccgacccgagggaccggctctgaacgcccggcggcaccgcgggcccccgcgccccgattccacccgcggcctgggctgccttgcgcgtcgcccgcccgcggcttccgggccgcacttcacccgcgggctgtggaacggccgcgttccgggccggtgcaagttcaggggcttggcgtttttatttgcactggagattgaattaatcaccatcttaatccttcgtgtttttgaagcctggaagacaggatgcctcctctgtcatcctgtgattttgtgataattaacagtagttttttttttttttttctggtccacgggaagttccccctctccttgaagttaaggggtccgctcatctcctaagcgctggcccctgccagtgggagtccctgtgggctgtggtttgagctcagcatcctagcagcttgaaacagggcctgtgttaatccctgcgtcctgtgggttacagtctccgggtttcatctgtcaaaacgcgtgaatatttcatatgcaagacttccagcttgatgttgtagtttagggccttattacaaaatttaacttgggggcagaaaacctggaaaacttaagacgttcagatttccaggcccacctca

SEQ ID NO: 6051 - DNA, 1341 bp, Artificial sequence
  DNA replication origin
cgcctcccagcgcgggcgccgcctcagccgccccgggcctcaggccgcccccatcccgcctgctctcccttccctggccggcccggcggcaacgccgcttaccggcagccgggcgcggcgagcgctcgggctccggcaggtccccgaagaggtccatggcggaggctgggtggaggcggcagcagcgacagacactcagcccgcgagcagcggccgggctccacaccccgggcgggcggcagcagcgggcgggcgacgggcaggggcggccggcgccgtcagtcacctgcagggagagtcccggacgccaccaatcggcgcgcggcgtggcccggccgccccagagggctgcgcgcgggctgggcggggcggctgggggcggggcggtgcgcatgcgcgtgggcccctcccgcgccccgactgcgagccgggcggacggcgccgtctgggccccgcggtgtttcccgccttggcgaaccccgggcccctcctgcttttccttggctgggggtgtccgatttctgtcaagtttcgttgagttcctgtccaagaagccctgtccagagagaaacgtctgagctcaagggcagcccctgatgcctgggaaggctttctggagctcttgccatctcttcggctcgtcctttcaccacggcgtgcctggtttctggcctgttttagagactgagaaaccgaggcttggatggagcggccctgggcgtcaggacggaaacctcaaaagatgccggagggaaaggaggcattccctgacttgtctgcacccactggtgtctgtggggagcggagaagaggggctcctccttaatggtgtccccctccatgcctgtaaagagaaaggcggccactgacatcggggagctggcctggttctgcagccaggacttggggttggtctggcacaaacagctaggcctgggtgttctctttgaatgtgaacaatttcataaaacaccaacatcaggccgtgatacagatcaagagaaaaaaacagaccactgtgtaatcaagtgtgaacacagacaaaacaggaacactgtccaagccacaaaagtgaccacattcccctcgtcttggccaataagagtgattgctgcttctttaccattacatgtttagcctttgtctcgtcctcctgccgtctagataagcttcatcaagatatccaatcatggaatcctcctcttcctgacatccaatccggagcaaaggcccgtttccataaatgtttccccaaatcaactaacacaaacccaaatcttacacctccgttccaacatcgtttacccaagttccccaggttatgtggtctccctccatgca

SEQ ID NO: 6052 - DNA, 1440 bp, Artificial sequence
  DNA replication origin
gagtgggaggggagtcagaggcctgctgcggaggcccaggttagaaacgaggctgccttggactcggtcggtggcaaagaagacgacacgtggaggcagggcttagaagtagagctccgccgggcttggtggctcacgcctgtaatcccagcactttgggaggcctaggcgggcagatcacgaggtcaggcgatcgagaccatcctggctaacacggtgaaaccccgtctctactaaaaatagaaaaaattagccgagcgtggtggctggcgcctgtagtcccagctacttgggaggctgaggcaggagaattgcttgaacccaggaggcggaggttgcagtgagcctagatctcccccactgcactccagcctgggcgacagagtgagactccgtctcaaaataataataataataataaattaataaataaaaataaaaaagaagaagaagtagtgctcatgggcttgactgataggacgtgggatggcaggaagagggtgaacttgagggtgacatctagatttttttgctcaatccatggggtaccaagaagtggtaatgcctgaggatctgttgttttggtggtggtgtgagcccatctgacatctaagtgcagtcactgagtggacaggaggatacagaggagccagccgcctggagaggggctttgaatcaagggcatgggattggcaaaacgggccagatggtgtcactgggtgtgggggcggcagggaaggctgaggacagagccttgggaagaacacgtccagttggagggcggcagggaaggctgaggacagagccttgggaagaacacgtccagttggaggtcggcagggaggagcattgagtacaggggactgaggatggccgatgaggtagaaagaaggctggtgtggtgcccttgagactggagaaggagcctccagatggatgagtcataacccacgagaagtgaagctgacatgcggacatgcccactgggttgggaaacatgctcgttactagagattttgactgtgcagttccagtggaagggtggacaatagcttgattggaaaggaatgaagaggaatgggatgcgtggaagtggaggcagtaagtgtagatgacgctttcaaggaattttgctttagagcattgagacagaggctaacagtatgtcacatccagggaggttcttccgagtaaaggtattcatattacagcccgtttgtaggttaatgagaatgatccagaagggaggagaagctaatggtgcagtggagagcagagtccctgagcaggtgagcagggatgggggcccatgcccatgtcggaagcgggcgccacactgcttcatgatggaaggcagaacgcctgggccagggtgcaggcaggtgtcacagagaatgtccttcatgaccacatcctagttcccagaacctgcgaatatgc

SEQ ID NO: 6053 - DNA, 1366 bp, Artificial sequence
  DNA replication origin
ctctccccctgggctctgcgggtcaccagccccgcccccctctgagctcccccatctccctctagtcccctttggcccccggggccccctccctcccttccactgccccccgcccgcctccctcctcccctcctcgtcctccgcgccccgcctcccaggcccgccgaagctgccgtctggtcctgtaacttgatgcccgtgacagttggcagctgcggccgcttcggcggagaaaagcgagaaaagcggcggccgcgccaagagcgacaggtgttggccgcgcctttgtctcgcaccctttgtccggcgggcaggcggcgggcgcttgtcccggccagacgcccgcgactcccccatcgcggcgggccgcccatctgctgggttcctcttggccgcgggcggggtgcgtgggcggtggggccgcgccctcgggcagcgtcctggggacccctgcccggctcctgccccggcgtcagtccagacgctgtgtggaggagccggaacgggagacgccttctcggaccccagccggccgactaccagcctgccccgcacagcacctgccttcctcagtccccactactcacccgggctgggatcgtcagggtctgttctgagcccctccaggctataagcgtccctggacaagggcacagtctgacctaggaccccctgtccacctccccgcacccccagcagagcctggcctcacagaagcgctggtaggtagggaaggtgaggggtggccctggcaggatgggctggaaggccgcgtgggaggggaacatcacgggaccgcagcagctgagcggagcggcaggactaggctgcagaccgaccgccccactgcccctagagaggtctgacaggcctcccatggcccctttacttgcgcctctccaccagagggacccctgcaggcttcctgctgggtgagtttggtgagaggtttgaaagctcccaaagtcacctcactgacctctgtaattacctgggaccccctcccgctggctcccaactgtccctgctctggctcttggttgctctatgagcagggtcctgagacttcccccagcccagcatcactcacctgggtgtgaaactaccgctttacttcacacactccccacctgcccagtagtggggctggcagggtggggctggagtggtggatcccaaggaagtggattattagcctgtgactttactctccttcaccacttagacatcaccccagggaaggagaacctccactcccccaagtggctacaatgacatttccactacttcgagaaactgtgatagggaaaaataaactcactgatatttcctgtactcccaagtttgcaaactgatttacactcct

SEQ ID NO: 6054 - DNA, 1646 bp, Artificial sequence
  DNA replication origin
ggcgcggccaccaatgggcgcgcggcgttcgtaggccccgcccctcatgtatgcagatgagacggagtcgcggccaatggcggaggccgggggcgggcgcggcgcgcgcggtcacgttttccactatgtgacagcggcgactcggccgcggcggaggcggcggcgctgaggggatacgtgcagctgtgggcggcggcggcgggcgcggggccgggcggacagagccgcgagtcggcggagggaccggcggacgggctgacgcgggcgcggccggcggtaagtggcgcggcgcggccccgctgcggcttacgtaaccgccgccggcgcgcgggcctcgggcaggtcggggtcccagcgccggctcgggcagcggaggcgccgccggaagttccttgggctgctggactcctcggcttgaaacggcgccggcgtgggggcgtgtgcccttggccctgtcccaggtggagagtggtcgagccgcgcgcagggtgcgctcgtttgaactgcggtgacaccgagggttggggactcgaacccccgcttcgcagctcaggagcctgaggtccgaaaggtgaggcagcgtgtgtagggcaccgagctaccgagtgactgcgcgcgggctgcggttccgtgggcgattctcttttgggaaccctccctcccctcgcatggggaaggccaaggaaaccaagggtcagcgcagccggccctgggatctggaggaccctcggggagctgactgcctcttctgaggccacagggctaagtcctgggctggggaagggccatggaggggcgctgatctaggagcttttcctggacacccacgggtctcctggaatgggtgatcagagggacaaggaagtcccggtgccaagccaggcctgggaacctgagggcggggagaccctctaatgttcgcccctttgcctcccctggaccaccctgtattaattccctttccccggactggatagaagggaatgggggtgtccactctttggtgcagcagtcgcgcctaccttctgggatgtactttggctgccaagtcccagacatagaccagggggtgggaggtggcctgcttcccccttcaggaaggccagggtaagggatgacgagttggttgccagggtttctgtaacctacacagaaggaacccgtttggaaagctgattcatacagaacaacagagccagaaggcaccctgaaaatcacccagagtaacccctcagcctgacagatgagcaaactgaggcccaggcccaggctgtctgcaggatcttcccatcgtcctggggcaggatgagcttcagaggttcagtgatggcctccacttgcgtgctgaatcctgggtgggctggaatttgggaggaagggccttaagtccgggaaatgtgttaagaaccccacacggtggctaaagccccacatggacgcctctcacctgtatatggcacagcaggactgctagacttcttggcccaccctctacccccacctggggcttctggtcccaggctgggtgtgcctgagaagaaaacaggactctacctgaaggctttatttggaaattgagttttaaaatacaaggtgaattgatttttgtgtgctatatgactataatgaagaaagggactccgttt

SEQ ID NO: 6055 - DNA, 1436 bp, Artificial sequence
  DNA replication origin
gcacatggaactccatgttcacctcgtcggttcctcaatggagacgcggcgcgttcgtgctacccgtcgtcctccctagtggtctcatccacttccggcgtcggcgccttccattcactacgccctcaagcccgccagctcggggagcgcggagtggcgcgtaccattgcgggcgggggagctgggcgcggggctcctgcgcacctccggccggcctggcagacccggcgcgccgaagccggacgagggagacctccacctccggccaccggccagaggcgcgcccccagcggccagggccgcgggaaagtccgcgcggcatgcttcattcacgcattcacattcattcatttactcattcactcactcattcatcgcggggccccggagcagcccaggagaaggtggcagcaccgccctgcagcagctccgggggcacgcccacccgggcctctgaggtgcctgtggtcgacacttgtcccggcagctaccaagtgacctttcttatttttgagaccacgtgttgcaatttttggttcaggaaatagagtcattgttactctggggaggtacaaaagaaagaaatgatgttgtccctgcccccaagcgcatcactagggagaaaggactatctcataaaaaggaaacttaatcaaatgctaaattgggcgatgtgggctataaattaaccagagctatccccacaggctccgtgagaaaggcagcacttccaaggcgggtaagatgggccctgagaaagggacgccttacaacggtgcaagccgtagagacgcaggagccaggggtaggaggttgtcctgggagacagcgcgggaccctgcatcaccttgtttcggtaagcattgtgtggggcatgtggagcctctaaacttccatttaaagtgtcaggagaaagagtacaatttccccgggtctgggtagaagcctgagacttacaggacaggaaggagctttcaggctcccacgcagcaggctctgaatgtgtaggctctcatggggaaggcgagactgtccaagaagctggagcccgcagcatctctctttactcttcttgttcttctttacctggactcacctggggaccagggatgggacagaaggaaaagttatgaacccacatcaggaattcctgagtgtgataactccttctcttctacttgacaaggtgtgtgtgcaacttctcagatgcaaaccagggcaaataccaagttcatcggggcagcccttcccacagaagccccgggaggcctgcatgctgttcacacactcagtcaggtggcccctcctcctgttcctctgacattgacacctcgacacactccccgccccctctccctaacacatacacacacaaatgccaagcaaacccaggcccggctgctgcgccctgcacacacccaaaggctcttttgttt

SEQ ID NO: 6056 - DNA, 1436 bp, Artificial sequence
  DNA replication origin
cagcccatgttcctcctcctctcccattaggattcctctgaccaactatgcggtagtgactggacagccaccgtgagctgagcgccatcactgccccacaaggataaggcacactccctgcacctccctcctggggctctgcatttcagtgggacagacaggcctgggagaataaaggttttggcagccacagctagagtgggctgggctcacactggctcttgttccctctgggtcagaggacgggtacccgcctacttcacgggacggtggtgatgcggcacattgtccccctcccaccgggctatccacacagcaggtcctctccccacacactgtccaggacaggctgtaagtgctgcaccagctgggaggacatgaccagggctggcgaggccctgggatgtgggtggattcgagagcatttttaggcactgttttaacacagaggcacacgctccaggagaccacacgttataagctaaggtaggagggcagaaccagtaaagcaaagtctgtgcaagaataaggcacccaacctgttgaaaagagtgagaaacagagcttgaggaccatcaccaggtgaggtcatgaggccctggaagtctgcaagtccaacctgaatcctaaatcccaaaacacacctctgagttcccacgtgcccttgggtccaccatggaaatgggtgctgcgcccgctgcagtgacgctcctgagagttaccagggagttaccacgagccttgacaggtcccactcaacaggggatgtttgttgtgcaatttctatgtaccttacccagtgcagatcaccagagccatgctaataagcaagccagggtctccgtcacggaggagcacaccatccgcaagtggaaaaagctacagagaccaccaatctcaacgtagggcaggctgtgcagctctgttacagtctttcctgccaagtccccctacagccgcctccactaaatccacccgcaggcatttattaagcacccaaaatgtggtatggagggaaactttggggcagaagggttgtataaaaaatattatttccattctcccaggatttagggagtgccttccacgtgctacatacttcagggcaagcgagaggggttctgcaaggttagacgaggcaggagtcacagaagcagctctgccagcaataatggaagatgcactctaaggaaatacaagggcaggcagggaagaagtaagaatgctcctgagggcccggagcctccttgtaagcggcggcccggagccgggggaggggcaggacctcctcacggagggcgccgcggaattgggcctacaggccgggctcccaggcaggggccgcacagaactctcgccccgaccccggaactgaccccggcccccgacccgcaccctgtgcccggcccacacccggccctgaacaggtccccgac

SEQ ID NO: 6057 - DNA, 3585 bp, Artificial sequence
  DNA replication origin
agtgcaagaccagcccctccccgggtcaaacggcaagacagcatggaggcgctacaaatggataggtaaggctggctcagcagggcagttccagccacacagtgtgttctccagtgggcatggtgcctccgctaagagaagggggagggaagcagcacatggtgctggaaacatgctattgaggaacaaaaagtgagggtaggccctcgcctcacaccataggccaacagacatgtcagatggatgaaagagaaaaaccatgcatacatgtaaaatacatcttcacatctatgggaaaatgttggactgcatttctctgacccctagattgaagactttctaagcgtgaaaacaataggggaattaggaaaaaataggggaaaaaaattaggggcttaattgcagaaaaattaaaaatagaaggtgatcaaaatgttataagcaggctgggcctggtggttcacgcctgtaatcccaacattttgggaggccgaggcgggcggatggcttgaggtcaggagtttgagaccagcctggccaatgtggtgaaacccccgtctctactaaaaatacaaaagttagctgggcgtggtggcgtgtgcctgtagtcccagctactcaggaggctgaggcagaagaatcacttgaacctgggaggtggaggttataatgagctgagattgcactgctgtactccagcctgggcgacagagtgagactatctcaaaaaaaaaaataaagtcataagcaatataaagacaaacaacagataggatggatcagagtgggtttcagatcaaataagaggcagggattggaggcaggagtagatgtgtttttctaggagttttgccacaaagagaagggaaggaataagactagaaagtgggaaaggtggtgtcaaggggagttattatttttctaatgacgggaatgatccagtggaaaggggaaattgatgacgtaggcgacgtgggacaggggtttggtggagcagagtccccgtgtgggtgtgggaacgggcgcggaggtggagtcggcacatggtgtgatgcagattcttaaggtgattttctggtacttatttttctcatgagccgtaagagggtctgggggaagaggagtgtcagaggagagaggggctgggtgaagtcgctgtgcacgagagtgggctagtgaagagactggagcagaggttttcctctaggggtgatcctactttggggacactgggccatgatctggagacattttctggtgttctgatgaaggggaggggttagggcagggcagttgctgaacctcctacaatgcacaggacagtctccaccacaaaggaggatgggctgcctgcccatagtgcctgggcggaggccgtggctgacagctgacttcagggcagcatctggtggacttgggcgtaaagagacagaagatggtgtggcggggcctgttctgcagctgcagttggctacacctacaggcactggggggcacaggctgtattaaacagggctcggctgtgccaagcaagtgcaccgagagagaagggaaggagtaggagtatgtggaagcgccacggtcatgaccaatgtgggatttatgccagtgagtgagggaggagccctcggggtgaaggtcaggaggaggcattaggattgagaggctgaaggtgccggatggatagaaggattgttggagtcaggtcctagggcggtgagctgggaatatagatagtggtggtaaaggagtggggcgcttggatttgaggttggagcttgctgttagtggtagtgacaggggtgcccctgggagtgggcgtcgagtgtgggaggtgggatcatcccagcagggttcagggacccaaggccaggattttggaaggatcatttctcaatacttgaaatcacaagtaagacaggagcaccgttggtgagagtggcgggtccaggaggactgggtgggaccatgggttggcagctgatggcagcaatgatggggtcgagggtgacaagatttaaagttggcagtttttagggagagtgatctggaagccgaagcaagcataaggaaattactgaccttccctctgggcccgtgacaagaggccggtgggaggagcagcagctgcagctgagggctgtggggaagctgtgtcctggagagcaaggcgggacagagagggcctgccgatcacggcaggcacaggggcgcaggtgttgaggaggtggatcgtgggccacagtgagggtgtgctgggagcgtgagagacgagggacgggagcctggacttcctggtactgacagagcagcgggttcgaagtgaggttggtcctggcggagccacacaggtggttgttgagtgtctcaaggacccagttgaggaagtcgaggatgtttggggcaatgggtgttattttcagaggtcgttcccaagtgtctacattccctctggaccttgtgcatggcactgaagcaagggaggattttggtgtgtgtgtgtgtgtgtgtgtgtgtgtgtgtgcgcgcgcgcgcgtgtgcgtgcatgtgcttgtgtgtatgcgtgtgtgtgtgtgtgtgtgtgtatgcatgtgcacgcatgcagcactgcgataacggggcagggggagttaggtgattgcttaaagcacaagtgtgtagggaagaaacaaaggcaggaggggccattaaggagcctgtagagtgtttgggtcgggggctcacatttgtacagagtgagctgacagtggcctgagtgaggaggagtggggcagctgtaggtggggcagttctagtaggtggccctggagagcatgagagagcccttgggtgaaggctgtcaccaaggaggacaaggtctggggctggagggccaggctgttggacgctgacttgcccagaatgatgtggacttgggtggagcgcagtgtgtacgtggtgctgagcgggacatagggcagccactgtgactaggagttgaatgaggggcctccagctggctgtgtgaagagaggtctggggtcagccctggtcagtgggaccccaatgtggcccctgccctgaggtttgtgacccagggcaataagcgcctccaggtagaaagcagcaggtgaagggctggtgtcactgagagcgcagtcaggggagaggcggaggccctgagggtctttgtgcagtagagggcatgacgaggctgtggggacgggaggccaggtgtggaccaggaggcctgggcagcacagggacgtggggaagctgggtgggggtggagggcgaggctcacagggactcaggcctggagggcttgcagaggacactgtttgcagacagtccatcttagcttcagcgggtagcttgagatgctgttctagctagagatggttggtgattagattcctctctgccgacctctgacacagtttcagatgcttgggactgatgaaaatgtgtaattctaatttaatctaatttctttttatttaggtcagggagtggtaaaaccgtttcaaatgtgattacagagtcacacaattctgacaatgaagaggatgatcaatttgtggtggaagctgcccctcagctctc

SEQ ID NO: 6058 - DNA, 1674 bp, Artificial sequence
  DNA replication origin
ctccctcctcaatctcctgagtagctaggactacaggcacatgccaccatgcctggctagttttttttttttctttttgtagagatggggtctcattctgcttcccaggctggtcttgaactcttggcctcaagcgatcctcccacctcagcctcttgagtctctgggattacaggtatgagccaccttgcctggctaggatgatttcttgagcaccgtctttaagtccacaaccaattgcctctttagacatatctaatatacttttcactgcaaccgtttagtatgtttttttcgaccactgtgtttttaatttcattttagaagttctgtttaatttttttttcaaatatactggttctttctgtgaagtctcttggcccttgttcacattttctttttttttttttatgatcttgttgcatgccaacttcgttcacattttcaggcttctctttactacttaaacattaaagttgaaattgacaccttccccaactgggcactccctgcgcccttctcctgcgtgtgtctccccagcctggcactccctacacccttctcctgtgtgtgtctccccagcctggcactccccgcgcccttctcctgtgtgtgtctccccagcctggcactccccgcgcccttctcctgtgtgtgtctccccagcctggcactccccgcgcccgtctcctgtgtgtgtctccccagcctggcactccccgcgcccttctcctgtgtgtgtctccccagcctggcactccccgtgcccttctcctgtgtgtgtctccccagcctggcactccccgcgcccttctcctgtgtgtgtctccccagcctggcactccccgcgcccttctcctgtgtgtgtctccccagcctggcactccccgcgcccttctcctgtgtgtgtctccccagcctggcactccccgcgcccttctcctgtgtgtgtctccccagcctggcactccctgcgcccttctcctgtgtgtgtctccccagcctggcactccctgcgcccttctcctgtgtgtgtctccccagcctggcactccctgcgcccttctcctgtgtgtgtctccccagcctggcactccctgcgcccttctcctgtgttgtctccccagcctggcactccctgtgcctttctcctgtgtgtgtctccagggcacaggtgtgtcaactccatggcagccgggacttttgtctgtttatctcacttttgtgtccacttccttgaacagggctcagtaagccagcactggttggatagacagtagcttcatattcggtgtctcatcagtgtttgaagcctgtggaggacccttttgctgactctccttctgtgtgcactttgctatttctgccccaatgagaggttatttttcttggaacttgatctgtgggaattctttgaggcccaggctgaagtagtctctagaaaggaactatatttgcttctgccagttgcttggggcactatcaacctagaactgctgtcacttagcttctttgcttgagagttttcagaacactaaagtgtgaatttcggtgggatttttgatctaaacttcatgtgaggcccaggcctgggctaaggttgagatgagcaggcttttctgctgagccagtattttagttcttgttacttctatctccacctcctcctcaatg

SEQ ID NO: 6059 - DNA, 853 bp, Artificial sequence
  DNA replication origin
ccctccgccatggatgcttccgcctccgcggccgcccctgacccgcgcacgcccctcgggcaggaagcagaacgacccgcgaccacttccggcgccgagggcaatggggggcgcgtcggggtcgcggcttccggcgggcgcgcgccggcctcactggtttccggggccgcgcaggggccacgcctccgcttccggcctcgctgtctagcagggcgctggctggtcccttcgtccggcgggaacttcgcggctaaccgactctctggatgccggccgcgctgtggtttcctcacataagaagccaaggagtcggaaagcccgttgcctgaggcagcagtctgggaatttcggtccggcgggccgtccccacccacacggacggggcgtggcttctgccagatgtgggcggggccccgagggccgtggcgggcgggacccgggcctcggccgggctggcttggtccccgcaggtgccccccgctagccacgagcagccccgggagggtggattcggaggcgcggggactggtgagggcccactgcagggctgagcgtcgcagcgtgctgtggttttagatgaatgctcctccaaatcccttccatgaagccctcaatcaggtcggtaactgatgacagccagtggctgacgcgaagttcattgaataaatgaatgcattcgtgaacaaccgagtaacatttcttgcacactcccaacttcaaatatcgcagcgtcgtcccaccatgagtattggtgttggtcctaaagcacggattcccttggctcctcccattctcccctgctgagttagacagcggggcctcatgcaggaggaggatttgtacacagcacagc

SEQ ID NO: 6060 - DNA, 1164 bp, Artificial sequence
  DNA replication origin
cccgccggacgaagggaccagccagcgccctgctagacagcgaggccggaagcggaggcgtggcccctgcgcggccccggaaaccagtgaggccggcgcgcgcccgccggaagccgcgaccccgacgcgccccccattgccctcggcgccggaagtggtcgcgggtcgttctgcttcctgcccgaggggcgtgcgcgggtcaggggcggccgcggaggcggaagcatccatggcggagggcggcagcccagacgggcgggcagggccgggctccgcaggtaacgtgcgcgcggccactgggccgcggggcgtgtggggatggcgaagggctggctccggcgtccctgccgaggtcctgcgtcctcgtcccgggctggccgggtccacggggcagccagggagccgcaccctgcaggccgggggtggggttcagcgcggctcgcagtgctgggcgaccccaccacggacgcgctgccctctcctcggcctcgagtgcagtccccgcgctagattttctttccggtggaacttgctcgtaacttccttcccgttagccgatacagatttgatatgacccaaccgcaaaagtaggacgtgggccaccttccagctctgagcgcacggatcaggaaagccagccagagggtagccctagggagggcaggcactttttcaccattctgccgcccacggcgtgtccggtggtacagcggggggcagccttcccacccaccacaggcacagaccagggacaacggggacgccgtctccagcgagctcgtcagtgacacaacatgtccaggggcctttggcccaccagcaagggaggcagatagaaaggctcacacccaccttccaaaataactgtcctacttagggtctccaccttgcagtgtccctaccatgcagatgtgaaggaagcggtcaggacaggttcccgtttcccggtggtgtggtgggagttccttcttgctggatttctgagcttgccattcgcgccaatagtttcgtgtgttctgggctttctttacatgcctatatttgtctttggaggggttcctctcctacttagtaataaaccaatacatttcttaaacatcttaaaagattgacttggagactggtgcagataggcttttccatccatccctccctctgcacctc

SEQ ID NO: 6061 - DNA, 2699 bp, Artificial sequence
  DNA replication origin
ctgagggctgccagcagccctcgggataccaacttcggcctcatcctcacagtggctcttcctttgtgtctccaggtctccctctcctttcccttttaaggacacagacactggacttatggcccaacctactccggcatgactctagcttaacttacttacatctgccaagaccctattcccaaataaggtcacactcacgggtaacttgggctaggacttcaacatacccccgtgggggccacgattcaaccccctacacgatcgactgaaggaaggaacgtggtccgagccccaggaggaatcttctcaggtgctcagcctccctggaccttgccaaggccgcccccagtgcctcctgcgcaggaagaatgagcacataggtggggctgaggaggctgcagggggccttccctgagcatccgtccactccccgtctgtccactccctgcacctggactcaaacaatggaaggaagcacttggtcatatccatgatcgcgtcccaaacagtgtgggaatacatgcgaggggttggatgtgcttgtgaggaatgggtacgtggaggtgtgtgcatggggtgtgatatgtgtgtggagggggggtgtgtgtggtgtgtgtgtggtgtgatgtgtgtgtagtgtgcagtgtgtgtgctgtgtgctgtgtggtgtgcagtgtgtgtgctgtggtgtgtgtgtggtgtgcagtgtgtggtttgtgtgtgtggtgtgtgctgtgtgtggtgtgcagtctgtggtgtgtgtgtggtgtgcagtgtgtgtgtatactgtgcagtgtgtggtgtgtgctgtatgtgatgtgtggtgtgcagtgtgtgtggtgtgtgtagtgtccagtgtgtgtggtgtgtggtgtgcagtgtgtggtgtatggtgtgcagtgctgtatgtagtgtgtgtgtagtgtacagtttggtgtgtggtgtgtgctttgtggtgtgcagtgtgcatgtgtagtgtgcagtgtgtggtgtgttgtgtgctgtatgtggtgtgtggtgtgcagtgtgcatgtgtagtgtacagtgtgtgtggtgtgtggtgtgcagtgctgtatgtagtgtgtgtgcagtttggtgtgtgctgtgtggtgtgtggtgtgcagtgtgcgtgtatagtgtgcagtgcgcagtgtgtggtgtgctgtgtgtgtggtatgtgtagtgtgcagtgtgttctgtgtgtagtgtatggtgtgtggtgtgcagtgtgcatgtgtagtgtgcagtgcgtgtggtgtggtgtgcagtatgtgtggtgtgtgctgtgtgtggtatgcagtgtctgtggtgtgtggtgtgcagtgtgtgtgctgtgtgtggtgtgcagtgtgtgtggtgtgtttgtgtagtgtagtgtgtgtggtgtgtggtttgcagtgtgtgtggtgtgcagtgtgtgtggtgtgttctgtgtgtggtgtgtggtgtgtgctgtgtgtggcatacagtgtgtgtggtgtgtttgtgtagtgtgcagtgagtgcggtgtgtgctgtgtggcgtgcagtgtgtgtggtgtgtggtgtgcagtgttgtatgtaatgtgtgtgtagtgtgcagtttggtgtgtggtgtgtagtgtgcagtttggtgtgtggtgtgtgctgtgtgtggtgtgtgcagtgtgcatgtgtagtgtgcagtgtgtgtggtgtgcagtgctgtatgtagtgtgtgtagtgtgtgtgtagtgtgcagtttggtgtgtggtgtgtgctgtggtgtgtggtgtgcagtgtgcgtgtgtagtgtccagtgtgtgtggtgtgtgtaatgtgcagtgtgtgtggtgtgtggtgtgcagtgtgtggtgtgcagtgctgtatgtagtgtatgtgtagtgtgcagtttagtgtgtggtgtgtgctgtgtggtgtgcagtgtgtgtgtggtgtgcagtgtgtgtggtgtgtgtagtgtgcagtgtgtgttgtgtagtgtgcagtgtgtggtgtgtggcgtgcagtgctgtatgtagtgtgtgtgcagtgtgcagtttggtgtgtggtatgcagtgtgtgtacagtgtgcagtgtgtggtgtgcagtgtgtgtggtgtgcagtgtgcagtgtgttctgtgtgtatggtgtgtgctgtgtgtggtgtgcggtgtgcatgtggtgtgcagtgcgtgtggtgtggtgtgcagtatgtgtggtgtgtgctgtgtgtggtatgcagtgtgtgtggtgtgtggtgtgcagtgtgtgtgctgtgtgtggtgtgtggtgtgcagtgtgtgctgtgtgcagtgtgtgctgtgtgtggtgtgcagtgtgtggtgtgtggtgtggtgtgcagtgtgtgtcgtgtgtgctgtgtgtggtgtgcagtgtgtggtgtgtgctgtgtgtggtgtgtcgtgtgtgctgtgtgtggcgttcagtgtgtgtggtgtgtggtgtgtggtgtgtgtggtgtggggtgtgcagcatgtggggtgtgcagtgtgtgtggtgtgtgctgtgtgtggtgtgcagtgcgtgtgtggtgtgtttgtgtagcgtgcagtgtgtggtgtgcagtatgtctggagcgtggtgtgcagtgtgtgtggtgtgcagcgcgtgtggtgtgtgctgtgcgtggtgtgtggtgtgcagtgtgtgtaggttatgctgtgtgtggagtgtgtgcaggcgtgaaagctgaagttctgtattctgctcactag

SEQ ID NO: 6062 - DNA, 1138 bp, Artificial sequence
  DNA replication origin
caaccctgggccacagaggcgaccccagcagcaggcactgctctccctgtggtcctcctccttggaacctgccctccctcagtggaattcacagggatatacacatttttaggctcttcttgggggtgaggctgtgtaccaggtagtcatatggcctcctttaattctcaacataaccatttggggaaactcaggctcagacaagctaaatgacatggccaagttgatacaagtctaaataatatagccaggcctggagctccagcacacttgctcccccttctctattctgtgtttgaaaagacacaaagcagggactttgtgtcacaccgccctgcaccctgatcacagggggagaagggaggcagggtctccttgctgtgactcccagagagaggtgggggaagcttgccattccccggaacttcccagcctgtacaaccatgggctaaagaaacctgttttttttttaaataataaattatccaacacccattctagcaacacccaacagaccatatagatgggaaggcgaattacaatggaaacaaacaaacaaacaaacaaaagaagcaaatagctattagcaaaactgtccataaatgagatgggctgactcagagagttgcatgttctctgtcacaggaagaccacttgagagtgatgatggttatggtggtgatggtgatggtgatgacagtgatgtggtggtgatggtgattatggtggtgatggtgacagtggtggtgatggtgatggtgatgatggtggtgatggtgatgaaggtgatgtgattgtgattatggtggtgatggtgatggtgacggtcatggtgatgatggtgatggtggtgatggtgatgatggtgatggtgatgatggtggtaataatgatggtggtagtggtgatggtggttgtgatgatagtgatgatggtggtggtgatggtggtggtgatggtggtgatggtgatgatggtgataatgatggtgatgatggcagtgatggtgattatagtgatgacagtgatggtggtggtgataatagtgatggtggttgtgatgatagtgatgatggtagtaatgatggtggtggtgatggtgatgatggtggtgatggtgatggtggtgatggcagtg

SEQ ID NO: 6063 - DNA, 878 bp, Artificial sequence
  DNA replication origin
aaccgcagaccggtgtcatcctggctggagatggaggtctctacatggctccctgtgtggccagaccactgtggctggaccagagtttcccgatagcctctgggaatggcagggacagtgggggaggaggtcccaggggattttattaacagaaggggggagagagggtagagaaaggtaatgggaacaagtagctgaaaatatgccctggagagcaggggaggaggctgagcaggcaacttcaaaagggatggaagaaaatgggggctgcggagagttgaagagtgaccccaaaagatatgtccatccagaacctcagaatgtgaccttgtttggaataagggcttttgaggatataattcaggtaagaatctcgggaggagatggtcctggattagggtggggcctaaatccgaagacagttgaccttataagggatagaaggggacacagcagcacaggggaggaggccacgtgaagatggagacagctcagagtgattcggccaccagccaagggatgcagggggctgcgggaagctgcaggaggcgggagggatgccccttagagcctctggagggagcaagactctgtctgcccctggatttcagactttggagctccacaactgtgagagaataaatctttgttgctctgtgttacagcagcccgggggcacaggcacgcagaagagactttcccacagcggttcccagagccctggatgaggcgtcctccaaaggattatgtcaccaagtttctgcaggtgatgagtttgggagctgttgggtcaactgaaggtcatatatgtgagtgtgttgcaaatctccagggggctttagaatgtggggttttctcaaactgtttaacaaggcggc

SEQ ID NO: 6064 - DNA, 1246 bp, Artificial sequence
  DNA replication origin
gtttgttgcatagcaacgggtagtggaaactataggtgggagaggaaagaggagtcaagactgactccaagatcgtggccctgagcactagctgactggtgctgtggttggaccacggaggagagagtggggttttattcaggggtggaaatcaagcattcaaagtggagtattttaagtttgagatgtcagttggacattgagttggtgatggagagtagacgatttagcatctgagtttggagttcaggaggaaagttcatgtaaattcaggagtcatcactgtgctgatgctgtattacaccacgggctgggtgaagtctcccagagaatggacatagctggagcagagaagagccaagggctgagctcgggacacactaacttggagaggctggaggaggaggaggagccacctgcatggactcggaggggagagggcagagaggagaaactgcggtggggggtgtccttgaagcaaaggaaaggtttcaagaaaaggctgtgaccaaagatgctgagagggtgagtgggataagggtgagaattcacccttgaagctggcgggaagatcactactgaccttgacagcagttttagtggccctgaggctgtggaagccaattagactggcttgaggaatgggtgggaagtgaagaagtggagagaggtgaggaagatcaggaacacttgcaagaaatgttgctaaagggacgcaggggaatggggcagcggttaaagggacgcaggggaaggggcagcagctaaagggacagaggggaatggtgcagcagctgaagggacgcaggggaatggggcagcggctgaagggacgcaggggaatagcgcagtggctgaaggaggaggggtattaagagaaggtgtgtttaactgttatgcatgtctttaaggtaatgtgcaagatccaagaccaaagaaaacgtgatgatgtaggtgactgaggaggaaagttcttgaggtgaggcacgtgtgaaaagggggctcgtccttggcaggggtagctcatcctcaacaggcaggaagcatgcgtgggtatagatgccagtgggtttgcaaactgggagatgagggcgttttattgataacgaagtcttccaaattagaagtgaggacatcgattgagattgaagaatagaaagagaataaggagttttaaaagaaataaggggctgggcatggtagctcacgcctgtaatcccagtactttggcaggtcgaggtgggtg

SEQ ID NO: 6065 - DNA, 771 bp, Artificial sequence
  DNA replication origin
ccaggcatcgggaagtgggtcctagaaggtgaggcctggagaaattggacattgcatagtctggggcaacgtgctggggtccagcactgtctgtggctggctcctgtgtcaaaggctgctgggggtgcagcaagagggacatggagagcccgtgtgactcaccctgcctttcatctgcatttgctctcttggcaagagtgattttcattgtaccataagctcagtgttaccaaacccatttggagtgatgcactgactgaaactgctcctcaaggagaaaggactaacaccggcttccaaacggaggctttgctatgtgagtcttggcttcttggctttccccatgaagaacttcctgtcggcccacagacagcaagtgagctgcgggaaagcgctggctgctagcctcctccttccgcactggaccaggggcaggggctcctctcagagaccaaccagagcaaagcagcttgcagggcaaggcccaaaggaggatcagaggcccaaaggaggagcagaacccagaagcagaagtcagaccacgggcgggtagggacaggtgagctggggatagaaccactgatctgaggcccgaggggcagtaaccacgtgggcctgatccaggagggtccctagaaccggcgctgtggttgctggctggttttccttggaggctggggcacgatgcaagagcagtgagtctgagtctaacatgttagggatgggcaggcagccccaagattgcagcacggagtggccagaacatacccc

SEQ ID NO: 6066 - DNA, 1367 bp, Artificial sequence
  DNA replication origin
tccaaggtgcagcagccagaatgggtcctaggcagccaggggtgatgacaaggaccactaggagtgtgacccaggacaagaagcagaactgggctgatccctgccaccctgttcagcaacacttccagagcagcaagtctccagaaacccaaagaccctctacacatcctgggccacaaggataggtacattctgaccaggtaataccatgtgacctcagtgcccatatttgtttgtttgttaaaatcacattggcactaagagctttgttttaggtaacagagaaaataagaaagataagcttagtatttatttgtctataacaaatatttgccaaatatatgtcaagcactgtactaagtgttggaattcaacagtagtgagacagatacatggataagtggatggatgggggtagatgaatgaatggttggatgggtaggtggggggtgggtaggtagatgtggatggagggataggtggatgggtgggtgagtagatgagtgaatgagtggatggatgggtggacggatgggtgggtagatgtggatggataaatgcatggataggtgaatagacaggtaagtaaatgaatggataggtgaaagggtggatgagtgggtggatatggctagatggacagatatggataggtgagtagatgagtgaattgatgaatgggtagaaggatgggtgggtagatgagtgaatgggtggatgggtgggtaggtggatggatggatatgtatagatggataaatacatggatggatgtgtgggtagatgggtgaatgggtagatggttgtgtgggtggttgggtggatgggtgaatggatgagtggaggtagaggcagatggatatggatggatggataggtgaacagatgtgtgggtagatgagtgaatgggtggatggatgggtggggtggatgtggatagatgaatgggtaggtgaatagatgtatgggtagatgagtgaatggtggatagatgggtggggtggatgcagatggatatggatagatgcacagatagatggatagacaccaagataaaaagttatgtcatcagattcagagacacaattgaatacatagaaacacagagacacagataaagtccatgagaggttttgataagtacatgtaaaatttgagtagaataaggctgatagggattaccagtacagaggctggggaaaatactttttcatcattttgcatcagatattgtacatcaggtggtcaggtaggaccactgtgatgagatggacatttgagcagtgattgtgaggaagtgggggcaggagctgggtagatccatctggtgtcacgcaaaccaggacatgtggacagacagcacacac

SEQ ID NO: 6067 - DNA, 1111 bp, Artificial sequence
  DNA replication origin
aagtaacagggaacccagccgagaccttccctgatctctcacagtgtggccttggaggagctctctggtgggcagtggtaccagcagaggctctgcggacacccaggagggcaggctggagctcacagggtgtgggtcacgtctgtgattcccaccatgtcctgccttctccaagtcagctcctctcccccaggtcaggaagggcctttgtcatctctgcatgccagtgactctgagcaccactccagtgcctggcagatgggccatgattactggtggaattgcattggcaaagcagacaggagggagcacaggggttccctggagtgtggatggagccctcacctgggctgtgcatggatagagctgcatctgagcctggcttgcagactcaatcccgaggcagtgccaggcaccatggaggatgagcagagacgcctcagccagtcttgggggtgagggaaggttttctagaggaatcaagagctcacctgagatcagagggatgagaaaagctggcttcagagggaggaggggtggggagcgagtgctgaccagccaggcctacatgctcagggacgcagcaggcagcaaaacagccagggccctgtttcaggagcgtggggaacttagcctggctcaggcagcatcagggcagggagaggcagtgagagaggaggctgcaggggacctggagccatcagaaggtctcactgtcatcctgggggcactgggaaggcgcatgaaggggaaggcagggacaggacaaatcgttcctttggaagaatcatttggccacagtggggggcacaggctggaggggcaggaccagacttcaggccacagaggacactggtgcaatagaacaggtgtggcaaacagtgcccagcgggggcaggtgtgtggggaaaggagaggaggtgcagcagcactgggcagtgggcttggaggatggtgggaagatgagacaccaggtctgcctggaccgttggtttccatgatttcctccatggcatggctcgcagcaatagagcccaggcccccttaactcccaccccagtgcatttcatgtcactccacacgctcaggccatgagcctggaccctggtgt

SEQ ID NO: 6068 - DNA, 1415 bp, Artificial sequence
  DNA replication origin
atcttcctaggaactaggaagccaggtcactaatggcatccatctgtccattcagcacataaggacttactgctttctatgctgggccaggtgcccaccccaaacctgaggaaccagcagtgcacaaactagacaaaagtcattgccctgctaggttcacattctaggggataaataggcagaggactagacaagaagatggggccaactacggtgaaagtgaatagggcaggaaagaggcaggagtgctggagcggtgcctcattcccaaagcctggggccctgggcagggggaggtggtcaggacaaagggttaggggacaaagggtggggatgaggcggtggccctggctggggacccattgagctctgccccctcctcctttctgcctattgtgctgtagaggctagacatgggaggcttgtcccaaatccatggagcttccacatggtgtctgggcttctgggaggagaagatctagggtgggggtggggagccgtggggaggtctgagaaggcagaagtggtcccgtgaggtcactttcaggcccgtccgtcaccccagatggacaggagggaaggagcagcctcagggcccacttgactggggcagggaggacacacagagagggacggacacatgtcatgcatgtttctccaacacgtgcatctctgactggaccaggtgaggggtgaggcagtggctttgaaaggcaagggaggccatcaaggcaggggtgatgaggggctgtggaatcgaggctggggagggagggagcacaaacaggtgaccccggggaatggaggtgagaccccaaggctggggtcatagcaccagagagtaagtgggaaagagtaggtgagggcggccacacttggggtgtttgcaacagagaccttgcaggggccactgtcactgggaatgaccaggtcagctaatgggggtgaggcaggatcactgagaaaagggagactgcgatcagaagagcccaggtcacgagcaggcacatcaaccatgatactgaaactgaagaattgagaggaagcatcatcatggaagggaaggtagctgctggagggagagcagggtaatcaggaagggcaagggggaggggaggacgatgatctggaagccgcaggaaggacacctgccatatgtccaggcccagggtatgggagtgagggaaagaaaacagccaccaccggagagggctgcaggacctctaccaggaaggggaagcaagacagcaaggagcgcttcagaccacagggccagacaagtgctccagaaggtgaaggtgagagtgtgccctggagtccactggccctgggctttttgagggtgcaatagaattggaccacaccatctccaagtcaggttgtggtgctgaggctgtgagcatcaagggatgggg

SEQ ID NO: 6069 - DNA, 1007 bp, Artificial sequence
  DNA replication origin
atttcccaaattgatgacattttcatttgggttttaattcagcaaattcccctcctcaaaagaggggaatgctgtcacttccccagccaacatacaggtgacattggaaacgctgctaaatgccactgtgccttagcttctcctatgtatgcaaggggtcactgcccaggtaatgactctgaggggctggcaatacagcataagaaagtcactccaaattctgttaagcaaggttttccgcaggcagccgtcagtatcacagcctccagtactataatcattgttaaagcattttaaaatagacaagacacgccatgaagaaagtgcatccagacggttgaactgggctgctggttatgatagctccagggcgccccggggggtcgcaggtgaaatcctccaggtccatctccccaggcagaggtgagcctgcaatccagcttgcgctgcccttccagggcgtccccggggcctctggtcttcagggctgggctgagccctgggctgctcaggaccaaagctgagctgtttttctttcaaactaaactatgaactctctctgctggagaaagagacagaaaggacagagaaagagacacgccgacagagccagagtgacacaggggcacgcagacagggagacgaggatggcgaagcaggctaccaggcaggtcctctcctcagtaaaagccctccgcatctgggaaagggaagatgtccctggatctgggtccttggacccacacagggttggtaaaagggcagcaaatcgctactgtcactgctctgagcaaagaaaccagggaaaggccagttcgggaaaaacaggccctttccatctgacgtgaagccccaggaagggctgcagcccagcaccggcaggacggctggggacctggcttctctctctctctctctctcgttccttaaatttttatttgagaattttaaagaaagggacctggaaagctattttgttgggctagaggggccgtgggccttcccag

SEQ ID NO: 6070 - DNA, 1285 bp, Artificial sequence
  DNA replication origin
ctggcatttgtggtgactcctgaggcctcgtatatcccctagcggcctggcagctgcgacggtttgtctgcctgtcaccccgggagcaccttcaggactgtgtccttgtcatgtatccggatgcccggctcagcccatgccctgcacaagtgggggtcatggagggagcctctgtttccccaccaagtacaccaagaaactacactgtgtctgatgcaaacgcatgttttctgtgcatctgtgatttacaattccctggctgccttccaagcagaacgcacctggcagcctgggggtcttgtgtttgccccaaacagaggagccagcctcttgtttcgagggccttttccgtcctcgaagccagcagctggagggaaggaggctggctgtaacattggaggggccacaacccccgaatttcttctgcagaagagaaggggtagaggtggagaaagagggagagggaggcagggagggagggggaagccactgtacagcctagcctggagacatcttgggggaaagtgattcatctgatctgggatggaagattattctggggagtaaaatgtcctgccttcaacacacacacacacacacacacacacacacacacacacacactcctcagtaaaatacccagttctcaccaggctttatgcagtggctctgggggcaggggcacaataaagagaagtcccagccagctcccggggtggtgtgggctgaggaagaggctgggaggagagagttgtggctgggaaccctttgataaacaggaaagaatattttcactttggcacaggcctggcacggaggagctgtcagcaagcaggcgtccgaagattgagatcacagaggggtggccgaggctggggcacaggctggatgcaaggcagatgccacatggaacccttaggtattgagtgccctgaaactagaaactgaaaaggcagtcacatcctcatcagaaagaaattgatggtgagttaggaggccaggagggaagcagccgttcccagagctgaggggcatccctcgaaggcgggagggagagaagtgggaggcaaaggctggggatggccggatggccctgggaccagcagaaggagcaggtgggctgaagaatgtgttggagcagagactgtggtcagcggaaggcatgagaggggccaccctcctgcatgtagtgaggctcgggaaacgtggaacgaaagaaagatagaaaaaataaatgcagtataatggaagttccaaggaacactgcagttaggaaggtggctgg

SEQ ID NO: 6071 - DNA, 851 bp, Artificial sequence
  DNA replication origin
  misc_feature (1)..(191): n is a, c, g, or t
nnnnnnnnnnnnnnnnnnnnnnnnnnnnnnnnnnnnnnnnnnnnnnnnnnnnnnnnnnnnnnnnnnnnnnnnnnnnnnnnnnnnnnnnnnnnnnnnnnnnnnnnnnnnnnnnnnnnnnnnnnnnnnnnnnnnnnnnnnnnnnnnnnnnnnnnnnnnnnnnnnnnnnnnnnnnnnnnnnnnnnnnnnnnnnnttgtgtgtgatgtgggtgtgtgtgatgtggggtgtgtgtgatgtgggtgtgtgtgtgatgtgaggtgtttgtgatgtgaggtgtgtgtgcgacgtagtgtgtgtgatgtggggtgtgtgtgatgtgaggtgtgtgtgatgtggggtgtgtgtgatgtgaggtgtgtgatgtagtgtgtgtgtgatgtggggtgtgtgtgatgggtatgtgcataatgtgaggtgtgtttgatgtagtgtgtgtgtgatgggggtgtgtctaatgtgaggtgtgtgtgtgtgatatgggatgtgtgatgtagtgtgtgtgatgtgaggtatgtttgaggtagtgtgtgtgtgatgtaaggtgtgtgtctaatgtgaggtgtgtgtgatgtggggtgtgtgtgatgtggggtatgtgtgggatgggtgtgtgtgtgtctgtgtgcgtgttcgtgtgtgtgtgtctgactagagatttcacatgtgtgctcacctcccacccttcttccctgccatgctggttctgactgtccaacggtgtccatggtactttgcccttccctttctgtggtagagtctacctgcactctaaaaagtgatccgtgtcttccctgtgttctagttgcttacaaacatgcttctgccctgctagatttctctgatccatctcagc

SEQ ID NO: 6072 - DNA, 1239 bp, Artificial sequence
  DNA replication origin
ccacctcagtggggcccacagggcaggggacacgccactggcatcagcacctggtcgggagtgtggcgaacacaggtgggccccgcgccgcgcctcagggccgcttctgccacacacccaggccagcctgcagcagcccccaggctgtgttgctgtcctgccaggagacctgagctctagcagggatcgctgaagactggccctgcgacctgggacctttactgctcaccacagggcctggccgtgtaagtgctcactcccacacctcttgcacaaacatgagaacagccagttgacctgcagagctcgcgggaggtgagtgttcagcgagaattattggagaactcccctgagccaaggggcaaaccagcgcaacgagaccctcctcccgcagagcggctgagcgtggtgggaggggtgggtgtcagcccagaggcaggcatgggctccccaaggcggccgccaggagaggggtcaccgtgaggattctgccacagggaaggaggtccagggaggccccaggcactggggggaggatgtggaagctggagggacgggtgacgtggtgctcggtgacatcccgtgtgtgtgtctgtgagtgtgcccactagtgtgagagtgagtgtgagtatgaaagaatgtccagagtgagtgtgtgtccatgtgcaagttgtgtaaattgtgtgagcatgtgtatcgtgtaagttggcccgtgtgtgtgccagtgtgcatgcatgtgtgtgagcatgtgcatccatgagtgggtctgtgtgtccctgtgggagtgtcagtatgcatgtgtatgtgtgtgtgcgcatccgtgtgagtgcatgtgttttcccgtggaagtgctggtgtgcatgtttgtaagtgtgtacatccacgtgagtgggtccgtgtgtcagtgtgtgtgtgtaagcatgtacatcctcctgagtgggtctgtgtgtgtgtccctgtgggagtgtcagtgtgcatgtttttgtgtgggtgtgtgcatctgtgtgcgtgggtccgtgtgtgtccctgtgggcgtgggtgtctgatgtcgcacagcagtgtgcaggggggacgtgtggttccgctccttcacccccagccctctcccaacccccagccccaggcttcaccccagcagcccaggtcctcagagacctccaggaacctttgttgaaccaaggcaacagtctgaaaaagccaagacgtattttccctgaaacccatgcgtatgaaaaccac

SEQ ID NO: 6073 - DNA, 2251 bp, Artificial sequence
  DNA replication origin
gctgctgcaggctggcctgggtgtgtggcagaagcggccctgaggcgcggcgcggggcccacctgtgttcgccacactcccgaccaggtgctgatgccagtggcgtgtcccctgccctgtgggccccactgaggtggcccaagaccttgggcttatgacaccacatccctgtacaccctgggtctcagacgctggccccggccacctctcagcaccttctctttgagcttggcaggcacagagggaggcgcgggattggggtccccaccccggcttcctggaggacctggactttcctcctgcctgtgtctcctccccctgcaggtgggaaccaggctctgggtagcgcctgagcgggttctttccccaaggcgctcccgggacagctggttgcagccccagagctgcaccaagcctggcacacccacagtttgattggcccacaagtgcgcttagaagtcacttgtgtggcatgaggggaccttgtggggctggaagaattgtgtgtcttgatcatagtggggggtgcaagaaacaacacgcatgatgaaactgcaggaagtacacatacaccactcacacacacacacaaatgcacacaatacacacacaaacacacacataaacgcacacaacacacacacaaaaacacacaaacactccacatacccacttacacacataaacacacaccacgcgccacacaaatataccacacactacacacacacccccacactgtacatacacaccacatacacacacaccacacaaacacactacacccccacttacaaacacacaccacctacaccacacacaaacacacatcacatggcacacaaacataccacacactacacacacaccccacattgtacatacgcaccacatacacaaacacataccacacaaacacaccacacccccacatacacacacaaagtcacgccacatacaccacacaccatacaaacataccacacacacagacataccacatacacatacacatagataccataccatacacactacccactacataccacatatacataccccacaccacacacacatacacacgccacactgtacacatataccccccatacaaaatacaatcccccaaacacacaccacatacaccatgcaccatacataccacacactacacacacacttcacactgtacatagacaccacatacacacacataccacacacacaaacacaccacaccccacatacacacaaacacaaaccacatgcaccacacaccacacaaacataccacacactgcacacaccacacataccacatacacacacatgcacacacatacaacataccatgtacactacacactatataccacacatacataccccacaccacacacacccacacgagtgacatgtgaataagctcttggtccatactggtgccagatgcctgggtgtgacgtgacgacaccactgtatgtgtggcatataatgtggtatataatataccatatggtatgttgtctgtgtggatatgtatgtggtatgtttgtgcagtgtgtggggtgtgtgtagtatgcagtgtgtttgtgctgtgcagtgtgtgtgtgggtatgtggggatgtggtgtgtttgtgtgtggtatgtgtttgtgtatgaggtgtgtatggacagtgggatgcgtgtgtagtgtgcggtatgtttgtgtggtgtgtggtgtgtgtgatgtgtttgtgtgtgggagggtgtggtgtgtttgtgtggtgtgtggtggtgtatgtagtgtgtttgtgtatgtggcagtgtggtgtgtttgtgtgtgtggtatttgtatgtggtgtgtatgtacagtgcggggtgtgtgtagtgtgtagtatgtttgtgtggtgtgtgtgtgtatgtggaggtgtggtgtattcgtggttgtggtatgtgtatgtggtgtgtatgtagtgtggggtgtgtgtagtgtgtggtatgtttggtgtgtgtgtatgtggggtggggtgtgttcgtgggtgtggtatgtgtatgtggtgtgtagtgtggggtgtgtgtagtgtgtggtatgtttggtgtgtgtgtgtatgtggggtggggtgtgttcgtgggtgtggtatgtgtggaaactgggtgaaaggcacatgggacatctctgtgttgtctttgcaacttcccgtgtgtctgcaattgttttgaaagcacgcattttaaagcaagaatccgccgttgacagctcccgcca

SEQ ID NO: 6074 - DNA, 1399 bp, Artificial sequence
  DNA replication origin
aacagcccagctaaccttcccagagcctcctaggagccaggtgaggctgaggcggggactcacagaagacaaggccctccacgcggatgaaagcctgaaccaggagtgggatggcagagtgctccttgcaggtgctcagaaggggctttcacagaggaacgtctgtttctcgggctttccgggagcggggtccagctaagctcaaggccaaggaacttcacagaacaaaactgcccccatcctgccctcaggaaggatcaaggccttatgccgggggccacagtgtggggcgtctcagccctggctggatttgggggaggtgacaggggccgtgaaaggacagccacatgtcctgtcgtttcccaggctctgcatggctgggcgtgcagggtggccagaggctgccaccttgcgtaggtaggagccaggggcggggcacagaggagggtgagactgcttgaggtgggaaatgggggagcaggtgatcaccaagaggggacgtgaagaggagggggagcagaccagtctggctgtggcggggggaggcgatggcgccagcctccgtgagccaccaggcaggtgaggcctctaggtgaagtgttcaggaggcatttggaggtttggatgtggccttgaatggatgtcctgtgggaagggaggtgcatttggggagccggggcaaggtttccaggcaggtactctggagcaagggctgcagtggcacggccgcctaggcagcaggatgctggagcagagggagacacagagtggcctgggagaatcgctgcatgaacccaacatggagggcgggagcaggtggcctgagttgagatgcaggcagcacctggcaggtgtggtcagtggtgaaggagtgtggagccccaggctctgtgtggggtgcaggattgggagcagctgcaggggaggggaggagacagatgcagagctctgtaaccccaaggagagcagaggggtctctgcaaagtccagagggtacaggggagatgggggccatgggggacagctggtggcctggaagcaggagcgtgtgggatgacctctcgtgctggcagagctggtggatggggtgcagcaggaggctaagttgcacaaggtaggaagcctggcaggagggcccatctctggtggggggtctacaggcccgcggggctggaagcaacaggtttcccagttgtgctgccaagttcccactcaggaacgtctgagtagaacgttctccacaccacagaggggcaccgctagctggacacatgcctcctcctggggtcccaaggtgtttaaagcctcacgtttctaagggagtcctgcagcaagtgcttcatggacagtgcacagagctgtccaatgcagtctccatggcccccatcacctgggaagg

SEQ ID NO: 6075 - DNA, 1709 bp, Artificial sequence
  DNA replication origin
gggggttcagagcttttgatgagcttcaaggagaaagaaggagagcctcctgtgtccccgaggagcaccaggcacactgcacctcagaaaaagcaggactcatgtgatgcagagtgtatggaaataaacagatgacccaggtgagaaccacaaccatttgctcagaacctgccaccatcctttgtgtctggcggagactgggaggcaggcagtggagaggagaagcttcgcagggaaagaagggaggctcaggtgtgccctgcctggaagctgttggctggggggagctggaggtggctcactagaagcagggatcctatgtgattggttaagggcgtattcgactttctctggttggtccgaagttggaagttgagagagaaattagggaagtgatcagttattaataaagccctggccacctggggccaattgttacagaagttactgtttagctttccagattagctgtagaacaagcaggctggcctcaggctggtgactgtagatgatgggtgggcttccttggctggtgactgtagataatctgtgggcttcccatgctggtaactgagtgattggtgggcttcccaagctggtgactgtacatgatgggtgggcttctcgagctggtgactgtagatggtgaatgggcttttcgggctgttgattgtgtatgatggatgggctttctaggttggagactgtagatgatgggtgcacttcataggctggttattgtcgatgatggatgggttccttgggctggtgactgtggatgataggtgggcttttcggcctggcaactgtggattatggttgagcttctcaagctagtgactgtgggtgatgggtatgcttcttagtctggcgaccatagatgtgggtgtgcttcataggctggtgactgtagattatgggtggacttcccaggctggtgactgtagatgacgggtgggcttcccgggctggtgactatagatgatgggtgggcttacagggctggtgactgtggatgatggatgggattctcaggatggtgaccatgagtgatgggtaggcttacagggctggtgactgtagatgatgggtgggcttcatgggctggtgactgtgaatgatggatgggattcctaggttggtgactgtagatgacgggtgggcttcccaggctggtgactgtggatgatgggtgggcttcccaggctggtgaccatgagtgatgggtgggcttcctgggctggtgactggatgatgggtgggcttctagggcttgttactgcaggtcatggctcagggttctgttttcacatatggcctggtcattgtccatttgtccattcagcctcttaagtgaaatgggggctatttgggatgtaatgatcatcacactagaaacacctcccagagtagctcccgtcgaggctggaatacaagctcaagatcagcagagggtcgggggctcaatgagtggtggatggaagcctctcctctgtatctggggtgaccatgacccaggtggcgcagggagtgtgcagacagacagggctgtgtcccaggagaggcctttggccaagtccttctgggccgctgcgttccatgagaactgttttattgagagggatggtatgtagtggattgagaaattgccatagttggaaaaacaagcataaaaactgccagaaaaacaatactaaagataatagtgc

SEQ ID NO: 6076 - DNA, 1828 bp, Artificial sequence
  DNA replication origin
ccttccctcgcgcacccgcccgtgacagccggctctttgcccttgaatctctcatctgttcacacaccaactcttgcccatggtgcacttgagctgggctttactccaggggcttgggacaatgagagaaaaaaccaaaatacaccaagacctttccctggtggggttcatgttcaggcgggaagggaagcagctgaacagtgctgagggctcaggacaaagacaggagcagggagggggaggcagaggggctgcattttgggcggtgggcagcctaggccatgggggaagcaacttgtgagtgagatcggcagggaggaaggaggccggtggggctgcgggaccagctggtgagaagcatgcatgagaggagacattggccgggcccggtggaggcaggagggaggagggaggagggaggatggaggaggaaggagggaggaggcgggagggaggagggaataaaaaggagggaggagagggagggaggagggaggaggaaagaggaaggagggaggaggcaggagggaggaggcaggaaacagaagtgaggcaagagggaagagggaggagggaggacagaggagggaggaaggaggacagaggagggaggagtaaggaggagggaggaggaaggaggaaagaggaaggagggaggaggcaggagggaggaggcaggagggaggaggaaacagaagtgaggcaagagggaagagggaggagggaggacagaggagggaggaaggaggatggaggagggaggagtaaggaggagggaggagggaggaggcaagaggcaggaggggagaaaaagcaggggggaggcaggagggaggagggggaagcaggagggaggaggaaagaggaaggaggaaggatggggaaggaggagggcggaaggaggccagtgcagctggagctggtgagggaggagttgagatggggtggggaggtagggcaggaccacagagacttctggggctgcagtgacaaattaccgccaacgagggggcttaaaacaacagaaacatattttctcacagttctggaggccagaggcccgaaattcaagtgtcagcagggccaggaccccgcaggctctgagggagtcccctcctggctcctctccggctcctgggctgccggcggcgttctgcattccttgatgcttttctccggtctctgtctccactctcccaggccttcctctctgcgtttctcctcggtgtctcctcctctccttgtgaggatgcttgtccatgcatttagggcccatccagctaatctagaagatctcatctcaagattcttcacttaattacagctgcagagatccttccccagtatggtcacattcataggtaccagggctcaggacttggacacatcgttctggggccaccattcaacatacaacagcccccagggcaggatctttggagacaggagtggtaaactgtgtcctggttagaggtgcagtgaggcaggaatatgggatttttggtaaaattggtgtaagggtggggagtgatttggttgagtttgcttcttactggatcagaaacatgggaatcccaggtcctcagaggaggagacccctgaaggtccaagtccaaattggtacaaggtgccttttggagcccaaagtcggctggtcttgggtgtgaggcctgctgtgggttcttcctagccaggatgaatgcagtcaggtggtggaggggggctgtgagctcactgcttgttttcagatgaccccagaggcttcatgcactcaataaactccaaacaacactcaccacatgtgggtcctgcagttacaacataagat

SEQ ID NO: 6077 - DNA, 983 bp, Artificial sequence
  DNA replication origin
ccaatgatggaggtgacagtggtgcggcctgcagaagccaggcgcctcaaaccattccccaatattctggggagacacaaaactgacaaagtgagactccccccacccccctgggaagcgcagggcactttggtggacctcctctgcggtctcctctgccagaggatcccagggcacagtccaccactgccccatggagcagcccgttgctttctgggcggtgaggacccgggacgtcctgcctcgtgctgggccgggatggctgctctgcacccgcagctcccacgtggccctaaacacctgcttcactcctcactgtctacatgggctgccaggcactgccagcctctccaggggctttcatggtggggacagagaacagacatacaatggcgtatgtcaggatgctgggagatgcgccaactaggaaggtagggcagggaggttgggggtgacggaggggcagggcagggggtgacaggtaggtgggccagggagagcagggaagggttgctggggacatgccagatggtgcagaggaggcaggaggctggggggtggggagcagggcaggagggccttggctttggacaggatgagccgagttctctgttagtttatttagaaccttggatagttgagcctagagcttgagaaatagaagcctggctggaaatagaatcctgagcctgtcagcagttaggtggcatttatggccacaacatggagcaaaataacgagggagcgaaataacaaagaagagaagaaacaccgagccccagaaaaagaggctggagagaagaggaaccggcagaggaggccaggcagggtgagcagtgtgtggggctggggaaacccagagtggggggctccagcgatcaaggggtcagcagaggggaaggtgccatccatggaccgaggaacagccgggagattgagcaccatgagcacacagcccccaacaccccagctcctccgtgctg

SEQ ID NO: 6078 - DNA, 982 bp, Artificial sequence
  DNA replication origin
caccccctagcctagcagccccgctctcctgcgggctcccccgtgggccaagtctcctaaactgggccagcctggagtcaggtgcgtgcagccctgccactctacctccttgcagcgaggcctggagggcgttccacgcgtgggcaccgcggccttcggaggcctccagagtcggcctcagtgggcgcgtcctccctcctgctggaggggactggacaccgttaatgacagcgaaaatcgcctggagttgatgacattaatctccaccaggcctaatgagcaactcagttccccaggccagctgtgggaggggccttgggtgggggcagagattagcagaggggctaggtgccagtgatgccaaaaccccaggggaggcagccaggggttagggtcaggggtcaggggaggtggggtccccaggggagaggcagccaggggtcaggggtcaggggaggtggggtccccaggggagaggcagccaggggtcaggagtgagggttcaggggaggtggggtccccagggggaggcagccaggggtcaggggaggtggggtccccaggtgagaggcagccaggggtcaggggctcccagtcactcagttgtgaaacgtgcagtgtgtgccacgttaagtcttcttagctcctttgccaagcagcccgaacatttcagaggtgcaagagggcagagtgccactacctgaatgcccctgcctggccaggcgtcactgtccctgtggtgatgggtgggatgcagctggcttttggcgggaaagaatctctggacagggtcacgcaggcatccttggtgaatctgcagtcccagctccgcctgggcccagcgggctgggggaagagggttttcctgctgcgacccacagcagaggctcacaggcaccacagtggggacaggggaaaacagcgcagccacaggaaggatccagggactcaggccaggctgctcaggagtctccaacctgct

SEQ ID NO: 6079 - DNA, 1267 bp, Artificial sequence
  DNA replication origin
tccaaataataaacctcagaggagacaaacgaattgtgttttgttgcagctcttcgctgtgctccccgtgagccgctgcaggagctcagcgtctaggatgtcctggggcgtgtgggcttccccatgccagcccggattctgaaaacaaaacaactagtgtttctccgtttctgtggtcattcggacaaagggaatttgagatcaagaaggttttcgttgttatttgaatcactttcatagcttgttttcttggtctcttgagtaagactctctaaaattaaaggtaatttatgtattggaatataggaaggtcagcaggaagcaactgagatgaacggctgccatgtctcctggggcgtggcggcagctcctgagaggaagggttccaggtgaagatgagggaaatgttggtaacatgtgaaatagggttccctaccagaggagcgtgggggacctccaagcaggagagtgtgtgtgtgtgtgtgtgtgtgtgtgtgtgtctgtctgtctcagtatggaactgtggatgtgtgtgataggtatatgcttatgtgtatatgtgtgtgtgtgcttgtatgtgtctgtggtttgtgtgtgtgtgagtgtttctgtatggggtgttcatgtgtatctgtgcatgtgtgtctacgtggggggggtgggtatgggcgtatctgtggggcatatatgtgtgtagggcgtttgcatggtgtgtgtgtctctatctgtggggtgtggggtgtgtgtggggtgtgtgtctgtgtggagtgtgtgtggggtgtgtgtctgtggtgtatgggcgtatctgtggggcatgtatgtgtgtagggcgtgttgcatggtgtgtgtgtctgtgtgggagggtgtgtctctgtggtgtgtgtgtctgtgtggggtgtacgtgtgtctctgtctgtggtgtgtgtgtctgtggggggtgtgtgtgtgtctctgtctgtggtgtgtgtgtctgtgtggggtgtgtgcatgtccgtgtcggttagccgaccctatggcattggctaagattccccagtggcttgtttgggagctgtgtgtgtgtgtgtgtgtgtgtgcgcgcgcacgcgtgtgagtgtgtctgcatgtggggtgtgtacgtgtctgtctgttaaccgattctccggcatcactgagggttccctgcgacgtattcaggagctctgcactcacagagacctcttaggtctgcgtggaccccgagtggctctctggcgggccgtggagaaactggccaccgcccacctgc

SEQ ID NO: 6080 - DNA, 700 bp, Artificial sequence
  DNA replication origin
gggggggttgcaggcatctgtcggtggggtgtgggcgtccgtagggggtgcgggcatccgtgggctaaggcaagcaggcctctgtttagcttctcgtctgtgccagccactctcctgcagcttggggccatcgcagttgctcttcccagccaggcacgctgttccctgaggaagggttcctctcgtgctaaccgggccggcaagccctccaggcaagaggcagacaggccctaatggacctatggccaactccttcctatggcccccggcagccagccctaggagcgtggaccagagcacacagagtggaggctactgttctggagcaggctgagaatgggagaggagccccacagcggggggtacagcccagctgaggccagaaagtggggtcccacgttggataaaggagcctgttacatcaagccagtctccctggagcatgtgagatgtcactccagctccagcccaggaaggggccgggggctgcggagagtgagggattggggcccaggcagccgctaggaatggtaggtcccgcccctggttagtgggggtctcttgtcctccacagatgggttttaagctggtgacgtgcattcagccagcactgggtcaaacaggaaaaagacagcacccctgtcctgggagcactttcactgccggagcaggcgcgggtgccagagcagtggggtggggg

SEQ ID NO: 6081 - DNA, 862 bp, Artificial sequence
  DNA replication origin
cccttctgaaagtggctgcagctgctgccccctgcctcctgcctcctgccctgctccctgttggcatggcagctccccagccccgggccgtggacgtggccattctacaagcctccggccttgatgcagatctgtgacctccacagagtgagaagagcctgagtcagctctgtgcatcgggcctcacactagggcctggctgtggctgtctgtgggacatgtgggtgtctgtggggggtgctggtgtccgtgtggatgtccgtggggggtgctggtgtccgtggggtggggtgggtgtctgtggggggtgctggcgtccatggggggggtgggcatcagtgggggatgctggcatccatgggaggtgctggcatccgtggggggtgcaggtgttcgtggggggtgcaggtgttcgtggggggtgtaggcgtctgtggggggcgtgggcatccgtggggggtactggcgtccatggggggtgtgggtgtccatgggggcggggcggggggcgggcatccatggggagggtgcagtcatccgtggtggggtgatgggggtgcagtcgtccgtggtggggtgatggtgcaggcgtctgtggggaggttgcaggtgtcggggggggttgcaggcatctgtcggtggggtgtgggcgtccgtagggggtgcgggcatccgtgggctaaggcaagcaggcctctgtttagcttctcgtctgtgccagccactctcctgcagcttggggccatcgcagttgctcttcccagccaggcacgctgttccctgaggaagggttcctctcgtgctaaccgggccggcaagccctccaggcaagaggcagacaggccctaatggacctatggcc

SEQ ID NO: 6082 - DNA, 817 bp, Artificial sequence
  DNA replication origin
cagaggttgaaagggtgaggccagccccacgtctggctaaggcatgggagaaagaacaggtttccatgacaccaaaaaggaagcagctctaggcccagggacagactgcatatggagaggcaagagagggtggccaggacaactccttcgttttgggcaatggagctgccccatcacatctgggagccagaaaagggatgaatgtgagcagagcaaaggctggagttgagaacaagaggggagagagggatgcgggaagtggcaaaaaaaaaaaaaaaaaaaaaagctcaggagagagggcgggggtctggagttagactaggaagggcgcacagggagtttctcagaagaaggcactgactgagctgcattcctctgcagactgtgaaagaacgtcccacaatcccaaagtcccagatcgaggggtctctccggatgctcgattcatctgtccccgtggggaacggcctgaagggcagattcgagggacggtgggacaagccgagttcctggcagagagaggagctacagcgcgtggaggatggatctcggcaccgcatccgactgtttccagaaggaaactgaggtgtgcaaggaagactgacacctgaaatcccccgagcccttgcatttcaacacccttagagcactgcatgctgctccacactcacgcgaggcggcctctccagcagcctgaactacggggcacgggttggtgggcactcagtgtccgcttgctcccaggggtcagccgtatcagacgacaccggtccccacgcagcagggctgagacgcagactcacacacacacaacatg

SEQ ID NO: 6083 - DNA, 952 bp, Artificial sequence
  DNA replication origin
agggctgagggtgcggggaccagacctaagggctgaggacacggagatgggagctcagggctgaggaggtgttcagggcctcagagggctcctcacaatgtgggctttgctcatcagtggatgggcaggagaggctgcgggtctctccgaggggtgcatggtcctgcctgtgccacaggaaggtgctaatgagtcagcgcgagggcaggggaatgcctgcagagaagcgactgcacagaggcagcagggccgggcagaggctggcacagaggctgggtccagcggcagtggggaccacccgtggacaggagagtgagcaggaggcaccaggactcctggccaagtgccagagaaggcagtggggaccacccgtggacaggagagtgagcaggaggcaccaggactcctggccaagtgccagagaagggccaccacagaggaggtgctggccccgggacggggaggtgggtagagggcagctcagagaggctgaatcccagcatccggtggggccctgagaaatccagcaagaaagtgcagattcgagtctgggatttgggagacagatcagaactggagcagtacgcaggtggaataaagtcaaagctgggagcacagaggagctacgcagagctggggagctgaagaaacagggatgaggcctcagggaccagtggtagggtgtcgggaagcagggaggccacagaggctcacatacagatacatacacacacagatacatatacccgcagaggcacacacagacgcacacagacacacacacacagacacagacagatgcacaaatagacagacatgcagatacatatacacatgaagagacagatacacagatacacaaatacacataggcacaggcacacagagacaaggagaggagaccagagggccagcagaagggtgggtacaatgccaggaaagggcaagggga

SEQ ID NO: 6084 - DNA, 1476 bp, Artificial sequence
  DNA replication origin
ggtctgaagaaaggacctacggtgtcttattaatatgtttatatcgattataagttgaaaggatggtttttataatggtttaatcgaatactaaaattaattccacccatttatttttatccatgttaatgtggctactaggaaattgtaaatttcacatgtggctcccatcatggtacatttctgctggagtatcctggcgtatgtggttcctcgttgtatttcttggaaatcactggtacgaatctgatgaaagggcaatggtttggaactgaaatggttgagtttgtatgaagctttattctacagtcaagccagtgtttagaagaaaacagtatttgcttttccatcttcctccggaagacaaggtttgcctttaggtgtggcatccgggttggccccagggccccgtgggggctgcacctcggctcctggcccagcgtctgtgtcccatccccaggctgcaggaaatgaaaggttgaaaaatcggaagataatttatggtcaggtgaggtagagggagcagctctgtaggttctgccctcagggctccgtggggtggccagtgtgactgtgtgagtgtggagtgtggccggggtgagtgtgagtgtgggctgtggccggggttagcttagtgtagggtgtgaatgggggatgtgggtgtgtgcagtgggtgaggtgagtgtggggtatgagtgtgaggtgtgggaaaggtgacaggtgtgagtgtgagatgcgggtgtgtgtgtgggaggtggggtgtgggtgggtgtgaggcatgaagtgtgggtgtgtggggtgtgggtggggtgtgcgtgtaagtgggtgtgaggtagatgggtgtgagtgcgggaggtaggcatgagtttgtgtaaggtgagggggtgtgggtgggtataggttgtgaggggggtgtgggtgtgaggtgggtgtggggtgtggaatgtgggtgtgagtagtgtgcagtgcaggtgtgagtgtagttgggcgtgagtagtgaggtgaggtgtgggcgtgagtgggtgtgagtagtgtaggtgcgagcgtcaggtgtgaaaagtgagatgtgggtgtgagtaatgtgaggtgtgggtgggagtagtgtgaattgggggcgagtagtagtgaggtgcaggtgtgagtagttgggtgagctgcaggtgtgagtgggtgtattgtgaagtgcgggtgtgtgtgtgtgaggtgtggaggtgagtagtgagatgcagatataggtatgggtgaggtgtgtgtgggtgtgaatagtgtgaggtgcaggtatgggtgggtgtgagtagcgtgaggcatgggtgtgaatagttgtgtgatgtgcggatgtgagtgttaccagttgtgtgatgtgcggatgtgagtgagagtaattgtgtgcggtgcgggtgtgattgcagcagggatagagcttcacttctgctcgccctgctggacgcttcttcgcggagggcacgcgtgtgcggt

SEQ ID NO: 6085 - DNA, 1514 bp, Artificial sequence
  DNA replication origin
cactctggcagccgctgtgcttgccagtggcacataagctgcactcacggcagacacaccgtctggatttgggtaactcgaccagggacacacaaacttgcaaggaggagtgagaccggcgtccatgggaggcagcacgtgacagcagtgacccactgggacctgagagaggaggtggcttcctgagaatcgctggcaaccggcacctgggagcccgctttgggggagaccccgatctgtgcccccagagccagtccactgcctggactggttgtggagaaactccattgtcctactggctggggcagggcgtggggttgcagggcagaaggagcaagggacaggagtgtggatcgtggttcagatggtgcccctggggcccaagctggaaagggcaggatgaggagccaggggcagggtgggcctggggcctggcggaggatggagagctggagtgcagagcctgctggaccagggcagggccgccttgggtccccctgtgaggcagccgagcaagcgagctttgagaagacagtgataggagtggggcaagcacgggcagccctttctgaagaggagcacagagtctgggaggctgcagcgggagttggaggactagagcagtggggctgctgggaagcaggggtcacggtgagcacagggcagcccccagagggtggccacggcagcatggaagaaggtggggagctggcgccccctcgcccaggagtcagtggacagtggacggggggccgaggccagcaggaatagaagccgggcagtggcctggacctgaggggaggacggagcagcaggcccaaggaaaggctgcacctgcagtcaaggaggccacgggagaagaagtggcctggggcagcctcagggcgctgagggacgtgctgagagacgggagatggggggcttccagggaggaggggtggcaaacagagtggctggggctgggaggactgacttttcctggaactccctgggtgagctgggtgttcaaggtgagtgtcttggcctggacaagggcggcgtgccctggctttaatggcaggggccggaggtacttcttctcagagggctctggggaccttcaggctggagggggaaggacttgatctcaagtcagccataggacaggtttgttttcctggagcctggtggttttcttgttttgccgtatttgaaccctgaacttaaacatcatggagtggtggcagaaactttgtcagaaaaccggctcttcatagggaaagaactgaaaccctgatcccagcttcacaccacgcatgattagttcagatgtcatagacctgagcctagacgcaaaactgatcaaactggaaggagacctagtagaaacttttcccaaccttgatggggagggggaggcaagatttcttaggtcgccaaaatcatcggctagataccaaaaacccaaaacatgatatttccacaaactgaaacacttctgctctttcaaaggcaccattaagaaaattaaaaag

SEQ ID NO: 6086 - DNA, 1091 bp, Artificial sequence
  DNA replication origin
gccttctgagtagctgggactacagctgctcatcaccatgcccggctaatttttgtcttttagtagagatggtgtcttgccatgttggccaagctggtctcgaactcctgggctcaagcaatctgcctgcctcagcctcccagaatgctgagattataggcgtgagcccttgtcctggcccaaaatatgtttttacattttaaaaattatccttttctttaccaattagattgtcaattttttttttaaacaaatgctttctgtggccttgtagaaaatactggttggtgggcacctcttcttggaagactgccactggagggtcctcagggtgaagtcacccccacttggcttgatgctttgttaccagtctgtttttttttttttctttttttctctaatggtgggataatttgaaaactcaaccctttccagccaatggtgagcacctgttcatttctcaagacaccctgagcctccaggtggcctccaccagcggggagccgagtgtgcggctggagtgtgtagctggagcgtgtggctggagtgtgttgctagggtgtgtggctggggtgtgtggctggggtgtgtggctggcctgctcaggagagacggggagccgagtgtgtggctggcgtgtgtggctggagtgtgtggctggggtgtgtgactggggcgtatgactggggcctgctgagcggagagtattctcagttatttgtttccggcagatctgagaacctgagtagtaggaactgcttcaggcctgggtcccggcccgggtggagttgctgtggaacgcaggtgttttctgtgtgagtttgctaagcgctgttgggcgttctggaagtgtctttccaaagcagacattatcaagccagggtccttgtggctacaccaggctgggcggctgtgtggcccttttaggcagctagaactggcctcactggttccggggatgcgtgcggtgagagtgggcacatgtccggtgagcttgtggaagtgccctgagaccctggttcctgctccggagtacagaacgtgtgatgatcagcgatgggccaccatggcgtgactggcaccaacagcgc

SEQ ID NO: 6087 - DNA, 1125 bp, Artificial sequence
  DNA replication origin
cgctgaactttgccagagccaggccctggttctctgacgtcaaagctgcttaactgttgggattttattgctctaaagaacgatttctaatgatgtgagcggcctgagggaagaacctggattgacttagcctggaagggctctcctttgaaaggaggccctggagccttacgccccttgcccggccagccctccacaccctccctgaggggatgcgctgtggcagggcaggatgcgtttgtcaggacacagagcctctgccttgaagccagagtccctggcatgaaaccgggagtgtggacggaaagcccacgggggcctgctggcaggacaagctacgcctccttttttttctcccattcccttgttttcctccaaggacagttctccaagtaactgtccttgtctttccttgtggttaagggcttaggatactggtgacttgactggccagcaggaaaggcagacgttgttacttggccacccacttaacactaccccgtccctccagtgtcatttactttcccttccggaatgttcgtgcctagagaaagtcttgcccagaaaagttctcagtgtcaaggagccccgcagtggatttgctgggacgtggatttgctgggacgtgtctgtggtcagcgggatggtgctctcgataggaagcagtgcatttgctgggacgtggatttgctgggacgtgtctgtggtcagcgggatggtgctctcgataggaagcagtgcatttgctgggacgtggatttgctgggacgtgtctgtggtcaccgggatgatgctctcgataggaagcagtggatttgctgggacgtgtctgtggtcaccgggatgatgctctcgataggaagcagtggatttgctgggacgtgtctgtggtcaccgggatgatgctctcgataggaagcagtgcatttgctgggacgtggatttgctgggacgtgtctatggtcaccgggatgatgctctcgataggaagctggttgagcaggcagtggtcggtaacttgagcatcctctcgctcctggaatcttggtgcgaggtacggataatgtttagttcaaaacaaaataagtggccgggtgcggtggctcaaacctgtaatcctcgtgc

SEQ ID NO: 6088 - DNA, 1244 bp, Artificial sequence
  DNA replication origin
cccgcggcaggtggacgccgccggtccacacccgccccgcgcgcggccgtgggaggcgggggccagcgctggccgcgcgccgtgggacccgccggtccccagggccgcccggccccttctggacctttccacccgcgccgcgaggcggcttcgcccgccggggcgggggcgcgggggtgggcacggcaggcagcggcgccgtctcccggtgcggggcccgcgccccccgagcaggtgggctccgggccgccgggagtgagggcgggggcgggcgggcgccggggccggccgggcgccgtttatgtaactttgtcaaatgctgtgagtttgcagaaaaacgtccctgccgggggtccgcggccccgcgcttgtcgtcgccgctgcgagcgcccggggggtcgcgggagggcggggggctgcccgggacccgctcggctcagcccgcagggcgccagcaggccgagacggggcccggtcccgctcgggggtgggatccgcgtttgccggcgttgcgaaaacacaccacggaatcataagcaaattatctcgtatttacattgagcgttgaattatttgacactgttataggaggagaccgtgcgtatcagttggaaaggccgggggtggaacccagtgtactcatttaatgcacatcaaaaatttgtaataacttgaggcagctgatatgagtgttttctttattgcatgttgtaaattgacctgctgtgacacagttttcaaataaagcgttgcagaaattaaacttaagttattttaaaactaatgactttcttcactaaatcctaattgcatgactgtagagacctacctaattgcttgctgagagcagttctgcttgctctccgtgagggaggaaagggcctgtgcagtcactttgccgccccgtttttctctgttcaggcttttctgtttattcccacaaatcaccgaagcagttaaggcctgggagtaagcctgtaaacagtcctggcccagcgccagcccagcaggactggggggatactggcaggtttgcaccttgacctggtttcactttttcttttgtaatatgatcgtggttgcctggagttttaattgcttctgataattctgtgcattattttcgggactgtccaaagaaggctggtgtggtggtttcaggacctagccaggaaaggtggtggtggtggctggggagagggagggtggaagggagggagatcgaattaagaaaactcagctgc

SEQ ID NO: 6089 - DNA, 1254 bp, Artificial sequence
  DNA replication origin
attggctgctggagctgccaattctagagggtggggcgtaccaaaagacgctccaggcgccagccgctgggtgcttcgcggttgaggaggcgcagggaccgggggccagtagtggccgtaaacacgggccccggccgtgtccggtcgcactcggtagcccgcatggctgcctagcggtcagcaccgcatgtctgcgagcctaattcgcgcttagagggcacacaatggggtgcaggctaacgcggggagccggccaggcctcgccgcggcgtccatcttggatactggcagtgggtcacgtggtgctgcgtgcgcacggaggcgcagggcggcccggtcactgagtgcgcaggcgccgtgggcctcgccctgccccgcggcgggaacgcggccgtgagggtgtggggtgtaggtccgccaggcctgcaacggctgccgagggtcgtgggatgcgctcgccgcgtccctgctcaggcggagggagcccggcccgccgccagggtctcgagtccgggtccaggcaggcgtggaggtggcgggaacggcgcaccgcccgggtgggcgttgttttaaggccgcagggcttgggaggcttgtgttgagttacaggtcggcccgtagatccccggaagcgcctttggttgccagcaggtgtcggcgagggtcttcagtggccaccctcctggtggtgatgtttccgtttctttccaacaggagtatgacaacttttcaacttgagtgcacacactgtccccggaatcccgcgttccagggaggaagcgcctttgacagcgcgcgccggttcgtggggcccgacggcgtgggcctgtggttgcggacctggcggagatgcgcgttcgcttcgattgtaggccattccttttaggagctgagaaaggatccgtttttacagcattctcgacctgtgattcttggtgggggaaactagttatgtggataaaaatacagttagcaaaataaaaatgccaattttacatttccttaaatatctcattaataattagaaaactttggtcattgcaagaaatgcttaggctaaacttagaaggaaaggaatggtgaattagagaactttaaaacaagatacagctgaagaaaaggagagcaattacggggttttggagacttggctgctgatggaaacggtgcactatctaattttcatgtagaatgaaacagggtctgtagctagctaacatctagataagattcagtatcatttgacaggattct

SEQ ID NO: 6090 - DNA, 904 bp, Artificial sequence
  DNA replication origin
tgggatgtgaggagcccctctgcctggctgcccagtctggaaagtgaggagcgtctctgcccggccgccatcccatctaggaagtgaggagtgcctcttcccagccgccgtcccatctaggaagtgaggagcgtctctgcccggccgcccatcgtctaagatgtggggagcgcctctgccccgccaccccgtctgggaggtgaggagcgtctctgcccggcggcgaccccgtctgggaggtgaggagcgtctctgcccagccgccccgtctgagaagtgaggagaccctccgcctggcagccaccccgtctgggaagtgaggagcgtctctgcccggccagccgccccgtccgggagggaggtgggggtcagcccccgccaggccaaccgccccgtccgggaggtgaggggcgcctctgcccggccacccctactgggaagtgaggagcccctctgcccagccaccaccccgtctgggaggtgtacccaacagctcattgagaacgggccatgatgacaatggcggttttgtggaatagaaaggggggaaaggattgagaaatcggatggttgccatgtctgtgtagaaagaggtagacatgggagacttttcattttgttctgtcctaagaaaaattcttctgccttgtgatcctgttgatcggtgaccctacccccaaacctgtgctctctgaaacatgtgctgtgtccactcagggttaaatggattaagggtggtgcaagatgtgctttgttaaacagatgcttgaaggcagcatgctcgttaagagtcatcaccactccctaatctcaagtacccagggacacaaacactgcggaaggccgcagggtcctctgcatgggaaaaccagagacctttgttcacttgtttatctgctgaccc

SEQ ID NO: 6091 - DNA, 1259 bp, Artificial sequence
  DNA replication origin
gtgtccctgggtacttgagattagggagtggtgatgactcttaacgagcatgctgccttcaagcatctgtttaacaaagcacatcttgcaccacccttaatccatttaaccctgagtggacacagcacatgtttcagagagcacaggtttgggggtagggtcaccgatcaacaggatcacaaggcagaagaatttttcttaggacagaacaaaatgaaaagtctcccatgtctacctctttctacacagacatggcaaccatccgatttctcaatcctttcccccctttctattccacaaaaccgccattgtcatcatggcccgttctcaatgagctgttgggtacacctcccagacggggtggtggctgggcagaggggctcctcacttcccagtaggggtggccgggcagaggcgcccctcacctcccggacggggcggttggcctggcgggggctgacccccacctccctcccggacggggcggctggccgggcagagacgctcctcacttcccagacggggtggctgccaggcggagggtctcctcacttctcagacggggcggctgggcagagacgctcctcacctcccagacggggtcgccgccgggcagagacgctcctcacctcccagacggggtggcggggcagaggcgctccccacatcttagacgatgggcggccgggcagagacgctcctcacttcctagatgggacggcggctgggaagaggcactcctcacttcctagatgggatggcggccgggcagagacgctcctcactttccagactgggcagccaggcagaggggctcctcacatcccagacgatgggcggccaggcagagacgctcctcacttcccagacggggtggcggaccggcagaggctgcagtctccgcactttgggaggccaaggcaggcggctgggaggtggaggttgtagcgagccgagatcacgccactgcactccagcctgggcgccattgagcactgagtgaaccagactccgtctgcaatcccggcacctcgggaggccgaggctggcggatcactcgcggttaggagctggagaccagcccggccaacacagcgaaaccccgtctccaccaaaaaaatacgaaaaccagtcaggcgtggtggcgcgcgcctgcaatggcaggcactcggcaggctgaggcaggagaatcaggcagggaggctgcagtgagccgagatggcagcagtacagtccagcttcggcttggcatcagaggg

SEQ ID NO: 6092 - DNA, 1146 bp, Artificial sequence
  DNA replication origin
tgcatgtcatgtgctgaggaagggcctggagtgggtcctggctgggatggagccccggctgtccctggaaggttgtagctcacttcctggggagcacagctcgccccagaggagagggaatgttgggtgtttggaccctcctctcctgggatggagaagcactggactgagctgagttctcagggtgacaccaccacctctggcagccccgtggtccctgccgcttggccacttggccaggaggctgtgcttggcagaagtaggacagcagagacacagggggctctggcctagatccggtgggcagcagccacaccccatcttacaaggggggtcccatcattatcttctacagatgatgagcctggagcccaggccgggaggaacttgcctcaagcccccagctgaaagcgttggaggtgggtttgactcaggccttggggactgagcccaggggccccacactcagtggcctcagagtgggggtcggaactgcgtctctcaggtggtcaggtcaggcagcatggtggagcaacacagaggccaggatggagaccgtggggcatgggggctgtgccatgaccggggggagcacgaggctgctgaactgggggtggcagtggtggggagccgagagtagggaaggaggaaaagaggtggccttggcccagagcctagaagtgaggggaggagcctggcggaggagctcatctgccagttggagacctcccttgcggagctgcggcccacctggccgcctgtctggtgagtgcatggcagaggctgggaggtgtggggctgtcttgctccaaggtgtccgcggacagctgagaggaggaagtgaggagggtgcagcctcctgtggacaggagacacccgtcaccggtgcctgccactgtctgggggcggaggacaatggggcaaggacacagtgggggatgcagggaggagaccaatcagtcaggaccccgagaactggcacagggagaagggaagggggcagtgtccgtgtcccctgcagctcccctgtcttcctggacatctgtcccaccgtgccccctgaccccacagggccgcctcacaggcctcactcaaatcctgaggctcctctgacatcaggcctcccaggacgtttctctcctcctc

SEQ ID NO: 6093 - DNA, 1475 bp, Artificial sequence
  DNA replication origin
ggagctcacagagaaaagggaaggtgaccccctggtgctgcccaggacgagctggcctgcggcccctggcctactctggggggcggggcggggagtgtaagcgtgtctctcctgccgaggctgccccacagctgctccctgacagccacgtctggaagctgccttgcagaacaagggcctggtaaacccgggcagaccctagggatccagggtgaggggtggcattgcctggggtggacaaggtgggtccctctgagaggggacatcggagctgagacagtgaaatgggagatggggctgtgcacatccatgggaaaaaaatgtcccaaacagacaaagcctgggccaggccaggaggcaggtgatgcttggtgtgtcagggcgtggggggaagctggatggagcagaggaaggtaaagccggaggggcaggtgggagctgggccgcaggctttcctggggacggtgaggaccgtggattcttcctaaggagtggggggccctaggtgtgggggtctcataggtgggacatgatttgattgatgtgttaaaatgtctacttatgctgccatgggaagtctaggctgtgtgtgtggtgtttgagtttatgtgtgtgtgtgcatgcatgcgtgtgtttgcatgtactgtgtggtgtgtatgtatcctatgtggcacatgtgtgtgcatgcgtggttggagccaccctcagcctgtgtgtggtgtagtgtggcatgcacatgcatgtgtgatttgtggtgtgtgtgcatagtgcggtgtgatatatgtgtgtgcatgtgtggtgtgtggtacgtgtgtgcatgttgatatgtgtgtctccatgtgtggtgtgtgtttttggtgtggtgtgtgtgatgtgtggtgtgcatgtgtgtgatgtgtggcatgtgtgtgcatggtgtggtgtgatatgtgcaatgtatgtgtgcaagtgtggtgtgtgacatggggtggcgtgtgtgtatagtgtggtgtgatgtgtgtgttgtgcatgtgtgtgtgtatagtgtgctgtgatgtgtgtgttgtgtacgtgtgtgtagtgtggtgcatgtgtgtgtgtgtggcatggtgtggcatgtgtgtgtatagtgtggtgtgatgtgtgtgttgtgtacgtgtgtgtagtgtggtgcatgtgtgtatgtgtgtgtggcatgtgtgtgtatagtgtggtgtgatgtgtctgttgtgcatgcgtgtgtggtgtggtgcgtgtgtatgtgtgtgtcgcatggtgtggcatgtgtgtgtatagtgtggtgtgatgtgtgtgttgtgtacgtgtgtgtggtgtgcgtgtgtgtatgtgtgtgtggcatggtgtggcatgtgtgtgtgtggtggggttcagcggggaggctgctgctctggtcctgatgagagaggaagaggctccggggaggaggtggtggtggaggtgctgaggaggttctgttctgaaaaggttgtgaagtt

SEQ ID NO: 6094 - DNA, 959 bp, Artificial sequence
  DNA replication origin
aaactgcagtgctccccacacagactgttcccactgagattcccagcatcagaggagctggaaggagggatccagctgcgggcttcaaggaccctggagggctgaggtgaagaggacaaggttgacagcccaacgttagcagggacatggcccaaggtcagcagggagacagccctgggtcagctgggggatagcccaaggtcagcagggagatggtccaaggtcagcagggagacggcccaaggtcagctggcggacagcccaaggtcagcagggagatggtccaaggtcagctggggaacagcccaaggtcagcagggagacggcccaaggtcagctggcggacagcccaaggtcagcagggagatggtccaaggtcagctggggaacagcccaaggtcagcagggagatggtccatggtcagctgggggacagcccaaggtcagcagggagatggtccaaggtcagctggcggacagcccaaggtcagcagggagatggtccaaggtcagctgggggacagcccaaggtcagcagggagatggtccaaggtcagctggcggacagcccaaggtcagcagggagatggtccagggtcagctgggggacagcgcgaggtcagctgggacacagccggtggtcagcaaggagcaacagtgatgtgggagaggtccaggagcagagagtgaggggcctgtgcctttagccagtacagcaggaatccgtggtgggtcctggtggttgttggggggactccgtgagggaggcggtgttggagatggactgaagtgaggcggggcatggcccatggagggataagggaggcagaaggggccgtgtagggagcacctaggctgtggggtatgcagaaggggcgcttggtgaaaaggctgctgggagggttggcagctgttgggggaggttcttgctgcagagctggggtttggtttggaaggca

SEQ ID NO: 6095 - DNA, 864 bp, Artificial sequence
  DNA replication origin
aaggaggcatgaagaaggcatatagaagcctgaaggaggtgtgaagaaggcataaaaaagcatgtattaatagaaggcggaagaaggtgtgaaggaggcatgaagaaggcatgaagaaggcatgtagaaggtgtggaggcataaagaaggcatgtagaaggtgtggtggagacatgaaggcaggttgaaggtgtgatggaggcatgaagaaggcatgcagaaggcatgtaggagtgatggaggcatgaagaaggcatgtagaaggcataaagaatgtgtgaaggaggcatgaagaagccatttagaaggcatgtggaaggtgtgaagaaggctgggaaggaagggaacacagctggaatggagagtgggggagcatggtgccaaaggaggctggagaccccacagggctggcaggacaggtgcagtgcaagcttgtcccggtttccaggggacgaagccgacaggatggggctggcttcttgagcaggtcatgtggctgtggcatgggaaactgacggcagcaatgttaggagaaagagcgcggccaaggtgagggaagatgggagcttgtgttgaggagcaggcagtggagatgaagagagacaggcaaatgggagaagaataaatcaggagctgaagtgagaggattcggtgttggattagctgtgggagggtgtgtgaggagggtgtgtgttgaggctgactcgtgccccacctggctcagagcactggacacctggactgtggtcctaaaggaccacatcgaaggtgggaggtgatggtgaaggtacagcgggggtggcaggcaattcagttggggacatcaagtttgaggtgcttttgtaacattgagcggggtttggg

SEQ ID NO: 6096 - DNA, 770 bp, Artificial sequence
  DNA replication origin
gtcaaggctgtgtgggctccaggagggcctgggcctgcagtcaggctttctttcgtggtctgtgctccaccactttctgtgacctcagacaaccacggtcctttcttcatccgataaatgggcattcattcattctttcattcaacaaacatctacggcatggcccctgtgagctgaactgcagtgctgagtacaacatggagccctgtggaacccagtgttaaggggcactgaggggaagctgaacgtagctccctccgtcatgaggagagctcggcagagccaagaggccaggaggtgtggacggcagtgggaagcctgtcgggctgcggtgcctccttgagatctgggggagggaggccggggtccagcagggtgtagattgctccagacagacagcagagagggcaaaggccccaggcaggagacctgaagccataagcaggccaggtggctggccaggaggtcgggaggccacagggtcataggtcccgcagggacacatgggctgcagtgagggttttggcttgtcctctgagtggagcagggacgtaggggagctgccatgatctgtctgatgtttggaaagggtcactctggctgatggggaggagttgcaggtacaggaggaagaggaagcagggggtttaggggcttgagggcctggttgaggaaggatggctgggacccatgggagccatcagagcctggagaggttttgaacaaggactcatcaggactcattgacagattggctgggtatgtgagag

SEQ ID NO: 6097 - DNA, 784 bp, Artificial sequence
  DNA replication origin
ggatcataactcactaagtgggtaaagccctggcggctggttaggaaagtactcccagatcagaggctggggcttggtgggcctgagatgtgagcccaacactgaatacagacttacaccaaccagattcaaacaccagccctgctcctggggcccctctgctcggagaggcctcgtaggtggtcaggcctctgtttgaggagctcagaggagccccgggaggtggcgttcatttgctacaccatggccagcagctgggctctgacagcaggcacggtgggcagcagtggggacatcatttggccccacagcacacggtgagccccgcctgcaggtgaggctgggtgcagaggagccctcagatgcaggagccttgggcctgagcaaggacggaggggatcggccatggaagctcccagagtgggagcgtgagaacaaagttcggagggtggtcagccagtctgaggctccctgatgtggcggggtgggggtacaccaagagggggaactgcaaagggcaaggggagggtgatgagaggtgggtgtgtctgggcgctcacacctggcaggtgccgtctggccccaggaaggagtgtgctggtgatcttatgggctctgggcattcctgtaggttttgctggtggtggaggctggggggacaatcccatctgtgtgcattttggagaggtctctgatgcacagcaggagggcgggaacagacaaatgaaaccagccaggaggccatcgcagaggccccaggagatgagagggctgcttgttccca

SEQ ID NO: 6098 - DNA, 897 bp, Artificial sequence
  DNA replication origin
aggccccaggagatgagagggctgcttgttcccagctggtggcagtagctggatttgagggagctcagtaggagaggtggcaacggctgaggctgggctgggtgtcggggcaaagcataggcatggcctgtttcaggtcaaccttcttgcagtgcacggagcacaggactccagatacttggcagtttttcttgcttccacctctgagcattggcagcaacaggtgcagagtggaggtaaggaggcgactccacggttgttacgggcaggggctgtccctggccttcatccccacatcagggcacagtggcctggagtggatggtcaggtcacctgcatttgcttcttggttagcacgccggcctcctacccgcatgtaccctcaccgcactcccgcttggacctcctgagtctcagcctgaactcaggactatttctcagtccgcatattgggcatctgatgaagtcaaggtgtcagatcggacggatgccgactttgtgtgtgcttgtgcagggtggacatggagaccctgggaggggggctcaggggctactgcattggaacgacatcgtgcagtctcagtgaacatctacctagtcttctgactgttgtttgacacgattgcacccatgtccctggcagtcagtcccatcaggcattggaagatgcctttcctgggcttcctgctccacagctgaagtgggagggctgaacgggcccaggactcatgcaggaaaatagccctcagcagccgagcagccagcgtgaatgatgcattgctctgcctgatgcctcctgtgtgatgtggggggctcagagatgaccaggacccaatccttgtacccacggggccccagtctgccaggtgaggcaggccagacccaagtgaggagttc

SEQ ID NO: 6099 - DNA, 2076 bp, Artificial sequence
  DNA replication origin
tacagtgacaaaaccctccacacaactgccccactaccaattgacccagacgcaagtttagggcggaggcaggggtgtggtcagtcagcttcgaggccccacacaaggattctattgagagaaatcaaacagaaaacgtgaggccaggccaggcgcggtggctcacacctgtaatcccagcactatgggaggccgaggcgggctgatcatctgatgtcaggagttccagaccagcctgaccaacatggcgaaaccctgtctctactaaaaatacaaaaattagctgggcgtggtggcaggtgcctgtaatcccagctactcaggaggctgaggcaggagaatagcttgaacctgggaggcagaggttgcagtgagccgagattgcgccactgcactccagcctgggagacgagagtgcaactcaaaaaaaaaaaaaaaaaaaaaaaaaggaaggaaggaaggagggagggagggagggtgaggccagatagggtcacagtctggctggatgacaagaagttctggtttagaaagaagggacgagggacaagtggtgtggctcaccagagtccaggcctgaggtgcaggcaagtgaacatgtgggctcccaggggcacagaggagagcagaggaaggggaaggtgtgagggacacagaagacaggagggaggggagggatgggagcagcggagagcagggaggggagagacgggagcggcggagaggagggagggtaggaaggagagcagaggagaggagggagggaaggcatgggagcctaggagtggagggaggggtgggaatggagcagaggagaggagggaagggagggaaggggagcagaggagaggagggaggggacggaaggggagcagaggagaggagggaggggagggaaggggagcagaggagaggagggaggggagggaaggggagcagaggagaggagggagggaaggcatgggagcctaggagtggagggaggggtgggaatggagcagaggagaggagggaagggacggaaggggagcagaggagaggagggaggggacggaaggggagcagaggagaggagggaggggagggaaggggagcagaggagaggagggagggaaggcatgggagcctaggagtggagggaggggtgggaatggagcagaggagaggagggaagggagggaaggggagcagaggagaggagggaggggacggaaggggagcagaggagaggagggaggggagggaaggggagcagaggagaggagggagggaaggcatgggagcctaggagtggagggaggggtgggaatggagcagaggagaggagggaagggacggaaggggagcagaggagaggagggaggggacggaaggggagcagaggagaggagggaggggagggaaggggagcagaggagaggaggagaggagggaggggagggaaggggagcagagagagccaatactaaccctgggcagtaacagcatccaagctagagggaagaacggcctttggcagaagtccgggggaatggccagcggtctttagtggaggttcaggactgcaccagtagggcctaaggaaagagcttaaggaagcccacagtcctaacagtggctggctggggacatagagaaggccacgagagttggaagaaatagccagaaatgatgacagaaagtcattggttggctcaaagagagtagtttctgtaaaaatattttttaatgaaaagaagaagccagatacaaaaggttcaaaagagaaggagatggtgaagtcaaggccatgagagtggggcagacacaagaggggacggggcgggggtcggggggcaaaggcagaaacgagagcacctctgagacccttgcgggcagggtgccaggcaggtctgttggcctaagggagagggcactgtggggctggcagggcccgtcagagttgcactgcattcctccaaatgtcagggcccccatgcacctgccttgatctgacattgaatgtgaccatccaggaaggcaatgaaaaacacacttccacagaactgtgccaggacagtgaaaacctctccaaca

SEQ ID NO: 6100 - DNA, 867 bp, Artificial sequence
  DNA replication origin
ggggggaacccaacagactcacatttcatgtgaaaggaatttctgcggatatggaaaaagcaatggcggatctccacccttgaaactccaacagtctatggtagcgatgagatccaaacctgcgaatatttagatcataacaaggttactaacaatgccgcctcacaccagagggtgtctcgtcggtacttgacaaatgaatcacctaggagcttctccgtaggtggccaggtggagaggtgactcaaggctgggtggcgaagccggctctggactggtgcccgcctctgatgagggaggcagagggaggtgtctcaggtggggagggctggagctcagcatggattcaggacagcaggaggaggggcagtgagccccgcagtggggagcagagtggggaactgagtgaggaacagctggggccaaccccagagtcacagaagtggcctagtgtggctccacctagtctggggggcgggcggggggttgctggacatttactgagatggagctcagcaatgttttatgagaaagaacctaacacgatgtggggctcagcaatgttttaggagaaagaacctaccccgacggtgttggagcctgcgtgggaggggcgggggaggaccaggcagtgggggaggagtcaccgcgccagccgggcctggaccagagtgggggctgtgtgaagggaaaggcagggcgtggtggaatagatacagtgacaaaaccctccacacaactgccccactaccaattgacccagacgcaagtttagggcggaggcaggggtgtggtcagtcagcttcgaggccccacacaaggattctattgagagaaatcaaacagaaaacgtgaggccaggccagg

SEQ ID NO: 6101 - DNA, 1608 bp, Artificial sequence
  DNA replication origin
tgcaggagaatatgtgggccatgcctccttctgctccctactgtgtaacctgaggcaagtgaacttacttctttgtgctttatgtctcccatctgtaaaatgaagacaatcaccatcccccctcttaggattaccacgagaatggaatgagttaacacacggaaaacattcagacaggggcctgaacttcgggagtgctcaataatagctgtttttattgttgtgattgacagagaacctctagaaataatttcatttctacctcccggtggtcatgcaggcagccattattttggtctgtgatgagcagtcagggttcaggcaggaagacagaaacattctaggcatttgcaacggagggatttaatatagggtatttgttacactggagacagagtcctgggaagctgagcaggaagtggcaaagcaggtcaagtcccccgagaagtggccatcaaggcttcagtcgacctgcctgggatctactggggagaggccttcgaggacaggagtgggtgggcagggtctcggagaccccacagggtggcccctgtgaaggggcggggtgaggaggaggatggaaggaggagtgggtgggcagggtctcggagaccccacagggtggcccctgtgaaggggcggggtgaggaggaggatggaaggaggagtgggtgggcagggtctcggagaccccacagggtggcccctgtgaaggggcggggtgaggaggaggatggaaggaggagtgggtgggcagggtctcggagaccccacagggtggcccctgtgaaggggcggggtgaggaggaggatggaaggaggagtgggtgggcagggtctcggagaccccacagggtggcccctgtgaaggggcggggtgaggaggaggatggaaggaggagtgggtggctgcagcacagccctaagaaagcttgtcttgggggctgggcgcggtggctcacgcctataatcccagcactttgaggggctgaggtgggtggatcccctgaggtcaggaggtcaagactaccctggccaacatggcaaaacctcatctgtactaaaaatacaaaaagattagctcggcgttgttgtgtgagcctgtaatcccagctgtttgggaggctgaggcaggaggatcacttgaacttgggaggcagaggctgcagtgagctgagactgctccattgcactccagcctgggtaacacagtgagactccatcttgaaaaaaaaaaaagaaagaaagaaaagaaagtttggttggggcagtggggccctctttggagctctgctcaccatcctccatcctgtcacattagtaggtgacgtggtccctgtctgcctctctgatgtagcgtccagcctatggggaagggagtgaggtggtctgccctgctttctgtggcaccttcggtcccagagcgcctgcacctgtcacagaactgggacagagcagaccctgcagtgtgcagcagcgctgagaacccccagcccttctgccctggctcagtgttgggattcaggtctgggcaggtcaatgaggtggaattggcctcagacttggagtcctgggtttgggttcttgctctgtcccttgtcacgacca

SEQ ID NO: 6102 - DNA, 2463 bp, Artificial sequence
  DNA replication origin
atatatttataacatataaaataatatagattatatactagtatatataatatacgttagtataaaataatacattatatattgatgtatatataagtacatatatattagtatatatttttatctatttataacataaaataatatatattagtatataacatatattaataatacatattacatattagtatatataaattagtgcattagtaaatgtactaaaaccactgaattggatactttacgtgagtgaattgtacgatatatgaacatatctcaatgaagctgctataaggaaaccatgattaactggtcctattcatcagaaagtctctgtgagttgaaagaagcagatctaaggctccccatggcataaaaagaaaacacattgaaaagaactcggttgttttcagtggagacctcagctagaaactaaaactctgtgagaatggattggcttttagcttcctatggagcttcctatgcccttccccagggcagggcagggcaaggcagggcaaggcagggaagggcagggcaaggcagggcaaggcagggcagggcagggcaaggcagggaagggcagggcagggcagggcagggcaaggcagggcaaggcagggaagggcagggcaaggcagggcagggcagggcagggcaaggcagggcaaggcagggaagggtagggcagggcaaggcagggcaaggcagggaagggcagagcagggcagggcagggcaaggcagggcaaggcagggcagggcaaagcagggcagggcagggcagggcagggcagggtagggcagggcagggcagggcagggcaaggcagggcagggcaaggcagggcaaggcaaggcagggcagggcagggcaaggcagggaagggcagggcagggcagggaagggcagggcaaggcagggaagggcagggcaaggcagggaagggcagagcagggcagggcagggcagggaaaggcagggcaaggcagggcagggcagggcaaagcagggcagggcagggcagggcaaggcagggcaaggcaaggcagggcagggcagggcaaggcagggcagggcagggcaaggcagggcagggcagggcaaggcagggcagggcagggcagggcagggaagggcagggcaaggcagggcaaggcagggaagggcagggcaaggcagggaagggcagggcagggcagggcagggcaaggcagggcagggcaaggcagggcaaggcagagcagggcagggcaaagcagggcagggcagggcagggcagggtagggcagggcagggcaaggcaaggcagggcaaggcaaggcagggcagggcagggcagggcaaggcagggcagggcagggcagggcagggcagggcaaggcagggcagggcagggcaaggcaaggcaaggcaaaagaaaggcagggaagggaagggaaaagaaaggcagggaagggagagaggtagggaggggagcagggaagaataaagaggattagctccacaccaggagacggagcacacttcccctctctgactttcagtgttttaaacaccttcctcctccagagtgccctctggctccctctgacctggattcccagctctgagtttttcatgtaggatgacccgtcccccttcccacgcctgtctctgctgagtctgggtcagatccagactggccaacttgaagtccttgaattccacacttcgccagccagaagctgcttttggcagccctggaggtaggtcagagggcaaagagagaatcttggaggaagagatcccaaaagttccgaagttccagctgagttagcgttttagaagagctagaatgaccgacccttcgtgggaaaagagtgctgttcaactctaacaaggccttagggaaaaagagagagagaaagagggggagacagaggaggagggagggagagagggaagaaaacagagagaaaggggggcagaaaggaggggtagagagggaggagaagctcagaggaggaggatggagctgtggtcggcatcaggggtcccctctttacacagcccactgtggtatccctttcatatgagcagccagccccagggtctgcagggtgcatagtttttttctaattaacaacaacaaaagagcccccttgatcacccacatttgcatcccctccccacactcagggttctgatggtgcagccaggagctccaccctgaaacccacccagatgtgaatcccccaggcctcatcaagtggtccccagaatcttcctcctcccattagcaccttcccagaaaagctcttacggtcacagccttcctctaagcaaatggattcccaccagagggtctgtgtctcaggggcatgaatgagtctgggaaatcgcatccacagagtcaactgtgtggccctttttctcctactgttctggttcttaacctacataccatcagatcataaat

SEQ ID NO: 6103 - DNA, 893 bp, Artificial sequence
  DNA replication origin
gaggagtccagcacccgcccacagtcacgcaactggggatggatggagctggaatttgggatggactactggccttcgaagctgatggctgcaccccacaccattcaggtggggtcctggagctctggagggctccacagcctggggaggtctccccatccagctgcctccttgtttcccacagctgagggaggcagccccggccttgaggtgcagggggagttccatgctcaaccccacagctaagggtggtggcctgagggtccttgcaggcctcagtgtccgggtgttggctgtagcagaggacacacctggccctgcaggagatgtggtcagtgatggtgcatctctgtgggctgagtgacccggccccactcaggtggtacctgagcctcggggggtgacccgcctgcccacatcatcaggcaggccccagagagggcagcagctccatgtgcatgacagcactcggcccagtggggatggccaaagtccagctgaggtgacaccatgccctcccatgagaaatacctggacactggggcattgaggggtggggaggggcgctgaagggctggcacatgggggaagacggctgtcattctcctgtctggtgtgtgatagggccatggagtgggggctgggcatcggagaggcacggcctcctgctttccagctggcagaaggtggacagggacggtggccagcacagacgaggggcaggtggagaaggcgggcgcagcaaagtggacagattgtggcccatgtctctaatacatggaagggaaaggagggacacatggacacttccaagctggaggtctcttctcaagggctgggacttgtgtgtccagaaagcctcctgctctgtcctagaactgcagtgcagggat

SEQ ID NO: 6104 - DNA, 1601 bp, Artificial sequence
  DNA replication origin
acccctgccaccccggtggttcacagctgtgcccagcatgaggctcaggcatcacccaaggactcttggggtcagagcccatgcctttaggaagccacccagcatgggagaacttgaggagggaaacctgtgtgtgtccccttgcaggagccggcttgtatccctccaggtccgtgctctggagaggctctggagaattccctgtgggtccaaggaggcaggatgggtgcctcactggcctggcagggaggaggctggagggcagcaaggatggtagagggtgaaggtggaggataggaaggaaggttgaaggtagaaggtggaggaaggagagggtggagggtggagggaggaaggaaggtggcaggtggagggtgggagggtgaggttgtaggtggagggtgggaggtgaaaggtgagaggtggaggggaggaaggagggttgggggtggagtgggagggtgggaggtgggaggtggagggtgggaggtggagggtgggaggtggaggggaggaaggagggtgggaagaagacctcgagtgtctgcccagctcaccagcacctattggggccagtggccagtcctgctgcccgcatctctgccctgcctgattgcatgtttctgagtgtgagcccttcccgtctgtctcatgaccacaaccctcctccaaactctgctgtagtcttctctgtagggaaacacgtttggcatatgggggtcacaccttacccgtaccctgggtccttccttcccagcagccttggcacagaagagtcagcgctctggagggcacagggggtcactgctcagccctggggtctggaaggcccactggagccaggagtgcgctcccagtggccaccaggagcctggccgaggtctgagtgaatgcaccgcacattggaatgtaaacaggcgggcacctggtgattggtctacttaaacccaaacaggaccccaacgccctccacgacccacaagatgcactctggggctgagatgaaggcccacacaccctccaggcccaagcttccctcttcttgttccactgttcctccgtcgtctccctgcttcctggcttcaccagcagatgctcccccaaaccccatggtgggaaaagctcaggaatgaatcaaggacgaatcccatgggactctgtgggagccacatcttgggtgtcatgatcgcaatgcaaagcaggcagtgtccagggcgggcaggacaatgactgtggacatccaggggtgggtggtgatcctgttgggatgaggatacaattaggaaaggcaatgagacccttgaggaagggcaggactcaggaagataggacaggggctgggagcctggctgcagagaccagcagaaacaaagcaggagaggtcacccagccgggaagcagagagacccgcagaggctggagcagggccagggggagcaatggggaatccagaacctaccatcgatgaagcgataagaccgtcgggcaggaccagatgtgaggtagacagatgtgggagaaaagagacataattatcagcataagtaaaacgacaatatctaactttttgagcacagatgaagccccaggtgtggtgccga

SEQ ID NO: 6105 - DNA, 1365 bp, Artificial sequence
  DNA replication origin
ggctgggctggggatggggccggggctgggctggggatggggccggggctgggctggggataggctgggctggggatggggccggggctgggctggggataggctgggctggggatggggccggggctgggctggggatggggccggggctgggctggggatggggccggggctgggctggggataggctgggctggggctggggctgggctggggctgggccggggctaggctgggctggggacggggccggggctgtggctggggctgggctggggctgggctgggctgggctggggctgggctggggctgggccggggctaggctgggctggggatggggccggggctgtggctggggctgggctggggctgggctggggctgggccggggctaggccggggctaggccggggctaggccggggctgggctgggctggggatggggccggggctgggctggggctgggctggggctgggctggggctgggctgggctggggctggggctggggtttggggttggggtgcggcaggaagaggggattgcagcctcctgcatgctgtggctgacagaggtgggatgggctgggcattggtacggggaggggtgatgagtcctggggtcgttgtgtggtggcggcagcggggccccggggcctgcagctctgtggaagtgccgggctccactccctgccccccgtgccctgctgcgacctggagagaagcactcaggagcctgacttgcctgcaagggaaaagccatgtctccttttccgggtatttcactggcaagaatttgagggcgggagtcaaaggctttttccaccgctagttttgttgcgtccatttttcagaacctgtgaaggaaccaggttcacgtgactccgatgacgtcagagctcctgccttgaaagacccggtgcttttgaggatgggcttgtctgtgtcgctgggcgccacattccggaggccggaggggagagggaagaagcgaggcgctgggttggggggcgttgggttgggggctcctgggggtcctgccttgtcctcagggtggagggtgggaggaagaccccgagtgtctgcccagctcaccagcacctatcggggccagtggccagtcctgctgcccgcctccctgccctgactgatcgcacctgtcagggtgtgagcccttcctatctcagggtgcccgacaaaggtgcagttccaggtccgagcacacaggggcgcgttgacccaaacacagattggccaaccagccatgcgtggcatcccgtgtcctaccgagaccagcgactgcctcctaccctcctcccgtgggcatcggagcttgagcaaagccgggaaaccagtccgtc

SEQ ID NO: 6106 - DNA, 1300 bp, Artificial sequence
  DNA replication origin
atttttctcctgaatttagcataggcctggcttgtagtaagatattgataagtggtggatggatagataaataaacagatgaatggatggatggatggatgggatggatggatagatgggtggatgaatgaatggatagatgggtggagaactggatgatagatgaatagatggatggttgcataaataagtgggtagtggatgggtggattgatttttgggtgggtgtgtggatggataagtacatggatagataaatggatggatgaatgaacaaaagaatgagtgagtggatggatggatggatggatgggataaatggataggtaggtggatggatgggtggacaaatggatggatggaaagatgaatggatagatggttgcataaataaatgggtagtggattggtggattgatgcgtagatgggtgggtgggtggatggataggtggatggatgcatgaatggatgaaaggatgtgtgaatgggtggatggatagatgaatggatggatgaaagggatgggatggatagatgatgggttgatggatgggtggaaggatgaatggacaaatggatggatgaatagatgaatggatagatggttgcacaaataaatgggtagtgggtgggtgggctgatgcatggtggagggatggatagataggtgaatggatgggtgaatgaatgaaaggatgggtgagtggatggatggatggatagatgggtgggtgggcaagtgagtagatgcatgggtggtaggtggatggacaggtaaatgagtgaatggaagagctggtggatggctagatgcatgtacaggtggatgtatgaatgatgggtggatgaacggacgagtagatggatgggtggtaggtggatggacaggtaaatgagtgaatggaagagctggtggatggctagatgcatgtacaggtggatgtatgaatgatgggtggatgaacggacgagtagatggatgggtggtaggtggatggacaggtaaatgagtgaatggaagagctggtggatggctagatgcatgtacaggtggatgtatgaatgatgggtggatgaaaggacgagtagatggatgggtggtaggtggatggacaggtaaatgagtgaatggaagagctggtggatggctagatgcatgtacaggtggatgtatgaatgacgggtggatgaacagatgagtaggtatgcgggtgcgtgagtggatggatgggtaagtgcatggatgagtggatgaaagaatgaaagtcaggcgtgatcaagcgttgacgattatggtct

SEQ ID NO: 6107 - DNA, 4159 bp, Artificial sequence
  DNA replication origin
  misc_feature (3497)..(3497): n is a, c, g, or t
cccggcagcacactcccaggaccagggtgaccccaagcatcacgggctccgtgaccctcctaggtcctgaggccccatggaccggtggtttcccgcagcacagtggaggtccaggtgtcagagacagggaggggctggacaggcctgaggtggactctgcacatctggggtacccaggaaaggccagagcctcagacgcccctggcgatggacaacctgtgttgggggttgagggggtgaaggtggaggatgcctgcaccccactgctatggaggcgggggcccctgatcagagcaaccgcttgggtctggggctggtacgagtggcctgagtttggggccagcttaagtccccaggacagaacacggcccagactggagggcataaattgaggacgagggccttccagggagccctgaggtcctggagagcagctttggagcagcaggggcctgtgtgtgcacatgtgtgtgcctgcgagtgtgggtgtgtgtgtgtgtctgtggtgtgtgtgaggagggatgtgtgtatgatgtggtatgtagagatgtgtgtgtttggtcagcatctaagtgtgtggtgtgtgtatttgtgcatatggtatgtgtatgcatgtgtgcagtgaacatgtaggttcatgtgtgtgcatgtgtaggtatacgtgtggtgtgtgtgatttgtgtggtgtgtgtaggtatatgtatgtgtacatatgcgtgtggtgtgttgtgcttgtgtgtggtgtgtaggtatgtgtaatgcatgtgtgtggtatgtatgtgtatgtattatgtgtgaatgtgtgtaggtgtgtgtgatgtgtgtagtgtgtaggttatgtatgtgtgtggtgtatatgaatgtgtatggtgcgtgtgtgtgtgtatggctggtgtgtatgtatgtggtgtatgtaggtgtgtacatgcaatgtgcatggtgtgtgtcatgtgtgcatgtgtgtggtgtgtgtatgcatgtaatatgtctggtgtgtgtgtgatgtgtgttgtgggtgtgtaagtgtatgtgtggatgtggtgtgtgcaagtgtgtatgtgcaatgtgtgtggtgtgtcatgtatgcatgtagatgtgtgtgatgtgtctggtgtgtgtggaggtgtgtgtgtgtggtgtgtgtgatgtgtgtactggtgtgttcgtgtgatgtgtgtggtgtgtgtgtgatgtatgtagtgtgtgtgtatgtggtgtctatgatgtatgtaggtgtgtgatgtgtgtggtgtatgtgtgatgtgtgtggtatatgtgatgtatgtggtatgtgcgtctgtgtggtgtgtatgatgtatgcaggtttgtgtgtggtatgtgtggtgtgtgtggtgtttataatgtatgtggtgtgtatatgtgtggtgtgtatgtgtgtgcatatatatgtggtgtatgtatgatgtatgtagttgtatgtgatatgtgtgatgtatgtggtatatgtgatgtatgtggtgtgtgtgcatctgtgtggtgtgtatgatgtattgtgtgtggtatgtgtggtgtttgtgtgcatgtgtggtgtttgtgtgtgcatggtgtgtatgatgtatatgttgtgtatatatgtggtgtgtatgtgtagtgtgctgtgtgtatatgtgatgtctgtgtggtgtgtatgatgtatgtaggtgtatatgtggtgtgtatgggtggtgtgtttgtgtgtggtgtgtatgggtggtgtgtttgtgtgatgtttgtgtatgtgtgatgtgtacagtgggtaagtgatgtgtgtgtatatgtgtggtgcataggatatatgtaggtgtatgtatgtggtatgtgtgatgtgtatatgtggtgtgtatgtgtgatatgtgtggtgggtgtgtatgtgatggtgtgtatactgtatgtggtgtgtatatgtgtggtgtgtgtagtgtgctgtgcttgtggtgtgtaggggtggtgtgtatgtgtgatgtgtgtgtatgtggtgtatgtggtatgtgtgatgtgtgtttatgtggtgtatgtggtatatgtgatgtacgtggtgtgtgtgcacatgtgtggtgtgtatgatatatgtaggtgtatgtgtgtatgtggtgtgtatgcgtgatgtatgtatatgtgtgatgtgtgtgtatacgtgtggtgcatatgatgtatgtgagtgcatgtgtgtatgtggtatgtgtgatgtgtgtggtgggtgtgtggtgtgtgtatatgtgtggtgcgtatggtgtatgtacgtgcgtgtgtatgtggtgtgtatgtgtgatgtgtgtggtgggtgtgtatctgtgttttgtgtctgatgtatatgtgagtatgtgcaatgtgtgtggtgggtgtgtatatgtgtggtgcatatgatgtatgtaggagtgtgtgtatgtggtttgtgtggtgtgtgtaagtgatgggtatgtagtatgtatgagtggcgtgtgtgttggttgtgtatgtgtgatgtgtgtggtggatgtgtgtgatgtgtgtggtgggtgtgtatctgtgtgatgtgtataatgtatgtaggtgtatgtgtcgtgtgtatgtgtgatgtgtgtggtgggtgtgtatgtgtggtgtgtggtgggtgtgtaatgtctgtgtatatgtgtggtgcgtatgtatgtaggtgtgtgtgcatgtggtatgtgtgatgtgtgtggtgggtatctatgtgatgtgtgtgatgtatgtaggtgtatttgtgtatgtggtgtgtatgtgtgatgtgtgtatgtggtgtgtgtgtgatgtgtgtggtgggtgtgtatctgtgtgatgtgtgtgacgtatgtaggtgtatgttgtgtgtatgtgtgatgtgtgtggtgggtgtgcttatgtgtggtgcgtatgatgtatgtaggatgtgtatgtatatatgtatgtggtgtgtatgtgtggtgtgtgtgttggttgtgtatgtgtgatgtgtgtgatgtatgtaagtgtatgtgtcatgtggtgggtatgtgtgatgtgtgtatctggtgagtatgtgtgatgtgtgtatatgtgtggtgcatatgatatatgtaggtgtgtgtctatgtggtatgtgtgatgtgtgtggtaggtgtgtatctgtgtgatgtgtgtgatgtatgtaggtgtgtcatgtgtgtatgtgtggtgtgtatctgtgtggtgtgtgtgatgtgtgtggtaggtgtgatgtgtgtgtgttgtgtaggcctgatgcatgtggtgtgtatctgtgtgtatgtggtgtgtggtgtgtaggcctgatgcatgtggtgtgtatctgtgtgtatctatgtggtgtgtgtgtatgtggtgtgtaggtgtgatgtgtgtgttgtgtatctgtgatgtgtgtgtatgtggtgtgtaggcgtgatgtgtgtggtatctgtgtgtgatgtgtgtggtgtgtaggtgtgatgtgtttgctgtgtatctgtgtgatgtgtgtggtgtgtgtaatgtatgtaggtgtatgtgtgtatgttgtatgtaggtgtgatgtgtgntgtgtgcatctgtgttgtgtgtggtgtatctgtgtgatgtgtggtgtgtatgtgtaatgtgtgacatgtgtggtgtgtgatatgtgtggtatgtgtgacgtgtgtggtgtgtgatgtgtgtggtatctgtgatgtgtgtggtgtgtgtgtgatgtgtgtggtgtgtatctgtgtgatgtgtgtggtatgtgtgacgtgtgtggtgtgtgatgtgtgtggtatgtatctgtgatgtgtgtggtgtgtgtgtgatgtgtgtggtgagtatctgtgtgatgtgtgtggtatgtgtgacgtgtgtggtgtgtgacgtgtgtggtatgtatctgtgtgatgtgtgtggtgtgtgtgtgatgtgtgtggtgtgtatctgtgtgatgtgtgtggtgtgtatctgtgtgtggcgtgtgtgtatctgtgtggggtgtgatgtgtgtggtgtgtgtgatgtttgtgtgtcaggggtgcaagggctcccccgtgttctggatccacacaactaaggagagtgggcttcaaacctttacttttattttaaacaggaaatgtccctgttgccactgaggctcacggggcgctggcagtgatcacacgagcagagagacagaggaaggagggagggatggattgaggatggcgagtttctccctccctgcccgagt

SEQ ID NO: 6108 - DNA, 1467 bp, Artificial sequence
  DNA replication origin
ctgtggtcactgtcctcttcgtctctaggtcccagcagaccaggagcacagatgggtcagcctactcagttctccactgggctccctgttctcagaatggtctgtgtgtggagaagactcctaagtgcctgggaataggtaagtgagttggggcagaggcctggcaggcatcctggagagggaggatgtgacgtggactgggtcagtgatggatggtggggataaggaagagagggtgaaggcaagattcttctctacagggcactgaaagccagtgcccggctaagatagatgtgggggtgaaggagagactgggaaactgggttctgggtttctggtttgggcgactgggtggatggggtgtctttacctgagctgcttcctgaagaaggggtcagggttgtgggaagagacttcgtgttccacttgggacctgctaaatttgaggtacctcaggatcgtgcctgtagccatattcatcatggaagagggctcctgatttgggagttggtggctcatatatttcagccataaaaagatatgacattatcaaaagacagccatggtgagagaagaggcgagggtcaaggagagaatgttggtgagggagaaaaggggatccatagagaaggtcagaagggacagccacagagacggaggaatgcaggagggggcattggcagtagaagctggcgtggggactgttgacagagcaacaaggcagagaacaagaggagccaagtcctgaaatggcccactgggacaacaagaggacccaggctggagagctgtggaggaggcagaagagacagatcttactgacagatccggtgttggggactgatgagagggagatccagaggaggtggcaggaaacttgcaaggctctcatcctggggaggaggtggaagcagaggacgggaggcagggagaaggaatgaggctgggatgatggagctgaggacgggaggcagggagaaggaatgaggctggaatgatgcagctgaggacaggaggcagagagaaggaatgaggctgggatggagctgaggacgggaggcagggaggaatgagattgggatgatggagctgaggatgggaggcagggagaaggagtgaggctgggatggagctgaggacaggcagggagaaggagtgaggctgggatggagctgaggacaggaggcaggaggagtgaggctgggatgatggagcttaggatgggaagcagggagaaggaatgaggctgggatggagctgaggacggaaggcagggaggaatgagattgggatgatggagttgaggatgggaggcagggagagggaatgaggctaggatagaactgaggacgggaggcagggagaaggaatgaggctgggatggagctgaggacgggaggcagggaggaatgagattgggatgatggagttgaggatgggaggcagggagagggaatgaggctagga

SEQ ID NO: 6109 - DNA, 730 bp, Artificial sequence
  DNA replication origin
acagcaagcatttttctgagcttacagcatgccaggcctgtctccttctctccacatgtaaaggggtgtgaaggaggggagtgatggaaggttgtgatggaggggtgtgacggaggggtgtggaggggtgtggcagggtgtgatgaagaggtatgatggagaggtgtgatggagaggtgtgatggaggggagtcatggaggggtgtaaaggaggggtgtgatggaggagtgtgatggaggggtgtgatggaggagtgtggaggggtgtggtggaggggtgtgacggaggggtgtgatggagaggtgtgatggaggggtgtgatggaggggagtcatggaggggtgtaaaggaggggtgtgatggaggagtgtgatggaggggtgtggaggggtgtggtggaggggtgtgacggaggggtgtgatggagaggtgtggtggaggggtgtgacggaggggtgtgatggagaggtgtgatggaggggtgtgatggaggggagtcatggaggggtgtaaaggaggggtgtgatggaggagtgtgatggaggggtgtggaggggtgtggtggagaggtatgatgcagaggtgtgatggaggggtgtgatggaggaatgtggagggttgtgatggaggggtgtgacggaggggtgtgatggagaggtgtgatggaggggtgtgatggtcccttccacaattgccaggatgaaacagaaaactgcgccactagagctt

SEQ ID NO: 6110 - DNA, 657 bp, Artificial sequence
  DNA replication origin
aggggtgtgacggaggggtgtgatggagaggtgtggtggaggggtgtgacggaggggtgtgatggagaggtgtgatggaggggtgtgatggaggggagtcatggaggggtgtaaaggaggggtgtgatggaggagtgtgatggaggggtgtggaggggtgtggtggagaggtatgatgcagaggtgtgatggaggggtgtgatggaggaatgtggagggttgtgatggaggggtgtgacggaggggtgtgatggagaggtgtgatggaggggtgtgatggtcccttccacaattgccaggatgaaacagaaaactgcgccactagagcttccaggccaggtacctggaaaatggttgatagttatttttattctaggcaaaacaagtctccaactcaacaaagtcagttagtaaggcaggtggacatcagagccaaagcaatgagccactgggccaccctgcacatccctgagggtagagaagctcctgggcctcaatgcaacacttaagggagtgagaggctgaatggacaatgtccagcccagatgtaaaaacagaattccacgacctgcagcatccagcacacaaaacccatcatcatccacagtcaccagcccagaaagcccacccatcatccacagtcaccagccgggaagc

SEQ ID NO: 6111 - DNA, 1752 bp, Artificial sequence
  DNA replication origin
actgctctgctcaaaaccctccgaggctcccacggccctaaaaagctaaacgccattctccacagggccctactgccccctgacctccctccctgccacacccctcctggaccctgccccccctcctgggcatgctgtacccgtccaccaggaccctgcggcctcctgacctccctccctgccacacccctcctggaccctgccccccctcctgggcatgctgtacccgtccaccaggaccctgcggcctcctgacctccctccctgccacacccctcctggaccctgcccctcctcctgagctcgctgtacccatccaccggggcctccatgcctgctgttcccctgccaggaactcttctgcacgccctctggtccggctcccggtgcatccttgccttccacctccctgtttcccacaaccccgccctgtgtacctttccttcctggtgctcaccactgattggccgggtgccacctgtgagtctgtagagctctttgggggcggcaggcagggtcagcagaggctgcggacagcggggtgcagagggactggagccactgcctgcagacaggcaggaccgtctttctgcttggtgtgacctggtcatttctctcggcgaagtggcgatcaggacgggatccatggggacggggtcaggaaaggtctctgaggagggcatcctgggagatgatctgcatgcacggctgaaggaggaaatttgcaggggatgtgaaggtcatggcaaaggtcagagcaggggcaatggaggagcaggggtggcagaggagcaggggtggtggagaagcagggctggcggaggactaggggcggtggagaagcagggctggctgaggagcaggggcagtggagaagcagggctggtggaggagcaggggcggtggagaagcaggggcagcggaggagcaggggcagtggaggagcaggactggtggaggagcaggggcagttgagaagcaggactggctgaggagcaggggcggtggagaagcaggggcagcggaggagcaggggcagtggaggagcaggactggtggaggagcaggggcagttgagaagcaggactggctgaggagcaggggcggtggagaagcaggggcagcggaggagcaggggcagtggaggagcaggggcagtggaggagcaggactggtggaggagcaggggcagtggaggagcagggctggctgaggagcaggggcagtgggagagcagggccggcggaggagcaagagcagtggaggagcaggggcagtggaggagcagggctggtggagaagcaggggcagtggaggagcaagagcagtggagaagcagggctggtggagaagcagggccggcggaggagcaagagcagtggaggagcaggggcagtggaggagcaggggtggtggagaagcaggggcggtggaggagcaagagcagtggaggagcagggctggtggagaagcagggccggcggaggagcagggcagcttgctggagcagcaagggctgccgcacttcccgggcttgtgaggtgcactagcctcccacaagaaggaaaatcaccactgattaaataacgttgagaggtgaggaaacactgccatggcttattttgcattccttgcaagagctctttttgactcattttttcctttttatggaggctcaggagtgagacctgagaccacaagagaaatggcctcgtgagaccctggcccctccttcccattctcaaccacctt

SEQ ID NO: 6112 - DNA, 1398 bp, Artificial sequence
  DNA replication origin
ccaccagtcctgctcctccactgcccctgctcctccgctgcccctgcttctccaccgcccctgctcctccaccagccctgcttctccactgcccctgctcctcagccagccctgcttctccaccgcccctagtcctccgccagccctgcttctccaccacccctgctcctctgccacccctgctcctccattgcccctgctctgacctttgccatgaccttcacatcccctgcaaatttcctccttcagccgtgcatgcagatcatctcccaggatgccctcctcagagacctttcctgaccccgtccccatggatcccgtcctgatcgccacttcgccgagagaaatgaccaggtcacaccaagcagaaagacggtcctgcctgtctgcaggcagtggctccagtccctctgcaccccgctgtccgcagcctctgctgaccctgcctgccgcccccaaagagctctacagactcacaggtggcacccggccaatcagtggtgagcaccaggaaggaaaggtacacagggcggggttgtgggaaacagggaggtggaaggcaaggatgcaccgggagccggaccagagggcgtgcagaagagttcctggcaggggaacagcaggcatggaggccccggtggatgggtacagcgagctcaggaggaggggcagggtccaggaggggtgtggcagggagggaggtcaggaggccgcagggtcctggtggacgggtacagcatgcccaggagggggggcagggtccaggaggggtgtggcagggagggaggtcaggaggccgcagggtcctggtggacgggtacagcatgcccaggagggggggcagggtccaggaggggtgtggcagggagggaggtcagggggcagtagggccctgtggagaatggcgtttagctttttagggccgtgggagcctcggagggttttgagcagagcagtgacttgatttgctaaattgagtgcttctggtcccattggcttttccctgtgagcatctgaacagcaactttcaccctggccacaggcatgagctctttggggcagaccggcttaatccacatgatgtagtctctctcacttctgcagaaatcaaggtgtctgcagggctgcaggaaagaagctgttccgggcctctctggaggtgcccagcacccctggcatgcaggcacctcgctccagcccctgcccgtcctcacacagccccctccctctccttcgatgacacttgtcattggatgaggatgtgcccgaaagccaggatgagctcatctcagtatccttaactaacatatctgcaaagatcccttttccaaatgaggtcacattcacaagtcccaggtggacacgttctggggacaccactcgcctcgccacagcgtc

SEQ ID NO: 6113 - DNA, 1001 bp, Artificial sequence
  DNA replication origin
aaggtagtaggaatgacagtttatcccaatacctgctgccaagcctgacatttcagaccccctgcccgacagtgtcatcccagtgtcctaccacttctgcacttagccctgattagatctttatcgtgccaggcactgttgtaagcattggggccacacccgagagtgaagccaagccctgccctcatgcagctcacctcctagtgggcagggagaacagatgatagacaggtaacagggtgccagggtcttggagaaagcacagcgaggaggctgccatgtggagagaggtctcaggcacctgacgcaggggactgagggatgtgggggtgtaggggagcaggcgccacaggggagtgagggatgtgggggtgtaggggagcaggcaccccccggaaggcaggaacaggtggacatggtctggagctagagaagagcccgtcatggtgaggtgtgatgcgggtggggtgagcttgagcagggagtgagctgaaaaggcagcaggccaaggtcagccggggtccgcagctgccacggggacctcagttcagcggtactcctggtgaggtggtggcgttggtgcgccagagagtggcatcatctgggtctcaggtttaaagggttgctctgcttgccacgtcgagtatcaactgtgggggcaaaggcagagggccaaggcggtcagggagggtcctggtggtgcaggtgagagtgctggtgctatgggcgggggcgctgagagtaggcactgtctcttttcccgagagcccccacttaacaggggcattgttgcccctccttgcccagccaagttgcttcttgctttttaggttttcaaaattaagcagactattgctgaaggattccagcagagggagtcagggaagaggtgcagggtggggagcgggctgctgagggcctggtggtggcctttcctcaccggacggtggagccctgggcctctgctgtgttgcctctcctgcagagttgtgtgtgtgact

SEQ ID NO: 6114 - DNA, 1738 bp, Artificial sequence
  DNA replication origin
agccagtggaaagctggaatctgggagctcagaggaagtactgttgattaatgaaagaggaggccgaagcaagccaggtgaccattctgtggaggaggcgcctgcttctggctgcttgtgtgtcctggtgttgccggtactccacctgtgagcttgccgcccgcaagagcactgcaagcccgtgcttctgataggggctgatcctccctggacatgctgagcagcgggtcaggtcaccagcaagtgtttctggagtgcctgtggtgtggcaggctctcttaggtgctagggatatgaatatgaagaaacttaagacaaggctcccacgggcccggggttgggggctgttgaaccaatggggatggttcattgtaataaagtgtacttagcactcctgagcattactcctgggtgctttgggggcacataggagaaatgtgtaaccggctgggagatgggatagtgtcagggacagctgttttgatgaatggcctgtcatctgtagcgcagtgggagtgagggacgtgtggggatggtggagaagcctgcgtgtgccacaggctggtggtggtgtcctatagtgagggctgggtgctgggggagaatgatgctggatgaggctgcacgaggaaggagctgcgcctcggcgaggatgcttggcttctgtcctgaaactagtgagggaccactggaggatttttagcatggcagagacatggttagatgtgagtttaaaatggttgcaggccttcatctgaaggatgcatttggtgaggagagacggaaggggaaggagcctatctgggaggaaattggggtgggacaggcgtgcacagcagggaggctgcactgggcagtgggagttgccgctcaggagggacactgggcaggcctgggtgggtggtttcctgtgtgcacagtggggagtggcgtggacctgccctggctagtgggccgctaagggggaaggatgcacaggggcagtggaccgatgtggcttcatgtttgggcgttggattcctgagtgtgaggttcccatggcaaggtggcaggagatacctgtcggcatctgctgagtgtctgctgaagtctgaggactggcctgggctggagtctgcaggcgttgggggtccagcactgaccgtgagcatgctttccttgggaaagcccaaggggtgatgggggagggctgagaccagatcctttggggaccatttctggggtgatgagacccccactgagggattgaagctgaatgatcagaggtgcacaggaggaagcagaggggatgtggggagggttggttgttggtgtcacatgtgctgtgactctgatgggaactgagaagtgactgtcacgtttcacctttcgggggctggtgatgttagccagagtcgtttgagtgctgggctgggggaaagcagatcatgttggctaaaggacaggtggcatagagcaaggtggggaccacctgagaagtgggtgtactgacaggagtaagggtgagggtgggaagcagggtgagagcagactcggtgaagggaggtttcacctcagcagcaggagagaccggcctgctaccggtccagcagtcaggaagcagacccgaggtcccgtgtgctctgcctggctgcgggtttgtgtttgtatgctcaggtgaacggtactccactggcagcctccgtcctttgctttgtcacacctcctcctgggtggtcttccttgttctttagctcgt

SEQ ID NO: 6115 - DNA, 902 bp, Artificial sequence
  DNA replication origin
aggggccgggcagccagcatgctgcccccacgttcacctccaactcccacctctcggccctcgccccaacccgcaggaccctggcagcgcactggctgtctccgcggaagcccccgagggcctcggcgcggccccgccccctggaaggttcccgacaggcgccgcgggcaccccggccgtgacgtcacggcagcgcgccggccgcgagagagggccccgtcgcgaccgcgtccccttgggtccttgatcctgagctgaccgggtagccatggccttgcggctcctgaagctggcagcgacgtccgcgtccgcccgggtcgtggcggcgggcgcccagcgcgtggtgagcgggcggcggggtggcagggtggcggggtggcagggtggcggggtggcggggtggggagcagttccacatctcccccggcctctggcggcggctcccaggtcgctctccgggtgggtttgggggacccctcctgcctccggaattgtttggtctttggtcgtggacagacctcagggggccacgagcttctccaggccattttatctcagctttaagcaaaacgctggagcgcggaggtgatcagggccccgaggctgccctgatgcgggaggcccgtgtgcaggtggcaggccgggggcacacgcgcttgtcattagataattcacgtagcagccctgtcaagagccgtttaaaggtcgggccctgctgggtgcttgggtgatgccatgttgagcagacacggagttcagtgcttgtgtccgcttccttttgcctttactctgactgactactctcatttcttagcattttgcccccaccttcttcagtgaaatcgtttcatacatttgtaacacagttggattgctttgtcacattctgccttacatcttgg

SEQ ID NO: 6116 - DNA, 1459 bp, Artificial sequence
  DNA replication origin
atagcaaagcctcagaggcaggaagcagcatggagctgtgcagagctcaaagacgcagcctcataggagcctggtgttcaccaaaggggagacttgagacaaaaagaggacagagccccaagagctcacatgtatggtgggtaacatcagagccccgagagctcccaggtgtggcgggcagatcaggacccgagagctcccaggcatggtgggcagatcaggacccccagagctcccaggcgtggcaggcagatcagagccccgagagcttcctgcatggcaggcggatcaggacccccagagctaacaggtgtggcgggcagatcaggacccgagagctcccaggcgtggcgggcaggtcaggacccgagagctcccaggcgtggcaggcagatcaggacccgagggctcacaggtgtggcaggcagcatggactcgtctggcaattaaggtgggggtagaggtacgttcagtttcctgccttggaccgtctatttggcaggtgtgtgacagatggagaggggaccccgtgggaggcaaggaggctgtgagggaggctgctgggattgtgcacgtgagggatgagcactaccctgggttgagcagtggatgcaggatttggatgcagtggccgggcccatttgagagctatgtaagtgttcaaatcagcatttggggttagagtgggaataggaaggaactgaggaatgcatccagatacctgttagggaccgagtagacgccagagctgaaggaggatgtgcagatgagtgaaggctgttgaaggctgagggagtgggtttgggctgtaactgccacagaggcccccagagagtcggaactgatcgcacctgatcttacagtaggcaaaggggtaattcctatcaaatgggtagaaatcagatccaggtgaagaggttcttccaaggccagaggagacatgggatttaatgggagggcaggatggggtagcaaagggctttgtggggtctgatttaagggatcaagctgacttggggtcaggaatttagagcctgcctctcagtgggttgagcaggagagggcatcgggcttgggtttggcttgctcccagtgaagcctggtggtgccttggccacatgcatgcctgttcatccacagctcttcatccacggcccttcatccacggcttttcattcacaacttttcttcaacagctcttcccccacggctcatccacggctcttcacccatggcccttcatccacggctcttcacccatggcccttcatccacggctcttcacccacggcccttcatccacggctcttcacccatgtcccttcacccacggctcttcacccatgtcccttcatccacggctcttcacccacagtccttcatccatgcctcttcacccacggcccttcgtccatgcctcttcacccacggcccttcgtccatgcctcttcacccacgg

SEQ ID NO: 6117 - DNA, 1423 bp, Artificial sequence
  DNA replication origin
tcctgatgggctcacttgagctcccgatgctactgttagctgctcccagagatgaggaatttcagggtgcctccaggcttctgctttcattagggtttccctgcagagggggaaagtgcacttgaggagagagaggaagatgaggggcttagtttggggcatgctgggcttgcagcgcctatgggacaccctgtagagagctccaggagtacccctgacatccagaacgcccaccagagactgaggtcagatgtcaagatgtgtagggggtcggtccaaggtttattaagtgtctaatatgtgccagtcattgtttcaggcaattgagataaatcaggagaaaaaaacagtcccaaactcttgccttcatgaaatgtaaattctagtgaaggcaggaaataagtcagaaaaataaataatacccatgatatgtaaggaaattatttagagtgtggaaggtggtgagtggatgggaacagaaggtcagggtgggctggggggtggtggtggggatgtgccagagaggaggcgacaccagggcagagtctcaaagaagatgtgagttagcctgtggctgtctgtcggacacacgtaggtggagagaaaatgaggtgcaaaggctgcaggctggggagtgcaagaagggggtcagggggttggggcaaggctggctgcagcagagtgatagggagtggcaggagacagtgacaaccaagagcagaaggagcccactcagagcctgaggtggtgaggaccatggtgaggacgttggctttcactctgacggcagtggcatggcaccacccacactgtaaatggctgactctgaccactgcattgagatcgggctggaggagtcaggtgaggagggggagcccgtgcagagaccctgaggtcatcagggaaaaggctgcaggagcgcaggccagggcaggaggcgtgggaagggcaaacctgtccggtgtgtgctgaaggcagcctcaacgaggctttctggctgggtccctgagaatcaaaagtgacaccaggaagtcaatctgtgctgcctgcagggatgtgaatgagattgaccaaggaaaatatgaagactaagagggcaagaataaaagttgagaagcctccccctctagaagcaggaagaggaggaagaggggctggtgaaggtggtgggagacgtggggagacactcggggacgtgtggcccaagccaggacacggtggctcctccaagaggagggagcatgattggcaggtaggaggccattggtaacggcagagggaaaacatatcagggagggtttgggggcagaagctcaatgttaatggggcaggcagaattggaaaggaagtggcacagagctagcaggagcagatgcctctcaggaggaaggaaaacagtgatacaatttggtgtactttcaca

SEQ ID NO: 6118 - DNA, 1206 bp, Artificial sequence
  DNA replication origin
gccatcccgagacttctgaggatgctggggccacggcagtgtggtgtgtgcggatggatatgatcaccatcgggttcagagtcaacctcgtaatccccagcctcgccaagtctctctccccttcctctcttttccttgaggtcctcagccttcctcatttctacacgccattaccaccttagttgcaaacctcttcgtcttccttgccaggtgagccaagaagtacatctagaggtggtcagtggggcacagcggcatgcagcagagccacagcctggcctggagcctgaggaaggtgaggaggagaagagaggaggaggggaggaggagaggagaggaggatgggaggaggaagagaggaggaggggaggaggagaggagaggaggagaggagaggaggatgggaggaggaagagaggagaaggaggaggggaaggagaaggagagtggggaggagggggaggtgtgtattcagccaggtggtttccagatggcacccgggggcttgttgggagaaccttgggggtggggggcagcatggagggaaagcgagaggtaagttactattttaaacagacctatttgaggatgctgtggaagatgagctgaaaagaggcaaaagcggaggcaggaggccctttcagttcgtgctctcaagaggccaccgggcatggcaggccctgcctggagtgggggagcaggggtttggagggttggggataaattgcacgtcgacatttttttctttgacaagtttgatcaggatgcacaaatacctaacctctctcccacgaaaacacatggaatggcccagaagccatgccgggtgggaggtagaaggctcgccctgctttggacccttcattttgctgtgctgggtcttcacatgactgggaccattgcaccctgtctgaccctttagagccctggacgcagaacatgcctgtccatctctgcatcacacacttagtcactgcctgctcatagcatgctttgcagggggattagagggatgtgaatacattgcccagtgcatccaattccatgtgcacctggggaagggtgggggctcctcaccacccagggtctccctcctgccctccctccagcccccagggcaccctgtctttctcaggccaccatccttcccatgagtgcttgtctctggcccagcctccgcagggcctccttcatgtccttgtttcg

SEQ ID NO: 6119 - DNA, 1017 bp, Artificial sequence
  DNA replication origin
gaggcgttgcagacgcccgccctcgccagcgcaaagacaaacgccggtggccgcggacgcgccggcggccgggagcaccccagcgggcgggcaccacagaggcgcggtcctccggcgtctagatctgccatgtggcgcgcgccggaagcggctctgaggccggaagtgagcctagagcgccgcggccccgagatgaagccggcggtggacgagatgttccccgagggcgccgggccctacgtggacctggacgaggtggcacgggcccggcgggagtctccgagcgtggggagcggggaagggggagcggaagggcggcgtcctggtgcgcgggtcccggggaggggaggccgggcgggtgggcgatgggcgcggctcccaggctccctgccccgcggagagcaaatcccggtttctccgagcacctggtgaaaggcggcgaccgaccgcggcgggaagcgtgtgccctagcccgggggaccaggaggcgcagcctgagggttgagtgcctgctgggtgcccccacggcccccgggaacacacccgtggtcagaggagttgcgtttgctgctcttcgatggctgcagcaccccatgggggcccgcggtgcgtctccataacctcgtgtgggatttgagctcgtgttaggggatttgggggaagaaagtgggctttactgtgccttggaagcgaggataattctccgattgggcctcttaatcttaactagaatgagggaagactggagcagccgtcattcctgtcggagcggaaaaggagacatctggcatttatgtgctttgcgtagtggcctcgttcttctttttaattatacaggattatacagtcgtcttggggttttgttggtctctattgtgttcacagagtgaccttgtctgatgtgagcgttctgagatggtttatggtcagcaggagagcaccacagcctagctcagagtggcaggccagctcctacatgtcagggccttatgtgctctttctcaaagcttaggggct

SEQ ID NO: 6120 - DNA, 1631 bp, Artificial sequence
  DNA replication origin
ggcactggaagactgggcaggcagcacgatggtgtctcagggatgggcctccagcaataggatggcctctgcacaggtggtgagccccccatccctgtagggtgtacaagcagaccgtggagacccacagctccaccccttagctagtaaagaccttgacttaatgggtcaatcttcttagtcactgccaagcccctgttccatcggactgactttcacttgggtccttcagggtgatgcacattggcatggcatgaggctcacccaatatccactgccagcttctccctgcgtcccacactgtccactcaggccaggcggccccttttcaggccacacacacccctcacatttcagctcaattcctgtccctggaactaccctcatccatgccgccccccactccccttctctacagcctaacccccaaacccaactcctctaaggcctgttaaaggaaaacattattggaaattttcagaagttgttccgaaccctggagacgggtgtggggaccactgcaacgggatcttgcagtgggggagggagaccaggctcagctccgaacagcacaggcagtgggggtttgcggctgaggagcaggtggggtcgcgggtggcaaatgactgggaggaacacagtgcgggacgggatgctggctcggccgaccccgcagggctttcgctgaagacaggtctgggccatcagacatcctggggatgctgggggaccaggaacccgatccaatatccagggtggggggctctggctaaaccaacttagcagggctctctgcgaaaactgaacctgacaatgcagtgcacagatgggcctgggaggaggttaggaggccaccgaagtctggctgagcaaggaatctttggcaaagtctagttccaggacctgttgctctctctccttccctcccctgttcttcctctctccctctcttcctccaaccttctccctcctcttacccctttccttctcctttccctcgcatttctgtcacattcttttttgttgtttttttcattacggtaaaacttcacaaattgtttccatcttaaccacatttcagtgacgttaagcacattcacgaactgtgcagccatcaccagcagcctctacagatccttttcatctgtcaaggctgaaaatctgtccccactaaacacgaactccccatttccccttccccagaccctgataacccccttctactttctgtctctatgactttgactcctctaggggcctcggctgagtggaatcatgcggtgtttgtcttaggactggcccgtttccctcggcagagcgtcctcaatgttcctgcgcgtggcagcaggtgtcggcattcccttccttttaaaggctgagtaatgttccacagtgtgcatggcccacatttgcttatgcacgtatccatcgatgggcagggacagcgggggacgcttccctttttcatttattataaataacgctgctgtgaacgtggggtaaagacgccccttggagcctcggcttttggtcctctgggcttgtgcccggaaggggagtgctgggccacgtgggtgtccgtgtttgattttctgggacctgcccccccccgtctcccgccccggctgccg

SEQ ID NO: 6121 - DNA, 1429 bp, Artificial sequence
  DNA replication origin
ctgccatgcatggtaccccaggaggcccagctgtgcagaatccggtgagaacagcgcccctggggtgcgcctccgccacgtcccctcctcattcccagcttggtttcccgagaacggagccttcggacgcccgtgatctgcaatccaaagtcaggtccagctggattttcactactttggttctaatcttttaaagctgtcacacccacatctaattagacagtttttcgtgatttttactgtaagtaggcctctccaagtcagcttagttttaatccaaaaagctctttcttttcatgttcattagaaatcaagacatttcgttattttattaaaataacaaggacaatcggcaccggtggggttgggaacccacgtaggtgactgtcagagggcgcccttatccttactccttgggtacctgggctctgtcctcgggtttatggagggggcagaagacagcagctgagaagcaagtgggcagtgagggtggggagggccgcgttccctgtggctcagcgaggacagcagggtggtcggcctgcaggcacggtgggctctgacactgactggctgggtggacctggaccaggcactaacacaggttcggagaggaggcaggcaggacacagccaggcaggaggccgcatcccttgctgagaccgaggacaccaaggacatgggccagggggatgggggcggggtgggccgtaaggagaggccatgtcccccattgagaccgaggatgccaaggacacaggacagggtgacaggggctgggatgggctgcgaggaggccgcgttccctgctgggaccgaggacatgggacagggtgatgggggcgggggtgggctgctgcaaggaggctgtgtcacctgctgggaccgaggacaacaaggacagggaacagagggatgggggctggggtgggagtggaggaggctgcccgagggtcctgggaggaggctgtacttatgggacagacaggtgagcagaggaactgatgtgatcagtggggctgctgggaggggtggacaggttccaggcagcaagcagagccccagtgccgaagcagggggcacgttcctggggccctgatggcgggctggagagagaggagctgggaagtgagtcagcagcaggagcctgggctctgaggccagacgtgggagcagcgtggacttgccagaagcctccctggcagccgaggggtgagtggtttgaatatggcctgtctgctccggaacacaggtccaaatctggtcaccatgatggcggtgtcgtgacggggcctttgggacgggtttgtccgtgaagaggggctggtgcttcctgtcgggagtgggtcgaccctctcgggagcgcggctgttataaaggcaagctcggctgcctctcgccagggggcccctttgattcccagccatgc

SEQ ID NO: 6122 - DNA, 1800 bp, Artificial sequence
  DNA replication origin
cagagaggcgggcaggtcactgctggcagagccttcttctctcagacttggagccagggatggggacacagggcagagggagccctcccatgactcagggagagaagcaccagctttccaggtgggctgtgacaggtgcctgaatcccacgacaggacccacactccacatgccatgacacaggcacctgaggaccctgcgctgcttggtggaaacatcaccgagaggccagccagggccccagcgccttggtgaagcaggaggaatctccacgggcacaaggctgggctggggtggcctggcctggctgcgcgggaggaaagggacctgggaaagggaagggcccacggcccccacacccttggagcaagagaaggcgggagacacccactcatcttcctctttccagaggacccagagcctccaacagccacacccagacactgcatcaacatttagccagtgttgtcttagcctgaagaatgtgtgtgtgtgtgtgcgcgtgtgcatgtccatgtgtgaggtggtgtgtgtatgtctgtgcacacgtatgtgcatgtgtgtttgtgtttgtgtgcttgaatgcatgtgtgggatgtgtgggtgtggcatgtgcatgggtgtatgtctgtgtattgtgtgtgtgggggggcctgcatgagtgtgctgtgtgctatgtgggtggggtctgggatgtgtacttgtatgtgtgcatgtctgtgtattgtgtgggggggcctgcttgtgtgtgctgtgtgctctgttggtggggtgtgtgtatgtgtgcatgcatgtgtactgtgtccatgtgcatgtgtgtgctgtgtgctctgtcggtggggtgtaggttgtgtgtgtgtgtactgtgtctgtgtgcatgtgtgtggtgtgtgttaagtgggtgggtgtggggtgtggggtgtggggtgtgtgtgtactctgttattgtgcatgtgtgtgtccgtgtgcatgtgtgtgttgtgtgctgtgtgtgtggtatgtgtgtgcatgtgtgtgtccatgtgcatgtgtgtgttgtgtgcatgtgtgtggtgtgtgctatgtgtgtgtggtgtgtgtgcatgtgtgtgtccttgtgcatgtgtgtggtgtgtgtgtgtgtccgtgtgcatgtgtgtgtcgtgtgcatgtgtgtggtgtgtgctatgtgagtgtggtgtgtgtgtgcatgtgtgtggtgtgtgtgtgcgtgtgtgtgtccttgtgcatgtgtgtgtcgtgtgctatgtgtgtgtggtgtgtgtgtgcatgtgtgtgtccgtgtgcatgtgtgtggtgtgtgctatgtgtgtgtggtgtgtgtgtatgtggccgtgtgcatgtttgtggtgtgtgctatgtgtgtgtggtgtgtgtgtgcctgtgtgtgtccgtgtgcatgtgtgtggtgtgtgctatgtgtgtgtggtgtgtgtgtgcgtgtgtgtgtccgtgtgcatgtgtgtggtgtgtgctgtgtgtggtgtgtgtgcgcgtgtgtgtccgtgtgcatgtgtgtgtcgtgtgctatgtgtgtgtggtgcgtgtgagtgtgtgtccgtgtgcatgtatgtggtgtgtgctatgtgtgtgtggtgtgtgtgtgcctgtgtgtgtccgtgtgcatgtgtgtggtgtgtgctatgtgtgtgtggtgtgtgtgtgcgtgtgtgtgtccgtgtgcaagtgtgtggtgtgtgctatgtgtgtgtggtttgtgtgtccgtgtgcatgtgtgtacccatgtgcgtgtgtgacatgtgtggtttgttgcatgggcatgtgctctacctgggaagt

SEQ ID NO: 6123 - DNA, 1018 bp, Artificial sequence
  DNA replication origin
tgacgtggtgcttgggtcctgggtcctcaggcagagtggcacgtgggtctcagcacctaggaaggtctcagctggaagggcgggacagtggtggagctgagcagggaccagggcggatccgggtggcttagggtcagggtactaaggcctctgcatgcccctctgtcaaccctccaccccatccacacctgcctgcaggtgtggcagcctgggcctctagcccacagactctgcatcagggctgtgccgttggcccaggccagccctgctgcctgctgggtggagcagctgatgcccaggctgtgcagccaggagggagatgcccaggccctcccatcttgtcggcgctggctcacatagcggggtcagctattggaacaccagcctcagttgggaaggtgctgccactggaactcagctcgctgcagaaaaaactgggtgggagtcccaggcttaggggagactgagggtgtcagcctgtatggagagctttcctgggaagtggaaggaggatggaaagagcagggccaggctaaggaggggtccgtaaggaagcagccttgagggtccagtgaggagaaaggaaggggctggagtggggaaaggaagggagtgtccagggaggggccctcagctctgggaccagtttcaaggagcacagcaggcagcaggcagggcagagtgctccagaggtgatgctgcaggaagaccccaggatccccccttcccagtgagggggtaaggggagggcgggagttgggaggtagacacatgggagacaggttggctgagtccaggcaggaaatggcacgtgtttgtgtcacagggatgtgggtggtgatatggtttggctctgtgtccccacccaaatctcatctcaaattgtaattcccatgtgtcaaggaagggacccgtaatctccatgtgtggagggagggaggtgactggatcatgggggtggttttcccatgctggtctcatgatagtgaggaagttctcacgagatctgatggtttca

SEQ ID NO: 6124 - DNA, 897 bp, Artificial sequence
  DNA replication origin
tccccacagggtcagcttctgctgcaccccaactgtgtcagggactcattccccaaaatcgctgcatccacaggaccccatcagaggtctagaccacgcccaagaggccatgctgggagctgcttacgtgagagaccaggcctgacggggggtgccaggaccacgtgtggagtcacagcccgtcccggggtgcctacatcacagtgcccctgtgggtcttaagggccaccttggccccaagctgctcctgaccccaaggcccccacagctggagaagtaactaggagagccctgcttgggcccctgggactgtgctctgggctccaaggaccagatgaggtggggctggctgagtacttgatcctggaaaccaggggtccccaacccctgggctgagggcaagtgtgggtccatggcctgttaggaacccggctgcacagcaggaggtgagcggcgggcaggcgagcatgaccgtccgagctccgcctcctgtcagagcagcagcggcattagattctcagaggagcgcgaaccctgttgagaactgcgcaggtgaggatctcagtcgccccctccttatgggaatctaactaatgcctgatgatctgaggtggaacacttttatcctaagaccttccccactccaccatccgtggaaaaattgtcttccatgaaaccggtccctggtgccaaaaaggttggggacccgtgctgtaaatcgtttggcagcttctcgcctgggggctgcaggattcacactaggagagatcgtcttcatggaggccactatgtgttgggtgttgtcaccaaggggacaggcgaaagtcgagaagccaccctgactggccgtgagatgctggacgtgcccctctggccgttctgtgaccagttctgggg

SEQ ID NO: 6125 - DNA, 1704 bp, Artificial sequence
  DNA replication origin
agccatagcctcagccctgctgtgccagccacagctccttcccagttagttcaaagcctagggtgaggaatgggaagccgctggaaatgccacgagtttgtagcagtttgcagagccctgtgaccgtgatgaatgggtgatggcaggggcaaaagatgggcattggccaggcaggacggtgggggaggggggaagcagggcttccccgactgcaccagcaatgtcctggcttggaccattctttgttgtgggggctgccctgcacaccctgccctctacttgccagattccagaacaccctcctccaaggtgtggcaaccaaaaacatctccaggcagcacaaaatgttaagaaccactgcattcatgttagctccagtctggctgacttagaagtaaccagggacttctccggggccagtcatgtctcatggtcccattccctggatggccaaaggctatgatcaggaacgggtgcataccctggggaaggaattcagtgacaatgatgagcagtgatgggcagtgacggcagtgatggacagtggtgggaagtgatggacagtggtgggaagtgatggacagtgatggatggtgatgggggtgatggacagtgatgggcagtgatggacagtggtgggcagtgatggacagtgatgggcagtgatggacagtggtgggcagtgatggacggtgatgggcagtgatggacggtcatgggcagtgatggacagtgatgggcagtgatggacagtggtgggcagtgatggatggtgatgggcagtgatgggcggtgatggacggtgatggacagtgatggacgggatgggcagtgatgggggttgatggacagtggtgggcagtgatggacagtgatgggcagtgatgagtagtgatgggtgttgatggactgtgatggacagtgatggacgttgatgggcggtgatggatggtgatggatggtgatgggcagtgatggacggtcatgggcagtgatgcatagtgatgggcagtgatggacagtgatgggcagtgatggacagtggtgggcagtgatggatggtgatgggtggtgatgggcagtgatgggcagtgatggatggtgatggacagtgatggacagtgatgggcagtgatgggcagtgatggggggtgatggacagtggtgggcagtgatggacggtgatgggcagtgatgggcagtgatggacagtggtgggcagtgatggatggtgatgggtagtgatggacagtgatgggcagtgctggacagtgatgagtagtgatgggcggtgatggactgtgatggacagtgatggacgttgatgggcggtgatggatgttgatgggcggtgttgggcggtgatggacggtgatggacggtgatggacggtgatggacagtgatggacagtgatgagtagtgatgggaagtgatggacagtgatgaatggtgatggacagcgatggacggtgatggacagtgatggactgtgatggacggtgatggacagtaatggtcggtgatggacagtgatgagtagtgatgggcggtgatggacagtgatggacagtgatgagtagtgatgggcagtgatggatggtgatggacagtaatggtcggtgatggacagtgatgagtagtgatgggtggtgatggacagtgatggacagtgatgagtagtgatgggcggtgatggacagtg

SEQ ID NO: 6126 - DNA, 1234 bp, Artificial sequence
  DNA replication origin
cacagaacctgtgcaagtcaccacctggcagtgtggggcttacagatcctgatcagcctgagctttgggaaaagccacctgacaggtgcacctgagtaccccactgggcagagaactgcgaggatggcggagggtgtctcagaagagcttccagctctggtgagggatccctccagtcacaccacctgtccccatcccatgcctgtgctggacatcactaatccatcgaggcacatgccccagcacacggcagcccctactgtaggatgagctctgctgccattctggatctagaacagcgcaaagctgtgagccctgctatggggcgtcaacctgcacttgtatggtacaagccttctagggcctgagtcacttgaattgtgaaccccgcgggtcctggaaggggcctcgggtcagcacagcccctcacaggtgggatctgagaccccgtgagcaacggggactgagatcaaggccaccgcccagtgcccgtgtggttggactacagcaggtgcggaaaggcggtgcatgctacctgtttgcagagcagaggtgggtggtgggtggagctggcagaagtgggtggagccaaagtggtaagtgggggaggcagagtgggtacagctgatggtgggtggagatggtggagatgggtggagctgaaggggtgggctgagctggtggaagtgagctgagctgaggggtgggtggagttggtggaggtggtcagggctgaaggggtgggtggagttggtggaggtgagtgggactgagggcgtgggtggagctggtgaaggtgggtggagctgaaagagtgggcggagctggtgggggtaggaggagctaaaggggtgggttgagctggtggagatgggcagagctggtagaggtgggtggagccggtggaggtggacggtgggtggagcgtgagtagagttgctgtctgactgcagtctcctaagggttcagccccacctggagtcctgtccttggtgctccttggagatggaggctgcctttgctcagagcccctggtgacccaaataccatggcacaacattgcaccctcccacccattttctttcctgacctccttcaaatcccaaccttaaagctaagccctagccctgaccctgacctctgcttgcctgagtttctgttggcagagacagcctcaaaaccccaggcctctaacctccatcttccccttaggagcatgaactccacagccagg

SEQ ID NO: 6127 - DNA, 1112 bp, Artificial sequence
  DNA replication origin
agcacacgtgggcaccaagcctggcacatggggagctctggtgcaggcagcacctgccacactctgccccaaccatgcctgtgtgaccagggcacaaccagaagtagctgggcaggtgccacccagagtgctgtggacacagtcaccgctgggcaggcgccccagggtgggtcctaaccttagccagcaagtgggtgccacaggcccagggagagcaacgcggggacagccctcgtgtcaaaaaacctgggatggtgtaagactccgaattgttgtcctgtctgaagaatgttccgttatttctcacaacctgtttcctccctggccactgaacagaggtttactttcctttaggacttgatctgtgaccacagtgccccgctgttaaggtgaccaatgcaaactgcagaagggtgccccttcccccccagaaacatcaggtgcgtcccaggtcctgcggcaccccccgaggagggaggtgctgagggcggggctgcagccacggagttggagggggggactgtgggtggggctggaggatcagggtgctgtgggcggggccagaggaaagaggcactgtggatggggcgggaggggcgaggcactgtgggcagggccggaggagggaggtgctgtgggcggggttggaggggtagatgctgtgggcagggtcggaggagggagtgctgtgggaggagctggagggggaggcactgtgggtgggccagaggggggagacactgtgggcggggtcagaggaggggggtattatgggcagggctggaggcgggaggtgctgtgggcggggtctgaggtggaggtgctgtgggtggggctggagggggaggtgttgtgggcagggctgtggggaggtgctgtggggctgtgggcggggcttgaggggagagctgcagccggggaggagggaggtgctgtgggtggggttgaagtgggggaggtgctgtgggcggggccggagaagggaggcgccgtgggtggggctggagaggggaggtgctgtgggcggggctggaggtggaggtgctgtgggcggggctggaccagagaggtgctgtgggcggggccgcagccaggcttatgcttccctgctg

SEQ ID NO: 6128 - DNA, 867 bp, Artificial sequence
  DNA replication origin
ctcgagtggtggccaagggcctggactccgaggggtgtccagctgtggcacaggctgttgggcccagcatgaaacggcactcggggtcaccagcagagcccagccaacggccgtgaggccgggaagtgctggaactgcatggcctggctgccggggctctgtgcctgcctcagtcacttgcttgtggagtgacccggccaggtcccccccacctccctgcccctgacttctccatctgtaaagtggggtggatggtgccaatcttcccacatgggagggtcgatagaagaaggaagggtggggcgtggtgggtgcttacagcaaggtgaggtataccccaaattcatgtccacatggcaccttagaatgggaccttacctggaaacagggtctttgtagacataataaggcaaggatcttaagatgagatcaccctgagtgtagggtgggccctggatccaatgactggtgactgtgtaagtggaaaaggggacatggagacacacgggaagcggctgcgtgatgaggagtcagagcccagaggaggcgtcacaaggcgaggagcgctaatgggtgctgcaaagctgtcagaggcagagacagatcttccccacagcccccaggaggaaccagccctgcccacaccccaattctgacacagccagtccccaaaagacagacactgcgtgattccacttatctgaggtccctagaatcagaaggcagaaagtagaactgtgggtggtcaaataatccctgaaggccagtctggattcaaggggacaggtctaagcccctgtctcttgataggaggagtcttgaagtgttcctggttatccttaaactgccacagtccaccccggcaca

SEQ ID NO: 6129 - DNA, 1031 bp, Artificial sequence
  DNA replication origin
tccagccctttgggcgtctgtctgccctgttttcctgactgatggggggcactgagggtgggagagagcccaggttagtttagcgctgaaatcacccccgaattgttcagtgagctcatctgctctgcacgcccgggagggtttctttccctgcagaacaaccacactcgcttctcaccgaaacacgtgctttctttggctgggctctgcgggttgccccaagtgccacttcatggcgggcctgactgcctgtgccgcggctggataccccgtgaagtccagccaggctcttggccactcacctgaatccccggtagggctggcggcgggggctctggttctggatgcagggaagtgaactcagatttgggcagccccaggtaatgcgggagagaaggtgggtccattacctacagcccctatggacaccctctgctgggagcctccccgtcaaggccagggtgggaaactgtggatgcgggggtgctgtgggagctgcagagagggtgtgcaagcagggcatgtacggggcctgtgtgtgcagggtctgtgtgtgtgtgtgcagggcgagtgtgtgcagggtgtgtgtggggtctgtgtgtgcagggcgagtgtgtgcaggccgtgtgtggggtctgtgtgtgcagggtgtgtgtgggagcctgtgtgtgcagggtgtgtgtgtgcagggtgtgtgtgtgcagggtgtgtgtgtgcagggtgtgtgtggggtctgtgtgtggggtctgtgtgtgcagggtgtgtgtgggagcctgtgtgtgcagggtgtgtgtgtgcagggtgtgtgtggggtctgtgtgtgtggggagcctgtatgtgcagggctgtggggggttacctgggacctgtgtgtgggggcatgttcaggactgtgggttgcacggcgtgtatgcagcatgtgtgtggggcctgtggggtctgtgcagtgtgatgtgtgtgtgcacatctcatgtgtataccacacatactccttgagctcgtgagtgcccagagaggaggaagacaggagg

SEQ ID NO: 6130 - DNA, 1420 bp, Artificial sequence
  DNA replication origin
ggccgagtccaggtgggagaggggctatgactcggccgagtccaggtgggagaggggctatgactcggccgagtccaggtgggagaggggctatgactcggccgagtccaggtgggagagggcctatgactcggccgagtccagatgcgagaggggctatgactcggccgagtccaggtgggagaggggctatgactcggccgagtccaggtgcgagaggggctatgactcggccgagtccaggtgggagaggggctatgactcggccgagtccaggtgggagaggggctatgactcggccgagtccaggtgggagaggggctatgactcggccgagtccaggtgggagaggggctatgactcggccgagtccaggtgggagaggggctatgactcggccgagtccaggtgggagaggggctatgactcggccgagtccaggtgggagaggggctatgactcggccgagtccaggtgggagaggggctatgactcggccgagtccaggtgggagaggggctatgactcggccgagtccaggtgggagaggggctatgactcggccgagtccaggtgggagaggggctatgactcggctgagtccaggtgggagaggggctatgactcggccgagtccaggtgggagaggggctatgacttggcccctcatgcccctggctgcacttgctaaggatgagtccatcatccaagccaccatgctggattcaaaaggcattcagaactgggagaccagaaatttccatgctgattcagaggtcaaaggtgagacaatctggaagagctgagagggagccagcagctggtctggcactaggtattgagaagtgatgccaaaaaatgtccgtggacctacttttgaattcagtaaaacatggcagaacattccgaggcttcccttgcaagggtagcaggctcactttgagagagggcaatacctgactgggcagacccaatggccctgtcccttcctcaacctcagaggccagctgcagggaggccatgcctgcctgtgtccccagggctggggccacctgcccggccaagatcccgctcactcttctctccggagagggcaggcatcacatccagggaggccctcccagcccagagggccatgcacactccacaggtccccagagcagctgcaacctcgaggcctcgtgctccccgccagccctgcgtccccggggctcagctcaccctcaagcagaacagcagtggcatcggaataatgtcaaaggcgccagtgcttccttcctacacacctactatgcacctgtcagatccccatgagctctgcagagacaagcccaggaatttacacctcatggctgtcagggcaagcaatgctgctccacagcttagccccagggacaccacagaagccaggaggctgacg

SEQ ID NO: 6131 - DNA, 1054 bp, Artificial sequence
  DNA replication origin
cgccagtgcttccttcctacacacctactatgcacctgtcagatccccatgagctctgcagagacaagcccaggaatttacacctcatggctgtcagggcaagcaatgctgctccacagcttagccccagggacaccacagaagccaggaggctgacgtgagagccggtgtaagtctgaacacccagggacagtgagaccagcaacgcctggctgggcagggtggggggtgggggaggcctgagacaaagctgccgccccacacgaacagggacagcaggaggccctgggacaagactgcccaggcccagggggtgactccccgcacccagcacatttctcttaacaggttcccagcaggacccccggctgcaccccatccgggtacccatttccggccgtggcagccgacaccctcctaccccaggggaaagtacatggtctggccgctccagccccacagtgcagagctgacccaggaggcaggacaggcaccggatcatcaaagcggtggagaaggccctggggatgtggactgagggcaagaaccagccagaaatgcctggtggggaaaacacagacgttgagcccgtgggcctggcgggtgggtttacgaaggcagcaacgtgcctggtgcggtggggcaggtggaggagtcccgtgaaggtgtgcggtgaggcagaggtgtgagtcggagcaggtgtgggaagggtgtgaagagggtactagaagcagaggtgccccaatgcggggccagagtcacagggacagagaaaagtcaaaaggatcaaatatttccaaagcaagttaatgagaaaatcttccggttaaaagcagggatgagccctcctacagcaaagggcacagggagaggcagccaggtggcacacacacctcctggagaaactcggggacctcccagggtaagacaggagtctggagggtcaggacacatcactggcctctgagtaccagcgtgagattcatcaccttgccccaccgaattccaagagccagcaaaaaagcaaagcaatggttcagagcattgagggaca

SEQ ID NO: 6132 - DNA, 906 bp, Artificial sequence
  DNA replication origin
ggcaaggcacacctctctctggcagagagggctctggaaggttttcccagggtcctcctccctcaagtcctcccatgccctgaggctggtccctgaggttgttggtcggggactccagtccttgctgctcagaaaagcatgcccagtgtccctcgccctgcccagtgtacgtccaaggctgctgaaagaatggagaaggcttcctttacttctgccttcattccttggacagatattaaaacctgctgtgtccaggccctgactgggcacagtgttggtaaatcaggtctggttccaacttcaaacaggcagccctgaccttggtgcaggcagccctgacctgcaggcatgtggtcccccgaccttagataggatgcccccgaccttggactgggtaccggtgaccttggagcaggcagccctgacctggaggcatgcagctctctgcagaaccagatgtgggtgggggggcgggtgggggggccatagtcactcagggcttggggatggctgctctttgttgggctgagtgtagggaggtgggttcccagcttcaggaccaggtgaatgggggatgcaagcgtgggtggggcaggtgaagcaggaagggcaggtggggacaggtcagatgactcttagcatcacggcggtgggacccgctgtggtgttctgagcagacacgagacagaagctgccttcaggaagtttggttgcacagacaagggtcaggagactttaatttgtgcagatgaggtgccctgagggcatttagcagctgctggaaaggaggtgtgggagggcttattagggagacatttaacccccacacggtcgatcaatcgtgagccacctgtgcctggatcctacctgtcagagacgcctgagtggccccacgttccagcctag

SEQ ID NO: 6133 - DNA, 1347 bp, Artificial sequence
  DNA replication origin
gatgatgcccgccgtgcctggggctggccgagtcttccccgctggcctgggcccccaagctagggctgccctctctgccagtctgagctgagtttctaggctgagttggtggctgcctctctgggtcttctgagacttcaccaggtagtctctgcagaagcttctggaacttgctgcagccatgactgccccagaaataagagaggtgcccttctctgcccttcacccacccttgaacactggcccagcaccagcctgagagggtcctgggcagggccaagcttgcaggaccccagaggagcccagaagtggtcctggtgggggtgctggggcgtgggggtcccctgggctggccaccagagggtttcctccagaccgctgtgtgcctgggctgggggagggcctgggctgggaacaaggaggatctgtgctctgggcctgggcaggagccagtttggggccctccttgggcctttgaagtcccaggcgcacccaccctgaggcctgggtagggcagaggcctggtgaagccccacagaggtttcttgcggaggaaatctcaagtccctgagaggggcaggtgggagagggatgtgggagggatgggaagagggggcaacgagagcaggctgtggtggggggaggggcgtggcagaggggcagggcatggagggggcagggctgtagacaggaaaaggagcacggaggaggacagggctgtagttgaggggcaggggtgtggaggaggggaggtcatggagggcaagatgtggaggggggccaggccatggagggagcagggtgtggagacggcaggactgtggtaggggtgaaggggcatagaggagggcaggcctgtggttaggggcatgggtgtggaggatgagcacggcaaggagggagcagggctgtggtggggggaggggcatggggaaggacagggcacggagggcagggccatggagggtgggaagtggtgggtgggctgtggaggtccccccagggccactcctgttggggctgctgtaaggaaaccccatgaactgcgtggcttgtaaacatcaggagtttatttctcacagcccagaggctggaggccggagatcaaggtgccagcctggtcggggtctggggagggctgtcctctgagttgtggatttccgacttctcattccgtccttaaagcggcagaaggaaggggaaggagccctctggcctcttcttacaaggtcacgggacccattcatgacagcagcgcctttgtgaccgcatcaccgcccaaagccccacctcctaaaaccgtcatattggggttcgatttcaacataagaattcgggagctgggcg

SEQ ID NO: 6134 - DNA, 1117 bp, Artificial sequence
  DNA replication origin
tcacagaacggtgaatcttcctggacagtttcatttcaggcacccattgcggcccctcccagccaggcccgagcacctggttcccactcaccctccgcggggcctcctgccaggccaggctccgcagtccacagtggtccacacgattccacagccccgtgtcaccccagctctcaccaagctctgcccggggtctcccccacccctccacagccaccgtgcacctgaatccaagaagcaggcacaatcctaagagcaaacttacagggctcacctcctcccaacgggaccagacactgaggacctttcctgggagcgggggcaggaggggatgatgggggctgggatcttgagcccctcagacaatggatggccctgggggccaggtgaggatggactgagcagagggagctcatggcagcaaggctgtgggacccggcggcaatgggtggtgggaaggagaggtgaaggtgggctccagtgggctttgggtgccgcactgaggggatccgctggggctttggttgagggcaggcctctgctgactcgggcactggtggagaatgtggagtctgatgggtctgggggccatgttcttggggagactgtctggggtcggggtgtggctggagcttggatccagccaggggccttggctgtgaggaggggctcccctgagtcctctggaatctggaaggggtggggcaggagaggagcgaggacttcggctgcgataggcaccgtctatatccctttccagcccagtaaagacacaatgagaatgagtcagggaggaccaaaggccagggcaggtgggggctcagaggggcaagttgccagggcccggctggtacagggcagggtccctgagctgggggcagaggaaggtggaggcgggggcagagaggcaatggcaacggaggaaagggggctcctgctgggaatcagaacccagagtggggagctcagcctgcggggaggggtgtgccttgctctgggcgtggggtgcaggaatcctggggtgcagggacagggaggggccttgcaccgctcctcagggtggagccccagcagcaggttctctcctgaatcctctgcactatgagacagacaggtg

SEQ ID NO: 6135 - DNA, 1202 bp, Artificial sequence
  DNA replication origin
agccccacatggatgctccattggccagctgaggcgcccggcccaccagggtggacagccactggtccagctgcccgaggtctgtggggcctgtctggcctggctttggtttccacccaggcagcagctgcaagaagccttcggaaggaggaagaccgggcctggcctggccctgcctcatcctcatgcctgtcaatcacacccaaagcctggggggtggggcggagccagaatcccccagtggggcctccagggcttggggacaagctcctctgaagctgcttggaaaacctcccagccgccgccctgggctcggattcctgagctcagtcagagctggcggctctgtccagggatgagaaccactcttacagacccctacctcaccccaaggcctggccttgtccctttgtccaggccctgctccccagtatctgaccctcaggctcagcctgagacccggagggaaggagcagccatggggatggtgagggaagtctctgcaggcccctccctggaggatccgggagaaggtggctggctcctgatctttgacatatcaaggaactgtgtcctgtgtgcggggaaggagaacggggggagggtaggggtgtctcctcggagtgcagatggatggggcaggggacaggggccttggaacgtcatggtgtgccaagtccctggtggctctgggagacgtctcctagctcccctattccctcttggcaacctgggacctgggcaggaccaagctgccccatggcaggtgctttgccctagaagggatgagggtccactgagggctggatggggactgaatgggggctgggggcaggacatgccgtaccttgcagggctgcctacagtgatgtgtcatggaggttgctggatagaccctagaaaggcacagatcagggagcggggactggctctggaccccaaaatgcagctactagcctggaagtgggggtgaggcagcggcaagggtggatggcatggggggtgagggcctcttgggccacagggtggcagagtgaatgctggtgtttgcacaccgacttctttggtgggtggtcagcgctgtcctgggactgggttcccacagtgcaggcccaggataggcagcgaggccccagaagtgaccgtgggcgagaatgcgcagccctgcagcttcctgtcccccagaccccctcaggggagca

SEQ ID NO: 6136 - DNA, 1193 bp, Artificial sequence
  DNA replication origin
ctgcaggcttgtctgaagagcttgcttggtccccaaagcaaagagccgtttccagggtgaggccaactggaggcatcctctgagctgctctgcaggtaagggtttgcctctggaccatgctggcctggaagggtggcactgtccacgccacactcccaaccttccctgctcctggggagggtgtcctgggatgctcaaggccctttgaggggagttgtccagttggtgacaggaacatggccggggcaccctcttcagccaaccttttctctggaagaccagagaacaagacagcaggcatctgtcctcctgggcaggagccaccagcctgcatgtggggaggtggctgtggcttccatggccctggctggcaagccatgggctgggggtggggggggttgggggcctgcacacctggctgcggaggacacaggcctgtactgtgtcagggcctagagcagccagagtgctcacagtggcctgccctgtgtgccgccggcctgcgctgggtgggagggaatccaggggctcagtggaagagccgtctcctaagggggaggccttgccagggcccaccgagcagggtcttgcaaccttggcaggtgaggctgagtcacaggcgagagaggcacctgcatggtgcagctgagggaggactgtagcctccctggcctgctggtcctctctgggaatcctattttcctgaggaggcgaaactgccgcatccgagtgtctgtttctctgtgcaatagtaatgccccgctaggtggcaggggacaggtgtcctgagcgttggacggctgaagggcaagggagcccctgaggcctgtgggagggaaggggtggtgcaaggcctcttctggggacagggacaggctgcctggtccctggggagggggatgggggaagggttggttttatttgccctgcagccaccggcacaaccagaggtgaaggcagctgcagggccctcctggacacagtgggagtgtccagggagggaaggaggaggggggctggaacaagacacagccgaggacttgggaggaggagaggctgaagccgtagacaacggctgaggaccagggaggaggagaggccctgaccacaccctgcaaccatggcctggcccatgggtcacacctacagccaagctcagccacatcgggtcagctctggctggcccacccgtg

SEQ ID NO: 6137 - DNA, 1705 bp, Artificial sequence
  DNA replication origin
cccggccatgttcctgtcaccaactggacaactcccctcaaagggccttgagcatcccaggacaccctccccaggagcagggaaggttgggagtgtggcgtggacagtgccacccttccaggccagcatggtccagaggcaaacccttacctgcagagcagctcagaggatgcctccagttggcctcaccctggaaacggctctttgctttggggaccaagcaagctcttcagacaagcctgcagaagggcagtgggaggcgggacagggccacagtccgaccccctcagaccttaggagcctcatctacagggaaatgaaacccttcaactccagacctctggagctgaaggcaactttaggccttccctaagcttaggggaaggtttgaggtgaccctggaatctgaatggggaggggaagaacgttcagcttcctggaccccttgagaggagggggaggctcaggggctcctgcactgtggctgagggcagctgcattctgatcttcagagtccttgcaggcttcggattgaagctggttttcaaatgatcagccaggcagtatggactgcaggaggaataggtcaaaagccagcaatggtccagaaggggagaggtggagggaagggcaggagccacacacagagcagacaggacctggcaggaaagccatgagctgctggtgctggggacaccaaagcgtgcacgtgggtctctgagctccaggtgtgtggggtgctttgtcctaacatagcagacagtgccggagtgcccccatctgctccctctcctcaaggagaccaggccaagagtcagggtggggaggggcaggaaaacagccacagggaaggccaaacccagctcagcccagagtggagtgtttggggtcatctcttgctaccagggtcctcagactagagaaacaggtgccagctcttggaggggccacaggtgcattcttctgaccccacctaccacacgggtgacccagcctcactgaaaaggcttgctctcctctgacctggataagggaggccagcccagacttctgctgatcaaaaggacccagcagagcagagcaggctccaaacagcttcaccttcaagttgactgccccacggcaggggcttggagagaggtggagggaggtgcaggtatgacctcctttgagaataatggtgccaggttttctcagtcctgcaaactctgcccagctggcgcccttgtccacccaccctcactgcccagtggcagcccctaagttggggaagccagggcagccctagggttcagactcaaagccgaactcctgtagattagggtcctggctcagggctggaagaccttccagggtaccactgagtgtccaggcagagcagggaccagcaccccacctcacagaccccacacgagtacaatcctgcagggtcgtctggagccgagctccttcatgagatgacagcggctccctgagccagcaccagaatgagagaccggatgaatgttccccaagtgtcaccaccaaaaggcagggcaggaagcacggggtgagctggaggtggagtccatgggccagagcaggccctggggcagatcccctccccatcgctaagccctgtagagctgcccagagccccgcttctttctggcaggcaccctgattaccatttgcagaaagatctccagctctgcaggcaggctgt

SEQ ID NO: 6138 - DNA, 1909 bp, Artificial sequence
  DNA replication origin
gcgcgactctatcgatccccggcgggaggcggcggagccgggcagcgcggggccgcggccggggtccccgagggcggccccccacgcccagcgcccagggcggtggcaccacctgtgggggcggggacgggggcggagggtgcgcgaggcagggcttcccccgccggacgtgacatcacgcctcccgcgccccaatcaggggcctccccgcccccagccgaaatcggcatcccgctccccgctccctcccgcgcgctccggcttcctgcaccctggcagcgcgccccgagaacgctctcccggcgcctccgtaccctccgcccgccggccgcgcctcgagccgccgcccctctccccgcctgcaccccgcagcggctccctccccgcgcccttccagccgtctcgcgctgggctccggctcgcaccgggggcttttgtggtgtgggggctgcacgcaggaaactcgccaagaaactcgacctcacctctcccagtcccagggagcggcaacagatggcttaattgttggaccttgacagctgttttgggggggtgaccctccacgttctttggatgctggagaaaccaaagtgatggggcagggccggtctactggtttgggctgctgggtggggccagatgacctctggagaagggatagggttggaacccggcgactagttaggccactgggggaggagggtggagtgagccggagcagatgcctctttgaagaaggcgggagggctgcctgcaccttgtatggtaggagggcgcgtggctttagctgcacatggggagttgggctggatggggtctgtagggagggggcgaggactgcgatgttggtgtctggagggcttcactccttccttggctcccagaccccccaccccggccccctgttctccacatggtaaggcctggcggtgaagccaggtgcctgagctgcagaattgggggcaggcatagaggtcagtatccttggcagagaacctcaagatgacccccatgtacagcaagggtgtcctgatttcagggcctgtggcatcacctggaagctgcagcggggtccgtggtgggggtggtggcaacattccctaccccttctgtgcctggggctctcagccgctgtgtggggctggagcaggaaggtggggtgccctccccctgggctcttggggtttcctgccctgcctcccagagaaggttgctccttcacccagagacactgagtcattgctggagagggaggctttggggacccaatccaagtgtgcatttccctgccctcccccacataccctctgctgcgtcacattttgtgactcacagacccctgttcagtacatgctccaggcttgctccttcttgcctgggcctggcgtggctgcctgcacaccttatccagcacggtcaggagcctgggcccacgatcccgctctctctctgtgtggtctcacgcactgcgggatcaggcagggctgcctgggcctaggaagctggacttgaggttaacccggcctgaggctctatagttaccccgtcactgtctacgcctcctcttaatctgaccaggttgggttattcctccaggcaagtccttcctccagcctagttctgggcctctggatggcagtgtggacagcagggcttagaacgcgatggtggcagcctctgcctggccctggtgacccctgggtggcttcatctcctaaggaagtccttaccaccatcgcaggtcctggaatcattcccattccgcaggccaggagacctgtagccagggccttccctggagaggatgcacatgccgccgggggcattggaagcaaaagccgtgtttgcacctgggaggagccgcaggatcctgagcagctgcagctacccctgcttccctcctggcaat

SEQ ID NO: 6139 - DNA, 1643 bp, Artificial sequence
  DNA replication origin
cccagtgcagtcctggccttgcaagtctggaggagggtggcaccccgagccctggcagcaggcactggcccatggctggcaccgtggttagacagctgcagggcgttcgtactccccacgcggggtggacagcatcccctgccccatcagacacagagaaatcaacacaatctgcctgtcctgggtccctaacccactgcattccccaacccaagagcagcacgacccacactctctggcccagccccacatcaacttctccatcttgtcctgccctctcttctcacccttgggagatggccaaactctgccactctgtctctctaactggcaacagtggcctgtggatgcaaggaaggttaggttggctcctaaggatgcaactgcccagaggacatggaggtgctaagaagggctgggggctaatggtttccaaaggagcagggttcaagactctgggctgggaggggcagccactcagccactctgctaccctggtgcctggggagggattcaccaggaaggccagggatgcctctttatgtgtgagtagaggggcagagaacgaacccaactgtgccgagggccttgtgctgcctggcatccaggtgtgccccctacctgggacagacagagcccagtggggtgaggggggcagcctggaaatgacagggttgcctctgcagaggcacaggaaggcctgtcctggggactttggaggggtccttgcaagaacctcaggctggtggggagggcatcgggagatccgccaagggactgtctgcgggttctgttccttctgtggggggcggtcagggggcccttacaagaacctcaggctgggggcatcgggagatccaccaagggcaaggggctgtctgtgggttctgttcctcctggaggggcaggggtccagagcccgactgcctcctcccaccactccgccccccgcggcaaggcatggccacagacccccctcacccagatgcacggatccttcttgctcagaatccccaggaccatgggcatttctgcgctgagtccccatctgagtagccctccacccgcactcccactcccctggtttcagaggagccccccagagcaggaacctagtctgttttgttcttgcccactgggtccctggcacgcggtacagaccgaggttggttcccacacgtggaaaggtgaagcttgggttccaagagttccttagcacacggagcccaccgttccacccacccgtacacttctgtccccaaagctcctccgggaccacagggagggaagaggcagagccgcaggcggctgcagggcttagggggcgccaagagggccgctgttcttacaaagaaatgacacggcccctgggcgggatccaacgcgccgaccacctgcagctggactcgcggcacgaggctgcccaagcgccaggcgggggccggcgcgtacaagttcttcgacaggaatctctacgaggcggcggcgttccgcccgcggataagtgcccagctccctccccacccctccgcactaccccccgagggggtcagcttataaaacccacctaggctgcctttgctggagaccctacgagaatccccgggcaggaccggagacgcctcccagagaggtctgtacag

SEQ ID NO: 6140 - DNA, 1113 bp, Artificial sequence
  DNA replication origin
aggattactgggctccctggccccacccactaaacaccagagcacccccactcctcaatcactgggatgtcacaagtgcccagggcaactgctcccgcttgggagccaccctatcccaggggaccttcccaggtatctgtctgacctgcagccacccctcaccccaaattgcccacaggatgaggccacgcacatagaacagggaggcacctgttctaacacctaccatcctgggtgtgaggccacaggagggagactgaagatgctgagcagtgttctgtgtacagccccccgccaggctcggggagggggcatcgcgttcaggaacagtggggctggattacgtgagagacttgtccttttaaaatacctccttgggtccagtgtgtcccaagctccatgacaactggagatgcatgtaaacgcctgagccaaccctggtggcaggtggcatcagctttgtccccagggcctggtagatggtcacaggtgggtgggatgctctccctgcagtctccagagccaaggatgggcctcctggccccggttcttgaggagacacttggacgtcacacatgggttaccacagggatgggatcagacagccacagggagccccagtcaccaaggatgcgccagacacgggtgggctgcggggtccacagtgggcactgaggctgcaccagatgcagggacaggctgagacgatcacccataggccacagctctgtgacgcactggacagctgtcgtcggtgtttggggaaatcgtctgaaggtgcgcacaggccacagacttccctacaggtcccactgctgatggcgcacccaggaagcacccctgccggggaggctagggatccggtcgctgctgcatgggcctaaggcttggctgttcccaggagggagacgtgctgttctgggcctcagagcatcggggtcactgcagccagatccatcaccccaggatggaccagcgggtgaggacggggctcaggatggacagtgccgcagggtcctgggcggctggatttgggagtccccggaagccccagccaagtttctcagtagaacctgaacttctgtggggcgagagcagaagcctagcagcgtt

SEQ ID NO: 6141 - DNA, 1082 bp, Artificial sequence
  DNA replication origin
gaccttgcacaggtcactttagctctctatgtgtcagctatgtcagcgggacctacagctgctgtgaagatgaaatgactcggcttaaccccctgcgaggcccatagtgagctctgcatcttagcagggagacagctagacctctgggaacaagggagccctcaccatgtgtgacctcccattcaggggcgtgccccgtcgagccccgtgcttcctctggggaggaggtgctggcttgggggggtgtggctcgtgggccatgctggcagtgggtcgtgttcgctccagtgccaacactgggcagattccccccgacatcatttagacgtgtgcctttattcagtaccagggtaccagggccggcctgggtgccaggtagggaggcaggagcaagaaagtggaggctcccctggcagaggttccctctggaaggagcatggcttgttgggactggaggccagaggctggggaggcttcctgagggaggtgaggggaaagcatgtgagatggagggaagtggcaggtcacagctgggtggggtgactgggtggagtgactgggtggtgggggtgggcgcagggagagccaggcctgggaccaccatgaccacagagatggcttctcgggaagtggttgggtcggaggtgagcggccgagttcctttgctccctccccttctgttccttccccagtgtttatgagccatccctcttggcgggctccctccagaggcacccaagggtttgctctgggatccggcccagcctcagctgtatgtgtgtctctgcctggttggcattcacggggcagatggacgggcctgcgcggcgtctttgtggactggaatgtggctgctgcgtccccttctgcgtttctagcgtgccccctgtgggtgtagcagacagggagggccagtccatcttccaggcctccttgggtgcctgtggcccctgcagtgggtgtacgggaagctagatgggagagctgggcagagccccaggaggacaaccccaccctcccacagcctgcctgaatttccaccctgctggcagggttgggcatagagatgtgagtgccctctt

SEQ ID NO: 6142 - DNA, 1045 bp, Artificial sequence
  DNA replication origin
caccctcccacagcctgcctgaatttccaccctgctggcagggttgggcatagagatgtgagtgccctcttcagctccaccaagccaaggaggagaaaggctgagccaggcctgggggcacggcctctggggagcacctcatcctgggttcgaagagtgggctctgccttacagccaagacaccgggtcctgggtgtggcaggaggttcgtgacacaaattctgaatcccctttcatccccagtctgaggccacagcatgagcctcagacagtggagcaggctggcatggggggaggcctgcacagggcacgcggcttcttggcccgagctgtgactaggctcccatctgatggacccctgccgtcgtgccatgccagggccggcaccgcccagacctggcgtctgccggcaggatggcctgctcaggggttccccaagcaggatctgggcagcttagagagcagtcttatgagttgcctggtgaaagccccgtctttgggggtctccggtgttgtggcctgccttggtggtctgtccagcagctctcagtgtgcccattgcagaccggccgagaggccggagtgcggccagaggggaactggtgtgagtgggtggttttgtctggctgggtcagcaggcctggggaaggtggggagctgggccgggacagtgggagccacgcaggacctgggctgcagggaggggagggtgttggcgggaggctgtccctctggtgtccaaggaggggccagaggcgcacagcatagacctcccaggctgggggcacctgggtgggagacttggtggaaggatgtggcctgttgggtttggtatgtcagagggaaagcaggtcaggatataggggcaggggggtctggagtcaaggcccgggtgccattggactgggggctggagggggcaggtagaggatgtggaatgaccatggcagctttgcgtgaggacagcggtggtcagctgccaccttcagcacagagagaaacccgacaccccgcccccattaccctccggggaggggccccggct

SEQ ID NO: 6143 - DNA, 1847 bp, Artificial sequence
  DNA replication origin
tcctcttccgccaggcccatccccctccccgggccgtcgcagcccttcgagccccctcccccacccccgtgcctgccgcacccgctgcgacaagccccttccccgccaatcgcggcgcccccctcccctcgcctgcccgccgcagccccctctccccgcccgcccccttccctccccgccgcgcccactgcaccagtgccccctcctcgccgggccgccggcgctgctgcgtgtccagacccctgcgcacccgctccggctgcgcggtttgccgtcttcgtccctggccgcggcggctggcgactggcatcggggcgcccgggacccccagggcggcgacgctgccgccggtgccgccgagcctttgttccgccgccggggccggtttcacgcctgtcgccctcgcaagcagccgcgggtgacaggagccttagccggcctggggcgcggaccctcccacccggggcagaggtgtccctacgacgcccctcggtttcgggtcgcagtgcgcggcggaggttctgcggcggcggaggggctccttggcgacgctgtcatttgggtgaaatggtggcgggggggcttcgggcagacggcaggggtgtggggaggggagggaagcacgatggggtgagtctgggggccgtggatgccgttgacgaggagctgagatgccgtggccggtccacctcgcaggtggggccaaggctgcctctggctcagacgtcaggagcccaggcggacagggactggccaggggcgcaggcttcttagaggatggggcaaaagtgaggaaaagatcctctgcagcctgggcagtgggtggtccccaggaaaccccctgggtcgtttgtccagtgcaccctcaccccaggaggctgctggacgtgccggaggatgccacagccaccggagctggttggggtccgagagcagatgggccaggggctggggcaggcttcgagaagagggttcgggcttggggaaagccttcgcagccatcggccagccaggaaggccccgttgccgggtgcagagctgagtagagggcaggagcggggaggcctaggctcttcccttgcgtgttggggggctgcggtgcctggagctctgcacacagccctactccagcaccgtgggaggcaatgcaggctgactgtccacgccaaattccggtaccttaggcattcgagtctgttgacactgagtgtctaggacgaggctgtaaaggtggataaagccggctttacagtctgcacctcctgtgtgagccgtggaagcttctggagggatgggcgtggcgtggcgccatcatctctctgcattctccttgggagggctccagagccactggtcacgggcagctgccaggctgggtctggacaaatgaggtctgggtccatcattggggatgggggccactgtcaggatgggagtctcgcctaaagctttggggtgaaggtgctgatgaccaagaggaaactgcggggtggggacatgtcagcaggggacgagaatgcatgacctaaaaggtatccaaagttaaggctggtgggggcttagtgaggagcagcagagtggggtggtccagaaccgtcaggatcgggagggggaagatggaacgagacagcagctgcctacgagccagggagcaagagctctgtgctttaacctgaggagcaggagcctgggaactggagactctgggtttgaggtgggggatgaatctgccattaaacaaataatccccttcccccccaaaaaaatcctcagagcactggggaagggaagtgtcccagtgactgagggaggggagcgctgtggaaggatgggtcggctacagcaac

SEQ ID NO: 6144 - DNA, 832 bp, Artificial sequence
  DNA replication origin
cggggtggggacatgtcagcaggggacgagaatgcatgacctaaaaggtatccaaagttaaggctggtgggggcttagtgaggagcagcagagtggggtggtccagaaccgtcaggatcgggagggggaagatggaacgagacagcagctgcctacgagccagggagcaagagctctgtgctttaacctgaggagcaggagcctgggaactggagactctgggtttgaggtgggggatgaatctgccattaaacaaataatccccttcccccccaaaaaaatcctcagagcactggggaagggaagtgtcccagtgactgagggaggggagcgctgtggaaggatgggtcggctacagcaacttcagcccagggatcagggaagagagggtccagtccctggcccagcggggagcaggcccggtgaccttgacctgagcagccccagggccagagggaggggtgggccggaagggcccagatgcctccctgcacggggggaaggggatgggctgccgggactcaccccctaggttggaaaatgcctccctctgggttggaggaggagaaaggccaggaaggagagggagagggacatggggagggttccctcctggcctgaggcctctctatccccaggtgttgagctgagagaagtggtggggaggcccctgggggtggggaggcccctgggtggggagatttaagatgacagctggtcttgggcacattgctctccattcagaaaggccccagcccctggcattcttccaggagggggcttgctttgccgccctgcagggggactctgcagagccggcctctgccatctc

SEQ ID NO: 6145 - DNA, 1900 bp, Artificial sequence
  DNA replication origin
taagatgacagctggtcttgggcacattgctctccattcagaaaggccccagcccctggcattcttccaggagggggcttgctttgccgccctgcagggggactctgcagagccggcctctgccatctcatgtccaggaccacaacctgtggccccggcctgcgccgggccggagctccgcagaaggaagccagcgggaggcctcctgcctttgactgccgtgcgtccagcctgcagcgggcctcagggggccgcctcgatccagcctgcccgaggctcccaggccttcgcccgccttgcgtccagcctgccgggggctcccaggccggcgcccgagctctggctccgtgtcttcactcccgtgcttgtccgaggagggagggagggacgggggctgtgctggggcagctggaacaacgcaggtcgccgggccggctgggcgagttggccgggcggggctgaggggtcggcgggggaggctgaggcgcgggggccggtgcgcggccgtgagggggtgtgagaggtggctgacggcgccgaggagcccctcagaacctgcaggtggggggagctcccatatcttacgggtgtttcgggcctcacctctccatgcctctcgtcagcctctcccgtctgcgtggtgggggctggggagtgggtccgccgggacctcgcgagggaggggcacaggaggagccggcgggggacgccacccaccctcctccctaggagtgcttgagccctagtcctgagtcttggaccagctcactcggttcctgtggcccagccagcctggcctgggtgccccgtcacagctgagcccatctcagctgagcccagggtgtgtcaccgggaagctcagctggcacctgccaccccctcccccaggcacgtttccctcccactgcccagcccattaccatcatgtgtccggctgacctgtgctctcctggtctgggcagcctggatgggtgcacagggccccatcacagcccacaccctcggagagacgcctcctgagtctgctcagcctggcacaggccccaggaaaggacccggaggggcggttcctgctctaaatcctgcccccacgggggtgggactggggcagaatcccatcagtgaataaaggctgcagagtgaaggatggtccctggcgagtgtacctgtgtcccagtcttcttgcctgagggcgccttcccacccatgtgaggagtggggaaggagcaccccttctctactaggccccagggctctcagagccgggctctgtcctcaccccagctggctcccacaaggccctcctggccccagactctgttggacccccaactccccctccagcaggcatctggaggtaaggaggggcggggggcgcaggtgcacttgccattcccgctctgtctgcagcatgggcacatgtaagtccaggccctggggaatccctggacctgcagcccctgcggaggactccctccccctctagctcaagccagagccccctgcatcagtacattccagaactcagacaggaaaagagggcaaggagggagcgctccaggataagaacccctacctcggccctccctcgctctcccaggcccctctgacaacctgtctccttgctgtcatgtcagcaggcacagaggctacaggggccaagcggcagccgcccaagcccggattcgggttctctgttcccttctcttgtctcgggctcctccctgagtgtgtgtacttagagggtgcggaagatcagcaaactcagtctgacccaggcattcaacctctgggtagttacctagtcctgggtccccaccccagatggcctctagtgggtaagggcttcctggaccccaggcctgaggggtgacttctcttgcagtaagcgggtagggca

SEQ ID NO: 6146 - DNA, 1719 bp, Artificial sequence
  DNA replication origin
ctggtgacaggagcctctgaggggctgatgggataggccctctgtccccaaatgtgcactgggaatgggctgtgcacactcccaggggggtgtcaaaccctgcagatccctgcctgagggcagcccccaaatcccagctggggcttcaacccagcgccctagccccaaagcactaactcccccacctcctcctgccaatcccccacccttggcattgacacaccaggcaaggcccagtgtgcccctcccccgatgcaccggcaccctgcgggccccgagcgcccgtgggaggcactcaccatcgaagctgcgcagctgggtggcaagcatggcctgcaggacgcggctgctgtcccggagcgcggtctccagctcggcatggctgcggttggccaggttctcctccatctcgctggtgcagcaggtgtagccctggggacagatccgcaggtgctcacctgtggggaaaggccagtgtgagggagaggggctgggacagcactgggagccaggagggcaccctcaggctctcctgggcaggatggcagacccagggtggagcacagctcaggggtgggccagcctggggggtgccctgggtgaaggcagaagtggtcggggtgtggagggaggaaaaggcctggcttcggtcccgtagcttcccacacgtgacacaagagcacggctgcctctacagggcaggaggccccttgggcaagtcctgccccccagcctgctgtcccagcagctgcaagcaaagaactggcctcaggttcctgtgtgcaagtgtggagaaggctcccaggcccgaaaggcaccccttgcctgggcccatgtctgaggatggggaaggaggaaggaatccaatccccctctcttcccacaccagccctggggggcaccaagctcccactgcaaggacggcagatcccaccaacagtgggctggtcagaggcagtggccctgcaggaccccaggcacgagtctggtatgggggcaggtgtgctctggtgcagctggcaggccccatgaaagggtcattggaccatgccccaagccctgcagggtgcaccctgtgcctcctggtgtccttgtggagtcccctcctctgcagcctgccatgagctactctgctccagcgtccgaggcagtgacagcggcactgccatcagagacagcttcacctccttgtggggagtggggacaggacaggctttgagtcagctctcagccctgctgtgcacacctcagggcccacctggaatgggtgtgtggcatcaggaaaaactgcattttttaaagggtgtgcatcgcactgtgatgaaggctgccgcaatcctcattttattaaccagaaaaccggggcttacagggatgaggtctcgtcccagctatacagtgagggggcaagtggttccggctgcctaagctcaggactccacactgacggggccacactgttccttctgggcctcgtcccccgcctctaaggccctcctggtgctggcctaggtcaggcacagtggagaggtggaagcaggagcctggcttggtcagaggggtggggtcaagggggggcgttgtcagcaggaattccagcaactttcctcaggactgccgcctcaggggcctgtctcatcctgttctgggaccctgggccagggtggctggaatgcagcaggtcctgcattcttttacgccctcctgagggtcagcagg

SEQ ID NO: 6147 - DNA, 1927 bp, Artificial sequence
  DNA replication origin
ccaccctgtctcggctgctctcctaggcttcttgtcttctctcagcttctgcgatttagaagcttcagctgtgagcaccccgggcctgtctgagggctctggggggcctcctgcagcctagaaccccagacatctcccctgctgggcagggggtgtggaggcacaggctcaccctcagacctccacatgtgctgcaggggctttagggaaaagcccccgtaccccgggcctagatgggaccctggacttccccatcccatttggaagtgggacttccaggtctgtaactgctcagagcgtccctagggctgtggccggctttgccccacaggtaccgggggctcgatggcccaccacaaggtgctccagggtagcagggcagaggctctcctttgaggcacgggggccgtcaagcctgagatctctggatcagcccccacgctgacccctggcaaggcctggggcttcagggctggcagggctacagagagctcccaggccgctgtggggagggtggacgggccacacagctgtccagtgtccaccttgggtcctggcgcctggaacgccctggcctgtcccggaaaggggcggcttgtggttcatgcattagcccagacacacctagagggccatgggccaaatccaggtgcagtccccagctctacctcctgccagaacccattcagctgctcctgaaggctggtgggggggcggacacagggctccaaatccctgaacacagcaaccagaggtccagccaggctcccctcctaccgcctcccactggttcccaccagcactgcagacaaagacccaggggccctcagctgccccggaggctgggaggggacagcagctgccatgggcaggggtgggaggggaggacataggaggtgggggttggacaagactccctggggtaggggcacaggtgggccttgggcacatcacatagtgggtcatttttaatacaaatgtccccaaagggtgtctgtgttttcaggtcaaagataggagagttgaacaggaaggctggaggcttccagagggcagcagagggagggcggcggcagggcactgacacgggacaggccccagagcagggcagcgacaccaaccccctaagagccaggaggaagcaggcgggcaggatgtccccaggccaggaggatggtgtgatgggcaagggtattagcaggagaggggaaggggcagggctgggtggcacgctggggcgggagccagggctcagcggcgctggggagaaactgaggcccaggatagagtggaggaggtgagccgggtccctacacatgggacagaaccaagtggctcaggaaggctcctgactcagggtgcaggggctcgctccccgggtccagctgggcaggaggaaggagagtcccagaggggccacgcgcatcccacgggccccacaccagcggggagggctgagctctgagcatcgatgtccaagtcacagagagggagcttctgacccactgctacccaggtgtacgccaacagctgaggtcccacagccctgtggaaatggccttgggggctcctggggacaggcagactctcccgggagcctgggaggccacagcaggtgtccaggagccggagaagcaggaacgctgagacaaaccccagggccccagcagcagctgccgtccctcacagccacaatggagccctgcagcctcagcgctccctccctcctgtctgcccaggctcactgtcccggcgccctggctccgcccggacacaggggcagtacctcagcccgggccgcctccctccaccaagtcctcgtgtttctgatcagaggtcacttcatggaggacctcctgaccccacactgtccccctgggggtggctgccactctctgcccagacacaaggcgaggcccagcctggg

SEQ ID NO: 6148 - DNA, 907 bp, Artificial sequence
  DNA replication origin
gatggccctttgcaggggctggagcagtgacctgggctctgcctgcctttcccccaggtacctccccgaggtcatgggtgacggcctggccaaccagatcaacaaccccgaggtggaggtggacatcaccaagccggacatgaccatccggcagcagatcatgcagctgaagatcatgaccaaccggctgcgcagcgcctacaacggcaacgacgtggacttccaggacgccagtgagggcagggcctggccgggcggccaaggggccagggttggtgggggtgccacaggggtgtgactgccctccgggttcccccacccgaggggccctctgctccggcatcaccacagtgagtctgaggacgctgtgctgcccaggcacgatcaccgagccctgcacctctgcggcgccctggaggcctggccgggatgtctgttggctttggctccagggaccaagggaggcagccccagggagtgagagtctcccagcctcaggggtcagcggggatcaggtgctgctggtcctgggattccacaccgaaaggatgttggggtcacctggcacgggcccttacagggtggtgctgcactggggtctcctgtggggacctgcctgccggagcctcctctccttcccaggtgacgacggcagcggctcgggcagcggtgatggctgtctggatgacctctgcagccggaaggtcagcaggaagagctccagctcccggacgcccttgacccatgccctcccaggcctgtcagagcaggaaggacagaagacctcggctgccagctgcccccagcccccgaccttcctcctgcccctcctcctcttcctggcccttacagtagccaggccccggtggcggtaactgccccaaggccccagggacagaggccaagg

SEQ ID NO: 6149 - DNA, 1715 bp, Artificial sequence
  DNA replication origin
tcttagttttctctagcaattagccagtctatagtttagtctgttactccagtgaatttaccaatctccttccaaatgcctctcaacattaggcttgaaactgtctttgctctgttaaaaatgaaatcggtttctttgtgatgaggtgtgaagctcactgttttatggtgtgtctctcccctgggcaaaaatcactgagccaaggctgtggagctgggggtcgggacaatgggatacttctccgtaagtgacacctccgttttaggacctaatctctgatggaaaggaggaggcagtagacatgggtcttcgcaacttgcctctccctgcctggtcctccgctcatgggccagtacaagcctgattagaaccccagtatcctcaggggtgtcatgcccaaggcagagcctgtatcccccaagtggggctctacacaaatggaggcctcaccttgcaggaaccctggccaggaagtagcctcagcaaaggtgcattcatgtgtgctggtgggcgagccaggtgggaagaagtttatgtttgtgtcgaggggaggttagtatgtttgtgttggggggggacatatgggagtggcttgtggctgtgtgcatgtgtaaggcatgggtggcagtgggtgagttggtgagggctggggttggatggggcaggtgttgggggtggggggggtttatgcatgggtgggcacatgtgtgacggcacataagtgagtttgggaggtgggtgtggggtgtccgtatgtgtgtggagatgtatgcagattgtggttgggtgggatgcggggaagcagtgtgctgtgtgggtggggacaggcacgtgtgtgggtaggtgtgcagacagctgtgggggtggagctgaggggggtgtgcgggcagctgtgggggtggagctgagggggtgtgcgggcagctgtgggggtggagctgagggtttcagggcgtgtgtcctgaggagtatgcaagcgtgtgggtgggcctgtggctggctaaatatttgtggggacacaagcatgccatgtagtttggatgtgtgtcccctccaaatctcatgttgaactgtgggcccccctgtgggaggtggggcctggtaggaggtgactagatcgtggagatggatccctcatgagtagcttagtgccatccccttggggacgagtgagttctcagttagttcacatgacagctgggagtttagaagagcctgggacacccccgccttctctctctccctctctctcttgccatgtgatggacaggctccccttcgccctccactgggagtggaagctccctgaggtctctccagaagcagatgctggtaccgcacttcctgtgcagcctgcagaaccacaagcctattaaacctcttttctaattacccagtctcaggtgttcctttacagcaacgcaaacggactaacagcacgtggaagtgtgtggggcggagcactgtgtgctgggaaggcacctggggtgttgctcagtgggggactgtgtgaggctgcaggaggctactgcatgctgagggctcggtgtgggggcgggatcagcaggttccggtgtgtgtgtgcacacacgtgttaacacgtgacaggtttttatgtgaggagaggatggctgtgggtatcagtgtgtgtggatgtgtaagtgggtctgtgtgtgcgaggtagacaagagtaggtaaatgtgagggtgggaaca

SEQ ID NO: 6150 - DNA, 1024 bp, Artificial sequence
  DNA replication origin
cctccactgggagtggaagctccctgaggtctctccagaagcagatgctggtaccgcacttcctgtgcagcctgcagaaccacaagcctattaaacctcttttctaattacccagtctcaggtgttcctttacagcaacgcaaacggactaacagcacgtggaagtgtgtggggcggagcactgtgtgctgggaaggcacctggggtgttgctcagtgggggactgtgtgaggctgcaggaggctactgcatgctgagggctcggtgtgggggcgggatcagcaggttccggtgtgtgtgtgcacacacgtgttaacacgtgacaggtttttatgtgaggagaggatggctgtgggtatcagtgtgtgtggatgtgtaagtgggtctgtgtgtgcgaggtagacaagagtaggtaaatgtgagggtgggaacatgagggggtatgtgggggtgggggtgagtaggtgggtggggatgtgggggtagggagtgactatgtgggggtgggggtgaccaggtgggtgggaggtgggtatgtgggagtgactaggtgggtggggttgagtacgtgggtgtgggtacatgggggagtagatgtcagtaggtactgcgtttgtggagtgggtgcatgtggggagctggggacatgtaggggtgtgcaggatgcaccctgtagggaggggtgtgaccatgcaggggagcagcaccccaggcctcgggcccacagtccctgtgccggatagactggcactcctgacagggctcccgcagcagtgcctagttctctcctgggcgtggggcccctctgacctgggccctggccctaggccaccaactcctcttcccagggacatctccccagtccagaccccacttctcagtctctcctggacgagctccttggacgacgggacacaaaggggacaagccgacgagcccagccccaggaaggcccctccaagagccccagggggtccagatctccagggataacagccccaggcacgaggccggaacgccgccc

SEQ ID NO: 6151 - DNA, 1313 bp, Artificial sequence
  DNA replication origin
ccaggggaccttcagaaagtcccctccagggggacaaaatcctcttctcacgaacatttctagctcctctcactgggcagcctctgctgagatatggggccccaaatttccctaatttgagagcagagcaaatcccactgaaagatccatgttcaagcccactgatcctgagaaactcctcagagacacacgctgggctggtcagcctcaggccgccccttcctcttaccggaaaggtcccagccttccctcccggtgccgttcagcagggtttgtggtctcagaggcagagcccctgggcagggctggtttctagagtgtgctgatgctgctggggtctaaagaggtgtggaggacagggccactggagagacgggctctggggatggaggggccagctcatccagctgcagccgagggcatgcctggggagcctcagcaggggaacggggtcattgggccgtggaggtggggcagggggcctgggggtgtagggcggaggcaatgatgtcatagttcagatgtgggggcttgggaggggagggtctggaggagagtgttggtgagtgaggggcggatgcagtgatgtcatagttcagatgtgggggcttgggaggggagggtctggaggagagcgttggtgagtgaatggtatagcactgggacagcaaagtgtatctcagttctcaccgtggatgaggtggtcactctgggcagccagggccagggtgggaagacactcctggtgagcgacgggcaggtcagcagatggggaggggctgtggttggggaggaaggggtgaggacatgggacctggggcgagaaagcctcaggccaaagcacacactgcataccctgctggggctggctgtccccagtgactcccaggggttggggtcagtgtggaagggtctgtggagacgtgggagctgtggggatgcagaggttcccaggaatgatgtttgggcagaggcttctgctgagatgttgggccagaggggagaaggtgcccagcagggtgagactaagaggtgaatcccaggtgctgctgagtagccagtcctgggagcctgggggtggggtggggtaggtggctgcatcactgccctggcagagctgtccagagaagccgtcccggtgccaggactgagtgaggcctgggtgccctacgtagacaagacttggggggtgggggtgggctggcaagtcccccagcaacattgggcagggaaaggtcgatccatcatccacccacctgtccatcaccacacccctgtggcagcctgtacccagccctcgcttaccaaccatc

SEQ ID NO: 6152 - DNA, 1649 bp, Artificial sequence
  DNA replication origin
agagcaaggtgggagctgggaaccacgctggagaatccccattttgtcaggggacagagaaagtgctggaactggcccacctgggtggagttccagctcctccctaacagaccagccatgggacccctccccgcccagcatcatcctctgtgggacaggccagcagcgggacccactgtgggtaggatccgtgggaagggccagcggtggcctccgtgaagcccctgctttcaggggttagttctggagtggcccagccctggggccttcccctctgtcaggggaagtgacatggtggccactgatgagactgtctgtgtatgttcaggttgtgaaggagctcctgacccagggagctgaccccaacctgcccctgaccaaaggcttgggcagtgccctgtgtgttgcctgtgacctgacctacgagcaccagaggaacatggacagcaagctggccctggtgaggggcaggaggctggggtggccctggtgagggggtttgagggtggtggggtggccctgagtgaggggtgtgagggctgggtggccctgatgagcggggaggggagtgggtggccctgggtgaggggtataagggctgggtggccctgggtggcaggggtgtgagggctgggtagccctggtgagggggggcgggaggttggggtggccctgggtgaggggagggaggagtgtgaggtgggctggccctgagcatggggaatgtggggtctgggggtggggtcctcatggacttctctgcctggctgtcattcctggcgggcggtgggtcatttgttctgtgttctccaagccttggtggtctaaatagtggagaaaggacaaaatattgtctgcttttagtattttacaggccttaaaaaatatgaagtggcaaatccactcagcagaccagacaaaaaagttccctgaaatttgtctcggtgaaaacaagattcaggatagacatagacctcaccttggtccagctgcacaattctggctttctcagtggtccacgcagctgctgggcgggggtttggggcattgtctcctggccacagggagcggctttcttaggtggaagctcacagtcgggaaatcctgcccgcgctggagacaccttctgtcctgagccctaggcacgtccctggagtgtccctcccatgtggctctgggaaactctcagtggctttggctcaggcagggcctccctctgtgccctgctgcctgctgccctccgcccatgccagcccttcctgtgtccgctgtgggcaccacccacgaccttgctttcctcaatccatcttggtacacactttggttcttacctgtctgagggagaaaaagggggaaggaggaggggggtgagactcaggcgtctggaatggggggcgagacccaggcatttggaaggggaagggcgagactcaggcgtctggaaggttgtttgacgtcacaaaagggtagctttacttaaaagaactgagacttatcttgagatgctgtttccagatctgattttaagtctcctgtccttcttcctaagaccctgttctgtctggatagactaagtgaggacgcagaagtcagttttccataggcggcagaggatggaatgaaacagtgtgtgtgggtagtcggcacca

SEQ ID NO: 6153 - DNA, 2221 bp, Artificial sequence
  DNA replication origin
agaacatccctgtctggtcagagcctccttggagggtagggagaaggagcaggtctgttgggtcttcttggggccaggcgctctgccctgagtagaccacctgaagggtggcaggaactcacgttaggaatgaacagtgaggctccaggaaggcggctggtcaaggctcccaccgtgaaggacgaggcctgggcagtgaacacagggctttctgttcgcacacttgtgtcctgatgacagattgggaaagttgtggggaaataaaaggagacactgaatgtgacactatcattgggtacaggacagactggcaggtggaacttcagtgctgcaggcgtgacggctgcagcagtccagccatcacatctgtatcccagaagggaggggaaaggggtccctttcccaggagcccctcagcagacttctgtgggcacctccttggcctggccagcaagactgcgggaaaggggagtgtgcatggtggttgggccagccagacacagggtctgccgcatctgaggggcacagtcccagcagagcactgggatagggagctgggccagagaagagtccctgcagtgggggaggaggagtcgcagaggtcaggtcctagtgaacacttctgggagaagaggaggaagagaagggagcagctgaggattgcacaatgggacgttctgacaggggagcaaggatgagagaatggacaggaaaacagaggggttcccagggaggagtcagggaggcgggaagggcagggacgggggaggagggcaggaggcagggaggcaggaagggcaaggatgtggggaggagggcaggaggcagggaggcaggaagggcaaggatgtagggaggagggcagggaggcagggagggcacggactagggaggagggcagggagggcaaggactgggggaggagggcagggagggcacggattggggaggagggcagggagggcaaggatgggaagacaagggcaaggaggcagggaagcaggggggcagggaggcagggagggcaagaatggggaaggagagcagggagataggaagggaggacagggacgggggaggaggacagggaggcacaaagggcagggacaggggaggagtcagggaggcagggagggcatggatgggggaggagggcagggaggcatggacggggctgccctcctggtgcagagagtgctccaccagccgagggtggggctctttacactcaggccgtcctctacgatcactgagccctggtggaggaggtgctcctccagtcacacctgctgtatgccaggacctgccacgtggtcatgtggtctggactgtcccttgtcctctgaaaacaaactttaaatcaacttatgcatcaatgtcctcctacttttcatttggaagtgatgaatgcttagaaaatatcttctccatttgaagatccatccacctcccaacccattcacctatccatctatgcatccacaattttgaacaccttgtgtcaggcaaggtaatggttggcaggaagtagccgttgagtgactacattgatttcatggcatttaaattaatgactaccatcaggtgctgcttatgggtgggggtgcctctctaacctgtcatttctccccacccagtgtgccagggacatagtccggctccttctatcccacggagcaaatcctaacctgctgtggagtggccactccccgctctccctgtccattgccagtgggaatgagctggtgagcatgttctgtacccacagacctgtgcacctatgtgtttccgtctccagtgcccaccccaccagtccgtcattgggatttgaagttgttggccatttatccatccatccatccatccattcatccatccacccatccactcacccacccatctatccacccaactacccattcactcactcttccactcacctgtctacccatccacccattcttccatccatccatccacctgtccacccaacttctcatccacttatccatctactcacccatccatctaccctccactcatccattcatccatccttccacccaactacccacccacttattcatcctctcatccatccatctatacatccatccttttaaccagtcactcatgtatcaacccaactacctatccactcaaccgttcacccatccattcattcacctattcacccatccgtctgtccatccatccatcc

SEQ ID NO: 6154 - DNA, 1079 bp, Artificial sequence
  DNA replication origin
gccaccttccagggccttgtgcccccggaagcatgtgttctcatgctgagtcttaggcagaagccagggagcttggaaggatggggagggaagcaaggcaaggcgggaggacgggatttcccactcacatgcacacacgcacgcctgcgcacggggcctgggtggcggcatgaagtctacttcttaccacagggcctggtcagacgtgtttgggagcctctggcctgggctgtgaccgtctggtgctgctgaccctcctctgtcatcctcatgtgtctctgactcaggacctcagggttggtcttatcttccagagccctgggcggtgcccctttggccctgtggccgctgcctcctgcctgcctcgagggttaattcctaccaaattgggtgtgggaaccactccgaggatgcccagcggctggggtggatgcggggaaactgaggccaagtctcagctttgccgtgtggcagcagatgcagcccaagccagttggccacggagcacatggcacaccgagcctcagtttacccacttacaaatgaaattaatgatcctgggccttcagcaaggtggtaacttgtgtggtcctgacatgagcgtgaggatgagtgtgcaggagtgccatgtgtgctagtgggcatgcgggtgacactgggatggggatgggcagacagggaggtggggaggtgggggcactgacaggcctccctgcttcagaacatccctgtctggtcagagcctccttggagggtagggagaaggagcaggtctgttgggtcttcttggggccaggcgctctgccctgagtagaccacctgaagggtggcaggaactcacgttaggaatgaacagtgaggctccaggaaggcggctggtcaaggctcccaccgtgaaggacgaggcctgggcagtgaacacagggctttctgttcgcacacttgtgtcctgatgacagattgggaaagttgtggggaaataaaaggagacactgaatgtgacactatcattgggtacaggacagactggcaggtggaacttcagtgctgcaggcgtgacggctgcagcagtccagcca

SEQ ID NO: 6155 - DNA, 1211 bp, Artificial sequence
  DNA replication origin
aaattccagacacaccatgtttaagagctgtaaaggggggccaggcgcagtggctcactcctgtaatcccagcactttgggaggccgaggcaggtggatcacgaggtcaggagatggagaccatcctggctaacacggtgaaaccccgtctctactaaaaatacaaaaaattagccaggcgtggtggcgggtgcctgtagtcccggctacttgggaggctgaggcaggagaataacttgaacctgggaggcggagcttgcagtgagtggcatcgcgccactgcactccagcctgggcgacagggcgagactgtctcaaaaaaaaaaaaaaaaaaaaaaaaaaaagctgtaacaccgcgagttccgcgacttcattcttgaagtcagcgagaccaacaacccaccagaaaggcatagatcctggacatgttttgacagtttttgagctttacatggtagcggcagacaaggagagccagcacccacgtcaacgcagctccctgggcttccgagtggtcagggtctggagacgggtctggagactgggctggaggctgctgctcaagtgctcaaggacgatctagttcccgcggctccgattctgtgcctactgcagggccagtgggcttggctcgatcctacacctgccctgccctcatggtcattcccgctgccatctgggccccctacccccagtcccctcctccctcagccctgcgcggctgcacaacccccacccacctggtcccagcctctcttgaggcccaagttttctctggaggcacagtttactcctgacctggccagcctttcagtgacccctcagaggtgtgtgtgcgcctgtgtgtttgtgtctttgtggtgtgagtggtgtgtgtggtgtgtgtgtggtttgtgtggttgtgtgctgtatgtgtagtgtggtttgtgtgctctggtgtgtggtgtgccgtgtgcgtactgtgtggtgtgcgctgtgctatggtgtgtgcgctctggtgtggcttgtgtgtggggttgtgtgctgtgtgtactgtgtggtgtgctgtgggtgtggttgtgagtgtgctgtgtggtgtgctgtgtgtgccgtgtgtgtgcgctctggtgtggcttgtgtgtagttgtgtgctgtgtggtgtgtctgcgtgtgtgggtgtgtgctgtgtgtgtgattgtgtagttgcggcacacacatactccctacgcgcc

SEQ ID NO: 6156 - DNA, 1376 bp, Artificial sequence
  DNA replication origin
cggcgcctcctgggcgatagtgggtgcgggcctggcctggccacgtggccgcgaccgcccttgctgtgattcccgcccacgaagggacagggacacctggggacgcgggtgaagtttacccatggttccgacaggtctccctgaggactcccagggatggtggtccgggacctgtgggtggcggcccaggctccggcgcggttcagggaggggcttgggttctctgaggctcaggggccgcgggccgggcctcgggcgccctctgagttcgcggcgggagccctgggggcacatgtgcggtcctgacgtcgcttgcaggttggaagaccacagacatggaaggggcccatgcctcccttagcttagaggacgaagtctctggggctggcagccgccaacgcccgctagaggggaagggcggcgagacccctgctgccgaggagccggggtccctgaagaactacgctgtcttcgccacaaggtgcgggggaccctccagcggggaggtccgaccctgacctggggcccagggttagccgggattctccttaaggcaagcagtaaaaatccctgaactgtgttactccctgagaaactagtttctggagaaatctgaaagcctcaacactgtgtcagcaacctactgaggaaaacgacaatagatggtaattggaaccttctcatgtcccttcctgcctgcacactctgccacccgtgtcgccgcctagtggagggagggaacgtttccctcacgagatggggctcccaagctgtctccatcttcacagctctgttgttcacagccaggggctgccctggagtctcactgcagcatctcacgaggtccccctgtcaccccatcgtgcttgtccctgtttgtgggcctccaaaactcagtcccagccctggcccagtgtgatgggtgttggggaccagcctcaacaccacccgtagagtgcccaaagtctagtggggacaaaggattgagaagagacaggttaagaattgaaaggtggggagccagggggccagttgcaaaatggaggctgcaaagggctcagagttctggtctccacactgtttattgagcacacttagatctgagaagcagatgttcagggcgaaacagtgaaagggtggcagtgtgtcataggtgtaatctatagcaatattggtttcagtgaatctcctttgtgctcaaacagcatatcttttaacttatcggagagtaactggtgggagcgggcttagctaggagcctgcatgtctgtccacagtccagggcttcaaaggagagtctttctccttgaacacagtgtttacagataagagagcggatctcgctctgggcatgggaacatgatggcaattaggag

SEQ ID NO: 6157 - DNA, 1853 bp, Artificial sequence
  DNA replication origin
aggtggcggaggcggaagagctgcgcgctggaggccgaggccacgtccagggcgggcggcggctcgggcggcgggcggacgggcgcggcctcggcgccgggcgcctggcggcagcagcactgcgcggccatggccgccggcactaggtgaaatccatgggcggcggccgcgccgggccgcgggcgaggggcgccgggcggcggcggcggcggggcgcgggcacaacaggaagtcgcgccgggagccgcccggcccggccccgcgccgtgcgccgccccgctcgggctccgctcggccgccgccgggggcgctgtgcgcggggccggggcgcggggccggggcgccgggcggggagggccaggagccaggggcgcggggagccggggaatcgagcgcggcgcggggccggggcgctgtgttgggagccgaggcgcgcggagcgggtgagcagcacccccagcccctcgcttcctccccgggcggcgcccgggagatcccaggaggcgggatcgctgctccctcccagacactgccggccaggcccctggggcagccgctgaagggacccgggaaccttggggccacaggggcaggctgcttccaggtgtggttcgtgttcccgaggagcgcagcgtcgcgaactcaatgtcatcctttcatccggggctacgggcagggcaggattctcctggcacccctgccactcctccaagtctacaggtgtggtctgtgctgtgggccctgcggtgcgagaagcgccggagccttcacgcagcgctgtcaactacagcagccaccaaccacgtgtggccatttagatgcgaattaaatacagttagaagttcagttccttcgtggcaggtggagtgagtgagtgtgtgtgtcttcctgggaggagtggctaatggacaaagcaggcaggaatcatttccacaatcgcagaagttcctctgggcagtgctggggacctctcatttgggagccctgtgctggggtacgaaggagggtctggcccgcctgtccccaccccatccgccaggtccacccttcccaacgccattctctgtggacctggcgaaggctgcccaaggctgagcctgtccaggagcctgagccccgagggaaggggtgctcgcctggcagaagctgctagtgagctcacagcggttaaattttgaggctgtggaataacaggggccaccatgatgtcgctgttgtcatcaagtaagaattcaaattcctagggacaaggggcttctggggctggggaactatccaggaacccaggacacctctctcttctgctccattgaggtgtggccgtgcagggctggactcgggtaccgcactcgactcagcgtcagccctgagtagtgtttcctgtgtctggactcagtctcctcgttgtgtaaccctctgtgtctaccctccttccgtggggcgggaaggaaggctgagagggagagtgtgcgttcacgtttgcgggacagagcactgaggcatcatttcagttttcccgtaggacctcaggtccccacgtgccctctttagggacacggccacgatcttggggcacccatcccaaactcaccaggaacccctaggcttacacagtcactcagaggtgtggatcagcctcgcatccaaggctgacagggaagacagctgagatgggaccctcctcactgcccccagcgccctgcccggtggggccctgcagtgccaagggcagactgttttcgatggcacccccagttctacggggctctccagagcccaccgggccatgttcctggctggaagaacctcagttctgcacacgcggtgccacactagctgggcctggccgtccg

SEQ ID NO: 6158 - DNA, 1519 bp, Artificial sequence
  DNA replication origin
gagttggccggctgcctggtgctcgagctgtgcgcgctgcggcccgcgccccgcgcgctcgtgctcgacgcgcacccggctctgcgcctgcactcagccgccttccgtcgcgcccccgccgccgccgccgagacgccctgcgccttcgccttctccgcccccgggccggggcccgcgccgccgcccccgctgcccgccttccccgaggcgcccggctccgagcccgcctgctgtccgctggccttcagggtggacccgttcaccgactacggctcctcgctcaccgtcacgctgccgcccgagctgcaggcgcaccagcccttccaggtcatcctgcggtacacctcgaccgacgcccccgccgtgagtccggggcgggcgccggggctgcgggccggtccgcagggcgctgctagcggcctctcgccgcacggccaggctgagggacgcgaatctgcgccctacaggtgcccccctccccccaccccggtgattcccagctgttgcctgtgagcccttaggaccctcggatagaagccggagtcctgcggggacacgggacagcatgtcactccgggaagcctcccgttcaggtgtctggtccctgcctggggacatgagcagcttctgtcacccaccgaggtgtacatctgcaggatcctggcaccaagggttgggctggagtgtcagctgcggaagggcctccatgtgaccagtgcgtgcagatgagtccaagccagaggcagaggaaagggccatggagattgtgatgctcggtttggggcttccttggccagcactggtggagtgttgagaccagtgggccccgcgaccccaacatagacacacataggctctgcagggcttgcacactgggtacccaccactccagagactctgcaagaaaggccaggtggctgaggctggcgctgtggctgcagcaccccctccacctccaccagtggggatgtgtacaggatggagcagggcctttcctgcctacagcatgggggttcatactgcatccctaggtggtatggacggcacacatgtgacacccgacatatgcaagacacacacagctgtggaggcgctgggaagtccagctgtcactggtcacggcacataaatggacagggtggtggagaggtggtcgagaggcttcaggccacaaagagccaaggtgacatctgggcaggaagaacccagaccagtgcacccctatgggcttcctgtacatttcccaggagccctaagcaggacctgccacctcacctttttcccagaacccctgtgggtgtgcaggccgctggctagccggccccgcccctgctgtggtattccagggctctgaccggtggcaagtatgcctcccagtatgacaggtgagaactgagggatgggcttctccttggccttgatccgtgtttggagcccacgtgtctggtccgcccaacactggcctgcagagtggccggaccagggccctcagcaggctgctgtgaacggggcccagtga

SEQ ID NO: 6159 - DNA, 1215 bp, Artificial sequence
  DNA replication origin
gctggaccaggccagtacgccggcccgctagtctcccattggtaaccaggcggcagccaaccgggcgtggggtctcgggtcacgtgacaggcggcccaatcgcactcgcgcgacggaaagcgccacggacgtcggaggcccagggggcggggctcccgagctccgctctttcgtggtcgggcggcggaccgcactgtattttttccttccgggggcggcggagcccagggctatcccggcctccgctcatacccggagggccggcaggcgttcagtcctccagccggtgaggctcgggccggggtgtcgggaccgcctgaacacgcgggctctgggagcttcagggaccagggagccacctcggccgagttgcgtcgcagactacagctcccagcatgcgccgccgctcccagcatgcaccttcctcccgaaacgcgtctctgcttccggcgctctgctgcggaggccgtggccgcgggtagttgggaggaaccgagatttacgcttggtaaggcaagttgcgagctgtccggcgccggtcgagttcctgccgccgtcgtcgtcaggcaggggagaagggggcctcaacccctctagtgacagctgtttgctacctaatagggcttttcatcccaccgggccccagggccttcgttaggagcccagcaggctcaacttcttgctgtggttctggaaaagggagtgaccacctggctcaacacctctctctgtgatgtgtttgggagttttgggaaatgagacggctccgagggaagagcttgagggagcggcgtcgcactcgttcgaccttcccgggcctgggctttgtttctaggcattttaggttgaacgctctacatcttaactgggggcaggggaggtggccagagcatcccgctgagcgttttccgattccccagatggccaggcacctggtcctggtggctggacagtgaccccgtggacgcacatttacagctatagccattcagtgccgcggggaggtgaggatagtgatcctgggacctgctcgaggattcacccttgccccaagaacctgttccattcccaggaatgaaggcggtcaggcaggggaggagaagggggcctcaactcttctagtgacagcagtttgccacctaatagagcttttcagattttgcctcctcaggccattttactcagcctcggactatcaaggatggtcacattgaa

SEQ ID NO: 6160 - DNA, 922 bp, Artificial sequence
  DNA replication origin
cccggcccgagcctcaccggctggaggactgaacgcctgccggccctccgggtatgagcggaggccgggatagccctgggctccgccgcccccggaaggaaaaaatacagtgcggtccgccgcccgaccacgaaagagcggagctcgggagccccgccccctgggcctccgacgtccgtggcgctttccgtcgcgcgagtgcgattgggccgcctgtcacgtgacccgagaccccacgcccggttggctgccgcctggttaccaatgggagactagcgggccggcgtactggcctggtccagcacctgcggggccctcgggcttggagggctgggccgggcggggaacgggcggggcgggccggaggcggcggcggctgactcgccttctctccggggctgcgaccccgaggcaaccggctgcagatgggagcccgcggagccgaggatgcgggcgggccggggcgcgacgccggcgagggagctgttccgggacgccgccttccccgccgcggactcctcgctcttctgcgacttgtctacgccgctggcccagttccgcgaggacatcacgtggaggcggccccaggtggggccgtgtggggtgcggtgggcgccgtttctggtttctgagatctccgctcctcgcagggagcggggcggggtgggcggccagggtagctccgaacgcagggtccgccgttgttctcctcagaagtgggcgcccggccccctcttttcgtacctccttcatacccccgcccagaacgagcaggactcggcgctaccctaaggacgctaaactaggtcgtggcctccgcctgcgagagctccaatccaggaggctcagagcgctgcgagaggcgttttaacagagccccaaaccccgccccacctgtttgctttcgccctgaagagcgttt

SEQ ID NO: 6161 - DNA, 984 bp, Artificial sequence
  DNA replication origin
ctaccctaaggacgctaaactaggtcgtggcctccgcctgcgagagctccaatccaggaggctcagagcgctgcgagaggcgttttaacagagccccaaaccccgccccacctgtttgctttcgccctgaagagcgtttgtgtctgctcctcccgcagagagggccgctcgtgcccctctgaagtggctaggccgagcccacaaagcaaagcgtgatagaatttcagttttggattttgtgcacctgcctttccagttgtaacacctagaaatggcacctccaagggatgccctggccgagtgctgtgttcatatttttagaaatggtttatctgctgaataagactgcccagggagcaaccttgccctaagtggatgcggtcttagcggagacaactgatggccgccagtcttcgaacagagctggaacttctgggctctcgtgactgagatggctttgacaggccacctggtttccttggacaacactgaagggcctgggaggaggcaagggtcagaccatgtagagccttgtcattggaatttgggttttattttgttaaaagattgattttaggtgcagctggaggccactagagggttttggtagaggagtggttctcttggatgtgtgtttttacaagctcactcttgctgctgggtgggaagtgggttgtcggggcaagaatgcaagggtccattgtagtggtcctggagaaagatgaaggggctcagattagcttgacgactgttaggatgtgggtttggagtagattggtttgagacgtaccttgcaggggggatcgagaggccatagtgactgattgaaatagagggtgaggatagtggagggatcaacatgccttctgggtttctggcctgaacaggtgggtggatggtggtcctgggacagagcctgggggtgacctagagttgggctttgctctcacgtcttcaggtggagctgtcctggaggcaggtgga

SEQ ID NO: 6162 - DNA, 1191 bp, Artificial sequence
  DNA replication origin
gggtttggagtagattggtttgagacgtaccttgcaggggggatcgagaggccatagtgactgattgaaatagagggtgaggatagtggagggatcaacatgccttctgggtttctggcctgaacaggtgggtggatggtggtcctgggacagagcctgggggtgacctagagttgggctttgctctcacgtcttcaggtggagctgtcctggaggcaggtggatctgtcctggaggcaggtggatacggagcagggataggctagaggcattcttctgggaggcggagcatattagatggtttacagtccacagcctgggagagtgtctcgggggagtatcagtaaagaagaagggggccttggggctgagccttgaggaaccctaacatttcttggggtcaggcaggtgccctgacagatagacttgagaagcagcaggcagtgagggagaggacacccggggagcatgcggcctcacagaagctgagtggggaccacctcaggggcagcagatggctgttctgctgttgtgaatgctgctgagtagttggggaagagagttgggaccaagagaagcccagtgggtttgataacatagaggtgacagcgacattgatcgaggcagtttaggggccatgattggctcagaagctagaggagcctgtgtggagagtgaatgggaagcaggtagtgggcatggcagctctttcaagagctgtaatgaagagaagcctgaaggagactatggtgctgagagataatgtcttaaagaacatgggggtgggattctgcccggggagctggaagggaaggagttgtgagaggagcccaggctctgagggcaggagagagggtcaggtccagaagcaggaggcaaggtcgaagctcagaggggtgggcaagggcagtgtggatgttttgagtagacggggagaaaggggaaggtatatgatagttagggggtgtgggaaatggagcctgctagagaaacagatttccagcaggatggaggacacatttgagatttaccagcatgagtaaaaagtgaaacttttcgaagccaacatttagctgttttgagaaggagcttgctagagtttgggatttttccagtaaggaaggaaggcaccccagaattaagctggacagaggcatttgaagccaggagctgaaggacacccgctgcagg

SEQ ID NO: 6163 - DNA, 1876 bp, Artificial sequence
  DNA replication origin
ggcccagccagctggggacgggaggcgggagcactggtaggactgggtgctgaggcgcctgatagggaagctggagacctaacagcagtgtcccgagacacaggtttgacaccctggcaaggcccctggaggtggagcaaacctggaggttcctagcggcacaggcaacacttccacttttgctgggcagggtagagatgccacaactgctgtggctggtggagggtaggcgtaggcgtgtgtggtgtgagctgccaagcactggttccctgggaagaccaaggtcacaccgctcacctgtgccatgctggttaatagggagtggcagctgtgccgcaggaggctggcaggagtggcggcggtgccccaggagcctggcgggagtggcggcggtgccccaggagcctggagggagtgggcggcggtgccccaggagcctggcgggagtggccggcggtgccccaggagcctggcgggagtggtggcggtgccccaggagcctggcgggagtggcagcggtgccacaggaagctggtggcaggaaccaccatcactgggtttggctcgccgggggcggagggcattagacctctaaacagcagaggccaggagacaatcatgaacacggctgaagggcgccaaggggcctgcctgcagggcttacggaatggcagcagagcaaggcagggctgccagcgagggcagcgctcaggtggagccggcagaggggtccaggagggctgagggtggtcactccgatagagccccagttgggcccacactgcccgagtcggttttcagcccaggtatctgctgactgaagaggtggccaggcctgcaagatgaaggacactccccacatcagcaagtgtgcatgacaaggacctccccggggactatgtgcaccaggaagagaatatccaggcatctgggagccactgagcacacaggccccaagctgatgctggtccccaagagtcaccagggctccatgacagtgggacacatcacaggcagttaataatggagtcctgcccaggaccagctcacatgagcccacagggcctacagacccacccggggccatgtcccggtctctgagcctgtgactgggattgacacctggggagcgaccgatatctctgctgcatccttggggtagagatggccgtgggaaggccaagagggacactggaaggccaagactgtcccctcctgcccgggtcccagagcagccgtggcatgcggagagagggtggtggccctgctctctccatttggttcagtgtggccccgtgggatgggattcctggagggccacgtggcgagtgcacacacagccgaggggcagcccagtgcagcaggtcctggaggtccaggtacccagggttggccatcaactggacgaatacgccacggaagatcagaagctgctcacatttatatgaaatttgtatggaatggacaaaggcatttgctgtttctcctggggcctctgccggaatacaggacagagaccccagctggccggacaccctgaagagcaccgcactgatccatgaccttggcaacaggatgctgatggtgtcagagcaggaggcagccagggacaaacaacaccaggccggggccttctgcaccagaaatgtttaggttggctgggggttagagccctgccagacatcccctccaactgcatctggaacctcccatcagaaggaagcacaaggcctcagggctctccgcaggcttcggagggagcgttttccacacccaggaacatggttccagctggtagaccaaatggccaaagcagccaggtcgagtggagccaatctacactggggcgatgatgggtgccaaccatggcctctaa

SEQ ID NO: 6164 - DNA, 846 bp, Artificial sequence
  DNA replication origin
gtggtcgtcctgtccagtccagttgtgaaactggttccagtgtccagtgggaaagttggggaagggggtctgctgggggccccagctgctgtttgatgaatgaacagacacgagggcctccaaggaggaagcaaataaggcgcaggtggctgaggcctcactgaggtgccctggctggagtttggagaagttgggcggggcgcagcactcccagctcctgatcaacacctagccaaggccaaggccccatctggagaaaccaggaccgtgggcagggaggaggcagtgcgtggtgcctgaaggttccactctccagcctcttaggaagcttctgagcctgcacagacgcggcccacccctcgctccacccccgtcaggccctggccccccttgggtgctagggctctgaccgagtgaagtgtcagcaacatccagtgaccagggagtgggctgcgggcccggccagctcggggcacaggagggggctgcaggcccagccagctggggacgggaggcgggagcactggtaggactgggtgctgaggcgcctgatagggaagctggagacctaacagcagtgtcccgagacacaggtttgacaccctggcaaggcccctggaggtggagcaaacctggaggttcctagcggcacaggcaacacttccacttttgctgggcagggtagagatgccacaactgctgtggctggtggagggtaggcgtaggcgtgtgtggtgtgagctgccaagcactggttccctgggaagaccaaggtcacaccgctcacctgtgccatgctggttaatagggagtggcagctgtgccgcaggaggctggcaggagtgg

SEQ ID NO: 6165 - DNA, 1272 bp, Artificial sequence
  DNA replication origin
agactgagtgactgcttggcagacagccaagagaggccggagagggcaggaagtgctggacagtggctcccagctccagagcacccctagaggcccctgggtgacacaggcaggggagcctcacggagatccaggagcaggcatgctggaggtggtgctgattacaagcttgctgatggtcaggcagcgctatcagctctgaggctgagaggggactgagggtttctagatggccttcaccctcaagcagagctgtgcgaggagccgatccaggctggctgcagccgctgcagagtccaccccagcagacgctgagagagaaatgtcactgggtggcctgtggccactggcccagaaagcaggaaaagtcccacagtgcctcacccctgcttgccttccttccctcctgacaccccaggtgtctcccccaagccgccaggccaagggcgcttctccccgcaggtgttcccagggttatggtctacacagccactgctgagagggtgcagccagcaaggagtaaatacgctggccagcaggtgtgagccggggcggtagccccaagggaaggcccatggctgggctgtgggcagcgttcttgggggcagccttgtccagggatgccatggggtagtctgcctggggaggctgagccaggcagggcacaaagaccaggcgtttcagccaggtgggggcaccccggccaccgacactccaggcttctccctcaccaaccccacctcttccaccttccctccgaaataccttgcacccaaattctatgtctgcctctgcttctggagaatccaacccccattggagaagagagtcactaatttgggatttggaactgggtcactcacggcccacgggcaatgaggacccatcactggtcaggggagatagctggcgcctggcacaaggtggtcgtcctgtccagtccagttgtgaaactggttccagtgtccagtgggaaagttggggaagggggtctgctgggggccccagctgctgtttgatgaatgaacagacacgagggcctccaaggaggaagcaaataaggcgcaggtggctgaggcctcactgaggtgccctggctggagtttggagaagttgggcggggcgcagcactcccagctcctgatcaacacctagccaaggccaaggccccatctggagaaaccaggaccgtgggcagggaggaggcagtgcgtggtgcctgaaggttccactctccagcctcttaggaagcttctgagcctgcacagacgc

SEQ ID NO: 6166 - DNA, 851 bp, Artificial sequence
  DNA replication origin
ggcatggttagggttagcgttagggcccacatgaggcattgttaattaggtttagggctcgggatagggttagggttgtagttggtgttatggttagggttaaggtttgggttgagttagggttagggttagagtttcggttagggttatggttgttggagttagtgttatggttaggggtaaggtttgggttgagttagggttagggttagagttttggttagggttatggttgtagttggagttagtgttatggttagggttaaggtttgggttgagttagggttagggttagagttagggtttcggttagggttagggttcgggtccatatgaggcattgttaattagctttaaggttcggaatagggtggagttagtgttatggttaggtttagggttaaggtttgaattgagttagggttagggttagagttttcgttagggtttgggttcgagttaggttcggttctgcctgaattttagggttatggttagcattagggttggagtccacatgatttatggttatggttagggttatggttaggatttgggttcaggttagggttccaggccacacgaggtttaggtttatgattagcattagggttggggtccacatgacttatggttcattatggtttacttggtgctccctcactttaaccatctgatgagattcttcactccttgtccagggcctcttttacacacttgcactcaaatgcacaccctccaacactcccctctccaccctcatagtgccaggtaggttttcccatgttctgctgtcctctctgctcactcctcatcttgaaggcctggtcagtgtttcttgtcccctctcc

SEQ ID NO: 6167 - DNA, 1026 bp, Artificial sequence
  DNA replication origin
cagctttggggagagaggggccctgggggtgagcggggagctaggagagaaacagcgctctggaggggcccgggcaaggcctgcctgagtgggagggggcagagcacgagggcccaggctccaggctgggtgggactgccctgaagtgcctgcggagacagccaaggggcagatggagagaggtagggggtgggctggggacagcgtttcctgtacacaggtggaacctggtggcaaggggcccttcccagagacagtcagagtctctaaatgtccagtttcttccccaagtccacacagcccagaagaatccgctgggaccatgtggccctgcccagtggggcttcccttccagtgtgtgaggagcacaggtgccaggccacgtcagggaggccaggcctggtggggacggggtgccccaggccactgctggggaggagtgatgcccagcagagggggcacggtggagttcatggctggcctggtggtggggggggtgggggagctctgcagggccctggctctggtgggctgggtaggcctgcttggggcaccatctgatctgccagaggtggaaggagcactcctgggagatgccgtgccctgcacctccagtccctgcttgacggcggccgggcttggactgatcaggtgccgtgccttctgctgaccccagaggccagaccctgtggccagagtgagggatggatgaaatcccaaatctgagcctcctgcccgaggatgaggcccctctccaatgaacatcatggcccatggagactgggcagggaacccaagggcgcacactggggactgggcctggagggacagccggggaagcaggaggaagggcaggaaggacagcaggaggaagcaggaagaaagggacaggaaccaggcccgggatgacagcagagaaggaccaatgcccagccagggcttcctcacgtgcctctgggtagagagccctggtctggctcaggaggcccaggcactggtctcagacctgccaccacctgtgtgacg

SEQ ID NO: 6168 - DNA, 1028 bp, Artificial sequence
  DNA replication origin
agactgggcagggaacccaagggcgcacactggggactgggcctggagggacagccggggaagcaggaggaagggcaggaaggacagcaggaggaagcaggaagaaagggacaggaaccaggcccgggatgacagcagagaaggaccaatgcccagccagggcttcctcacgtgcctctgggtagagagccctggtctggctcaggaggcccaggcactggtctcagacctgccaccacctgtgtgacgctgggccaagcgcttcccttccctgggcgtccgtttccaccgctgtaaagtggggaggggtgaaactgaagctctccccagcctatcccagccgttgaggagggagaggctgtggtcaggggctgtggggcccacgttgaggagacgaggctcctgccctcagggtggacagggcccaggaagggggtgctctgcaccatgggggcgcagcctgggcctacgggctcccccaccatgagctcagaaggaagatgtccgctgaggagttgggggccagggagaatattctagaccagataggggtggtctgggtaggcttctgagggggtgggcttggaggaggggccggtggccaagtcggggggaagcaggggaggagccagcctgcctgcgtgtgcctctcacctgtgtgcattggcgtgtgcatgtgtgtgtgcatgtgtgccagcgtgtgtgtgtgtattggaaggcgcccacggagcgtgtctgcatgaaccaggatgagtgtgcgtgctgcaccctgtcttggggctgggcatgaggcgctggggagggcgagctgaccgcagaccctgggagggctgggccctgggaaggtttccgagatgacagggcagaagtgggctggggaggaggaaggctccgtgggcggggctggagcgtctctggttttgctgtctgtctctcacgctgtttccagaacaaatgtgtgccctcagcaaggatgctggctcttcagaggtgtcagcacaggcagccggcaccccacttccctccca

SEQ ID NO: 6169 - DNA, 1652 bp, Artificial sequence
  DNA replication origin
gctgaccgcagaccctgggagggctgggccctgggaaggtttccgagatgacagggcagaagtgggctggggaggaggaaggctccgtgggcggggctggagcgtctctggttttgctgtctgtctctcacgctgtttccagaacaaatgtgtgccctcagcaaggatgctggctcttcagaggtgtcagcacaggcagccggcaccccacttccctcccagaaatcccccacgccctctagctggggctggtgcaggagcagtggggaactcctgttacccctgacctgctgccgtcagtcagccgcccgcccccccaccttaaggaggggcagagtcagggaccagccctgaggggtggctcaccccagcttcacttcccccagcccttctcagacagccactgtgcaggctttggcagcgggggtcacacactccacccgggaggccaaagctgcctgcaggtcagtgccgcccactgccctaggggcctcccagcggggcaggggcatggtgggggtctcagagtggggtgaggctgtgatggggtctcagagcagggtgaggctatgatggggtctcagagtggggtgaggctgtgacgggggttctcagagcgaggtgaggctgtgacagggtctcagagcggggtgaggctgtgatgggggtctcagagcagggtgaggctgtgatggggtctcagagtggggtgaggctgtgatgggtgtctcagagtggggtgaggctgtgatgggtgtctcagagtggggtgaggctgtgatgggggtctcagagtggggtgaggctctgatggggtctcagagtggggtgaggctgtgatgggttctcagagcagggtgaggctgtgatgggttctcagagcagggtgaggctgtgatggggtctcagagtggggtgaggctgtgatggggtctcagagtggggtgaggctgtgatgggggtctcagagtggggtgaggctgtgacggggtctcagagcggggtgaggctgtgatgggggtctcagagcggggtgaggctgtgatgggggtctcagagcggggtgaggctgtgatggggtctcagagcggggtgaggctgtgacggggtctcagagtggggtgaggctgtgatgggggtctcagagtggggtgaggctgtgatgggggtctcagagcggggtgaggctgtgatggggtctcagagcggggtgaggctgtgacggggtctcagagtggggtgaggctgtgacggggtctcagagtggggtgaggctctgatggggtctcagagtggggtgaggctgtgatggggtctcagagtggggtgaggctgtgatggggagtctcagtgaggtgaggctgtgttggggtctcaggtgggctgaggctgttggggtctcaggggtggctgaggctgatgaagacttggagcctgtgtctgggtagcagcttgttggagtgtgggatgtgacatttaaaaacaagaatgaagaataccccgtgctgtggccccgaggtgagcagctactttggtgaactcgtgtcactcacagccccatcctgggtcctggggtgtggtgtgctgtgtggggcccaggcccagtggggtcacaggtacgggggactctggtgcctgggccacagggatct

SEQ ID NO: 6170 - DNA, 1651 bp, Artificial sequence
  DNA replication origin
cccagcagctgcagtcacggggtttgggcgctctcccctcctgatttgggggaccttttgtgctcctctgggcagagggaggaggcagagggaggaggaaggcccttcgctgtgggctgagtccttcccaccttccataccagcccagcaggaagccactgcaggatgccccagaggacagcctgatggttgggggagaggcttctcccgccctcacccctccgggttcttcctggacccactgagtaacccaggtggtgggacgtgtggctgtgagtcctggactctgggcgctcaccagcagctccgtctcacacctgcctgcgtgtgacaccagcaccccttatgatgaggaaacaagtttgcccagctgcaggggtggccgagtcaggatgactctagcccgtgtcctggacaccagaccctgcccaggtccagccggggctggtctcagccttcctgggctatgtcgcggagggtgttggggacagcgagaggctggcgtggacagtggaggggtgactttgtgggtggtcctgatagtgacggagaggaggatactcagctccacccctgggcggcccctgagcagcacgactgggcctgaaggggcagggctgccgtcacaggctctggcccctgggagctcaaggggtgaatccctgatcccaggtgtgggactgggatggggcctcaggctgatgcaggcaggacctccagagctcaggactgggtgggtgggctcacagggaggtaggggcaggccagagtcccagctgtcctggactctgctgtggggaagggctgatgcaggtgtggagtcaaatgtgggtgcctcctgcagccgggtgccaggaggggtggaggggccaccctgggctttgtccgggagcctggtcttcccgtccttgggctgacaggtgctgctgcctctgagccctccctgctaagagctgtgtgctgggtaaggctggtggccctttgggctccctgtccaggatttgcgctctggagggtagggcttgctgggctggggactggaggggaacgtggagctccttctgcctcctttcctgccccatgacagcaggcagatcccaggagagaagagctcaggagatgggaagaggatctgtccaggggttagacctcaagggtgacttggagttctttacggcacccatgctttctttgaggagttttgtgtttgtgggtgtggggtcggggctcacctcctcccacatccctgcccagaggtgggcagagtgggggcagtgccttgctccccctgctcactctctgctgacctccggctccctgtgctgccccaggaccatgaatggcacctacaacacctgtggctccagcgacctcacctggcccccagcgatcaagctgggcttctacgcctacttgggcgtcctgctggtgctaggcctgctgctcaacagcctggcgctctgggtgttctgctgccgcatgcagcagtggacggagacccgcatctacatgaccaacctggcggtggccgacctctgcctgctgtgcaccttgcccttcgtgctgcactccctgcgagacacctcagacacgccgctgtgccagctctcccagggcatctacctgaccaacaggtacatgagcatcagcc

SEQ ID NO: 6171 - DNA, 1569 bp, Artificial sequence
  DNA replication origin
aggtgggcagagtgggggcagtgccttgctccccctgctcactctctgctgacctccggctccctgtgctgccccaggaccatgaatggcacctacaacacctgtggctccagcgacctcacctggcccccagcgatcaagctgggcttctacgcctacttgggcgtcctgctggtgctaggcctgctgctcaacagcctggcgctctgggtgttctgctgccgcatgcagcagtggacggagacccgcatctacatgaccaacctggcggtggccgacctctgcctgctgtgcaccttgcccttcgtgctgcactccctgcgagacacctcagacacgccgctgtgccagctctcccagggcatctacctgaccaacaggtacatgagcatcagcctggtcacggccatcgccgtggaccgctatgtggccgtgcggcacccgctgcgtgcccgcgggctgcggtcccccaggcaggctgcggccgtgtgcgcggtcctctgggtgctggtcatcggctccctggtggctcgctggctcctggggattcaggagggcggcttctgcttcaggagcacccggcacaatttcaactccatggcgttcccgctgctgggattctacctgcccctggccgtggtggtcttctgctccctgaaggtggtgactgccctggcccagaggccacccaccgacgtggggcaggcagaggccacccgcaaggctgcccgcatggtctgggccaacctcctggtgttcgtggtctgcttcctgcccctgcacgtggggctgacagtgcgcctcgcagtgggctggaacgcctgtgccctcctggagacgatccgtcgcgccctgtacataaccagcaagctctcagatgccaactgctgcctggacgccatctgctactactacatggccaaggagttccaggaggcgtctgcactggccgtggctcccagtgctaaggcccacaaaagccaggactctctgtgcgtgaccctcgcctaagaggcgtgctgtgggcgctgtgggccaggtctcgggggctccgggaggtgctgcctgccaggggaagctggaaccagtagcaaggagcccgagatcagccctgaactcactgtgtattctcttggagccttgggtgggcagggacggcccaggtacctgctctcttgggaagagagagggacagggacaagggcaagaggactgaggccagagcaaggccaatgtcagagacccccgggatggggcctcacacttgccacccccagaaccagctcacctggccagagtgggttcctgctggccagggtgcagccttgatgacacctgccgctgcccctcggggctggaataaaactccccacccagagtcagtcctagtggggccctctgtgtttcgcactcgtgtggtgggaggcagggagggagcgcgtggctcagagggctggcggacatcttccagggacccttcggggctcttcactttgaggtcccccttggaccctttcaccccttcccacccccacccacctggagcgtgagcaggggctgttggaagct

SEQ ID NO: 6172 - DNA, 1717 bp, Artificial sequence
  DNA replication origin
ctgaggccagagcaaggccaatgtcagagacccccgggatggggcctcacacttgccacccccagaaccagctcacctggccagagtgggttcctgctggccagggtgcagccttgatgacacctgccgctgcccctcggggctggaataaaactccccacccagagtcagtcctagtggggccctctgtgtttcgcactcgtgtggtgggaggcagggagggagcgcgtggctcagagggctggcggacatcttccagggacccttcggggctcttcactttgaggtcccccttggaccctttcaccccttcccacccccacccacctggagcgtgagcaggggctgttggaagctcctggcaggaccacagtagaggcccccagcccaggtttccttgctcaagacagggctgggagcagctgatctccatgtaggggctgcacagcggtgcaagggggggtgaccaaggtcaagcaggtgagggtgggttggggtgggtggcagtgaagggggtggccagggtctgtcaaggaacccagccctcttctccttccttcagggaaaggctggaaaccatgtctggcaggggcaggggttgggtgcccactcaggtaaaggcacgatgtcctgctggtttctgcctctcctgtactcctgcatggagggcatctcgaaacccaagctggaaggacagggcactccagagacctcctgtgagtgtgggccagcacggcctgggctcaaaccccatcctgtcatcccatattgcatgtccacaggcaccgccccaccctgttccatgttccacaggactggagagagatggcagtcatgttctggcagggacatggcacaagcatgcggctgatggcatctcacaggacccaggctccggagggcccatgcccaggagagccccataagggctctgtgcctaaaagggtgcatgcccaggtgggcccatgcccaggaaggtccatgcccaggatggtccatgagcaggagggcctcattcccaggagggtcccgtgcccaggagggctctatgcccaaaagggtcccatgtccgggagggtccatacgcaagggtgtccatgcctggttggggggggtctatgtccaggagggtcccatgcctggaagggtccatgctcaggagggttcatgcccaggagagtttatgccctggagggccccatgcccgggagagtcacgtgcacagagggccctgtgctcaggaggatacatgtccaggagtgtccctgtccaggaggctccatgcccaggaggctccatgtcaagaaagattcatgcctaggagggttcatgcccaggagtgtccctgcctaggaagatccattaccagaagggcccatgtcaaggagcgttcatgcccaggaaggtccagcccaggagggtccatgtcaaggaggttccatgcccaggagggtccatgctgaggtgggtccatgcccaggagggttcatgtccagaaaggtccatgcctaggagggcccatacacaacagagccctgtgcccaggaaggaccatgtcaaggagaaccccatgcccatgagggtccatgcccagtaagggccatgcccatgagatcctcatgcccaggaaggcccatgcccaggagggtccatgcccaggccagttcatgcacaggagggccccatgcctaaaagtgtccatgcccaggaaggtcca

SEQ ID NO: 6173 - DNA, 2018 bp, Artificial sequence
  DNA replication origin
gatggctgggacagggactacacacacccactctccctcctatcccctcctggctcccagcaccatggaggcggctggactttcacaaaaacccaaggacattgagaggaaacagaggcaaaagcacgaccagtcaggcgcccaagaactgacttcagagccccgatcacaactacacactctgagcacccacatccgagtctggcctttgggctgggccaggccaagcagaaatcctctttctcaaatgagaccaggcacagaccccagagggcttaggagcagcccacacactcatcaccacagagtcaccattaactagcaaaaccattaattagcaaagaacaagcattagaagtcgattccagttgaggctgcatcaacaggagtacagggtctggaacgtgggaacacagaagcgcatcctcccttgctagtgaacacctggggaattgtatctggcaagggacacgttctgtatggggaccacagtcatcctggggaaggttctggagttggatgcagggtagcaagggcttggcaattcaaactacttgggaacagaaggggaactgtggctgttagcagacggcgagctgcctcccagaaagtgacggccctctgcagccactgacgagcagaaggtccagatgactgccgaggacggacccaggactggcgggggacccagcacactgcccagaaccgagaggcttctggtcagggacacgggtgtctacttaggttctcgtcattggattcttagtgctctgtgctgtctgtttgcttctcccagtctggaagcttttagggtagatatgtatttacactgagagcgtgaggatttcaccacgatgcacaccaggctggattttcactcagttactgtgctgggaacatggtgtgctcttccagtcggaggaccgcagctgtctgggcttgattcccttcttggataatttcctccacccgtgagccagagtttggagttcttagaccgaccttctgttccttattgattcatttttcgtttccttttgtccatctctttgaccttttgttctgccttcaggggataccatctcatctttattttccaagtgttttactaaatttttattccagtgattattcaagagtcctttcttggtttttggtcattcctttttatttatttatttattattttttgagacgaggtctcactcttgtcacccagtctggagtgcaatggcacgatctcggctcaccacagcctccgcttcccgggttcaagcaattctcccacctcagcctcccaagtagctgagattacaggcgcccaccaccacaactggctatttttagcctttttagtagagacagtgtttccccatgttgcccaggctagtcttgaactgttgacctcaagtgatcctcctgcctcggcctcccaaagtgctgggattacaggcgtgagccaccgcgcccagactggtcattcctttttaaaaatactatcctgttctcactttgtgatgccccgtcttctcaggtctctctggggacgtcacttgtggttggctttttatttcatttttaaacaactgtataggggtataacttctgcacagtaagctgaactgaaggtgcacagcgtgatacgttggaccaacgcctccgcccatcgcctgtcaccgcgctgttgtccccagagctccccctgccctgtggcccctccactggttggctgcatcccccactttgcattttctggggctccacatggatggggcctgcgatgtgtgcgcactctgcagtgtcctccccggcggggtgacttcggagcccgtccaaacagccgcactctgcttccttcatttcattgctgggtgggttccgctgacacgtgttttcaagtcccctctgctccccatgatctctgtctcctctgatttcctcgttttcctttgttctgattccttccttccttccttccctccctccctccttccttccttgacctaccttccttcctt

SEQ ID NO: 6174 - DNA, 1216 bp, Artificial sequence
  DNA replication origin
tagcccaggatgggcgccaggccgcgctgcagcggcgccagctgcgggtcaagctccgcgccccgcccccaggcctcgccatgcaggaggcaggtgcgcgcccaccgctcccgcagcgcagccacctccagcggcagcccagcggcccccagcgcgcccagccacgcccacagcgtgcggttcaagtgcgcacagagcgccaagtccagcgcgttctaggcgctcgccctgcactccacgcgcggctccagcggctccgggccgaaggccgcgcgccagtgggcggggacggccaccaggtcatccaggccccagcgcagtgcggcgcaggagccccagggactcgtccaggtgctgggcgatcagcagcaggtcgaagcgcgcggccaccgcttgcacccccggggccaagaggcgcgttgccaccctacaaggcggcggcgcgttgtggtcgaagcctaagtccaaggccatgaggttgtggccatggtgcctgtcgggccgcctggggtcgtagaaggcgcaggaagtggcgcaggatccgggctccgacgaagggagaggccgtcttgtagaaagcggactccaggacgagggctgggtcccgcagggtggtgaaggaggtgtcgcggggcaggatgcgtcgcatctgggcggggaagggcctgtgtgcccacgagggcggctggctctggggacgctccaagggctccaagggcagcagtcgccttgagccccacccaggcagagcttccatcgcctgggcctctggagctctggcctgtccatccagaggcgcccggaggaggcgagccccacccttatatttgaactcggagccccccacggaccacttcccacaaccgctaggacaggaatggcccccccagcgctctgcctgcagccacctcccctccctgctcagggcaccgtacgtcataattaagttcaagggaaggtactatgcctggatgtgtacctaaaccagattgatgtttctctccacccaaacatctcagtggagtaaagaataacaaggcagcattgcggcaaacatgtctcgcctctcaccacagggcggtttttctctcatctcggaattgaacaaatgcacaatcgggttttaaatcgagacattcagttcccaggggcaggcaggagacagtggccttcctctatctcaactgcaagaggctttcctcttttactaatccac

SEQ ID NO: 6175 - DNA, 1340 bp, Artificial sequence
  DNA replication origin
gtgggtgtgggatccgggacgcccttggggagcagagctccaggccaggcagcgtcgcgcggcaggcccaggcccaagggaaaatgtgggccgtgttcagaggcgggcaggggtccgtagggccctggagcagaagggcgcgccctcagcccctgttacatgggaccccacagggcgggcgacagtggccaggagccccagccgaaactgctccgtcccggctcccttttctgcgcatccttctgcagggcctcgaaacctgtttttggcaacttgcttttcttttcatctacttgaaagccacgtaggtcacccatggcagatgcacgattccaagtcattttggcaggtgtttttgttttttgttttgttttgtttttgagatggagtttcgctcttgttgcccaggctggagtgcagtggcacgatcttggctcactgcaacctccgccttctggtttcaagcgattctcctgcctcagcctcctgagtagctgggactacaggcacccgccaccacgcccagctaattttttgtaattttttttttttttagtagagacggagtttcaccatgttggccaggatggtcccgatctctggacctcgtgatcctcccatctcgccctcccaaagtgctgagattacaggcctgagccaccgcgcccggcattttggcagttttaatgtggagaaggctctttctgcagagggaacgttgcagagctgctgggagtgtctcataggctgtggcgacctgggaagctgctctgcggagcctccggaggcgcagatttcagcacatcgagagcagatgagcggctagtcccaaaactgtccgcgcttcagacagatgactttcgcagaagtttgagtgtgcttgtagatgcaaatctatcgtgattatgtttcctcggacgtttcctgtgcttgtggagctcataggagagactgaaggtgaattcacgattgcacacaacttacaacatctgtttgtgaattccatcagtgtatcttcaactgtaagaaaaattaatttcaaaacttctgcattaatgcctggatactccaacatcttataggaaaattgtgctcgtttctgtccaatgctgtggcccttgcttcagggtttgtggattttgttgagaatttcgagattgtcagaaagagattctaagctggagtaattctaacagcttcctggttatgttactgggataaggctgtgtctgctcctcccatgctcagttactgatacagttactgcctgagcaccgggacctccactcctggaaggatctgtgcagaggctgcaggcactgatggggaaatagacacac

SEQ ID NO: 6176 - DNA, 1257 bp, Artificial sequence
  DNA replication origin
tcccatgctcagttactgatacagttactgcctgagcaccgggacctccactcctggaaggatctgtgcagaggctgcaggcactgatggggaaatagacacacctccggcacccaggggcctcgtgctgccaccggaggaggatcccctctccttcctggggctccaacccctgctgctgcttctgctgccatgtgacacccaggcatggccaggcccccacgcagaacgtctgtgagggcagctggttggccccaccccatcggctcccctgtgtgctcagcagccctttgcctggcaggatctggcagccccatcggggcctctggatgccacacaggactggctctcaggcctgtcccatgggattcctgtctccagtccacagcagggaagaggagccaggggctccagaaagagccagctctctgcctgggtaggagggggctttatggaggggtgaaaggtgtgtgtgtggaggggcagcctcagagaggaggatgtgtgtgtgaaggggctttctcgcagggaggagggtgtgtgtgtgaaggggcagcttcaaagaggagagtgtgtgtgtgaaggggcagcctcagagaggagagtgtgtgtgtgaaggcgctttctggtggggaggagggtgtgtgtgtgaaggggcagcttcggggaggagggtgtgtgtgtgaaggggctttctggcggggaggagggtgtgtgtgtgaaggggcagcttcggggaggagggtgtgtgtgtgaaggggcaacctccgggaggggagaggattcttctttctctccctccaccaaacgctcgtccaggaaaacgtggcctcaccggcatccccagggagaagcccacgcaccatgagacgggaatcatacagggtggtcagaggggagtggaagttccaggcagccccttctcatctctagcaaaaggaaaccctgcagcagcgagtggctgacaggacccaaaacaccggggtgtggccgtgctggctgagaccgcctggaccccacagggctctggctgtgccccggtgtctcccgcgacctcacggtgcgctcattagcacactcgtcacacccccaccagcgcgtgatggctccagaacacccagatttggtgtaagaagtgggcggcgccgcagctctgagacatctccacgttttccaggaatcctgtggattcctccagccccagcgcccctgcccgggacgggactctagagggcgccacactccctttctccagtg

SEQ ID NO: 6177 - DNA, 947 bp, Artificial sequence
  DNA replication origin
cggtaggcgcgcacctgcctcctgtatggcgaggcctcagggccgggcgcggagcgtgacccgcggctggcgccgcagcagcacggcctggcgcccatcctgggctaccggctgcggccagacccggaccaggccacccgccgccattgccaggacctggccaccccagagctgcagttcgccaggcgtctgtacctgcgccagttcccggagcgggtgtgggatccgggacgcccttggggagcagagctgcaggccaggcggcctcgcgcggcaggcccaggcccaagggaaaatgtgggtcgtgttcagaggcgggcggggatccgtagggccctggagcagaagggcgcgccctcagcccctgttacatgggaccccacagggcgggcgacggtggccaggagccccagccgaaactgctccgtcccggctcccttttctgcacatccttcagtagttacgggaaacctgattttaccaacttgcttttcttttcatctacttgaaacgcaggtaggttgcccgaggcagatgcacgattccaagtcactttggcagtttttaatgtggagaaggctctttctgcagagggaacgttgcggagctgctgggagtgtctcataggctgtggcgacctgggaagctgctctgcggagccaccggaggcgcagatttcagcacatcgagagcagatgagcggctagtcccaaaactgtccgcgcttcagacagatgactttcgcagaagtttgagtgtgcttgtagatgcaaatctatcgtgattatgtttcctcggacgtttcctgtgcttgtggagctcataggagagactgaaggtgaattcacgattgcacacaacttacaacatctgtttgtggattccatcagtgtatcttcaactgtaagaaaaattaatttcaaaacttctgcattaatacctggata

SEQ ID NO: 6178 - DNA, 1845 bp, Artificial sequence
  DNA replication origin
tgcccaggcaggcatgcgcctgacccctctgcctgcttttccaccccaaagtctgtgctgctgatctcccgagctggaggagcctgcgggtgttccatatgaatcatgggcactcagccctcctggaggccagcccctgcctaggaagcactgctctccaaatccctctctccctcatgcacagttccaccatttgggagtcactcctttagctagatcacagtgtctccaaaagctgtaaaggttacacttaaagacaccaacacagggcaggtgtgggccctgataagagggtcggtctgcccaggtgaggcagatatgaggctcggtagcaaggctgggtctaacccctctgaggaggcaacttcccagcaacctgcccggctgaggcagcagctaagtgggctcactgatgacatcccctggaacccaggtcatttcagccatgagaagtggacactcagagatgtactgaggtcccctggcagtcaccctgcagaccctgtctgaaagcctggacttcagcccctgggtttcggggagccaaggagggtcttgaggaaaacgggcacagtgagatttcagtgtgacttagatggggctggacaagaggggcaagactggaggggtgaccaattaggagggaatgcgggaacgtgggagacagggggcggcctgggcttgggccgccagagggaacaaggtcagggaggaccctaggggtggtgagatttcaggggagggcaggggtgagtgtgacccccacgtgtctggcctggctgcctgggtggcagtcctgagcctgaggacataagacagacttggtctcgtggtgactggggtgggggacatggggactccgagttcagttgggagctgcagagttcacggcttctgcagggcacccccggccatggcaaggaggcagtggggaggtgaccatggagatggggggagtgtattggggtggtgacgatggtgacgggggaggtaaccatggtggtggggggagtgcactgtggcggtgacgatggtgacgggagagtgcagtggggaggtgaccatggagatggggggagtgcagtgtggaggtgaccacagtgaccaggagagcagtgaggtggtgaccatggtggcaggtaggagtgccacggggttgggtgagaacactttgtgtggaggtcagaggggtgggaggagggaggtcctagggagggagaggaagggtctcctgagtagctgaggaggctctacgagagggtagggggctgggagcaagaggccaggcagggcatggccattgcggcagatcctgacccagggccactgtggagaggaagcggcctctggtgcctacagaggggaatggctgacaccctggacatggccagctttggtccctattccccagaccctgggaccctgcagccctctccaataatttaaccgcctttgcgaggatgccactggaggcgacctccacagcccactcaggtccctccgaggcaaagcccggtggatcccgtcccattgcagagggggctggggggctgggtggagggtactcactcccagttgcttgccttggagcccttggagcgtccccagagccagcagccctcctaggcacacaggcccttccccaacaggtgtggcgggtcctgcccggagacaccgccttcaccaccctgcgggacccggcccgcgtcctggagtccaccttctcctggtacaagatggcctcgccagagagcccaagcccggagcctgcgccacttccagggccacacccgcaccttctatgaaccccgacggccagacagccactagggcctcaacttcatg

SEQ ID NO: 6179 - DNA, 1461 bp, Artificial sequence
  DNA replication origin
aggaaagatgctctgcaccgcgtgttgtgagggagctgcggactgaagccgcggtgagaagcctctgcacacccacgggaatgtggggcacccacctgactgacgacatggaggcccgggagcagcggcagccccgcgcctgcgtccggcgggagcgccacatggcagagccgcctgggggcagctcggtgtttctcacagaagtcgccacggccccacacagaccccagtgtcacagtccttggcagacccagctgatgggaaaactccccagaaacagggtgtaggtggtgaggatctaaagaggaggaatcaggggggctgggctggggaggggcttgtttggggggcactccctcatgcacagagagttctggagggtgtcagggagagaggggtgagttagagggctggggttggggcacagtgggagggagtggggagaagtgaagggtcagggtgggagggttgggagagggggtcagagaggcatggtcaagggcttgtggagggaggtgcagtggggtctggccgaacctcacagaagggcccccgctagccacaccccccgtggtgggacgactctgctctctggctggacaggacctgctggagccacctgagtggccacagtggtcactgagcaaacctcagacacccagggagctgcagcatgggcaccccgatgagcacaggccagcccctcctccccacccgctgcactggacagactgctggaggtctggggccaaggcatggaaggaacggggaagatggtgtcctgagggccaaggacagggaggaaacagcccctcctagaaccctcagcaccggccgacttcactgctgagtgacccggagcaaaaccctctgtgtctcagagcctcacttcctgcctcacaatggtcaggtgagacccatcccagggagctgagggttgggtggggcagagaaagctgaggtgctgtatctgggggcttcagcagagggtaggccccatccctggcccctgagccctgcccctcttgcgcggtggccaggtcagtgttatcgccagcctcctcctccaagcaggctcccctcctccctcagctgttgcctggagaccaggatgccccgtgtatccatccccagcaggtgccgaacagggtccccatcctgcagcccaccctggtggggatcccccaggagaagcacgaccttccccagggcctctctgagggccacctgtgccttatgggctcccagcccaggaaagcaaggccacaagccaatatttgcccaggcaggcatgcgcctgacccctctgcctgcttttccaccccaaagtctgtgctgctgatctcccgagctggaggagcctgcgggtgttccatatgaatcatgggcactcagccctcctggaggccagcccctgcctaggaagcactgctctccaaatccctctctccctcatgcaca

SEQ ID NO: 6180 - DNA, 1706 bp, Artificial sequence
  DNA replication origin
tctcccctccacctctgctcatgggctccttttgtgcccccagctcaggcaagctcactgtttcctggtgagccctccccactgggaagacccccacagtccccctcgccctggctgacactgtcgctggactctggctccagaaccagggccagcagtccccatcactgctgtgccacagggccaggacacagcctgcttggttagtgtctgctatggggattggggggtaagggatgaggggaggaggggaggaggggaggaggggaggaggggaggagggatgagggatggggggaggaggggaggagactaggggaggagactaggagaggagccaatgaggggaggaggggatgacgggaggagggaatgaggggaggagggaatgaggggaggaggggatgagggatgggggaggagggaaggaggaagaggggaggaggggaggagagaatgaggggaggagggatgaggggaggggaggaggggatgagggattggggaggaggggaggagaggataaagggaggagagaatgagcggtggaggggatgaggcgtgaggggaggaggggatgaggcatgaggggaagaggggatgaaacatgaggggaggagggatgaagggagaaggggatcaggggaggagagaatgaggggaggaggggatgaggaaatgagggggtgaaggagtgagggagagaggggaggaaaaaatgaagggaagaggggcggagggaatgaagggaggcatgattagggcgtaaggggaggagagggtgagggaattagggaatgcagggacgaggaggtaagggatgagggggtgaggggaggaaagggtgagaggaggaggaattgagtgaggaaatagggtaaaatgaggggatgagggaatgagggagggatgggggatgaggggggtatgaggggatgagggagggatcagggatggatgagggaatgagggagggatgaggagatgagggaatgaggggaggagctaataaggggatgaggagttcgggggtgagggacgacagggtgaaatgaggggatgaggggggatgagggatgagggaaaatgagggagggatgaagggataagggggaatgagggagggataagggatgaggggataagggatgaggggatgagggagggacgagacgatgagggggaatgagaaaaggataaggggatgagggtatgaggaagggatgagggagggatgagggggaatgagggagggatggggaagagaggggatgagggagggataaggggatggggaagggtaagagatgaggaatggatgagggagagatgagggtatgaggaagggatgagggagggatgagggggaatgagggagggatgagggggaatgagggggggatgagagggtgaatgagcttcctggccaggctctgacccacctggacagacttttcctgattttgcctttaatcccacaggatgtggctcacatgagtgtcttagtcacacgtgaaagatcaatgagtgcgtgggtgaatgttgcggccccaccaatggcacagcaatgcccagaaaacagctcctaaattagagcccaagctgatgggctccccagacccagatctttccgagcatggggaaactcccagaggcaggccagctgactccaggactagctagcacgatgccatctcctcctcctg

SEQ ID NO: 6181 - DNA, 824 bp, Artificial sequence
  DNA replication origin
ttctcaccagtgcctggattagggacttggaggccctccatccccaaggtctcgccgactccctgccccaggctggcacgggcaggggcctcactgcagccggggaaaagggagcctcctgctggacaacctgagtctgggactctatggtctcttcatgaattcaccacccgccacttccacaaaaggatgctcggtggccacggccagaggagcgtggctggagccgctgtccctcctcctggcctggccaggtgagggactcacgagaggctgtggaatgtgccggagtgtgagggtctcctgggctggatcctgtctgcccttccccaacccctgtgctcatggctctgcctgctacagccccttgcagggagaggggagcggggctggtcctcacagggtggtgcagccaagggcagcgggccagccagcagcgtgcgggacaccgagcccatccacagggcagggtgtggcgcggggcaggcaaggctggggcaggaggagcaggaggccagccagtgtctactagggagcaggaaactacaaagcagccaaaatcaggagtgggggaagaagggactcagccaagaggacagggtgggaaagcaataaagaaatcaaaccaagattccaagagaataaaaagaaagaagacgggaggaacaggaggacaggtgagcacgtgtgtgaggagtccaggaagctggaagttaacttctcaggggcatggggggcggtcaggggaggagcagggaggaaagaagaggctgaaatgaaaccaagggtaaaccaagggtcacagatgatacctaggtatgtcc

SEQ ID NO: 6182 - DNA, 1107 bp, Artificial sequence
  DNA replication origin
gtttatcaccaagcagaggggccagcgcaggggttggaagatgagctgagttctgtcctcgggagttttgtggttgcgtggtgtggggacaagtggctgtatgtccaaggaccatgctgctgtggatgagtcagtggcctctggcaggcatcctggggctagaggtggagcagctggggtgggcgcccataggcactgcttggcacaggcccctcatcaccaggctgctccttcctacactccttgcacggccaagaccccacagtctgggcggtcccagcccgaccgcatttaggctggggttttggcgctctgggatgtctgtggcagccctatcggggtctgctggggttaggggatgggagagggaggcagcccctgcggttggcctgggcaggtggctcagcactgccaggggcagccctggtgggtggggacgtcccgcgggctccactgcgtcccagacgctgccttccaggggcttggggaaagtgaggcgggggctccagtgtccagtcctggctgctccctgggggctcgacctggctcatgatgcacaagcccagagtggaccctcagagctgaagccgcaggtgtctccatggctgtgtttgtaggaaaacgtctttgagggcctccctgcaaggagggtcagggtcataaggaaggagggtcctggcgggcgtcgtctcctattcttctgacttgggtccacacaaagctttggtttcatcagcaacacccagaaagtgggctatcggggcttagcactgcagtaaggagggcactgcaggggcagccagggcagggggcagctggatagtcagggtgggcacagcgctgaacagtggggggtgggggttgggcacagacctgggcagggtggatgcagctctggtcccagccctgcctgtggccttccagagggaacttgccctgcactcatgtccataggagggtggagaatccggggggtgttctatgtggaggtggtgccatgaggggggagcacgtctgggagagggagaggtgaggcagaccaggtgggacgggccggggcttggggcttccccgtgccttgcttctcctgccgccatgagaatgctc

SEQ ID NO: 6183 - DNA, 909 bp, Artificial sequence
  DNA replication origin
acttgatgaatggtgtgaccggcagccatcccgtgggtggggtccgcattcgagtgactgccgttttcctgaatggaggaataaagggggaagcaggaggagctgcgtgaagaaccgtgtggagaaacgcgaggaagtgcgtggggagcgggaggagctgaggaactgtgtggtgagctgcgagcagccgcgtgggaaccgtgcggggaacggcgagagctccttgagggactgagtgcttgagcgtgcgggactgacatgtggaagcaccgcgtgggaaccgcgtgactgtctgtgtgagggactgggagggaaagtgcgagggaccctgcgagggacagtgacagagacttttgaaggagccgcgcgagagggttttcgaggaactggttgaggagccaggcccagagcagggaggcgaggccggcaggagccgggcccgtctgaggatccgaggtccctcccggcttgtcaggagctgcctgggggagctttagtggcagcagcgggcgggtgttcagcggggctcacagtgtctgctttagccaagggtgcgtcctcaggccatgtgcgctggtgacggataggtcgggagcaggtggcctggtgcggcaagtcaggatggaaggtcagcgttccaggcttgggatggtggaggctggggggcctagacgggagagcggggtggtcctgggagatggcagagcacgactggacagggaggcggtgagggagcaggaaacccagggggctgctgggctccttgctgaagtggctgaatggctggaggacatttatgtggaagcaaggaatgtgacacatagcagagaattcaccctcaggaattaaataatcaaaaaccaaactagaggccgggcgcggtggctcacgcctgtaatcccagcactt

SEQ ID NO: 6184 - DNA, 5101 bp, Artificial sequence
  DNA replication origin
ccctcagtttccccgcctgtaaagtggggctatggccacagttggccccgtgcagcaggcagcccaggcctgggcccgggaagggcggccctggagggaccctgcctgggggagctgctgtctaggagaccacggggtggtagagcctgagtcatggccagggcgaggcagccgggccgcctgctcttccgcccccacagcccgcgccagcttcgctccgggcctcagcctctctctgtcttttccttttcaggactccggacccaacaaggtaagcggcttccttcagccccggggcaggtgcgggaggctggtggcggtgtctgccctgcattggcgccctgtggtgaggggcggggcgggcagtgagtgcgctgggagatgggggacgtgggggtggatcccgggaaggaagaaagcgggtgtgggaggccccgtgcggtgcctgtgcctgcggggacggagggcgtccggggcggcctcacggcagggcctggggcgggggctgctgggagacaccgaggtgggaaagtgtggcccggggggcgtgggggccctgggaggagctgaaaggggcgcggaggagcccctcggacatggagagggctggggagccctgagaggaagcgggtgacaggcgtgctggactctgagcagccgtaggcgtgacggggccacagggggaggcgggcgcgtgtggagtcggaggtgccgcggagcgcgccacgtgtgaagctgcctggggcgacgctggggactgtgtgaggaaccgcgtgggcagccgtgaaagcgttcgagggaccggcaggaacggagtgagccagcgtgggaatgcgtgagacagggcgggcgccaccacggggatccgcgaggtgctcactgggaaacgcacagggaactcggcggtggctgtgtggggacagagaactgtgtgaattgtgaagagctgtgcggcccgtgtgaggagttccaagagactaagaacacgtggggctgcaggaagaactgggagaaggcgtgtggactgagtggggaactgtggagaacggtgtggcgaacccgagtgggagccaggcgaggaagctgagggcccctgtggggaactgtgtggggaactgtgtgggaacgggagaggaagcgtgtgggaaacggcacaggacactgcgtgggactgcgggagacggaggacctgcgtggggaattgtgtgtggagcggagtgaactgtgaggagcggtgataaccgcgtggaactgtcagagaacgctggggaatggcgtgggcggcgtggggaggaagcggagaacgatccgctgtccagattgtgcgggactgtgaggagctgtgtgtgtgtgtgtggagctgtgtgtggagctgtgtgtgtgtgtgtgtgtgtgtggagctgtgtgtgtgtgtgtgtgtgtgtgtgtggagctgtgtgtgtgtgtgtggagctgtgtgtgtgtgtggagctgtgtgtgtgtgtggggagctgtgtgtgtgtgtggagctgtgtgtgtgtgtggagctgtgtgtgtgtgtggagctgtgtgtgtgtggagctgtgtgtgtgtgtagctgtgtgtgtgtgtgtggagctgtgtgtgtgtgtggagctgtgtgtgtgtgtgtggagctgtgtgtgtgtgtggagctgtgtgtgtgtgtgtgtgtgtggggagctgtgtgtgtgtgtgtggagctgtgtgtgtgtgtggagctgtgtgtgtgtgtgtggagctgtgtgtgtgtgtggagctgtgtgtgtgtgtgtagagctgtgtgtgtgtgtggagctgtgtgtgtgtgtgtgtgtgtgtgtgagctgtgtgtgtgtgtgtgtagagctgtgtgtgtgtgtgtgtgtgtgtgtgtgtgtgtgtgtgtgtgtggagctgtgtgtgtgtggcgctgtgtgtgtgtgtgtgtgtgtgtggagctgtgtgtgtgtgtgtgtggagctgtgtgtgtgtgtgtggagctgtgtgtgtgtggagctgtgtgtgtgtgtgtggagctgtgtgtgtgtgtggagctgtgtgtgtgtgtgtgtgtgtgtgtgtggagctgtgtgtgtgtgtgtgtgtgtgtggagctgtgtggggagcctgcagagaactgtgtgtccaactctgtcagaagccggaagaacctgtgtgaggaccagaggaataaatgcctcaggaaccgtggtgggaacccgaggaactctgggggcctgagggtagctgcgtgggaacatgagctgtgcgtggtgccgggacaggacgtgtgtgccacagggtggggagctacgtggaatcatgtgagggaaccgtgcagagctctctgtgcagctacgggaaagtatgtgagaaaccgtgtgaggaattgcgtggggaactgtgggaggatttgtgagaaactgaatgtgactgtgtggagaaggcggggaagcaggcgggaagtgtgtggggaatcgcttggggaaagtgtgcgctcgtgtggggaaccacatgggggctctgtggagctggagctccgcgtactctgaggacctgtggaaatgggagcggaagtgtgtggaggggtgtggggccgcgtgggaatcgtgtgagggacgccgaggagccatgcagctgctcggggagcggtgctgggctgggagaaactgcggggggccaggcgggtggctgctgggaaaggcatgaggaaccgtgtgaacgctgcgtcagggactcgggggatctgtggaaatgtggaggacactgtggggaagcgtgcgggaactcggaggaactcgcgggggcctgagaggagccacgtgagcccccgtctgaggcactgtgagaggatctgcttgagaaactgtttgtggaactgtgaaactgtgaaagtgggtgcaacggggctgtgtggacctgtgtggaatgctgtggagagctgtttgaaaacggaagcaccgtggggcgtggggaggcctggggggaaacatgggacagcctgcgtgtggagccatgtgggaaacaacaactgggaggcagtgcatgcggctgcgtgaggagccgcagaaccgtgcgaggaagcgtgtcagccagtgtggggaagtgtgggaactgtggggaactatgaggaactgagtgtggaactgtgaggaactgagtgaggaactgtgaggaactgagtgaggaagtgagtgtggaactgtgaggaactgagtgtggaactgtgaggaagtgagtgaggaactgagtgtggaactgagtgaggaactgtgaggaactgagtgtggaactgagtgaggaactgaggaactgagtgaggaactgagtggaactatgaggaactgagtgtggaactgtgaggaactgagtgtggaactgagtgtggaactgagtgaggaactgagtgaggaactgagtgtggaactatgaggagctgagtgaggaagtgagtgaggacctgagtgtggaacgatgaggaactgagtgtggaactatgaggaactgagtgaggaactgagtgaggaactgagtgtggaactatgaggaactgagtgaggaagtgagtgaggaactgagtgtggaactatgaggaactgagtgaggaagtgagtgaggaactgagtgtggaactgagtgagggactgagtgtggaactgagtgtggaactgtgaggaactgagtgtggaactgagtgagggactgagtgtggaactgagtgtggaactgtgtggaactgtgaggaactgagtgtggaactatgaggaactgagtgaggaagtgagtgaggaactgagtgtggaactgtgaggaactgagtgtggaactgagtgagggactgagtgtggaactgagtgtggaactgtgtggaactgggtgggaacatggaggtgctgttggggacccgtgaggagccgtgtggagcgctgtgtgtaggaacggggtgcacacgggcgaatggcctgaggaagtgtgtggaaagtgtgtgtgcacccgcattggggatggcgtgaagggttgtgtgaggaacgtgtgaggaagtgtgtgagccatggcgggaggagctgtttgggaaacgtggggagcggtgaggaaccgtgtgtggaacggtgcgcagaatcgtgaggaaagctgcagagacgtgtgcgaggggttgtcggggagtgtgaggagctggatgggaagctgcggggacctgctgggcgccgcgtggagctgtgggaaccgggaggaagtgtgtggaagggggtggggagctgtgtggggacgggggccgagctgaaggggttttcgggagctgcgtggctgctgtgaggcccgtgggacactgagaagcctgtgtgtgtgtgtgtgtgtgtgtgtgtgtgtgtaacgctgtgcgggagctgcgagcgcctgctgagagctctgagaaatggaggatcgtgtgaggcctcccgtggggagccgtgttaggaaatgttggaggaatgtgggcaagtttctctggagctgtgaggaaccgtgagagcgagtgtgtcagggacggtggggactggcgtgtggagaatggtgaggaacgcctgtgtaacgaggccctatgtagagacctaggtgaggatcgcgtggaactgtgtaaagaactccacagagaactgtgacagaattgcgtgtggaacttgtggggaaacttgatgaatggtgtgaccggcagccatcccgtgggtggggtccgcattcgagtgactgccgttttcctgaatggaggaataaagggggaagcaggaggagctgcgtgaagaaccgtgtggagaaacgcgaggaagtgcgtggggagcgggaggagctgaggaactgtgtggtgagctgcgagcagccgcgtgggaaccgtgcggggaacggcgagagctccttgagggactgagtgcttgagcgtgcgggactgacatgtggaagcaccgcgtgggaaccgcgtgactgtctgtgtgagggactgggagggaaagtgcgagggaccctgcgagggacagtgacagagacttttgaaggagccgcgcgagagggttttcgaggaactggttgaggagccaggcccagagcagggaggcgaggccggcaggagccgggcccgtctgaggatccg

SEQ ID NO: 6185 - DNA, 869 bp, Artificial sequence
  DNA replication origin
gtgcagccgggtgaggcgagggggtggatggggcaggaaggggtgtggggatggggccagagtgcggcggagtgaggggatgaggtggacacggtgggtgttgctggcttgagcaaggggccccaggcctctgtgtcagagctgggaggcccagccgggctgtgctagggaaggcgctgcaattgtttccacagcgctggttgatcgtgctagggttctggaggcggcgccacgggtgctgttgggtcccggcaggcgctgaagtcgggacagcttggccttctctctgcctctgctcctggccatagcacggacgtggcccctctcacctccgaggacagggctgtgatggtcagtccccagctccctcctgctggctgcccggggtgcctgggtgtttcccagaaatcctcaggcctgggatgggggcgcaggtgggacctgaaactggatctgccctggcgacaaggctgccagtgatgcctgtgctgtcagcaagacgcttggccagagggggtctcagtgccctgaactgccataaggaagcaccgcaaacagaagtgtgctgtctcgtgattctggaggccagaagtctgagatcaaggtggtggcagaggtggctgctcctgagccatgaggggcacctgtccaggccctccagcttctggggcttgccggctgcttctggtgttcctagcttgtcatcaccctgatctctgccctcatgttctcatggcaccctccctgtctccaaatctcctcttttataaggacatggcagcactagattagggcccgtcttcatggagtaggacctcatcttaactaattacatctgcagcaactttatctccaaatgaggtcccatt

SEQ ID NO: 6186 - DNA, 1036 bp, Artificial sequence
  DNA replication origin
accgggggagaggacctcccctctctggagcttggggcccatctgtagtgacagaggatggttcccagccacagcacagggtgtgggaggggtggcagggccagggtggggtggggctcccagacacaatacatggcctgggagtggggttgccggcagggtagggtgggggtcccagccccagtgcagggcctgggatgggggtgtaggcagggccagggtgggatgggggtcccagccacaacacaggcctgggaggggtgggggcccaggacaagcaggcctgagggattctcccaagggccatttacagctgcaactgagccccactcccgcccactcacctgtgctgccctctgtcccccacctacctggcattccttgggcaccatctgtgccctgtcccagagggcccccacctcatggagctcatggcccatgtggggtgtggcatcagggcttcatctgagcaaggttggcacctagggctgggcaagggtgggacagggagcaagggctagtgggggtgtggggatgggggccaggcctgtgcggggagcccgacctgagtgcagcggggtgaggcgagggggtggatggggcaggaaggggtgtggggatggggccaggcctgtgcggggagcccgacctgagtgcagccgggtgaggcgagggggtggatggggcaggaaggggtgtggggatggggccagagtgcggcggagtgaggggatgaggtggacacggtgggtgttgctggcttgagcaaggggccccaggcctctgtgtcagagctgggaggcccagccgggctgtgctagggaaggcgctgcaattgtttccacagcgctggttgatcgtgctagggttctggaggcggcgccacgggtgctgttgggtcccggcaggcgctgaagtcgggacagcttggccttctctctgcctctgctcctggccatagcacggacgtggcccctctcacctccgaggacagggctgtgatggtcagtccccagctccctcctgctggctgccc

SEQ ID NO: 6187 - DNA, 1062 bp, Artificial sequence
  DNA replication origin
ggagcagtccggggccatgcctgtccctagagctgcatttcaggagccccacgggaggcccagagggaagggggtgcctgtcattcctaagccaggctcaggaatccataggttctgaacaagagacactgagacccaaagacaccccaacccctgagagggtggccaaagctcaacctggactctaccagaaaatgcggtacctgggctagaacaaccggctcagccatggaagagcactgactgagtcttcactctgtgtgaggcaccgtgctggcccccgtgggggtgggagaagtggggggtaatgggggtggaggagaaagtggagggatgagcagaaagcactaaaggagctaccatcctcggagtcccaggtcctcactttacaagccacatgggcttctcaggagcctcagtctccatacctggaaaatgggaacaccaccacctggctcagtggggtccgagccaagcggtgctgttctcattgttcaggtgtggagtggcatgggataaagggaagcacatgaggtgcacagtgcaggctatgaccagtgttctctgtcttcttccccacccctggaaacctatggttgtggagggggtgccaatctgaggggtaggggtgacagcaggcatcatggcagaggcagcatttgagggggacctaaaacctaatgtggaggttgagtagaaagtattgagaagaaacccaggcaagaacaaagacagggacaagggatgcagagtgtgtgtgtgtgtgtgtgtctatctgcatgcatgcatgtgtgtatgcatgcgtgcataagcatgtgtgtatgtgtgtttgtatgtgaatgtatgtgtgggtatgtgagtgtgcatgagcatgcatgtgtgtgtatgagtgtctgtgtgtgtgaatgtatgcatgggtgggtgtgcgtgcatgtgtgtgtcagtgtgtgtgcaatgtgtgtgtatgtgtatatgcatgtggatctgtgtgtgttcgagtggatgcatgtgactatgagtgtgtgtggccgggtgactgctctggacccctccagggcactg

SEQ ID NO: 6188 - DNA, 2114 bp, Artificial sequence
  DNA replication origin
gagcactgcctgcgtctcagcagccagcgcccctgtaacaggtgtggcccggcggcgagggaggggctgcggggccgcagggtctaggctggcggcgcgcccccggcgcccgggctcggatgacacgaaggaacagtggccgcgaagaccttcgcactcccgctttaagccgctcctcacgctgacttcccccaaaccagccgcgctgccctctcgctgggaagggccggggcagcatccccgccgggagggagggtccgcaggagcggggcgctgggcgccggtaggtggggttgggggggccctgccggccgcaggggcgggagggggaggggaaggagggaatgccaagtcatggggcctgctgggcgcgagcgcgacgtcgcccggcgcggacccgatgcgcgcccacgtccccgggaatagggactttcccccagagactggaggaccccttccccaagcgtcagccctttccaaggggtgcctgcattgctggaattaaaggcctgccagggcaagcggattggatcttgcggctgcggagaggaggcggtgcggagaggcccctgcctcgcagggctggcactggcctcaccctggggacgcacagcgcgacaccgtgctcggctctgcgggacaccaggtcgcactcaggctggcggggcctttgccagggaagccatgccagcaccctcgtggtgtgagaaggcagcagagggtttgaagggaagctctggggtccacgtgggggttggggctgcacctgcggcggccattttgcaggtgtggttggccaccagccttagccaggctgtggagtggggcagtcaggagtggggcagtcaggagtggagcagatgtggagcttgcggtgcagggtgtgggatgggccagggccagggctcaggtctgcccttgcactgaacacacaccgtctatttagaggggttccttgtttggttgatggggtggttggagtcaagacccaggaaccctctggaccggagggatgaggagggatgcggtaaggccgctggctgaggggcccagcgtgggatcggaggagggcagcctttacccggggtgaagtctcgggagggtgctgggtccaaggcagggcccggatgaacagcttcactccggctgcagatggatctgaggccctgcaggtgtcctccccgggcaggtccgcagggtggacagaggctggaatcagttgtcaaggcaggggtcccgggccgggcccagggaggtccctgtggtgagggcctgcaagatgtctgctgtgtgccagccctgctcccagccgggtgctgcccccctgggtgcctcctttcccccttccccactggaatgtcccacagactgccccatctggggctccagccggccagccacaaacaggtggagcctggagttctgcccaaagcccagggatgatgcttggctggatcaggattaaaactggggtcactgcccggccgcccagcctgtgccccgcagtcctcactgatgtcatgactgctgaccttgggcccaccatgccctttgggagtagggtagggcagtcctcctgtgggatttgtgaagggtggagggggagatgtgagctggaggaggaggccctggaggagactgagggcatctcttcaggccactcagccgggccggccaaagcaggtgaactgggtgtggtggggacgggaagggagacgttcccacagagccctggtcctaccagattggggtctatggaggggctaccagcattaggtcattgggatttactgagccctgcacatgcctagctggccaatcccgtcaggcctgagaccatccgtgcacatctatcagtgagctgggaggggcctgagccgctaccacgggtggagagtggtgggcctgggtctctgggtggctgtgattggtaggatgagcacgtggttgtctgcctgcagagtctggggacctctctaggtcattgccacattcagtgttcttaggcccaaaggatgtggctcaccacccacaatatgggtggccaaagggactcaaggtgtcacctcccactgcccatcacccactccatgcccaggagcgtctctgagaac

SEQ ID NO: 6189 - DNA, 1045 bp, Artificial sequence
  DNA replication origin
ataaaaagccagaatataaagaaaaaaagatatgctagtcatttaaatattaacgtgaaatagattaattcctagaaaaatgtctattgcctcgagaaatagagaacttgccagattaaaaagcatgaggaaaacggaggtgataaagaccccagccccagaagcccagatggttttattgtttctgccagggttaggaagaacaattgatttctctttcatgccggcggttccaggaaatagtgaaggaggaggagctgtctagctggtttcggcggggctggggctgggagtggggggcccgtgtcttgcagaagtggatgtgaatctcccccagccacctgcaaggcgctcgcacgcagctgtcgggactgaggtgaagccggctctcccaggagtgtggatgaaatggttaacggcgaggccgctagggcagcgcaggcccctgctgggcgccagggaggcttagccaggcgacgccaggatgcccatggcaggggctcgatggcaggggctgggctggaggggacccagccccggggttcagggtggcccgaaatccgtgcacccccgcaccgcagtgcggggaggttcccatgggcgagctgcccagaggctttgtcgaagttgcccagccctgggacggtggagggaggacggtggcgcgcacagagataccagtcagcccctggaactaggaaggcggctgggggcgggtgacgcaggctggggtttgccggggtggcccccgagcggcgtgtgacttgggggtccaaggaagttaaactggacaggctggggtgaggacaatgggggcctggagaggtggggcgagaggagggcggggggtccccacgagccgcggtagaggcgaggcggcgggtccgcgggcgggttgcatcatccggcggggagggcctgggtcactgctgctcttcccccggcgccccggccccgacacaagatgcgatttcaccgcgcacctgttacacccggagccagcatccctggcgcaaggagccctccctccccagccccgcccgcc

SEQ ID NO: 6190 - DNA, 928 bp, Artificial sequence
  DNA replication origin
ctccccgccggatgatgcaacccgcccgcggacccgccgcctcgcctctaccgcggctcgtggggaccccccgccctcctctcgccccacctctccaggcccccattgtcctcaccccagcctgtccagtttaacttccttggacccccaagtcacacgccgctcgggggccaccccggcaaaccccagcctgcgtcacccgcccccagccgccttcctagttccaggggctgactggtatctctgtgcgcgccaccgtcctccctccaccgtcccagggctgggcaacttcgacaaagcctctgggcagctcgcccatgggaacctccccgcactgcggtgcgggggtgcacggatttcgggccaccctgaaccccggggctgggtcccctccagcccagcccctgccatcgagcccctgccatgggcatcctggcgtcgcctggctaagcctccctggcgcccagcaggggcctgcgctgccctagcggcctcgccgttaaccatttcatccacactcctgggagagccggcttcacctcagtcccgacagctgcgtgcgagcgccttgcaggtggctgggggagattcacatccacttctgcaagacacgggccccccactcccagccccagccccgccgaaaccagctagacagctcctcctccttcactatttcctggaaccgccggcatgaaagagaaatcaattgttcttcctaaccctggcagaaacaataaaaccatctgggcttctggggctggggtctttatcacctccgttttcctcatgctttttaatctggcaagttctctatttctcgaggcaatagacatttttctaggaattaatctatttcacgttaatatttaaatgactagcatatctttttttctttatattctggctttttatggttttgtttgtt

SEQ ID NO: 6191 - DNA, 998 bp, Artificial sequence
  DNA replication origin
cgcgcggccccgcggttccacggggcctcgtccccgcccctgccccgctgtaggccccgcctgctataggccccgccccgctgtaggccccgcctgctataggccccgctccgctgtaggccccgcctgctataggccccgccccgctgtaggccccgcctgctataggccccgcctgctgtaggccccgcctgctataggccccgctccgctgtaggccccaccccgcaggaaacctcgccccgctggtggcgcgccctggttgccgtggcaacctcctccctccgccgccgggttgccggcttcgctagcctctcagcagcgccgttgccatagcaacggcgggtgggtcccgcggggcgagctgagctagggtgagcatcctgtggggtagactatggcggctgggcgcgtgcggcctgtgcggggcctccccggctgcggtgagagcggctcgaggggtcccgtgcccggaccctgaagtgcggccaagccgtggggggctccgtgggctcgcgctgcaccgcggtggggttggggtccagccacatagattgagttgcaaggccctttgggacgggaaactgcatgttacaaatggggaaactgaggccaagatcgaaaaacgctgggagggactagctccaagctgacgcactagtgtccaggcagaatcctgctggcctagccaggaccctttacatcccagctttgctcagatggctcccaggggtgacctgtgggtggtgttcctggcatggaccctggatcctgttcccacagagctccctgtcaggccgaggccccgttgcccacctggtcttcacagatcccctccaggcgcctgctcaggggcaccatgacaggccttgcccaccctgtcgtcacatcttcactgcagcttttgcagcctttccctgaaactgaagactccccatcccccaaagccctgttgggatgcctcttccccctcctcctccatgaagactttctgcctt

SEQ ID NO: 6192 - DNA, 1458 bp, Artificial sequence
  DNA replication origin
gggaaactgcatgttacaaatggggaaactgaggccaagatcgaaaaacgctgggagggactagctccaagctgacgcactagtgtccaggcagaatcctgctggcctagccaggaccctttacatcccagctttgctcagatggctcccaggggtgacctgtgggtggtgttcctggcatggaccctggatcctgttcccacagagctccctgtcaggccgaggccccgttgcccacctggtcttcacagatcccctccaggcgcctgctcaggggcaccatgacaggccttgcccaccctgtcgtcacatcttcactgcagcttttgcagcctttccctgaaactgaagactccccatcccccaaagccctgttgggatgcctcttccccctcctcctccatgaagactttctgccttacaggacggacggggggcccaggtgggcaaaggggtcacctgaggtcagcccggggggctctgtggacaccaggatggaggtcaggaagacgctgccccccacggaacccctcgggcctgggaagcctggaagggcagggccaggaggagagctgggtccaggcagtgctctcacagtagacgccctaagggtgcggttggggtttcatttgtttcatccacgcctattttgctctgtgcaccctgtctctgagagtctcggggtcaggtgtacagtggggacgctgcagtcctcaggtttggagaagagaatgtcaatgagacaatagcagtgaagttgtctgagaactggctgctggaataaaatcctggctctgcccctcactaactttcgaacctgggtggtcattcatctctttgagccccagcctctccgtttgtggaatgtgaagtgattacccatcaatttcatggcgggtaaattgtgtccaataaacaatggctgtcagggcatggtgaatgcttaaccaggctgtgtccacccctccacagtgggtgggagctggcctagctcatggcctggggtgcagcgcagactctccagaggtccaggaacctcagcagtggtgtcagcaggtttgccacatgctctggggctgtggtgatggggcggagacaggacatcagccactggcctgggtccagggaaaggaggcccagcagagccctggtcacgtcccagctcttgcagtggagccggggacctgggtgtggagcaggcagaccacactgcagcaaaggggcagccaggcagaagctcaggcccagcccacagacatctgccccagctctccccagtaaccctgacccttcccaccatcccagcccacagacacctgcccaggctctctccagtaaccctgaccctccctgccatccaaatccgtgctgtggaatttgccaagtgcttacttttggttttttggtttttggttttgggttttggggagtttttttgagatggagtctcgctcgtcg

SEQ ID NO: 6193 - DNA, 1292 bp, Artificial sequence
  DNA replication origin
gttgaatcgtgttgttgatgttcattgtctagattctgaggttgaacatagaggccaatcatttccaacctttcctgaattcgtatcaatgcctttaagcttgaacttccctctcacagcacagcggctgcatccccttggttttgataaagagcattctcattttcattcatttctagaaagattgcaacttcagttatatttcttcatttaacctagtaagttttttaacttccaaggcattagacatttttttcttgaccatacttttcttatttactttttgttttatcgcttaggctcagagaacaataacttgtacaatttcttctttgaattgtttactggtattttgaggggctctctgcctggttatgtcaatgctcgtgggcttttgagaaagacccgcatgtaccagtgagggttccggcaggaaacctcttgctatgctccaggggcacagctgcagagagcttggtgacaggctgcttacacaggtgtggacagggctggggacccaccaagggaggtgtgggtggcattggggtctttgccagtgctggagggcacgaggagggagccagtggtggaactggacagtgccattcagaaactaaagccctcagcaagagggcaggctgtctggagtgatctgaaaaggtggggccaggagtatcagccccctccctccttaccctctcctcctgctctccagccctggcagtctctcctactggctgaagccagaatagaatctggagaggccaccctcccaggacacaggggcagggacaggctgaggaggtaggagtaggtctgcacaggggagaagtccacctcgcacaccctgggctcctccatggcgtgaggtccctgtcttccctgtacttgtgtaagtgtctgtcatcagaaagatggcaggttgccctggggaggatggtgtcttactcggttccgtccctgccagcatctagcactgtggtcaagtcctctacatgctgtccccagagaacctctagtccccagcctcctgctctgtgtgtaggctgacagcagaatccagacccaagtcactggggagcacccaatttgcttcctctcctcctcagctaagggtgagcagcaggggtgaccccagctattagccccacctagcacacagcacagcggccctgcagaggggcagcccttcccactgccatgctgcagctccagacacagaggaagctcagggcttccagggtctttgtggatgaacagatgagggaaaactggagggactgggagcagca

SEQ ID NO: 6194 - DNA, 1462 bp, Artificial sequence
  DNA replication origin
ggtgggtggatggcttaagctcaggagtttgagaccagcctgggtgaaaccccatctctaccaaaaaaaaaaaaaaaaaattagctgggcttggtggcacgtgcctgtggtcccagctacttgggaggctgaagtgggaggatcacttgagcctgggggttggcggctacagtgagcttagatggcgccactacactccagcctgggtgatagagcaagaccccctctcaaaaaaaaaaaaaagaactcaaagaaaggcaggatagttgctgtttttataccaccttgagatttgtaaaccaagaataaagtcctaagccctttcaaccaactgactagaccccgttatatatataaagtttggtgccgcaaaaggaatagcactcgaatataaaattttatttttaattctcagcaaggtaagttactgctatagaaggatgtacccttagagatggagcaatggtgagcgcacacctggacaagggaggggaagcgggtcttaaccctgaaggatgtggcccctgctgctgtgtggttccgctactggctagggttagaccgcacaggctaaactaattctgaccggctaatttaaaaggagtgatggggtgagtgctttggcgggaaaaatggttatgacagagcaggtaatcagaatgagtcggggggagcaggtgatcggaatgagtcagggtggaataggtaatcagaatgagtcggggggagcaggtgatcggaatgagtctgggtgaagtaggtaatcagaatgagtcgggggagcaggtgatcggaatgagtcagggggagcaggtaatcagaatgagtcgggggagcaggtgatcggaatgagtctgggtgaagtaggtaatcagaatgagtcgggggagcaggtgatcggaatgagtcagggtggagtaggtaatcagaatgagtcggggggagcaggtgatcggaatgagtctgggtgaagtaggtaatcagaatgagtcgggggagcaggtaatcagaatgagtcagggtggagtaggtaatcagaatgagtcggggggagcaggtgatcggaatgagtctgggtgaagtaggtaatcagaatgagtcgggggagcaggtgattggaatgagtcagggggagcaggtgatcggaatgagtcagggggagcaggtgatcggaatgagtctgggtgaagtaggtaatcagaatgagtcgggggagcaggtgattggaatgagtcagggggagcaggtgatcggaatgagtcagggggagcaggtaatcagaatgagtcgggggagcaggtgatcggaatgagtctgggtgaagtaggtaatcagaatgagtcgggggagcaggtgatcggaatgagtcagggtggagtaggtaatcagaatgagtcggggggagcaggtgatcggaatgagtctgggtgaagtaggtaatcagaatgagtcgggggagcag

SEQ ID NO: 6195 - DNA, 2524 bp, Artificial sequence
  DNA replication origin
gttttataagaggctcttcccccttcactctgcacttctctctcctgccaccatgtgaagaaggactacagttgtacattcgaggtaaggaacaccgttgggcattagagggagaggagcaccactgtactttagagggtgaggtgcaccattaggcattagagagtgaggagcatggttgtgcattagagtgtgacaagcaccattgtacattagagggtgaggagcaccgttgtacattagaaggtgaggagcaccattgtgcgttagagggtgaggagcaccgctgtacattagagggtggggagcaccactgtgcgttagagggtgaagagcaccgctgtgcgttagagggtggggagcaccgctgtacgttagagggtggggagcaccgctgtgcgttagagggtgaagagcaccgctgtgcgttagagggtggggagcaccgctgtgcgttagagggtggggagcagggctgtgcgttagagggtggggagcaccgctgtgtgttagtgggtggggagcaccactgtgcgttagagggtggggagcactgctgtgcattagagggtgaagagcactgttgtgttagagagtggagagcactgctgtgtgttagagggtgaggagcactgctgtgcattagagggtggggagcactgctgtgtgttagagagtggggagcactgttgtgttagagggtggggagcatcactgtacattagagggtggggagcaccgatgtgtgttagagggtggggagcaccgctgtgtgttagtgggtggggagcaccgctgtgcgttagagggtggggagcactgctgtgtgttagagggtggggagcactgttgtgttagagagtggagaccactgctgtgtgttagagggtggggagcaccgctgtacattagagggtggggagcactgctgtgtgttagagggtggggagcaccgctgtacattagagggtggggagcactgctgtgtgttagagggtggggagcactgttgtgttagagggtggagagcactgctgtgtgttagagggtgaggagcactgctgtgcgttagagggtggggagcaccactgtacattagagggtggggagcactgctgtgtgttagagagtggggagcactgttgtgttagagggtggggagcaccgctgtacattagagggtggggagcactgctgtgttagaggatgcggagcactacggtacattagagggtggggagcactgctgtgttttagagggtggggagcactgttgtgttagagggtggagagcaccgctgtacattagaggctgagagcactattgaagtttaaagggtgtattagtcattctcacctgctcttaaggaatacccaagactggataatttacaaaggaaagaggtttaattgactcacagttctgcatgtggggaggcctcaggaaacttacaatcacggcagaaggagaagtaaactcgtccttcttcactaggcggcaggagacagaagagtgaggaacaaagggggacgagccccttataaaaccatcagatctcgtgagaactcactcactatcatgagaacagcatggggaaactgccctcatgatccaatcacctcccaccaggtctctccctatatatataaaacggggattaaggggattacaattccagatgggatttgggcggggacacaaccaagtcacatcagagggtgaggagcaccgctgacactaaagcttgagtcctgggccccacagcatgtgatactgggacttgtttacatctcaattctttaaaaagatgtcttttagatgactgggcaaacatgtctatggccaggctcccaggtgatagaaaggaattgttattggcttttttaagtgtgacaatggcattgaggctgtgtgaaaaaggtccatctttttaggtgtgcactggaagatctgggtggaagaacacactgtcggggtttgctttaaatcttcagcaaaattaaacaagtaatacggagggggtcctgagaaaagaagctggacagcaggacgctgccggctgttgaggccggtgctggcgccaacagtttcactgtcctcatgtctgtgccattggagaacgtcctcattacttagaagatattttaaaatgggacagctgtgacgtgtgcttcagtgggaggctccctcctccctcacaaggaggtttggcttccttccccatagaagattctccccattaccccagggctaagctgagggaggaacaagagggctcaccccacagaccttacagagctgtcctgagaagaagtggaggctgggccagggatggggtttgcccaaggacacactgcaggttgagggcagagccaggcactgagcttgtcgagaaggccgagaagcagccccgaagttcagggcccatggctacgccaagtgccatcaggaaccgggctgtggaagcccctaaggacggccagaaggaccaatctaggggccttcatagcagctcactcacca

SEQ ID NO: 6196 - DNA, 958 bp, Artificial sequence
  DNA replication origin
ccccattaccccagggctaagctgagggaggaacaagagggctcaccccacagaccttacagagctgtcctgagaagaagtggaggctgggccagggatggggtttgcccaaggacacactgcaggttgagggcagagccaggcactgagcttgtcgagaaggccgagaagcagccccgaagttcagggcccatggctacgccaagtgccatcaggaaccgggctgtggaagcccctaaggacggccagaaggaccaatctaggggccttcatagcagctcactcaccacggggaagagacagtgcaggggcaggagcagtgaagggcggtgggcgctgcccagggcaggcccagccagggcagtgaagggcggtgggcgctgcccagggcaggcccagccagggcagtgaagggcggtgggcgctgcccagggcaggcccagccagggcagtgaagggcggtgggcgctgcccagggcaggcccagccagggagggtagtcaggctggtctaggggccagagccctgcgtgagaaagccccacccactgcttgttgatgacgaatggtggcagatgggggtcagagggcactgggagcaccaaggctggacggggagatgaagacaggatggctgggctacagaaggcaagaggcacatgaaccccacagacatttccactggaacccccgtcagagccacctgggtaccctctgagtcattcaagtggaaaaacaaatccacaaacaagtccctccctgcttaaacctgaccgactgcctcctgaccatcctctggtcacgcctgaactctgggccccctgctgccgtcccccattgctgccgtcccccactgcatccaccccatgtgcaggctgctcccaccccagaagcctcgaaggccagggacccgtggggtccctccgtgactcggtacccttcccctcgctgtcccctga

SEQ ID NO: 6197 - DNA, 824 bp, Artificial sequence
  DNA replication origin
atagtgcccactgacctctgtccccagggctgaagagggcttggtgcagacttccatatcttgccagggcctgtccccacctcaccccgagattgccaggacactaaagctgcctgatgccctccacttccctcctccagcctccctcatccccgcatgggggtgcacagggcaaggccttgaatggagtcagatgggattcctgagaaatgcggacagagccccttgggacccagcagtcccgtctgcaggtctgagcacaggacagaggagagaaactccacggccagggagggtccttctgacagggcccccagcccagacagcttgctgcatggaccgtggccatgaataaagctcacaaacataacctggccagcttcagcaacacccaggccatccccacctgcggccagcacgagatactttctgtgtctcttttttctttataagaaaacctggaggtggaggagggtgagagtttgtgaacatggaggcggaggagggtgagagttcgtgaacatgcaggcggaggagggtgagagttcgtgaacatgtaggtggaggaggataagagttcgtgaacatgcaggaggagggtgagagttcgtgaacatgcaggaggaggagggtgagagttcgtgaacatggaggaggaggagggtgagagttcgtgaacatgcaggcggaggagggtgagagttcgtgaacatgcaggtggaggagggtgagagttcgtgaacatgcaggaggagggtgagagttcgtgaacatgcaggaggaggagggcgagagttcgtgaacatggaggcggaggagggtga

SEQ ID NO: 6198 - DNA, 2234 bp, Artificial sequence
  DNA replication origin
tcttgtactgctgtagacaactacctgagactgggtaatgaataaagaggtttaattgactcacagtcccgcaggctatacaggaagcatggctgggaggcctcaggaaactgacaatcatggtggaaggtgaaggagaaggaggcatatcttacatggccggagaaagaggaagagagcaaaaggagagggggaggggccacacactcaaaaaaccagatctcatgagaactcactcactatcatgagaacagtaagggagaaatccacccccatgatccaatcacctcccactgggcccctcctccaacactggggattacaagtctacctgagacttgggtggggacacagatccaattctacctgagatttgggtggggatacagatacaatccatatcaggggccacttccacggggacgggaagaagcagatgggagtagtcctgggcaggtgggctcatggctgtgtgtgcaccctcagttggctttagtttgctctaagaacgaggtaggaggtggggatgcctggggaagggggtcattcacagagaatggagaagactcaaaattatccatcagcacatgagccttttctacttctaggggaaatattttccacactgatatacaaaaagtggacagtaccctttctgctgtgtatacccagcacattcattttttcaaaaccaaatatacagcatttcgtcaccaaggaatggcatacagtgcaggcagggccaagtcctcagctccaggtctcctgccgatgctgtttgcttgacaacaccacgtggctgggtcaacatgcaccacatggagagcttggcacctgcatccaggccctgacccagggaggaggtgctccaagaggcctgccctgccccaccaggcactgaaagactctcagaggccactgctggggacaaaatccctccactaccccctcaaggagaagcccgtttcttcttccaaacatcccaggagcctcccatggtgcagtgcagagtctgttggggagccaagaacaggtggctgagaccaggtggcccagctcagctctcctcgcctcccagagtcctggtcttctggaagatgctctgcatggcagagatccggtccttatcctggatgttgaagacctggaactacaggcagggttgcaggggagaagggttacagggacccctggagcccatgataagctctcagggccgagagcacagcgtggaacaactggccctccctgggccatgccgggccttcctgccccgggtatctgcctggacaggcatcctagaggcggagcggccccagcctctgctgctccctgagcccctcctcacacacggcgtccctggcatgggcctacactgaggaggaggccccacacggtgctgcttgaaggctgcctccggtgaccaccccaccctcaccgcaccctgcccacacaggtctgctgagagcacagagcatggcctttgccccctaatctgcaggctctggggtaaaaattcttaagtgttgggcatgaggggaggccccaggaggccatcagcatctcaacaggcggaagtttgctaaattaggataggagatgcccagcagagggtggctaccctggggcctcactgccactaggacacaggagagggtggctgagaaacccctgtttgtgccctggaaggagattgtgtttgctcctgggatgagggtgagggccgggccctgggcgaggagcagggtggactccaggcaggctcagcagaggtggcagagcctgggccacagggaggggcagttggtggagcctccaggcacccacgagaagtggcccaggggacacagggtcccaaggagcacggctgtggattcttgagtccagggagaaaaaaatggtccctctggggcccaggtaaggccatatcccttcatgaggaatggaactccagggtgggcagctggggctctgagcatttaccaagtgtgagctggggggcaattctggtgggaaacagaagcagggtcagacccactgccctggttccagggagaagccccaggccctgtgaggccaccagtgaggggacccccacggcccgtgtgacccccagacatcacatgtccccgcagacgctctccatccgagccctgacctggcctcagcattcctggggctgctgacctgggagagaatgggcagggagccaggccagggctccattccaccct

SEQ ID NO: 6199 - DNA, 1055 bp, Artificial sequence
  DNA replication origin
cctgggacactgttgggtagaatctcagggtggggcctcacagagcccagtgttcccgcccagccagcctcctcccagtgtctgggaatgtcacctggctgggacacctccctctgggggttcccaggagagtccaggcacacccttctctctgcttcctgggccacagtgacattctgcagaaccctgtccttctggggctttgtaacatcagatgctgagaagaacaaggaacaggcaggggccagggattccaacccaccccaaccccgaggaagcaggtgggggctgtgctgtcttggggtctgctcggctggccccttcctggagtgtgtggccagccgggcgctgctccacagatggggctggcccctccacctggctcagtgttgagggagaggtgcccctcctggtgtccggagtccctaggtgacctctggccatgccctctcaggcccccacctgacctggagcttccagccccccttgaggttggatgcatggtggttcccaagccccaaactcaactgcagggtgagaggccatgggagaagagggtttgaaaagccgctgtgagacagggcctgtgagacagggcctggggcaggatggagggtaagggtgtctggaacggccgcaggcagctcaggtcttgtggttcaggccaggggtcatgagcacacaggctaggactgtgacaatgccatgggcccgttgggttgggctgcagggggtgagtaggagctcaaaggggcggagggaaggagagaaaggcccagaggatgctgggagctgcagaggcccccaagggaggtcctggggggtgaaaggaggagctggggtggggtgcgagggccagagccaggcaggggaggagagagaggggttcatgccttcgggagccagcaggctgggggcagcgggtgggaggggcctgggactccgactgggacgtggaggggagggcacagggtaggaagaggtgtgggtaggagcagggaggggcagccagggtgagggtgggagcgcagggtgggagcacagggtgggccggg

SEQ ID NO: 6200 - DNA, 1768 bp, Artificial sequence
  DNA replication origin
aaaatagctgagaggtcaggcaacctgtccaggcaggtgggttcccagagaagctgagagggttcccacacagtgggggtgcgtccacattgatgtctgtgagaggaaggagaggggcactgggcacaggctgagctcccctggagacccctagccaatggccagggaccgcaccccatccagatctgacaccactgcaacagcccctcagggtggctcaccccgcctcacttgctggaaggatggttgaatccacgctcgtcagtggagggctttgcaaagctggttatgtccctcctgtggttttcccctgcaaggaaaggctcagcggagcgccagtcacctgccctgcattgcctctgaccccttcacgcgaggcaggggcggcgtccaagcttgtggaataaactacctgcccgcctgccaaggaaggggaagggctgggctgggcagaatcatttttgcaagtaaatgggaaaatgacatttttggtgccccacatcctgtaggcttgcgggggacactgggcgcgttactggcccctgttgtggctccttgaagggtgggcccatgagggtgcattgccaaggctccaccacctcagcccatccagcatgcacgcagcaagtcatctggtgtgagctgctctgagctgtgggcataggcggggctggggtgtggagcagagattctgagcccatcatgcggccacccctggaggctgccgccctgggcttcctgaaggggccatgagtggagctgtcacacccccgggctgagtggttccaacctgggcaggtctgagaggcaccttcctgtctacacaaagggccggactggcctggaggctcctacatccctccgtattcagggccagggagtctccacgaaaagcaggcgtgcacactgcacagccgatgacagcagctcccgagaagcctgggttccggctgggtcccaccagcagacgcagcacagcacgaccctggccagggcccgaacctccggggctcagaagctccccatgctgggggccaacagcggcgggggctgacccagtgcgtctgtctgggccccaggacctccactgactacctgctcacgaggctgctgggggagctgggctccctgcagggtcatcgcctggacagcctctccatcctcgaccgggtcaaccacgagagctggcgtgacagtggccagactgacggcctgacctttggccacctgaaggtacccagggcgggactcggcgggttgtctgtcaccagggcccaggggtaggtgcacccaggcgtgtccctcctgccagccctgactggcaggcagctgctatgagtcccaagtcggagttggggggattctgagggcctgcccaggttctgaggaggtgaggccgtggctcctgagggtcaagggaatgtggccgcgggtgccgtggtgccgcaggctggccttcgccatccctaggccgtgacctcggaggccctcctggccctgggacactgttgggtagaatctcagggtggggcctcacagagcccagtgttcccgcccagccagcctcctcccagtgtctgggaatgtcacctggctgggacacctccctctgggggttcccaggagagtccaggcacacccttctctctgcttcctgggccacagtgacattctgcagaaccctgtccttctggggctttgtaacatcagatgctgagaagaacaaggaacaggcaggggccagggattccaacccaccccaaccccg

SEQ ID NO: 6201 - DNA, 1350 bp, Artificial sequence
  DNA replication origin
caggcgggggccgtgtgggtgtctgcagtcaccctgagtgacacctcacctcttcattctcggatattaatttgtttttgggggggtagggcaactgaggcagaggccagagggcccctggactcaccagaatgcccccagccccagctccagccccattacaccctggaacaggccctccagggactctgggctctgtgttagtgaagtgggcactgggctgggtcccgggtggggtccgaggaggggagggagtgggaaacctcttggtcagaatgtgcctcctgtgggggacaggggccatggggctctcgggcaagggctctctgggaagtgtaggatccagacctggtcaggaatagtggctgagctccgtcactgtgagcctgctggcctgggcagcccagaaacgggggtggctgagctccgtcactgtgagcctgctggcctgggcagcccagaaacggcggtggccgagctggctctccactactggcagctgccgccgcctcttctctccatgggaactgagcctcagcctgggcctgtccctctctccccagctgcccccatcatgtagactggtcccctagctggatccaacatgggcttcccatgcatgcagttgatttgagtggcagggggctctcagggaagcttccaggggcaggggcagggggcagggggcaggggggaggaggaggtgagttctggggaggaaaggcctagcttcgctccaccctctccagctctggagtgggagccctgtggccccagcctggactgctgctgcctcctcccctgcagagaaggcagcagagatgccagggccatcgtcaggaggtagggggctagctgagggctgggactttggccccagggctggggcagagtgagcaggctcaggaaggcctgggaaggcacagcaggcgtggtcctggggtgtggggtgagggtggtgcctggcaaaggaaaacctcatgtaggacgctgctgtcatcactggtgctgcaagtcgctgagctgacagttgtgccgaggactgtcaccattgggcaggcatggtggccagctcctcacttggctgaggtccagggatggacacaggtgtctggggttggggagctgcagcctgcaggtgggggccagcagagagggctgcaggtgagaggtgatgaggggcaggggccaagttggcagcaggaggagggctgtggagtgtcctgggcaggtgaggcaagtcgaggggccggcgtgacttgggtctttgcaggttcgctgaacgcggccagcctgagggaggagcagctccacctgtccttgctggtgtccagcggctggagaacaatc

SEQ ID NO: 6202 - DNA, 1301 bp, Artificial sequence
  DNA replication origin
gaggcagtgaaggtatcctcggtggtccaccgctccaggccagccccttccctgggcacacccaggtggcataattcaaggccatcctccggctgggtggcctctggttcctcaatcagtagagcctcggcatccacccacaggggcacctccatgtccattgggtcctcagaggagcgcagggcgaactggaaggcctccaggccacgggagtagtccacgatgaagcgggggtccagggcatgcacgcgctccagcaccgtgagcagcacgttctctgcgcgctggaagtcctgggcacgcggcgcctcccgggaccggatggcctgcaggtagtggtgccacaggggcacctgcacggccatggctgaggtggggagagcaggggcaggcatcccttcaacagtggcaggtgagggccagtggcccctgaggaggactccgcaggccagctgtgcagatgggctgtgaggaggcacctgcccaggtgagcagcaggtctgcaggtggggcctcagctcccacacagcagaattccagagtgacagcacagtgtggcaggtgaaatagctgaactatttaaggcctttgaagtgggggtgagtcagtccccagcaattgggaatgtcacaggggccatgcagggcaggcgggggctgggtttggttaccaccctcctccctcccttcagaagagctctctcatcttaggcccaaggcacggcccctgtcccagccaggcttggggtccctggagaaatattgccgctggactgtgccgtccctgggatgggagcctctgtgtgttgctgatgggcctccttccaccctcctccccacagcccaggggccgggtatctggatcaggcccccctgccccagcctccctgccaggttggagggaacacaaggcaccccgtggctcagtgaggaaggggaggcagggcggtggctgcccagaccccgctgtgggggagcccccgactctctaaggctgcctggaaggctgggaacctggaggctgcgtctctgcaatgttcccctcagacacctgtgcccggcttacaggctgcagtcctggcatggctcctgcctctgccccagctgtgcatccagccatctgggccctggacccctgggctaccagtccccaccccaccccaccccaccctgcccagcctccaacctgagaggagctggcacccacctagcctgggagctggagctcgtctggttctggagaaaagcagtctccgtggctccacctcacccaggtggagaaactcgccccaccatccccct

SEQ ID NO: 6203 - DNA, 1288 bp, Artificial sequence
  DNA replication origin
gcgcagggggcgcgggggcgcgggggcacggggggagcgcatggggggggcgggggacgcaggggtcgtgcaggtgggcggggggcaccggggaaggagggggcgagcaggggggcgcagggggacgcagaggggggcgcagggggcgtagagtgggcgcgactttggagtgtgagggcagcgccgcccccatggaaccacccggaggagagaagggctgagggaaggagcaagcaggggagaggcagggatgggagaggaggggaaggaagggaaggtggaggtcggcgtgtccggaggcctgtgccgccagcctaagcgcttaggaccccgccgatgctgcttccttccccacggctccagggtggtcctgagggtcggcaccgcccactccccaggcccctcccagggactctgcgctgccacctgcgccggcgggtacaggcagggcgtcccctccgcgacctgtgggtccttctgggcctgcccgtttcccgcccggggcctctgcggggtgggcccaggctgtggcccagcgtccgctggaggcttgtattctagaaggcctcgcagtgggagggaacaccagggctggaggtcactttcccctaaggccccagactcacagctgagcccggcccctatctcttcctcctgcccccagcaccttcttcagctcaacctgcattaaagaccccagggaggtcacagcccctgagtggagctacgctaggggtagctggcccactcaacccgatcctggccctgaggggggtggcccagcagggagagccagcgggtcctcactgctgcgccaccccatttggttgtgtggagagggacagccaaaccttgggggaaatgtgggctccccatatctctgcctccacagggttagagcagggctcccctctaaaagagttggactggggtccttgctatgccaccaataaacagagaccgtgggtgttaccccccacctcatgtccccatctgtgaaatgggagcgttggccatccaggccctcctggatcccagggccaggggctgaggctctgtgagggtgcagtggatggaccacgtgtggcctcagctgcctgcccccaactggccaccagcccctgggaaatgcaagctgctggaatcttgcctggaggcaaatgacctcccacactctgatggaatcagaaccctcgtgtggatccagggtcccacctgcactttggcacttgctggggaccgggggtttcagggctgctaccagggcctctcctcttacaccccttcc

SEQ ID NO: 6204 - DNA, 809 bp, Artificial sequence
  DNA replication origin
gagaacggaggcccagcagggtggcaagaggcaccccaggctccttgatcagagaccgtcatgctccgctcaatcccccagactgggaagggctctgccccgccctccctccgcctgctcagcagctcccgccctgcgctcccccgggcatcggcggcgccacccgctaacgggaaggctgcagcgcggagtaaacttgactcattcctaacatttacagagggtcacttattagcgggacgtcccgagaggcgctggggcgtaatgggttccatctgtggacgggtgcctgcaataggccgcggcccagctggagccggaggggggcgcggggagcgcggggggagcgcagggggcgttcagggggacacggggggagcggggagcgcagggggcgcgggggcgcgggggcacggggggagcgcatggggggggcgggggacgcaggggtcgtgcaggtgggcggggggcaccggggaaggagggggcgagcaggggggcgcagggggacgcagaggggggcgcagggggcgtagagtgggcgcgactttggagtgtgagggcagcgccgcccccatggaaccacccggaggagagaagggctgagggaaggagcaagcaggggagaggcagggatgggagaggaggggaaggaagggaaggtggaggtcggcgtgtccggaggcctgtgccgccagcctaagcgcttaggaccccgccgatgctgcttccttccccacggctccagggtggtcctgagggtcggcaccgcccactccccaggcccctcccagggactctgcgctgcc

SEQ ID NO: 6205 - DNA, 1106 bp, Artificial sequence
  DNA replication origin
tacgccccagcgcctctcgggacgtcccgctaataagtgaccctctgtaaatgttaggaatgagtcaagtttactccgcgctgcagccttcccgttagcgggtggcgccgccgatgcccgggggagcgcagggcgggagctgctgagcaggcggagggagggcggggcagagcccttcccagtctgggggattgagcggagcatgacggtctctgatcaaggagcctggggtgcctcttgccaccctgctgggcctccgttctccgctgtgcaaaataaggggtttagaacagaatggctgagccccttccagcagctctcctcctggttggtggtcttggcacctgggtcccagctgggcccaggaggaggagcagggacttccctccccctcccccactgggctgctgctcccaaggggggcccattactccctccagaagaagaggcaatgggggaacctgcagtgaaggcgcctcccaagacctcccaggggactgagagacagaccctggtgcacgggctgtcgggaggacgggcgggctggccccagacctcagctgatagtggggaggcgtttgctgagtggctgccctttgcagggcagcagagtcggaatagggcctctccaggcgccatgctgagcctgggtctgcggtgactctccaaccccggcgaggggggccgcgatctttggggtgcagatggaggaggaggcctgtgtccagggagcatccgggatagccagacagcatgcaccaggtgcaggaggcctggctggggttgggaggagggtgggggagcagggcacagccaccagcccaggcctgaggtcagagtccggggacgcaagcagggtctcagggagggccaagagatgggaggcaggaggcagccaggtggtcacccacgtggaccctggtcaggaggaaaatccaggaggcacaaggtgggggagctgccctgcggaccccagggagaggggtcctctgtgctggcgtgggagccaggcaaggaggacttgggtggactctggcgtgccatgctggagagccctaggagtggacatcccctcccagcttcccctggcaagcatccagtcaccc

SEQ ID NO: 6206 - DNA, 1408 bp, Artificial sequence
  DNA replication origin
cccaggcccaggactgtcccccacgccgtcaccttggccagctgcaggcccaggactgtcccccacgctgtcaccttggccagccgcgggcccaggaccgtcccccacgccatcaccttgcccagccccgggcccaggaccgtcccccacgccatcaccttgcccagccccgggcccaggactgtcccccacgccatcaccttggccagccgcgagcccaggactgtcccccacgccgtcaccttggccagcaccgggcccaggactgtcccccacgccgtcaccttggccagccccgggcccaggactgtcccccacaccatcaccttggggtggctcctcactcaggctgccggccacgatctcacggatgcgggtgggcacgggggtgggcgaggcctgccggccttccccacgcacggtcagcgcccggtcttccctgctggctgtgggactcaggatggtgtcctccagtctctgaaagacacccccagagatacctggagatggcagcccccaacagctgccaggcaccctctacgatcccactgaatgggagccgccacagggccaccccaaggcagcagagtgccctggagaggacagggtgaggctgggcaggtcactcaggcgcatgccttggttctgcacctgcggagtggggctgcgcctgtccccaggttctggagaggaggaccacacccagccgaggtcagcaggagcaggtactgcgcttggggctctgccctgtcttggtgggggctgggctgagcgctggctaagcggttgccagttccctaggggatgctgacaggcaggttcctttgcctctgctccacaagaaacccaacatcctcgcccacctggagcaggtggtctcacagcttgtttgcacggtggggccagaggagggacctagatcccacgcagcagtcacagagcccagtgtgtttgtgtgtgtttgttggggggtgggggctgaggatgggtcagagggctgaggctgaacccatccttctctgctcagctgcccactgcccctccacaggctcggtccatcgggacccaggtgggtccttcatgaaagccgactgccagggaagaggctccaataggcccagaagtgggcaggaaggcccaggacctgggctcacactcaggaggtgtttgctgaatggctgcccttctgccccaggagtgcctgggtgtcctgggtaccccagcctggttttgagggtcttgggctctaatggcattttgccgggcaggggcacagcttggggagggccgggaccccagggcaggggactcctgccaggtgaaatagattaccgactgtgggcaggacacacaggccgcctgtgccaaaccagcagaagcccaggcaggatcccgcaggaatacgcaa

SEQ ID NO: 6207 - DNA, 815 bp, Artificial sequence
  DNA replication origin
tcccccagaagcaacagggctcacaacttcatagacagcgcgagtgcccagcgtccaggccgcccacacactctgctgccattggtttggggctcggcctgggcctgggtctgcattggggttcgaggtggtaggattgcagttaacatgagaggaagtggggctcagagtatgaagtctgcctccctatgttagggtcccgggctcagatctgggacccctcccaggagatgggggcaggtccagcagctggagcctggtggccagcccagggtcccaccgtggagacagggcacaaggctgagtgtgggtgggccctggtctggccacccaggctgacccaggtaccgtgcagcaggggtacaggagccgacagccactgtggcccgagtgcaagaggagaacgagctcctgcaggaggagctgacccggctgggggacctgctggcccaggccagcgccgagcgagatgagctggccagcaggtgccgtgtggtcagcgagcaggtgcgtgtgtgcagcagactcagggcaggcgggaggtggcagcctggcccttcgtgaggggtcacttgtcgggacggcagtcagagcctgggaccatcggcaatttctaagactcggaaagacagagtgtcagccacgtgacattcaaaccctgggcaacagacagggaaactgaggcaacagatgggataactgaggccagaggtgggaggccaagcagcacgtgcccaggcctttctgatgcccagcgtgtcccctaggtctcgcaacctagcttaggcactgacttgtccccgcacctgcccggg

SEQ ID NO: 6208 - DNA, 2301 bp, Artificial sequence
  DNA replication origin
tgccagcatcaaggtggctctcccaggtgccagcccagtgccctcctgcctccctgcgatatctgcccctgccccgagctctcctggctctggctctgcaaccttggcccgtccctcaatgcctgagacaaggtgccaggggctgggagggaggtgcctttcgcggggcggggtgacgcggagagggagtcagacatgcccgtggtgggggacggcttctgctgcaccctggggacttccccaccacaagtaggtccacacttgctgcagtaggggtgcaagtccgccaggtgggtggacctcgggagccggcacccccgccaggcctaagcctcctcttgggttatttttcttccccctcaaaactggttttcaaaagtttctcagcactttgattccttttccagattcctggaggatgaaccaaatgtgtcgatattctatagacaacttaacctccccaggtctgggagactggtgggccttggttgctgtgcagggctgggttaatgtgggggctgggtcagtgtggggggccgggtcagtgtgggggccgggtcagtgtgaggggccgggttagtgtgggggctgggtcagtgtggggggccgggtcagtgtgggggccgggtcagtgtgggggccgggtcagtgtgggggccgggtcagtgtgggggctgggttagtgtgggggccgggtcagtgtgggggccgggttagtgtgggggccggattagtgtgggggctgggttagtgtgggggccgggtcagtgtgggggccgggttagtgtgggggctgggttagtgtgggggctgggtcagtgtgggggccgggtcagtgtggggggccgggtcagtgtgggggctgggttagtgtggggggccggggtagtgtggggggccgggatagtgtggggactgggttagtgtggggggccgggttagtgtggggggccgggttagtgtggggggctgggttagtgttgggggctgggttagtgtgggggccgggttagtgtgggggccgggatagtgtggggactgggttagtgtggggggccgggttagtgttgggggctgggttagtgtgggggccgggttagtgtgggggctgggttagtgtgggggccgggttagtgtggggactgggtcagtgtggggaccgggttagtgtgggggctgggttagtgttgggggctgggttagtgtgggggccgggttagtgtggggggctgggttagtgtggggactgggttagtgtgggggctgggttagtgtggggggccgggttagtgtgggggccgggtcagtgtgggggccgggttagtgtggggggccgggttagtgtggggggctgggttagtgtggggggccgggttagtgtgggggctgggtcagtgtggggactgggttagtgtggggggccgggttagtgtggggggctgggttagtgtggggggccgggttagtgtgggggctgggtcagtgtggggactgggttagtgtggggggccgggttagtgtggggggctgggttagtgtggggggccgggttagtgtgggggctgggtcagtgtggggactgggttagtgtggggactgggttagtgtgggggctgggttagtgtgggggccgggttagtgtggggactgggttagtgtggggactgggttagtgtggggggccgggttagtgtggggggccgggttagtgtggggggccgggttagtgtgggggctgggttagtgtgggggccgggttagtgtgggggctgggtcagtgtggggactgggttagtgtggggggccgggttagtgtggggggctgggttagtgtggggggccgggttagtgtgggggctgggtcagtgtggggactgggttagtgtggggactgggttagtgtgggggctgggttagtgtgggggccgggttagtgtgggggctgggttagtgtggggactgggttagtgtggggggccgggttagtgtgggggccgggttagtgtggggggctgggttagtgttgggggctgggttagtgtgggggctgggttagtgtggggggctgggttagtgtggggggccgggttagtacaggcagggtgggggccgggcagaggcccccttgataagcccaggcatgacatcgtcagctccatctcagggtgtgagtgggtgatccacacactggactcaggtgtggctggtggccagggtctgttgccagggtcctaatgtcagtgctcactgacagcggtggcggggggggctctgtccctctccgccactctctccctgtca

SEQ ID NO: 6209 - DNA, 951 bp, Artificial sequence
  DNA replication origin
cccccacactgacccggcccccacactaacccagcccccacactaatccggcccccacactaacccggcccccacactgacccggcccccacactaacccagcccccacactgacccggcccccacactgacccggcccccacactgacccggcccccacactgacccggccccccacactgacccagcccccacactaacccggcccctcacactgacccggcccccacactgacccggccccccacactgacccagcccccacattaacccagccctgcacagcaaccaaggcccaccagtctcccagacctggggaggttaagttgtctatagaatatcgacacatttggttcatcctccaggaatctggaaaaggaatcaaagtgctgagaaacttttgaaaaccagttttgagggggaagaaaaataacccaagaggaggcttaggcctggcgggggtgccggctcccgaggtccacccacctggcggacttgcacccctactgcagcaagtgtggacctacttgtggtggggaagtccccagggtgcagcagaagccgtcccccaccacgggcatgtctgactccctctccgcgtcaccccgccccgcgaaaggcacctccctcccagcccctggcaccttgtctcaggcattgagggacgggccaaggttgcagagccagagccaggagagctcggggcaggggcagatatcgcagggaggcaggagggcactgggctggcacctgggagagccaccttgatgctggcactcagtttaggggtcctttgtggggcccatggcaggtgggggcagagcagcggctgtgcacctgagcccaggtcagttaggcccagagggtttggggttccattcaagccccttgacttggggactctgagcgcctctcttaggagaggcttcctacccccaccatgccctgtgg

SEQ ID NO: 6210 - DNA, 948 bp, Artificial sequence
  DNA replication origin
gcggcaggttaatctggcagccacacctccatgttgccaagaagtgtctcagcctgctcttgtgatgaacacggagtgcaggaggcggtgcggctgaagcaagcgtctaccccgtacagcaggcacggggtggcatgccctcggagggcgtgcagacaggtgtaacgggctcagaggagcacgccctcggagggcgtgcagacaggggtaacgggctcagaggagcatgccctcggagggtgtacagacaggtgtaatgcacacagaggggcatgccctctggagggtgtatggccaggtatgggttcacagagtcatgccctccagagtgtgtatgaccaggtgtaatgggctcagaggagcatgccctcggagggtgtatggccaggtatgggttcagagagtcgtgccctccagcgggtgcatggccaggtgtaatgggcacagaggggcatgccctctggagggtgtacagccaggtggaatggacacagagggatgtgttctccggagggtgtatggccaggtgttatgggctcagctggggggaatctcaggtgtgggatcaggtgagggggtcaggcaagcttcatgaaggtgagttgatctaatacctgaagttcttcaaggtctcgttctattgtttccgctggtttctggtcatggtcctctctgggggttctggagaacgggcaggatgtgagtgctctacctgaaggcaccctggaggagcaggggtggggctgtcacaggcaggcagaggtggtagaaacacagtagcaccctgagttccagaggtcagtgagcaggagaaggtgagtgcagggcctagaaggtggtgtggagactctgagacttctggctttcatcttagctccctgcaaggctggaaccactgtgcacacacaattccccccattcctgcccccacacagagtcctcccactc

SEQ ID NO: 6211 - DNA, 1358 bp, Artificial sequence
  DNA replication origin
acggcgcccactgaggagcccccaacgtgccacatccccccatcaaggggcgtccccaccacacatctgctccccagccaccctggaccccgcactgcaggccatgcgggcagccatagagaggcggtggcggcgggaacaggtgggcagccgcagcccacaggactccctgtctccctgagggcagaaacatgagcccctcaggctgaagggtagttatggggcctgcccctgagccccatggctccagggaggggccccagtgtcgggggtgtcctttctggggagtcgcaagccctggtgggcctcggtgggcaaagcctgcctaggccagagaggcccacaacttaccccacccgagcaggagctgtgcctgcagctgaagtcctcccaggcactggtggccagtctccaggagcagctgtccgaaagccggcgggagctgtgggccgcacagaagctccagcaggagcgggctcgggagcaggcacgggaacgagaggctcttcggggccagctggaggcccagaggctcgaggtgcagcagtgccgggcatcctgcaagctcctggggaggtaatggggtgaaggggttgcacggccttgcacagggtgtatgggatcctgagggcccagggctgctgtcaggacaagcacctctagagctggaggggttgccagccggggaggggtccttgccttctagcagagttgtgtgagcaccagttgagcgtgggccagggtgggacacacccgccagtgagaccctgtctgcttctcaggctccctctgcccatgcagtctcaggggctggcatccacccagcccccaatgcccaccaaggcacgcggtgcaccttgaatgtgtccagggccgccccaactctgcccccaccatccccagggagaaggctgctctggagatggtggtggaggagctgaaagggaaggcagatgctgcagatgcggagaagcaggggctggaggccgaggctgcagagctgcagagaagcctcctgctgcaggcagagcggagggaggagctggctctgcggagggagcggagctgcagggcactggagaccaggtgcgcggccgtggctgggtgggcagggcccctcccacagaagagaccccactctgccaccatcagccacttggccttgggccacgggtctgctttttcacctgtctcatctcagggtgtggtggccctaacagggcaggggcgggggctctccaggcttctccccaggctgcaccatcctccagaccaaccctcacttcctctggcccagtgccccacctgggccaccaccccgtgggcccatcagatgtggggccccacccctcccgtcc

SEQ ID NO: 6212 - DNA, 1180 bp, Artificial sequence
  DNA replication origin
tcctgctccagagtcttccgctgttcccgcagctggtcccgctcctgctccagctgccaccaggtgtcgggggctctgcatccactccccccatcctcggtccctgtaggccagccatccccaaggcctgccccggggcactgtcttccctccctcaggcctggcccaggggcactctcttccctccctcaggcctggccagggctagtcaggctcccttgtccccaaaacctcaaaccaggagaggaagtgatctgggaggatggaaagaaggcctagggctgggagacccacagccacctgggaaacaggttccagcgaggcccgccccactggcccttgtctcacctggagagccaggtggttcagggcacttttgtcctgagccaacccctccatcaaggcggccattgcggccagggagtccctttgctccactccctccgacttcagccgcctcacaagaagctccaggtccgcattgctgcactcggcctggggcagggagggggatgccagggagggaccttcagcttccagggcagggctgttgccgctgggaaaggagtgagccctgagccacggaggtgtgcaagccagagctcttgggcggacatggtgggaaggtcgccacagtggggaggtctcagggccaatggtggctccaggcactaaggctccagccagaggaggtggctggtggtccagggagaggccacaaagaagcaggcgtggccagcagggttgacagcagctgggccaggctggtgcctactggttggggacgggagagaactttggtgactttgggatctctggtgatgggctgaggggcccggcaggcaggagagagggagtgggaggccaggtcagtgaggccagggtgggtgggggcagacaggagagggggcggggttgtggggagcagagtgtacccgcgccagggcgctgcgcagtccctccctctcactctccacgacatcccgctgcagctgtgctgtgctcagtgcctcccggaccgatgccagctcctctctgagcccggagaccttctcctccagctgctgcaggcggccttgactgaggccccagaccagagggcgggaggtcgctcagggtgagcagtggctgccccatgggatttcaggcaggcgaccacctgcaactccctccaagccca

SEQ ID NO: 6213 - DNA, 1007 bp, Artificial sequence
  DNA replication origin
aagggccagtggggcgggcctcgctggaacctgtttcccaggtggctgtgggtctcccagccctaggccttctttccatcctcccagatcacttcctctcctggtttgaggttttggggacaagggagcctgactagccctggccaggcctgagggagggaagagagtgcccctgggccaggcctgagggagggaagacagtgccccggggcaggccttggggatggctggcctacagggaccgaggatggggggagtggatgcagagcccccgacacctggtggcagctggagcaggagcgggaccagctgcgggaacagcggaagactctggagcaggaacgggcccgggccggggagcagctggcacaggcggagcagcagctggcgctggagcgggcagagcgcaggggcctgcagcaggcctgcggacgcctggagcagcggcaggagcagctggaggggcaggcagccctgctggggcgagagaaggcccagctccaggagcaggtgggccaggtgaggacgtctgcagggcatgctgccgccgtctgggatgcggctgggtggcaggtcttgcctaaggtacttctgggagtcaggcaggctcaggatgcccacatcagctctttctgtcttggtaacggatcaggcccagtgctggcctccccgtgggggtgggggcagggggaaggtatgcagagaagaagattcccatcaggcctggccaccatatccatcccgccacttggcaggggagcccgggcctcaggccagtgacttctgcacactgggctcttagtgagctttgctgtttcctcctctgtcttgtttctccctggtccacatccacacagctgaactctgcgactgcacattcactggtgcctcactcatttattcccaatttccccatcttttgttgaggaagctcaactcactggagaaaaaaacagtcttggttttttccaatcctgcctcgttcatccgtgtgaaaaccctgtcca

SEQ ID NO: 6214 - DNA, 1551 bp, Artificial sequence
  DNA replication origin
ctcagagtgttgcaagaatcaaatattaaatgcagagagtttgacaataaatcttggctatttcggctactgtaactcctcctgcagtttgtcatttttttttttttttttttgagaaggagtatctggatctcagctcactgcaagcttgcctcctgggttcaagttattctcttgcctcagcctcccgagtagctgggattacaggtccccaccaccatgcccggctaattttttgtggttttagtagagactgggtttcactatgttggccaggctagttttgaactcctgacctcaagtgatccacctgcctcggtctcccaaagtgctgtgattacaggtgtgagccacagcacccggcctgtaatttgtaccaacatcttatagtccttatcaccccatgggacacaatgtggacgtgttcatgtgtccattcctttcactcaacagtgaattcttcggggtagcatgatatactggaacagcctagactcggtagcttttatagggctagtggctgagtctcaactgctgatgggatggaaggatggccagatgtgtggctggtagttgtgtgcttggcttggtgtttgagttggatacactgatggatgattggatgactggctggttggcggatccaggtagatggatggatagacacatggatggatggttggatatgtgacttgacagctgagtttgtggacagatgaaaggatgttaagtggatggatggatggatggtcagatgggttgtggatagctgtgtggatggaaggttgggtgcatggatagttggatggatagtcaaatgaactgatgaatgattgcatggatggtgaggtgtgtggatggacagctacgaatgtggatgcatggccatatatctgggtggatagctaaatgtgtggaaagaagaatggatattcaagtgagtgggtggatgatgacaagtgtgtggagggtcattcaagtgcatggatggatgggtggatagagagatgatggacagatggatgaatggatggataggtgggtggatgagtgtatggatggatggatgggcaggtggatgggaggatggaaggatgaacaggtggatgggtggatggatggatggataaatggatggatgggtgaatggatggacagacggatggatgaatgaatggatggacagatggatggatgggtgaatggatggacagacggatggatgaatgaatggatggacagatggatggatgaatgggtaggtgtgtggatgagtgtatggatggatggatgaacaggtggatgggaggatggatggatgaacaggtggatgggtggatggatggatgaggaggtgaatgggtgggtagatggatgagcaggtggatgggtggatggatggatgaggaggtgaatgggtggatggatggatgagtaggtggatgggtggatggatggatgaggaggtgaatgggtagatggatggatgagcaggtaaatgggtggatggatggctggatggatggatggataaatggatggatgggtgaa

SEQ ID NO: 6215 - DNA, 1264 bp, Artificial sequence
  DNA replication origin
gctttggggctggcaggggccagagagagggggcctggcccagctgggggcctcccatgagccaacagcagcgagtggctgagcccatatgtgcactggagctgctcgtagaaaagcacagctggggacatgagcaccagccttgtggaactcactcaccagagagatccttccaaaggagaaacaacccgaggcggctggccctgcaccagaggaaactctcggcaggaaaggacacccacattgagtcctgagcggagccaggagagaagcgtccgcggaggggctaggacagccccccagcaaagagccgcccaccctcagccagtgaacagaggccctcccatgcacaaaggctgctgcaggctgccagcgggggtcacctgggacccctgggtcctcccctggagcccaagtccagggggctggacaggcagcagcaaatatggcactgggcaggagggctatagggaggagcgctctggagaggagggctctggggagcaggggaggaggactctgaggcctgtgcctccagctcatgggcaaggctggacacccactgttattgcttgcagaacgccaaggcttcagcccatctgtgatggggcaccaggtcccgcatgggagatgaagagactgggcagggctcacagcgagggtggccagagcccagcgataggacatagatgggggcctggctcacagtggggggtggccagagcccagcgataggacatagatgcaggagttacagcaggatctccaagggcccaggcggcctgaggagaggctgtttgtgttgaggtcggggctgctgtcctgggtggcaggggctggccctgaatagacacaggtgcgagggtgccctgggcagggagggaatgggctcaaggcaccggacgccactcctctccttgccaggaacaggtaggattgagggcgaggctgatcgccaacccccagctctctgccctccctggccacacacaccccattagctgggcccacacctgcctcctgcctctgtccttccagctcccagcatgttcagtgacgaggccgttcattcccgtacttgttggcttattttaaattcaggcgagcctttcctccctgtccctggcaaggacgcagggttggacacctacctgactggcgttgaatgtatggttcagtgtgcagtgaacagaacacaggccatggtgccaggcgcgggaggcagcccccttctctgcccattctgaacgggagcccttctcac

SEQ ID NO: 6216 - DNA, 1671 bp, Artificial sequence
  DNA replication origin
tggcttgacaaaagcaaacccctctttctggctgttttcacgggatattgtccaggcccccgaccggcctggctcccgaggctgccgctgttattgttgttctgtttttgggaagggccagagcctcccctccgctcccctccacccccacacgtgggagccatgaccgtgctgagcattttccgccgagctcagcagaaacccgcccagaaggtcaaggaccagcaaaagggcccatgcatcataaaagaaactgttttcatttcccagcgcagaggagatgaaaacaagcaaaacaaatgcaggggagggcctgcccccactcccgcccccaccccacccgctccctctgcctcatgagaacagccatcccttttacaggaattttacggccaaatcacttaatgtgattataataattatttctttgctagaaattgtataaacagcctcttttaaaaatctcctacagggaggcagctccagagctctgcagggaggaggggctgtggagggaaagcaggggagggtgagagtgtgtgtgtgtgtgtgagtgtgagtgcgtgtgagtgtgagtgtatgtgtgtgcgcgtgtgtgcgtgcgtgtgtgtgtgtgtgtgtgggtgatgagtgtgtgtgtgggccggtgcaagtgtcctctctgtacgtggtgtgcatacgtgtgtgtgcatgcatgtgtgtgcacgtccgtatgcctgtgcatgcactacgtgtgtgtgtacatgtgtgtgatgagcatgtgtgatgagtgtgtgcgtgtgtgtcatgagtgtatgtgtgcgtgcgtgtgtgtgagtgtatgtgagtgtatgtgtgagtgcgtgtgtgtgatgagtgtgtgtgtgtgagagccagtgcaggtgtccactctgtacgtggtgtgcatacgtgtgtgtgcatgcatgtgtgtgcacgtccgtatgcctgtgcatgcactacgtgtgtgtgtacgtgtgtgtgatgagcgtgtgtgatgagcgtgtgcatgtgtcatgagtgtatgtgtgagtgcgtgtgtgtgtgtgagtgtatgtgtgatgagtgtgtgagtgtgatgagtgtgtgtgtgtgagccagtgcaggtgtccactctgtatgtggtgtgcatacgtgtgtgcatgtatgtgtgtgcacgtctgtatgcctgtgcatgcactacgtatgtgcatgtgtgcgcacacatgcgtgtgtgtgcttggtgcacgtttctgtgcacgcctgtgtgcactgtgtggtgtccatatgtgattccagcgtgagtgtgtgtgagtgtgtgaggcttgtgtgtctgcattcagcatgcacacaccactctgagtgtcaagtgtacaccggtgtgtgtggtctcactgcgtggatgatgtgtatgcatgtgtgtgcacacgtgtggacctcaggcagggtctgagagactggaagttcctccagtttaaaggttgtgaaaaagttatggtttccatggtgaccctgggccagcctggcgcctgcacgggctctgcttgcttttctctgtgattgttcctcttgtcccccttaaccgtcctcagcttttagcccccactccctttctgggcaccctgctctgttctgctcctctgagagcctgaccttcccatgaggcctgcactcccttccttgaggccagcagaa

SEQ ID NO: 6217 - DNA, 2181 bp, Artificial sequence
  DNA replication origin
cccagggccaagtcctcagtttccccaacctgtaaaacaagggctagaaccaccgtaaggacagctctgctaaggacgaccccagtcccgatgaccccaaagccgcctgccacagcccagcctgcacctctgccccagggccccaccgggctggctccagccccgaacacccacagaagcccttgcagacccctctctcccacctcccggccctgtggcctccctgcagggtgtgagggtgaccgagaggccttgttcttgtgccccacctgggacccaccctgccgcctgccccacctgcagccgccgcttctcctggcctgccgcacgcacgctcgccaggtgctccaactccagcctgcggagcgcctccttctgcagggcacgtgctgcccgggcgctgctcagcgcgccctccacccggcgctggcctgtggggcaagcagggtggcttgaggggcccccatgcccctcccaggtcacaggcaggcaatgcagggctctgtggacttgagtgactggctcccacgtggaggtgggggtccatccttgcagctcaagggtcctggggctgccccagggtcccggcttcccacccatccttccctcctgcctctttcctttaattgaggggcaataagcagagaaactcgtgagtgtgaggcagtggggggcagaaggaaggggcctctctgagggggtgacgaggggcagggcctgcccggggagagccgtgtggctgtctgggggagagggtgccaggcagagggcacagccagggcaaaggcccccagtgggaactgcaggaggccagggtggggcaggggggcagaggatgctgggggccggatcgggagggccctgatgggcctgtggacgtcactcctctgtgctggggaagtcgctgctgagaactccgatgccaagcgctgacccagcctcgccaggcctggtggtttgggtgttgcccccaggctcccttcccaccgagctgccccagggactgaaagcttatagccggcagcagtggggacatggtggtgccactctcacagccactcccagggtgggcggggcagggcaagggaggtcaccttcttccgcctcagccagggctttctgcagctgccccacgcggctctgggcccgggcacacctgcactctgcctcgctcagccggctgctcagggtcgccatctggatgcgggagtcatcctgggcagaaggactgaggtcagcgggggcagtccaatgggcgggtggagggccaaggtgtctgctagagggtcggggccagctggggccgctcacggtctggcctgcaggtgtgcagggcagggcagtgggtggtgtgggccgtgggctcggggaaggtgcggggaaggtgatcacactgggaagctgcgctgacctgcaggcctggggaggtggaggcgcccagtgagactcggcctaaagggtccaggtttcaagcacaggtgtggtgtgggagagctggcaggtggcggcccacagcctgtggtcagggggaccggtaggggctgcccctggcgggacttggggctgagtgcagacgggaccctgccccctggggctggcagcggtgggagggtgggcccgaagggaaggagtgtgcacagaggaccctggccagggctcagggcctgcctctgtctttcccacagtcctgcccactggagtcatccagcgaggtgggagggggccgctcacgggtggttctgtgggagccctgaagccaggagcagccactggggagcttggccccaccggaggggtctttgggagcattgaggggagcttgctggctctgtcctgcagttgcccagccccggcagctcttcaggggtggcatgagttgcagaatgccctaccctgggccctggtgggtgtcacagcagggcctggctccaggggcttttcagcctggtataaggaagggggcggcctccagccacccaaggcacttgggcttgggggccatggtggtgctggtgtttatcacaacaaacaggacggcctggacactgaccctcagacccagggacgcgcggatggatggacagcaggtgttcttcccagagacccccggggggtgccgccgtgggcgggaggaccccagcccccattacccgctcccgctgggcttcccggagcttctgc

SEQ ID NO: 6218 - DNA, 1174 bp, Artificial sequence
  DNA replication origin
tgcagttcccactgggggcctttgccctggctgtgccctctgcctggcaccctctcccccagacagccacacggctctccccgggcaggccctgcccctcgtcaccccctcagagaggccccttccttctgccccccactgcctcacactcacgagtttctctgcttattgcccctcaattaaaggaaagaggcaggagggaaggatgggtgggaagccgggaccctggggcagccccaggacccttgagctgcaaggatggacccccacctccacgtgggagccagtcactcaagtccacagagccctgcattgcctgcctgtgacctgggaggggcatgggggcccctcaagccaccctgcttgccccacaggccagcgccgggtggagggcgcgctgagcagcgcccgggcagcacgtgccctgcagaaggaggcgctccgcaggctggagttggagcacctggcgagcgtgcgtgcggcaggccaggagaagcggcggctgcaggtggggcaggcggcagggtgggtcccaggtggggcacaagaacaaggcctctcggtcaccctcacaccctgcagggaggccacagggccgggaggtgggagagaggggtctgcaagggcttctgtgggtgttcggggctggagccagcccggtggggccctggggcagaggtgcaggctgggctgtggcaggcggctttggggtcatcgggactggggtcgtccttagcagagctgtccttacggtggttctagcccttgttttacaggttggggaaactgaggacttggccctgggggcacagcgagtggggggcagagccccaagtctaggccctttcttcttgctgaggccacagcggcaggcatggggcggccctggcccagccttggggctctttatagggtcacactgtcctgctccaagaccacttttcattccatgtggctcagacacagaaggggcctctcaggaagggctgaagtcagtgtccctacatgccaggctttgtgctggggaggtgcccgctgggtctgaggttttcaggtgaggagcctgggcctggaaatggaacggccaggcagtggtggatggaggcctggcccaggccttggtcctcagtgctggtggggagccccaggcccagccagcccagccccacaggtc

SEQ ID NO: 6219 - DNA, 2131 bp, Artificial sequence
  DNA replication origin
tggagtgagtgcctgggtgtgtgtggagtgggtgcctgggtgtgtgctgagtgcctgggtgtgtgtggagtgagtgcctgggtgtgtgtgtggagtgagtgcctgggtgtgtgtgtgtggagtgagtgcctgggtgtgtgtggagtgagtgcctgggtgtgtgtgctgggtgtgtgtggagtgagtgcctgggtgtgtgtggagtgagtgtctgggtgtgtgtggagtgagtgcctgggtgtgtgtgctgggtgtgtgcagtgagtgcctgggtgtgtgtgtgtggagtgagtgcctgggtgtgtgtgtagagtgagtgcctgggtgtgtgtgtggagtgagtgcctgggtgtgtgtgtgtggtggagtgagtgcctgggtgtgtgtgtggagtgagtgcctgggtgtgtgtgtgtggagtgcctgggtgtgtgtgtggagtgagtgcctgggtttgtgtgtggagtgagtgcctgggtgtgtgtgtgtggtggagtgagtgcctgggtgtgtgtgtggagtgagtgcctgggtgtgtgtgtgtggagtgcctgggtgtgtgtgtggagtgagtgcctgggtgtgtgtgtggagtgagtgcctgggtgtgtgtgtgtggtggagtgagtgcctgggtgtgtgtgtggagtgagagcctgggtgtgtgtgtggagtgagtgcctgggtgtgtgtggagtgagtgcctgggtgtgtgtgtggagtgagtgcctgggtgtgtgtgtgtggagtgagtgcctgggtgtgtgtgtgtggagtgagtgcctgggtgtgtgtgtggagtgagtgcctgggtgtgtgtgtgtggagtgagtgcctgggtgtgtgtgtggagtgagtgcctgggtgtgtgtgtgtggagtgagtgcctgggtgtgtgtgtggagtgagtgcctgggtgtgtgtgtgtggagtgagtgcctgggtgtgtgtggagtgagtgcctgggtgtgtgtgtgtggagtgcctgggtgtgtgtgtggattgagtgcctgggtgtgtgtgtggagtgagtgcctgggtgtgtgtggagtgagtgcctgggtgtgtgtgtgtggagtgcctgggtgtgtgtgtggattgagtgcctgggtgtgtgtgtggagtgagtgcctgggtgtgtgtgtgtggtggagtgagtgcctgggtgtgtgtgtgtggagtgagtgcctgggtgtgtgtgtggagtgagtgcctgggtgtgtgtggagtgagtgcctgggtgtgtgtggagtgagtgcctgggtgtgtgtggagtgagtgcctgggtgtgtgtggaatgctcacagaggacaagagagctgcctctcaggtgatggggagggggtgttgtacatagcaggctcctcctcggtgggcccagagtgacggctggggtgcaggctcccagaagctctgcctgcttcctggaatgccatttcctctttattgggctgtttccctatcagtcgacctggcggctgtgcgcccctcatctccccgcgaatggttctgctccgtctggtttcatgcgtggaagccaggtccacctgcgtccagggtccgagctcagtggccaggaccactggatcacccacccgccagcagggtgcctccacctggcctcacctctgcggcccacccctggacacagtggtctacgtttgtctgacctttgggcttggaaaccctgtcttgcaccggggaggccgggggatgacaggactgggtgatgaccgtcacttcaccccttgaccactgagctcttcctggtctctcaccctgtctgcccaggccctaccgggagctcaggggccactatccttgtgagcgttgagaggggaggttgtggggcacctgcacaggctggcccacctgttgctccagccgcagggcacacccctggggaggggctatctccaccatgagcaggggcctctggggctctggggtgtgtgatgtgtcaggccactcggtttccagcaaagctgggctcagacactggagacaaagccggggatttgcccccacccatggtgcctccccagggagagccaaggcagggcgcacacgacaccactggcagggctgtggccacctgcgggcgtcctgaccctgagcttagtgccacccc

SEQ ID NO: 6220 - DNA, 1533 bp, Artificial sequence
  DNA replication origin
agccccagggccgcggccaccagcagcgcccaggcgacgccgtgccgcatcgcggaggtgtgcgggcgggacggggcgctggcggagcagggcgctgggggactaggctgcgcgcgggggtggccggcagggccaggcggggtgcggggagcgcgggcgcgcccgctggccgcgccgtcgggggctccgcgtcccgcgcccgttcggccgggccgcgctctcgccgcagctccgcagaggaaagcgccgggcgggaccgcgttcggggccagccccgcccctggggccacgatttaaatatccagcccggcggtcactcgggggggcggggccatgcaaatcgggcgtctcttaaagcgccaggccccgtgggagggcgcgggcgcgcggggagctcagtcccctggcgtgggcacaggcaaggtgagggctctgcgggcgcgcgccctgtggtggggccatgctccgccctgggtccctaccctggtggaggcgcctgggccctcagtgccgtcctgggacagacctgtgtccctaaggcctgagacgctgggcccgccctgaaggcgtgtcatcacgcggggggcgggaggggaccctggccaggcagtgcctgaatgaacccgttccgtgctgcccccttcccagccctgagcatggggacgccaggcttccagccacaggggcagactaaccccggagcccactccctgcctgggtctgtgtgaggaagagcccgggccggagactaggaggcatggaacaaagtgtttgcatctgcgtggccgcatcaggagaaattcctgggaggctcgggacctcggggcgacccctgggtaaagcaaaccctccgtggggaagactgacccactcaggccctgggggcaagtgcgtgcatgacaccggccttggcaggtgggggcaggactctgagtcccagtatttgaattcagggtccccaccctgtggcctgccagccctgccccctgtctcttgggctgctggcctgggctgcctgtctgtccttcctcagggcctcagccgggaccacctctatgtccccaggcccatggcagggtctgattcctggaactcacccggcccaccgtggtctcttctcttagatcctggtgttgggtggtgttggctgcgtgccacactggggcccccaaagataagagtgcacccctcgaagacaagcaggaaaggccgggctgatggtaactgcatctaccactgaggtgctgggtggttttttgtttgtctttgcgtttgtatcttctgaaatatctcaagtgagcacgtgttgtttttcagtgagagccaggcacagtcaatgttatttttaagaagcagcggagggttctctgcgtgtgactgggtgttgccggttctcacagatcctgcacttggtgttttcactcagaggttcatgaccctttagacttggtgtcagggccgggtgcagaattgttaaggaggagctgaccctgcactggcacctcctgaaagcttgcccctggcgcctctccc

SEQ ID NO: 6221 - DNA, 1055 bp, Artificial sequence
  DNA replication origin
gtttcaggaaaaagctccgatggagataaatgttttgttagcagccagaaggttcatttctgacgaaaccctagttctcctagcagatcttcccacgttagagctgtttcccctagttgctctggcaagggcagatgtttttggtgaggctgttaagtgggttaaccattttaataatattttcacctgtgactgtgagtgggaaagctgagcctggcccaaatgcttaaggagcctcttgagttctgttcggatggtgccaatgtgagtgtcccatacctcaagtggacaggcctcctccagctcgggccaacgctgagcaccattctgtcctacccacttcgtacttccaggagtcagtcccgttcctctgtccaagtcccggtccagagggactttcagggggtagcaccgacagcatggctgcccctcccaccagtcaggtcacccagtgctgccaccgaggtggggaggccttcctgagcaggtgtggaaaacgcagtgggcgctgtggatggtgttggcagttgtggggtgggaggcgcactagagggcatgtggtggaggaggccctgtggatggaggtggggagggatgatgacaaccatgcagaggatgtggatggtgacgacgggaagctggggaccatggggaaggtggtggtggaggcagtgctgctggtggtggggttgaaggaggtggtgttgacggaggagttggcagtacaggtggtgttactccgggcagcacagatggcagaggcgatgtggctggcagtgggttgaggctggaggtgggcgagggtatgagagggctgatggtggaggtggccgtggtgacggagctggaggggactctacttgaggctggcccagcagttttctagatatgatctggggtgtttcagggaaccaccaggtaccagtgcaccgtggcctactcagggcgagtgctccatgcagttaccaggtgcatttcattccctgggctgccataagggcttggcctggggtcacactctgggagccatggagacagaaccggcactcgggcct

SEQ ID NO: 6222 - DNA, 804 bp, Artificial sequence
  DNA replication origin
cattcagacaacaagcctactcttggtcaagcgacaggctgggggcggaggagcgcagaggtcactgcagtgggatgggggctggagggtcctggctgggcctgacatgggagtctgagtccagggccagcagacacgaggcccctatagactggagctggacaagggccagagccaggggcctcagaagagggtccgctcggcctgggtgggcgtgggaggccccaggcaggtccacttccttcagaacaaatgcctcccttctttccacctggcttcagccctaacctgctgccaagcacccctttctctctccctgcttgaccacagagtccgcacagttacttcaggcaaggtgtcctgggcaacgcagcctcaagcctcctgctgagcaaacagaaaggtgaagtgcactgcaggcactgtgtccacatcggcaaatggttttcaaataatatctttgtttcaggaaaaagctccgatggagataaatgttttgttagcagccagaaggttcatttctgacgaaaccctagttctcctagcagatcttcccacgttagagctgtttcccctagttgctctggcaagggcagatgtttttggtgaggctgttaagtgggttaaccattttaataatattttcacctgtgactgtgagtgggaaagctgagcctggcccaaatgcttaaggagcctcttgagttctgttcggatggtgccaatgtgagtgtcccatacctcaagtggacaggcctcctccagctcgggccaacgctgagcaccattctgtcctacccactt

SEQ ID NO: 6223 - DNA, 1001 bp, Artificial sequence
  DNA replication origin
tgcaggtcctgcatctctgtgtggaaaagctgactcccaggctaaggctcaccctgtcagggaaggtgggactgcttctgctttggggaacacacggtgcagaaatgtgctggtggccaagaccatgagcccaccatgtggatgtggcacaggaggacttactgctcagggtgcaggcatcttgctgcatgcatcctctggcctcagcaggggtggaagagagagtccttcaccagggcaccaccaccactgcagccccaggctgtcgtctgaggcctattctgagcccaacaccagaatggtggcatgaggatggatgtggtccctgccttcatggggtgcacatcccaacacctcccaaacaagaaaactaaggagcaacccagctgaggtcagaaccaacaagctgcagtgagcacagagggtggggctgggggagtgcctgagcggggggcccgggggagggcggaggggggcagggaagcgtagcggggattctggcgaggagagacaggatcccactggtgttttgtatggctcccttggtcactctgcacagaggagggcaggctggagggaaaggccaagagctggaggtcagcaagggggtgctgcaggtgtccaggcaagtggggatggacagctgggaagtggtccaagtagagaggcaggcggagctgctgctgacgtggagggtgagggagaggagggaggcattggggaggctctcaggggtttattcatggagatgggtgggcgccagggaggaagcaggacttctgtttgggtcccactgagtttggggtggcacagtaagaggcagctggacgcaggagtctgaaggcccctgaatctgcattctgagcctcggtttcctcatctgcactgggcatgacgtcctgctccatcctctcaggggctgcctgtgaggtccaggcagatcacagctgtcctgggctcatggccttgacctggagtcatcaggctctctcactccagca

SEQ ID NO: 6224 - DNA, 905 bp, Artificial sequence
  DNA replication origin
aggtgtgccacggggttggaggtggggcgtagtaggggtggggggcggaggcgcgtcacggggaggggagtggggggtggaggtgcgtcacggggtgggtggggggtggaggtgcgtcacagggtggggggtggggggtggaggcgcatcacggggtgggggttggggagtagaggcgcgccacggggtggggagagcaccgcgcgctcatgggaagaggaaagatgcagtcgcagggcgggaagacccatctgagggctgcaggtggtgccgcgacgaaggaggcccgaggagcccgagctacccacacactggggcacgaacaggcccccgcttgcatctgagcttagggagtccgggctcacggggcggggagcccagagcggccgcccagcatccgagggacacagccctcctgcagcccccagccacaccccctgcgtggcccgccttgtcccagaaacgctgacatgacggctgagtgccagcctcgggttttccacgccaggaaccctggaggggaggcggagtgtgccagtttttagacctgtccacggcagcgctgagagggatggaggggacggggtgctggtgtgagtcgcttcagggagtccgccccacacgaagccacctccccagaggccacgccaacagcaccgcccctgctcccctgctcccctgctccgacctaaagtgaaacctgaaacctggctgctttgctgcggtcacccgggcacccagaggccgaccttttgggtcaggggagggaagggagatgcggatgggagtggctctcctgccgagtccggaggcagcggctgaggctccagcccctccctatgtctgcagcgtccgtgtgcctggccctgcgcccctgcctcaacggcggcaagtgcatcgacgac

SEQ ID NO: 6225 - DNA, 1202 bp, Artificial sequence
  DNA replication origin
gttctccacaggaagggcccagccattgccagagcctgggcagaaaagaggacaggcaagcaaagggcccacctgtgactgagttggggtctccagcctgtgagccccaccccagcccccaccatgtgtgcggacctgcttggcccctgctgcagccaggccccagggcttcgtcgagaaggccccaccagcaccagaggactgaggagatgccaggagggtatagtggctctgtggggccagcagcctggccccgttcatctgcctctctgtccttccacacagcccggccacacctgtgcagctcagggccctgccggaacgggggcacgtgcaaggaggcgggcggcgagtaccactgcagctgcccctaccgcttcactgggaggcactgtgagatcggtgcggcccccaggggcaggggggagggcaggaacgacgggccagccctgagctggggcccctgatgcaccctccctgccagctgtgggtctgcttctcatgaagaggccccagctctgggatgttggggaacgtgggaggggcagtgggctgtgaccctgacctggcttctgtttccagggaagccagactcgtgtgcctctggcccctgtcacaacggcggcacctgcttccactacattggcaaatacaagtgtgactgtcccccaggcttctccgggcggcactgcgagataggtaaggtgggtgggaggccaggccagggcggccaggggtgaaccctctctgcagatgtgaaaacaggcccatgggcagggctggtccaggccctggaggcgcaggaggtggagctgggtgcaggaggcaggatgccccacacagtcccgagccttcagggaagacacagtggccaggaccttcctgcattctggcagccccctccccctgcttccggagcccgtgtgtgaatgggggcacctgcgaggaccgggacacggatttcttctgccactgccaagcagggtacatgggacgccggtgccaggcaggtgagagggtcagggggatcaagcagggtacatgggataccagtgccaggcaggtgagatggccagggcccaagcagggtacatgggataccagtgccaggcaggtgagagggccagggggccaagcaggatatatgggataccagtgccaggcaggtgagagggccggggggccaagcagggtacatggga

SEQ ID NO: 6226 - DNA, 884 bp, Artificial sequence
  DNA replication origin
atgggcagggctggtccaggccctggaggcgcaggaggtggagctgggtgcaggaggcaggatgccccacacagtcccgagccttcagggaagacacagtggccaggaccttcctgcattctggcagccccctccccctgcttccggagcccgtgtgtgaatgggggcacctgcgaggaccgggacacggatttcttctgccactgccaagcagggtacatgggacgccggtgccaggcaggtgagagggtcagggggatcaagcagggtacatgggataccagtgccaggcaggtgagatggccagggcccaagcagggtacatgggataccagtgccaggcaggtgagagggccagggggccaagcaggatatatgggataccagtgccaggcaggtgagagggccggggggccaagcagggtacatgggacaccggtgccaggcaggtgagagggtcggcggggggggggggggtcaagcagggtacatgggataccagtgccaggcaggtgagagggccggggggccaagcagggtacatgggatgctggtgtcaggcaggtaaggcctggggggcccaagcagggtacatgggatgccggtgtcaggcaggtgagatggccggggggccgagcagggtacatgggataccagtggcaggcaggtgagagggctagaggggggtcaagtggggagcgtgggatttcttgctaatccctgcagagctgggcaaggcaggaatgggaagaaggaaacgtatcacggcaaccaggccccagaagtcgaggcacctttccccggtgaagggcagtgtgggagcaggacatccctgggccctgcagtcgggtcgggcagaggcagggcggtggggaggggccagg

SEQ ID NO: 6227 - DNA, 918 bp, Artificial sequence
  DNA replication origin
ggaatgggaagaaggaaacgtatcacggcaaccaggccccagaagtcgaggcacctttccccggtgaagggcagtgtgggagcaggacatccctgggccctgcagtcgggtcgggcagaggcagggcggtggggaggggccaggaaggcacaggaccgtgcgagacaggctgccgtgccttgcagaggtggactgcggccccccggaggaggtgaagcacgccacactgcgcttcaacggcacgcggctgggcgcggtggccctgtatgcatgtgaccgtggctacagcctgagcgcccccagccgcatccgggtctgccagccacacggtgtctggagtgagcctccccagtgccttggtgattctgtgggcccttggggtggggcaggtggggcccacaccctcctcatcctggccatgtggaggagcacaggggctgcaggcccaagcctggatgcccagctctgacctggtcctgcccctgctcccctcagtctcctgtctgtgaatgtggaccttggggtgacagtggtgatgatcacagtcaactttgctctggggcattcactaaaggcttccccatcctcagagcagcccggagcaggaggtcaaacacccaaatacccactctgcagatgcagcagctgaggccaagaggtagcccaggggcagagtcctaaagagccagatacggattcaggacctacctcttactcctggccccttgaagacttgtggaatcagaacaagatcccccttccccctgcaggcatttgaggagtgctgctccagagagcattgccactgaggtcccacccctgtctggcttgggagctgggagtgcacagcctagagacaaggctccctctgaccgaagcccctggagaagtagggccattaacaccctgcaggtgcat

SEQ ID NO: 6228 - DNA, 2108 bp, Artificial sequence
  DNA replication origin
ccgtcggaggagacgtaggtgaccgcgtagccatcaagcatctgcctggcggctggaccattgggcgggttccaggagatagagaccccactctcctccactctctccatcttgagggccgtcggtgggaagagctcttcagggtttgggtcaaaacaaggggaggggactggtcagccgttagctatgcatgcctggctcccgtcggcggctcagccgggtctggctcttgggcctgacacagccatcgctggcagagtccttctttgtccctggccacgtacctccaggagggtcacacttttgaatgtgtgaccgtgtttcaagcccaccgggggattttatcccctccctgttcctcagggaaggggcctgggcaagcagcggccagacgctctgcccttggagaccgttgggccctctagggagaggggaccccctcgtggctccctcactggaggcgccctcgccacccacctttggcgcagtcctcgcccgtgtagcccactttgcaggtgcagctgtgggagccgttgctggccaggcaatagccacggcccccacaggggctggagaagcaggggtcactcactgaggggagaaaaagtggcagtgtatgttggggcgtggccaggggtccctgctccagccccgcccttgctcctggggcactgggtccctcctgcgtgggtgtggaggggcggggggcacaggacagctactgcctcccttcggttctgccacctccactgccctgcggggcccaacccagcagctcctccaccctccacagcggagtgccaccagccggactggctgaggggaggagacactggatcaggacaggacaggccaccaccccagtgacagtcctgcttgaggaggggaggtcagtggtcagggaagcctcatcaggaggtatcccactgggggctgattagggagaatgttccagatggaaggacagccaggggccagacctgggtgtgcaagaaacttggcctgtccaagggcagcagggcctatgtgtggacgtgaggccccacccctgggtgtgtcctcgggtgaagaggggtgtctggggggtgagcgcaggagatggggaggtttagaaggcaccattgtgggaccaagggagacaggcggagggccactggcctgagaaggggacttccaaggcggcgggcagagggcggggagcaggcgggcagagggcggggagcaggcgggcagagggcgggcagcaggcgggcagagggcggggagcaggcgggcagagggcggggagcaggcaggcctgccgccctacctgtctcgcagtggtagccgaagaagctctctgggcagacgcacaggtaggccccgccgccgctctcacaccggcctccatgctggcaggggctggagtcgcaggcgtccacctctggagaacacccagagagtgggcccaagctgcaaggggggagtctgggggagggaggagaggacagcgggaagaagggaaaggaggagtctaggggcggaggccaggagagaggggcagtgggcaggtcccgcccctcagccctccccagcaccctcacctccacccctccctcccaaggtggccgcagccctgggggtccctctccccaggtggcctgcccagcagggaatgtggggatgccccacctcctctctgatcttccagaggcccaggctctgcatgtggggcccactggagggagcccctacctgtctcacagtggactccaacgaagcctgcagggcaccggcagacataggcccctgggaggttcctgcaggaccctccatttctgcacgggtgagctcggcactcatccctctctgcacagagaaggggtgtcaagggtgttgctggctcaagtctgaggcgcccacatgcccccaggattccgtgcatttcctggggcttcagttacccctttcccagctgggagcaactactcaggacatgtgctttttcttccatcagccccaaacccacccctcctcgggaggcgtgccacctccactgcctgctggcaaagccccacctccaggccatgccttcctccaggccactccgcaatgggaggctccccagg

SEQ ID NO: 6229 - DNA, 1052 bp, Artificial sequence
  DNA replication origin
gattgagccaccgatgcctccccttagcacacctcagcgcctacatatccctgtgagcaggtgcctctttcaaactctccccaggccttcagagcaccccagagtcccagcccccccaagcccacccccgcggcccctgtctcccacactggctccttctagggacccttttgggaagcccccattcctccccagtcccacttcctagctccatgcctgggggttgtgctgctcccactcttggctcgattctatgcgccccaatcccatgcctgtatcttgtggacccaaggccactcccacacagctctgtctccagcagggcggtgcctccaacccccagctcagctgtctgtcttgctgctgcaagaactaggagggtggacggcatgacagccgccctgcaggtgccggggccagcgctgccctcgaggggcaggggctgggcagggacggccaggctcggggacactcacgcgtgcgggccagcagcacggcaggcctgctgatgtcattcttgttgttactgtttcgcttcactgagaagacggagatgttgtaggccctgccggccgccagggcctggagctggtgcgaggagcgggtcctgtccacaaagtctgtgcggcggtaggagccgtcggaggagacgtaggtgaccgcgtagccatcaagcatctgcctggcggctggaccattgggcgggttccaggagatagagaccccactctcctccactctctccatcttgagggccgtcggtgggaagagctcttcagggtttgggtcaaaacaaggggaggggactggtcagccgttagctatgcatgcctggctcccgtcggcggctcagccgggtctggctcttgggcctgacacagccatcgctggcagagtccttctttgtccctggccacgtacctccaggagggtcacacttttgaatgtgtgaccgtgtttcaagcccaccgggggattttatcccctccctgttcctcagggaaggggcctgggcaagcagcggccagacgctctgcccttggagaccgttg

SEQ ID NO: 6230 - DNA, 2451 bp, Artificial sequence
  DNA replication origin
ggagccaggcatgcatagctaacggctgaccagtcccctccccttgttttgacccaaaccctgaagagctcttcccaccgacggccctcaagatggagagagtggaggagagtggggtctctatctcctggaacccgcccaatggtccagccgccaggcagatgcttgatggctacgcggtcacctacgtctcctccgacggctcctaccgccgcacagactttgtggacaggacccgctcctcgcaccagctccaggccctggcggccggcagggcctacaacatctccgtcttctcagtgaagcgaaacagtaacaacaagaatgacatcagcaggcctgccgtgctgctggcccgcacgcgtgagtgtccccgagcctggccgtccctgcccagcccctgcccctcgagggcagcgctggccccggcacctgcagggcggctgtcatgccgtccaccctcctagttcttgcagcagcaagacagacagctgagctgggggttggaggcaccgccctgctggagacagagctgtgtgggagtggccttgggtccacaagatacaggcatgggattggggcgcatagaatcgagccaagagtgggagcagcacaacccccaggcatggagctaggaagtgggactggggaggaatgggggcttcccaaaagggtccctagaaggagccagtgtgggagacaggggccgcgggggtgggcttgggggggctgggactctggggtgctctgaaggcctggggagagtttgaaagaggcacctgctcacagggatatgtaggcgctgaggtgtgctaaggggaggcatcggtggctcaatcgggaagagccgtggggcaggccctagatggaatgacagacccagagcctccacctggagctggcactgaaagctgtgaccagatgtgacccctgaagagggggtcctaggaggagcctcctcagagcctgagccaccaagattgcaggggaggcccgggttgtgcacagcctgtggggttgttgccgtgtcggggagcagaagatgctgagcgctctagggaaggcgtcagggcttagcgggcttgtgtgctgctgggagggattctgggaaggagaaaggagccctagaacatggcagtggacggacaggggcagggccggaagaaagcagagggctggccttccacggagcccggccgcatcagctagagcacaggggatctcggaacaggctgggcaggaaccaagtggggtgcagggccatggggccatgggactctcacccaacatgcctgtggcctccagacacaggagcaagaatggggaaggggtgctagaggctcgaggaaagaggaaaaggtgctgagagcacagactgctgcgaagtggcgtgatggatggatgggtgggtgggtggccagggcttcagggaggcctaagcatccagcagggccctgcggggcggccacgtgagtttggtgaaacctatgggtagcatggcgggtaggtggggaggagctcggcggttctcacaggaggaaagcctcctggccacacctgggccctagcttgatgccaatgccaagggcattgagggacaggagaaggcattcaaggcagcttgagcccacccagaggcccacaagggcctgtcctgcaggagttgaccaccaaggggctggagttcccaacacagcaaggacacagagcacacctcggccagtggagagcctgggcgcatgtgcgggtggcactgagcaggtgtcagcaggagctgccaggggctgagtaggggtggctcgcctgggctgttttaggaagaagcacctgcaaggccgccccatgtgagatctgccctcggaaggtatctggagtgaagacagagcccgccctgcccgctgcagagttggggctccagccagccatggtgggtggaagggaccgctgtccacagaccggggtgctgagttgccgggagctgagcgctgccctctgggctctgcctggtgcatcagcagtggcactggagcttcggaggagactggctgggcgggaagcggagctcacaagtggccccttccctgcagttgctgggagttctgtatgtctgtcctcctaagacagcgttgcccagaccaggcccggatgtgtgctcttagaccaaaatagtcaactggcacagaaaaggggaggtccgggttactcatgtccagagggactccggcccatcccctgccatgtcactgccacatctaaatggagactaagacccctgcctctggtaagacgggctggcccacagcgggctctgcagccgtcatgctcacagcgggttctgcagctgtcagccctggaggccagagcctgggcatcccactcagcccgagttccctgagcagttgatgggacaccctctccagtgcctctctgtggcccccagcaccctcccaa

SEQ ID NO: 6231 - DNA, 949 bp, Artificial sequence
  DNA replication origin
tgggtatccctggcccagtgaggtcctctggccctctggtcggtgtccagtaggaactccatgctgaggagctaccaggagcctttagagatggagactgccctggacagctgtcccagcacaagggcccagcccagcccagcggctcctgcccagtggccccagcggaagagacatctgggaggccaggggctgggtttctggtgttgtggacgctttggagaggactaggggaggctggaaggaagccagagcttctagaagacggcctttcgtgtgccgggggccgcgctgctctactcacgggtccacacgtgcgtcggcgcggtggccaggctctctgtggggtgctcctctcccctgagcccactgagggtggtcagctggatggtgtacctcttcccaggcagcagggccctgtgggcaggaggtgacaaagagagaacagggatgtctgggacctgtgtgtgactctgctgccagaccgcagctcccccaggcaggaggtgactgcggggaggtcatcctgctgctggtggcccaggcaacctccacgaggggcagactcatggccctcagagccgtgtgctcctagggcgggaagccaacccatagtccgggcagcggaggaggatcgggtgcgcttggggctgctacagtatggtcagagggccggtgttcagctgggagaggccagagaagggggaagtggtcactgtgcagggatgggggacgggccctcagcacaggtgagttgatgtaaattctcaggaaaccacaggacaacgtgaggccaatgccaccccagccccaggaagctgctggctggagtcttccttcccactcgctctccgatcttttcctgcacccctgcctgcgctgagcacgattcggaagctttctctttggttggcgaccaaatcacaggggtccactgtgggactcctgg

SEQ ID NO: 6232 - DNA, 1146 bp, Artificial sequence
  DNA replication origin
caccagccagagcaccaagagccgctatgtccccaacgggaagctggcgtcctacacggtgcgcgacctgctgccgggacggcggtaccagctctctgtgatagcagtgcagagcacggagctcgggccgcagcacagcgagcccgcccacctctacatcatcacctgtgagtgccgtgggccctgcgcgtgggcggggccagtgtttgccagccctccaccctgttcaggactgacctggccctgcaggggcctgggatgccaggcagacagcctagaaacaggaccgtgttagcaggggaggagtctgtgtatgaaagtggaggcttttcaaacccacaaggaaaggaaggactcatgggcaggtggcaccaacaactggaataataagcacattgagcctcagtttgtgccggaccctcccgtagatcccagacaggccgagcatcacctgaaaacgggtgccgagggtggcagcgaggaggaagcccccggaagtggcctgcattgcagcccaggcctgacccacgaagagccactggacacagacagacaaagggccaggaggccacaggcaggggcctgcaaggcaggcaggaatgctggggagcagaggcacagggcagaagccgctcggagtggggacagatgctccgaagggctcaggtctgctcccaagtgcaggggtggcccttccaggctccaccagggtcccgaacgccccacttaggtcttccaagttcacagaaggagcagtgggaaaatgcaggagcagaacagggagagaagaaagagacggagacaagcagggaggagaggccacggcgggacagagcagagcagtgcgcggctccccagggaagagagggctctgaccccaggctcctccccaacccgtgaggctgtgctggggacacgaagtgcataagcttgccgagttctcagacccaaccctgccacccccaccagcttggggccaagcccaccagccaggcagaaggggcaggctgggacctctgtgagccggcgtcagagtgagagggagagggaaggggaaggagggcccagcctgggaggctgaaggacgctgttagggtgacagatgcaccctcactctcagggcacatgctggggtggggactccca

SEQ ID NO: 6233 - DNA, 1250 bp, Artificial sequence
  DNA replication origin
ttcttactttagagtatgtgagaacgctgttctaggttaggctattttacttagggaattgcagctttgctcgtgcagtttactgagctaaacgcggtttagctggtggaccaagaatcatggggcagaagtctgttggtgcctcctatgtccagattccgttggtgcctcctttgtccaggcaccccaaaggactgggccatggtgaggaaggaagcgtcacttgcctttcaggggctgtctgatggaggcacttggggagacagcaggctgtgtgcttgaagttggggtagacctggaaaatggggaagtggggcatagagctgcgggaaatggtggctgggagtctggtctccaggtcaaggagcacttcgacactggagtaggagggtgttggagctgagcttgtgcactggagtgtctgagggtgtagagcggagggccctgtggagagtgcccaggatactgcagggaggggtgggctgggaggcacacagcgcccttgggagtgggcttcacccaggcgctgatcaggaatgttctcagtgagtgttgacaggtgtgttccttttttggagcatcattctggtggctgcatgaggagcaggggtgggagccggaggtacagggccttgagacatgagaaggagctgcgcttggtgactgctgtctggggaagagcaggggcgagagtggctggatggccacgtggtttccagcctcagagaatggtcggggtcaggccactcactgagaaagtcaggggtcctggctggaggacatggaggggaggggatgggagagaaatggaagggtcaggtcttgagtgcttggttttgagcactggaagaatgtatctggtgtctccagagatggggaagcaggcgagtgggccgtgggaggtccaggctggaggtgcgagtgtgagagtcttcagtgcatttctaattagatgtatttaaagctaccgaggaatgggtgagatggagccagggtcactgagaggtgggaggtgggggagcccaggtgcccgaggagggtggtgtgggaggagggtgaggcctgaggaatgacggggctgagggttttgggagccattggaggcgttgctgagagaacgctgcacaaggagctcttgaatcgtaggaacgcttccaaggaggaggtgacggggcagccaccggagtggccatggggtcttggaatgactgacagaggacagaaggtgggaaggaaggaacctttgagtg

SEQ ID NO: 6234 - DNA, 872 bp, Artificial sequence
  DNA replication origin
gggtcacgccaagccggctacacaccacggaaaggagcccttccgcgcttttatcccaccgaccaatcgcacagcgactagcaccgattgacaagctccacggaccagccacttgcgcgtatgggcgggactaagctagccagagtctagaagcccgcgctaagggttgctagggacgcaccaaacacccctacggcgcttcggaggagccaaaggaataatgggcgcctccgcccccgggccgggcagatgcggtttcctcccgactcgcgatcaaaatgggtgagtagcgcagagctcgcctcttggaggcctctttctgaaggcggaggacgcggggcggctcgttcatgggccgggtggctccgcagggtagacgaaggctgcagcgtccgcactgggctgggaacgacttgcaaggggagcccagctggcgccccggagccagccagctggctagcggccccaccagcgcaagtgccccgcacctgcccgcctgctccgagcgtcaagagaaggcggcatttcgcatgggtaaaatccgcgcggggacgccgggagaatgttgttgctcttgccgttcggcccattgtacagacgcagccagcgaggctcgcagaggtcagggatgcacgtaggactggcccgcaccttgcagccacggaaagatccgcctggcccgcggcccctccacgcctccgaggtcgagacagtgacataagtcaactctcaagcccagggcgtctctccactctgcctagacgtccactccgtctgcctgcagctacggctctgtgcgtcccgcttcgactccctctgctttccttcccagcttctcgcctccagactgttccggctccgccgcctgaaat

SEQ ID NO: 6235 - DNA, 995 bp, Artificial sequence
  DNA replication origin
agcctgggctcctgccctgcctcctaactcgtctctgtgacttgtcttgccctgcttaacctattctcccctgccagagagtctgatctaattctaaaatccaaatctgatcttttgagtccaaaagtatttctggaatgctcttcctgagtttgcatcttgctgctagagatgcagctttggcaaatcgtttccatttgaaagcctcaatctcctagtctgtggaagggagctagtatagcacctatgcctcagcaagttgctgtcacggttaaattagaaaaggcacaagagcagttagcacgtgcatgacatgcagtagatatataacaaattagtcaccaccaggcacaggtcacttggtggtccaggctcagggagagaaagttctactgcatgacaatctggcacaaaaaccccagtaagaggaggagtggtgtgaggttagcaaaggcttagctaacgaaggttggccaaagtgaagcctgagggcagcagagagggtctggaacatgggacagtggctctgcatgtaagaaaatgactttggtgtactggggatgatgggctggtgaacagggacaatcaatctagcctagagatgatgaaggtctgagttaaggtactggcaatgggaatggaggacgtatcggagatttggagatactttcaaaagtaaaagtcagagctccttgactaacaggacatgggtgggagtgggacagtgagaaaagccgggcttttatatctgtcatttaccaagacatggaaacagctgaagagggagtgggaggatatgaagaggcgcttcttaaaaagactcaaagggtatgaagtccaagacccttaacactaccgcccccatccccaccacatacgatttggtcaaactctcctccacaccttttgacagcagttttctccgtcttgagtgattcttgctcttttccctcaccctatccccaacctcgttgccttcgagttattcttcaggc

SEQ ID NO: 6236 - DNA, 1206 bp, Artificial sequence
  DNA replication origin
ggtgcaggagggcaccagggctccctgctgcgcaccccacccggccccaaccccagcccctgccacacagtcctcagcgccattccactgcaggcacgtctcgacttaccactctaaactacacaggtgaacacttggtttgcatgctagttttataaacttttaatttcaatgcaaagtcaaaggaaggtgaccaaactttccacaggcaaatttgaatttttccaaaattttatgcaggtgttggtgaaatttactgctgccaactaggccctggggttgaggcacaaaggcctttaatgagattgaaacactatgtttatagaccaatctggttgtatttgctggcaatttaacaaaacagaaaaaaacaagtaaaattgaatgagaaaaagtcttttatttgtcttgaacaccgcactggggcagagcagggtgagctggaggcagctgaggagggtgggggctctgtgagcacacttcccctcagtacgtgaggctgtcctgcacctgagtgagaagggccggggagggagggaggagcatgaacaggtgaggacaggtgtggaaagcaggcagggaggaatgggggaggaggaagctgctcatactgtaagaagaggaaggggctgggactgagagctggtcctgtgctctctgtgggctgggaagtaggggctgaggccagtggacccatggacaggtcagtggcctaaagggatgccagtcaccctcatacagggccctttacgagcaggttgggtttgtttttttcaaatcttgcaaaatgcctgcagtgcacagtgggtgtgcaatggatgctgccccattgaggaagcctagggaagcctgtgctgaaatcccacataaagcgtcagcccttcaaggcacactcagggcagagggccaacaggcacacacagctcctgcacttttcagtatgaggaaagggtcccttagtttttaggatgggaaggtctttctgataaacctccagaggcagggcatcttcctgacaccggcccgagaggccagtgtgtgctggctggccaggtgcctgcccgcctggtgcccaccgcccacacagccccagacagacagtgggtgtcttacattgttctccaggccctcgatgacctcgatgccattgtggctaaggtacagctcccgcaggttcaccaggttctgcagaccctcgatcttggt

SEQ ID NO: 6237 - DNA, 1397 bp, Artificial sequence
  DNA replication origin
ctccctcccctcctgcctcccgactcctttcctggtttctggagcacttccccagtccagccctcgtccagggatccacctcaggcgcctgcaggctgagcttggccaagcagagacctctcatgcagatgccctgaggcccagggccccaaggtcctgccgcccaggctctgctggtgctgacagggaacccggcctgcagggccttcccgctgttccgaggcacaacacaggtccaagaacagggccccttgggaggtgccaagcacagaggggcataggtataagggaaagctgcagccaggatgagggtccgcctggagggatttcaacaggcagaagggggcacctggaacagcaagctgagcttggggctccccagtgcagttgtgcatggagggcgaggagcacgggtggtaggttctcagacactgccaggcaccaaggaggaaagggggagggggagggagaggggaagaggaggggcggggagaaaggataggaggagaaggaggaggagagggagaagtggggggagggggagaaacaggaggaggggagtggggagaaaggaggagaaggaagaggagagggagaagtgggggggagggggagaaacgataggaggagggggagtggggagaaagaggaggaggaggaggagttggggggagaaatgataggaggagagggagaggggagaacggataggaggagaaggagagggaggagtaggggggagaaacaataggaggagaaggaggagagggaaggtggggagaaaggataggaggagggggagaaaggaggagggggaggagggctaggaggagaaagaggagggctaggaggagaatgaggacgaggaggagggcggaaaggatgggaggaaggctaggacccctcctgtccttttgcagatggggccctgagcatgggatgtgcctgaggtcacccctcaggcattagcagagccagcagtgtgatctgggtctcccaatctccccagcccccgggtgaaaccctggcccaccactcagcacatgctacgtaacctcaaggagcctcagtttccccccacataaacagagcttacgaggtctgcctggcaaggcttccagcagaggtggcacttgtggctgttcctgtggaatcccacctcctcgagaccctccaaggcagcaactatgacagctgatgccagccctgaaatctctaagcaaataaggttcccaggaggacggcagcatttgcatgcgggtgtgtgaaagcccagccaagtgggctgcctctgtctgcagctctgagccccacaccccctatttaaacaaagatagatcctgctccaggagccgggaagccttgccctggccagctgtgctgggcacctcccctgc

SEQ ID NO: 6238 - DNA, 738 bp, Artificial sequence
  DNA replication origin
ggcccaaggaggaggggagccggctggaggcccagggctggtggtgccctctggccctgcctgccgctccccgcgcctgcgcatcctgtgcccccacacagcagaggggcttccccctccaccccctacccacccgccgaacattcttctgtggtcctgagtgttctggggcagggcggggacgggttggaggcgaggacggcttcagggtggggcggggtgggtgtagttgtcgagggcagatgctgatgctgatatgcttctccatcctccatgccttccagccaggtggacagcaagcggccgcctgcagagctgggagtcctgccaagccccggatcggtgagcccctcccagcacctgtaccacacccgtgttggtcctgagggtggggacaccacgggggtgcccccaggggcagcaggctggggtagcctcctcagtagccactctggggccagttgcttggggatggggcactggggtgagggcctcggggtgagcaaaccacagtgggaagaacagcaggaaagggggctccctactgatggggtggggccggaagggctctggagagtggacagggctgccccctccctcctgctccagtcccctccaccatcctccagctgttcagccacaactcaggtcatttctgactcttatctcttgcactccaccccttttgtaccttcaaaatctctttgatccacccccaacccactgcctctgtctgcc

SEQ ID NO: 6239 - DNA, 1416 bp, Artificial sequence
  DNA replication origin
gggtctctcctgactccctccccgaatgtcactggcccatgaggccctggggcaaccccaggaacttccatcctagggaggtcgcccctgcctgggtccaggccaagcctctcatctcctccaagcaggccatctgccccaggcaaccccagagctgttcctcctgggtcctggctgccctcaccccactcagctcttggcaccctcccttccccatcctgggtcagacccaaccccttcattctgtgccccagaacttccaaagccctttctcatccgcacacacagccccaccgtggacccagacaatagagccagccagggcagcgggcggggccggcaggcatggaagggcagccggggcacagcatcggggcagagggacagctcctgtgtgccaggactcacccggccatctcaggacctggagcagcaaccctgggacagcacggccaggctgggggcttctgggggcaagcagggccagggctggatctgggctccaggcagacttgcgtttcacagcagtcactttggccagcagagagtcaggcaggagacaggacaccaggcctgggactggactagccctatgggaggcagtgggggtacatgctgagggcctggggtaactgagggattgcggctgtggtcagatgaggcaggggccagggtgggggttgggtggtggggagggaggtacccggaatgactcgtggtttccctggggctggaacacgggtgggcccacagctctgtggtgggcaggatgtagagggacttctctgtccgtcccgggcaggttggttggagtgagctggctgaggagaaggcatccagaggtggagagcctggtgggctggagccccagcagcactggtgttggggtcaatgtggtaggggtgtccagagtctagggcagaggcccaggagggtgggccgtgccagagctgccagggagagctgtgtacctcttggcctcctcacatagggccccagcccccaagctgggctgagggtggtccctaggggacaagcatggctgtgcagacccctacctggggcccccaagcctgggttcctgatggtggacccctgccatcctctctacagggttttacacaggctggctcctgccagcggcagtggtgggcacactggtgttcctggtgggctgcttcctggtgttctcagacatacccacgtgagtgttccctctccgcagctctggggcctggtgctgggcctccagatgggtgtggggcggggggacccctaggtgctaggtcctgtgcagacagctggtgcttgaggtgattgaggtgtgaggtgagcacatgcctgtcttcaggagtgtcacagagggccttgtggacatggctgaaaggctggcaggtggacaggagtgctcccagg

SEQ ID NO: 6240 - DNA, 847 bp, Artificial sequence
  DNA replication origin
ccccaggaagctaaagggctggtggcagaagttccggcttcgctccaagaagaggaaggcgggagcttctgcaggggctagccaggggccctgggaggacgactatgagcttgtgccctgtgagggtctgtttgacgagtacctggaaatgggtaggagcccgttagcagctgcggcaatggctggcgccgtgggcagggatgggtggccactctgctcaagggcctcccagcctgacattcctgtgtctgcatctgccctgaaatgtgctgtgggggtggggtgggaacagagggtcgggcctgtggagaatccagaaaggaattcttttcccctgagagtgcccaagagggttggctgaggacagaggggcaccggcacggggaggaggcccccgcggccgttgcagagctcccctggggtccctggacctagaaagcatgggccagagcaagggaagaattaggagagcaggccctgggggctgacagaagtcctccaagggtgaagccacagtgggaggcagcggcctggagagccaatgttcccagaaatctcaatgcccacgctatttgcagacctaccactgtcaccttaccaggtggtggccagtgccaggggctcactgcctgcacgggtggtgcactctggagggtgggtctgtatcacctgtgccgtccctgcagtgcagggtctgactctgagctgacaaaagggagaaggaatcatcaggcagtttgtttgtttgtttttgttttgttttttgagacggagtctccctctgtcgcccaggctggagtgcagtggcgccatctcggctcactccaacctccacctcccaggttca

SEQ ID NO: 6241 - DNA, 953 bp, Artificial sequence
  DNA replication origin
ctcgtaggggcggggcgggggggcggcgggggcgggcaggggcggggggcagcgggggcgcgcaggggcggggcggggggggcagcgggggcgcgcaggggcggagcgggggcgcgcaggggcggggcgggggggcagcgggggcgcgcaggggcggagcgggggcgcgcaggggcggagcgggggccgcctcgcgctgacccctccggcgcccaggccttcctcctggccttctcgtccgacttcctgccgcgcgcctactaccggtggacccgcgcccacgacctgcgcggcttcctcaacttcacgctggcgcgagccccgtcctccttcgccgccgcgcacaaccgcacgtgcaggtgagccccgcgccaggtggagggggccgcgggcgcacgaggacgaggcggagcggggctcgggtggggtgggggtgcggcggtggggagccgggaggggcgggcgccgccgggcaaggccgggggagggggggagctgggggcgccgtgggcaggggctggggggaggttccccgcggtaagggacggagctttgcggggctggagggcaaatcgtggattctaggtgaattgctagttggtcatagtgtagcaggacgagtcgcagacagaactcctcagacaccggattaaagaaggaagaggtttttttattcggccgggggcgtcggcagactcgtgtcttcagagcggagctcgccgaaaaagaaattcttagccctttgaagggcttacaactctaagggtctacgtgaaagagtcataatagatcaagtaagcgtgaggaacgtgactgtgggctacatacatcagctaacggtacaaaaagttttacggtgctttctcatacagcgtctggaattcacacataacaccagtagttttggtcaggggttaatattattgttattttaaccgccagggccaggtggt

SEQ ID NO: 6242 - DNA, 1127 bp, Artificial sequence
  DNA replication origin
cgccgtgggcaggggctggggggaggttccccgcggtaagggacggagctttgcggggctggagggcaaatcgtggattctaggtgaattgctagttggtcatagtgtagcaggacgagtcgcagacagaactcctcagacaccggattaaagaaggaagaggtttttttattcggccgggggcgtcggcagactcgtgtcttcagagcggagctcgccgaaaaagaaattcttagccctttgaagggcttacaactctaagggtctacgtgaaagagtcataatagatcaagtaagcgtgaggaacgtgactgtgggctacatacatcagctaacggtacaaaaagttttacggtgctttctcatacagcgtctggaattcacacataacaccagtagttttggtcaggggttaatattattgttattttaaccgccagggccaggtggtggcgccaaggtcatctagctatttatcttctgtttctttccagctttttgctttcttccttttctcctgtcttataaactagggaaaaggggaggttggggagaaactgggaaggacaacaggagaagtggtggcctcataccataatagaacctgcagagcaggtagatgtacttcacccgcagttgtggagacttcctttgtgatctggttacaatgaagttttgcatgtgtttcaataaacttgaaaagcatcatagtctcctaatgttggagcaaatctcagcagtaaaattacgaaaccatagggttatcagtcttttcatatcggtctctctcaggttttgcttttgctctatgtattttgagctttttagttgtgtacgaattcatacttgtgatctcttcataatggatacttactttttccttttattctttatcttttttattcctcctctcctgacttctggtggatgggtaaaagtgttctggttgttttttttattattattcttttgcttatttggaaccgatggcatatatttctattattttaggggttactcatatgtttagcatacattcttttcttttttctttttttttagagactgggtcttgctctgtatcccattctagaatgcactgccacaattatagctcactgcaccct

SEQ ID NO: 6243 - DNA, 905 bp, Artificial sequence
  DNA replication origin
gggccggctccgagtctcttctgcgcgtggccgtggcgcggaggggcgcgcacaaactttctcaagtccggtggcgccgctgggccgctcttggctgcaagctgggctcccccgcctcctcccggggcttcggtggggcacccctggtgccgtggccgcacggcgcggaggggcggccgacctgagcccaggtcgctgacgttggcggggccggccctcccctcccccgctccggcgggggcgccgtgtgcggccagggtgggggtccctgggaggccagcggggtccttccccccaggtggcggcggggcgggggtctgggcgcagaccgggcggcggggcccccgcagcacctccacctgccgcgcggggcccgcgtcagtctacgtgttcgggggtggggaaagctgctcttcttgggcctggagtgcaacttggacgtgccccagggtcgtggatgaaaaatacattacggaaaagtaccgaatttggatgaaaggcggggaggccgaggggttgctgtccctttaagcctgtccccgcccgcgggccctcgtggcctgtgggagggccgtgctgaggtggcatctgcgaaagttcctccatgcaggatgggtgccgacttccagaacttggtgagaagtgcggagcggagcctgccttctgctcgccagtcgcctgtggtctctcctagatttcgatcttgtgatctctgagtggatcaggattttattttcccattctgaactttggtttgtggtcttgagtaattttagttttggaagaggagaagtctgggtttcagccggaggcttttttggtgccctccatacccggtcctgtctggtgctttaaagcacttgcgggtctcattaactgaggctgaaatgaaattcttcctggag

SEQ ID NO: 6244 - DNA, 1528 bp, Artificial sequence
  DNA replication origin
cttgagaaagtttgtgcgcgcccctccgcgccacggccacgcgcagaagagactcggagccggccccaggtctggcccggaaccgccacgcgcggtaagcaggacacccgcgggcgggggccgcagcctggggcccgggtgggggccgcggcacccgggcccctccccctccgcggcctccacgtcagcagccaccccccacccccccgcccggcagcccgcccgccccgtccgcccgcccgcccaggcctcccagccccgtgttgcgcgctcactcgtgggcccccgcccgctggtcctgccgctggcttactcgccccccgcgcgggagaagccgggacgctccgaggcgcggcgcccgggccccggctgctatatagggcggcggcccaatcccgcctggacacgtcagcgcccgcccgccccgccgctggggtccccgccgccccgggccgcccagcacccgggaggcccacccaactgcaggcgtggttctgcatccttttttcgggtggggaaggcggtgccgaggagttgggaaattaatcacctccagaaagcagagggagcgcgccccgcaagaacccgagtggaaacaaccgaagaccagaaagggagcaggaaggacggctgctctggaagcagatgtcaccagtaccgcccacctccccaaaatcagaagaaaaacctcaaaggatgcccaccacatcgtaaacggatggccacactggcacgaggtcctacagcgcagtgaggctcccaggcggctccagggctttcattccctcattcctgcgtgcctattccttatgtccctcacttttataaactatccccacccgattccttggcaatcaacttaatctcccccccaaaatgtaaaatccccttcctttaaagcgtgtattacttatggctccatctctacatagatgtatacacgcaaaagaaccggtgtgtggcctctgagcccacggtggatacgcaggactgggcggaacggaatccctactctcggggtctccaccctccgggaaggacttgtcacttctgcatccattgtgtttactaagtgataactgccactgtttcttttaagggtataaagggagtcgagcaatctgtagagatgtcagtctgaacctctggcaaagtcgcaggtcaacagaatcctgcatagggcacaggatcaactacaggtatctggggacaagaccgtcccacacaggggaagaggtaggggcacacccagccttacccagggaatggggtcaggtccgcacagcctgcagccaggccacgggtgctgttgaggatggtgggagctgggtgggggctgcaagcagcagaaggcaggatcagacgtgtttttttttttttcgtggaacactgacactaagtggcaggggaggggagggcaggggaggcctactatagttcagtctaaagatgacaatggcttgcattatggtgggcataatggaggaaataaatggccagatttggtatatattcagaaagaagcacc

SEQ ID NO: 6245 - DNA, 935 bp, Artificial sequence
  DNA replication origin
ggagccttcgcctctcctcctgtcctccaagaagatggcggcagcaccgagctggggcgccgagtacgactgggcgggggacggcgagcggccgcgcgaaactcgtctagcccaccaccgccgccgtctcgatgatcggggggcctctctgggattggctgcgcgcacgtcacgtggggccgacgggccctgcgcagaccatcgagtcgggcgtccctccccggggacgtggccttcctgtgcccgggctggggcccgccgccccgcgggggagggcggagctggcgcggcccctagctttctccttctggtgtggggcccgaggtgagacctggggagtgctccgcgagcccacgagcagcgacgtggctcggggacgggagggtgccgtgcctggctgcggcctgagcgggatgggcgcgggcggctccggcccgcgggttgtgccccggcccggggtgtcctttcctccctcccgcgtggcctggaggcactgcaactgttcgagactcacgtcaaggcttggcgcaaatacccctcgttcaggaagccttcctaggtttcccccgcttagaggaaacacttcctgagttcctaatggctgacccgcatggtgttgggaacctgagcctttctgacaccgtggcatgttgctagggtatttttgtgcgtagctcctttgaaaagtggttaggtgctcaaggctagctgctacatatcctctccattcgacttaaaaaatgagagggtcagacttgacatggtgtttggacgccatgtaaaatcgaaggaagtcgacttgggctttgcttattaaacagtgcctattatggtgaaattaaacggctgaaggaatgtggatgagtcgtaatcttaaggaacatgacgatttgcccctcagttttgcgttttatgtcctcagattcatagctacc

SEQ ID NO: 6246 - DNA, 1632 bp, Artificial sequence
  DNA replication origin
cttgacctccccccccacccccagcctctatatggccaactgccgtgggaggagcacggcgcttgcgcagaggcggacaacgcggacgactctgggcttgcgcactcggaagccggccgcatgggggaggggaagaaggccaggtcgcactgagccaggaagcagttggcaaaggggcggggtgacgcggtgacgcaatccgcctgcgcgctgggcggggcggggcgggctggggcgggctgtgagcggaccgcgagcgctgggcgggtccgcggcgcggtcggtcggcgcctgttctcgggctgtttggcgggtgagtgtctcgccggtgtaccccgcacaagttgtgggccggccctcccgaggagctgcgggggacgcgccgctcgtcccatactctcgggcggtggtcggctggctctggggtgccggcggggcggtgtgggggaggggcggccgagcccaggctcttcggcacttatcgtgggctcccccgtcccgggcggtcctagtgccggcgacagtggctccgacacgggcaggcccgggcgcgggagtggggattccggtgaccccttgttgaccctgcgggaattcctctgcactgtcgtcggtgctgggcctcggggcgtcgagtgcggtcgaggtcgggaggtttggtgcttggagggaggatacaggtttaggcccgacaaacacttagagcttgtgtggccatcttgtctttctaacggtgccatttcctccctgaggcgtggaggactggccagcccccaaacctccaagcccatcggctggatgccgtggataagcgaggggagagcgactaggccctgtctgcgggtaccttcggcgaggagaggcgacgaaggtctgcaccagcgaggcacggacaggcagcagggggtagggtatagggttggaggccgccgagttggcccggggatgaggagcaaacctgtggcttccgtggtctcagtggagtcccaactgtgacctggcctactggcccagacaaacctggcttgcttttttaccttttcggtctaattcttgtcagtgccaccagaccttgtcctctctccacggaaacacacgaaccaactacactgaacttcttgtagttcaaacttctgcacctttggccattgcccaaactcttaaatctggctacttcccaccttaactgccttctccttacctagtctgtgcttgtgggattccgcccaaattagatttcctccagacaggcttaggtgtttacctgatgttccagatggtatttgtccagtggactattggtgctgtgagggcagggcacatgttgtcacccatactcattgcctcggttggtgtctagcacctagtaggttctcaaatactttttgaatcacagtgcctgccgatatatttaatgtttcaaaatagttctgccgtcataaagaaaaacatcatggtgtaggggtcatgaaagctgattcttgatacttctgatttgagcctcattgttttcagtgatttttgatagctcccattaatgggttctttgcaccacccagcatcctaactcatgatgtgtactgttatgtataatcttggcattgatctcattagctataaaggttgtcctga

SEQ ID NO: 6247 - DNA, 1687 bp, Artificial sequence
  DNA replication origin
agaaggggcgggagcaggcaggcagctgcgtaggatataaatctgtgcagcgctcggctcgttgggcggggcgtcggcttgctgagcgaggcaatgtcctaggcgaagccaaggctcgctgggcggggctagatcttgggcggggagtcggctcgttgggtggggctaggtcctgggcggggagtcggctcgctgggcggggctaggtcctgggcggggagtcggctcgctgggcggggctaggtcctgggcggggagtcggctcgctgggcggggctaggtcctgggcggggagtcggctcgctgggcggggctaggtcctgggcggggagtcggctcgctgggcggggctaggtcctgggcggggagtcggctcgctgggcggggctaggtcctgggcggggagtcggctcgctgggcggggctaggtcctgggcggggagtcggctcgctgggcggggctaggtcctgggcggggagtcggctcgctgggcggggctaggtcctgggcggggagtcggctcgctgggcggggctaggtcttgggcgaggtctaggctcgctgggcgcggataggtgctgggcgaggcctaggcttgctgggcgcggataggtgctgggcgaggcctaggcttgctgggcgcggataggtgctgggcgaggcctggctcgctgggcggggataggtcttggcccgggccttgccggctgtccttgcaccctttggctcagtccctggctgccagcctcctccttcctccaacgcattgcatccctcgtgggactacagggaccgaaggggatcatcgaaggatcgcgcgaggctgtgctaaggctgagacaggctgctccgtggtggcggccaggacggccttcctctggcctagggacccccacccgagaatggaagactgacttgctgtggcacacttcccttctcttgagaagttcattgaactcctatgtgttcttcaagaccctacccatcgtgctctcctagcccggccctgtcacccactgtcaccatgtggctgttgagggaataattaacttcaggaaacacccgggcacttaagagactcctcctatggtgctgtggattccagagtgaaacctgacccttcgtttcccagaagcccagacaggagaaatgctggctcaggggaacctccatttctcctgagacaactatggggtctgagacccaggcacaccaagactgggctcagctgtgcgggatgctcccctcatgtgccacccacctctggggcttttcctttaaccaacccccaatgacaccaccaggcccagagtggtgcacacaccccagaacagaggatccctgcctgcagacgggcagggccgggtggggatagtgcaggtgagagcctggccagagggtggtactgacccctggtaggatgcagggtgtgtgctggtgacctgaggctggcagtctggagggaaggcagcaggcgtggcagctgtcagctgaggaactagagagagcaagtttcagtatccaggggtctgtctataaggaagctcagaaaacactgatagcaaggtaaaaggggcccaaggtggtcctgggatgatcagtccagtgggcaggaagaaggctagaggccttggagtgtaggtgtccagccacccagatcaattcaggtttccagtttcctttact

SEQ ID NO: 6248 - DNA, 1236 bp, Artificial sequence
  DNA replication origin
ggctccgccctggcgccccgcaggccaatcgactgcgcgtccgcgtcgcgggggcggggtcagggcggggcgcgctgcgcgggggctgccggcgggcagttgggagcaggcgacgccgacgcgagtctggcggctgctgcttgcgactgcggaggccgggcgaggccggtgaggacgcggcgggcgagcgagaggccgagggtgaggacgtgaagcggcctgggcgcgtggggcaggggtgggcctctccgggtgggcggcgaagcccgaggcccgaggcgagaggcccaggcggggggggcgctgaggccgcggtccaccagagatggtcccgcccggcctctgaaggccatcgtgaggcggctggagctcctaggcgggtccgggttagaggagcgtccgtctgtagggagcctgccgcgtgggggcaggcggggcggtgggccggggagtggcccgcgtggactcccgggttgaggggtgccgcgtggaggaggccggtggggctgtagaccggggagtgtcccgcgtggactcgcgggttgagttgtgccccgtggaggccggcagggccgtgggccggggagtgtcccatcccggaaggacaccccagagtgggccatagggacccgcagggtatgggcctggaggtgcctggtggaggcattttgagccgtttgcctttttagcatttctttaaattgtatcttaaaggtgggaatcaagtgttaggtgttaatatttttactccactaagggctagaaatactcataagccagtgggtagcctttgggaaacccatgaaaactggggaccagaatatggcccagtacattacacacccgaattacgggcaccttttccgtttacgctatggcagcaacccctggcctatcatgtgccattaatggatgtgaaaagcagaaattagaacaaggcatcattgaaggaaagattgtcaatacatagtgttaaaaagggatgggcaaatttaaaacccaaggccaaatctttaaagggtggtttttctctctgggtttttgtttttgttttgtttccgtgggatatttttgtctgggccactgtgtaaatgtttgataaccctgaggtggcagtgggttagcgtgttggtcttgtgtagactgccttataacaggcgacacagattttctcagtaccagagagatgggagaggacatttgaggtagggaagcatggagtaacctttacttgta

SEQ ID NO: 6249 - DNA, 1531 bp, Artificial sequence
  DNA replication origin
ggctcatccccactcctgagccctgtcctcagtgatgctggcggagccgggatggactgcgaggagcccagacacaaggtgggcccctcgaggctgagaagctagcagagggttgcagggtgggcctgttttcactgttccttcgggtggtgctggtggggaccctggggcggggcagggaagggctctgcactcacagccgccttaccagcctcctgagcagagaggaggtactgggccgccttccctagcaaaaccttcctgagactttcctcttatctctgggactccaggttccttcgtacaaaaacgagtttccttattcatttagcaaacggtccctggaacccacaggctccatgtgtcaggctggatcttccagcctcccccactcttccttccttccttcccaccttcctcatttctccctcccgtcctccctcctttgctcctttcttctctccctgcttggtcaagcttctactttgacaattgagtaactgggaggaaagatctgggtgctaagggagggtgcactagggactgctttgggttccggagaggctcttgggcaggaggcccagtgtagaaagatctgggtgctaagggagggtacactagggaccgctttgggttccggagaggctcttgggcgggagacccagtgtagaaagatctgggtgctaagggagggtgcactagggaccgctttgggttccggagaggctcttgggcgggagacccagtgtagaaagatctgggtgctaagggagggtacactagggaccgctttgggttccggagaggctcttgggcgggagacccagtgtagaaagatctgggtgctaagggagggtgcactaaggaccgctttgggttctggagaggctcttgggcgggagacccagtgtagaaacatctgggtgctaagggagggtgcactagggaccgctttgggttctggagaggctcttgggcgggagaccccgtgtcgatgttggagacagtggaggagccacctggggcgagggggcggttctctgctgttgtggcacggggaggggggcacatgggccacagacaggggtgaggctttatgacaaagttgaggcagtgtcccctatgggtctctttttatcagagatgataggaataagggcacaaactgagagtctgcagggagaaagtgaccgagcagagaagctcactgctggcaggcacagggcaaccaggggcagggatgctgtggcctcagggtggcctccactctcctagcccaggggagtctgcctacagctacggttttgcagatggaccctaaaagaaaagactcagggtccagggagtttgtagactatattgggcctggagtccacagagaagggagacatggggtccctgagtggcagctggatgggaagaggccatggggcctctaggagggagggagtcagtgctggtacagggggaggtatgtcattgtgacacctcagcactcctgctttggcccgaattggccagaggatattct

SEQ ID NO: 6250 - DNA, 870 bp, Artificial sequence
  DNA replication origin
cttcttggaaaatggcctttggtgtgcaaatgttaccagcctcttggtcttcctgagaacttgaatagaattctcttggacaaaagggagtacatttgttggggctggcagaagccagccttgcaattttatttatccttcattttgatgagagtttccaagggtgctggatgttaagtgtatgttgttgatccattctatcatgcacctgctctgcctactgctgtgggggaacctgttctgagggggacccttttctgaggggactcagttacgaggggacgtggctctcagggggtcctgttctgatggggatgcgctctgaagggatcttggacggagggggacccaattctgaggggaccctgttctaagaacactgctctgaggagattctgttctaaggggaccatagttggaggaggactctgttctaaaggggacagtgttctgaggggggactctgttttgagggaaacactactctaagagaaccttcttctgagggggacccttttttgagggggacactgttctgaggggactcagttatgagggagatactgctctcagggggtcctgttctgatggggatgcactctgaggggatcttggactgaggaggaccctgctctgagggaggggtccatactctgaggagactctattctgtggggaccctgttcttaggaggatactgtgctgtggggactctgctctcaggtggatgctgctctcaggggaccctgttctgaagagatgctgttcgcagggggatgctctgagaggaccttgttttgaggagaccctattcagagggggaccctgttctgggtgctcactaccctgagggaactcttatgtgagggg

SEQ ID NO: 6251 - DNA, 905 bp, Artificial sequence
  DNA replication origin
ctgttttgagggaaacactactctaagagaaccttcttctgagggggacccttttttgagggggacactgttctgaggggactcagttatgagggagatactgctctcagggggtcctgttctgatggggatgcactctgaggggatcttggactgaggaggaccctgctctgagggaggggtccatactctgaggagactctattctgtggggaccctgttcttaggaggatactgtgctgtggggactctgctctcaggtggatgctgctctcaggggaccctgttctgaagagatgctgttcgcagggggatgctctgagaggaccttgttttgaggagaccctattcagagggggaccctgttctgggtgctcactaccctgagggaactcttatgtgaggggaatgttattctgggggggacactaccctgagcggatctcgttctaagtggggaatagtgtcatgggggaacatgttctgaggaggatgctgttctgaaggggaccctgttctgtgggggattctgctctgagaaggaccctgttctgaggaggattctgttctgaggggtctctgttctgacgggggtcctgttctgagggggatgttcttctgaggggaccctgttataacgggatactgttctgaggggaccctgttccgagtgggatgccgttctgaggggaccctgttctgcggggaatactgttctgagggggacgctgttgtgaggggacactattctgaggggatgctgatctgaggggaccctgttttgtggggatcctgttctgtggaaaccctgttctgagtgggatgctgttctaaggggaccctgttctacaggggatttgattctgtgaggaccgtgttctgtggggaccctgttctgagggggt

SEQ ID NO: 6252 - DNA, 2181 bp, Artificial sequence
  DNA replication origin
tgttctgtggaaaccctgttctgagtgggatgctgttctaaggggaccctgttctacaggggatttgattctgtgaggaccgtgttctgtggggaccctgttctgagggggttgctcttcttcttttttttttttttttttttttttgtgtgagacggagtctcgctctgtcacccaggctggagtgcagtggcaggatctcggctcactgcaagctccgcctcctgggttcatgccattctcctgcctcagcctcccgagtagctgggacgacaggcgcccgacaccacgcctgtctaattttttttgtatttttaatagagacggggtttcaccgtgttagccaggatggtctcgatctcctgacctcgtgatccgcccgcctcagcctcccaaagtgctgggattacaggcatgagccaccgcgcccagccggggttgctgttctacggagaccctattttgtggggcatcttgttcttgtgaggacgctgttctgaagggaacctgttctgtcaggatcctgttctgagaggaccatgttctgtggggaccctgttctgaggggattatgttctgtggtgatcctgttctgaaggaatcctgttgtgagcaggaggctgttttgaggagaacctgttatgtggggaacctgttttctgggaacactgttctgagaagaccctgtttggagggggatgccattttgaggggatcctgttctgggggggttctgttctgtggagaccctattctgagggtagtgctgttttgaggggaccctgttctgaggggaccctgttcttagggggatcctgttctgagggggatgctgttccatgggaaccctgttctgaggggaccatgttctgtggggaacctcttctgtgggaaccctgttgtgaggggattctgttctgtggtgatcctgttatgaaggaatcctgcttggattccttgagatgctgttctcaggggaccctgttctgtggggattctgttatgtgggggatgccattctgagggggatcctgttcagacggggatgctgttttgaggcgaccctgttctgagggagattcttttctgtggggaccctgttctgaggggaccctgttttatggtgttctgtggggattctgatctgaagggaccctgttctgtggggcatctcattctgtgaggaccctgttctgtggggaacctgttctgagaggaccctgttctgaagggaatgctattctgaggagaccgtgttctgtagggattttgttctgtgtagacgctgttctgaaggtgatgctgttttgaggggactctgttctgaggggactctgttctgaggatgctgctgctctgaggagaccctattctgtgtggattctgttctgaggggacccttttatgtgggagatgctgttctgaagggactcagttctgagggcaccctgttctgaggggacgctattctgaatgtgatgctgttctgcggggaccctgttctgagagggatcctgttctgaggggaacctcttttgagggggatgctgttctgaggggaccctattctgagggggatgctattctgagaggaccctgttctgaagggatccttttctgtggggaccctgttctgagggggctgctgctctatgtggcctctgttccaagggtgatgcagttctgaggggaccctgttgtgagggcattatgttctctggggaccctgttctgaggtggacgctgttctgtggggatcctgttctatgaggactctttttctgaggggactctgttctgtgggggattctgttctgtgggcatcctgttctgtgtggattctgttctgtgaggacccttttctaaggggaccctgttctgtggtgaccctgctctatagggaccctgttctgaggggacccttttctgagtgagatgctgttctgaaggtaccctcttctgaggggaccatgttccaagaggaccctgttctgtggcagatgctattctgtgggggccatgttctgagagggacccttttctgagggaccctgttctgcagggggcactactctgtggagaccctgttctgtgggttctgtggagaatgtcaaggcaggtcaggtgatgtataggatcattatcgtgccatcaggtccaaaatgtgtcctgagcttccag

SEQ ID NO: 6253 - DNA, 1433 bp, Artificial sequence
  DNA replication origin
ctgaactgggcaccgagcgcccctggtgtccctcgcagtggactgacgccgcaggggcgagctagccggctccgcgcctctccgcgggatccagacgcctcctggggctgctggcggagggtctgaggcggcgcggccatggctcacctccggggatttgccaaccaggtgagaagggtgcaggtcaggaagactagcggcctctcaccgaggggctccagagtctcctgggggttcagaggggagcgccacgccggagcgggcagtggggtgagggaaggagcgcgcgtcgtgcgaccagcggagccgtcctgaggtgggcgcagggcggccccggggctctgccgtgtgcctgtggcgttttgcgtggcagaagctcgcaggcctctagaaaccgagcccctggtggctccgcctgtgcgagggcggtggaggtgcgtgaagagacaccggcgcagggacggggcgctgcccccagcgcggggcgggaacctcatgtcagcatccgaaggcagtggaaggtcgggggccaccctgcggcctcggcctgggccgcgggtcattctggccgtgttgggctgggcaggggctgtaggggagaccctggcgggcgctgaggggctgagattgtggagaagcagatctgagtggccggtgtgcagggaaagcagagaacacgtgtgtgctttggcccaggggagggtgaaaaggctgctctgtcaggaccgtttaacccctgcgacgggcggttgcccgaacatgagactcatctttcttctttaaagaagtcgtttccactatggagccacctttaagcgtctggtgggacagcctcggagggagccactacggcgagcccttagcctggaatgaggaccagctgctggtgccaaagggcttgccggggaaggagggtggggtcagccaacctggggcctggggacttgcattctctacccctccccacttttttgactctggccgctgggttttcttacatcttagctgttcggttttattctccttgatgccttggctctacctaaggcgttggaatcgccgctaaaatgtgtggccctccttgttcactcctatgtgctgaatggagagttgggcctgcagtggaacaggaagggcgtctgttcgcgtaggggcaggaactggagtcagggctgctttggaggaaaccggaccagcctagagacccggaacaccatgtgcagctgttgggccaggcaacctggacctgcgtggtcacagatgagactggggcttgctgactgttgctgaattaagctaacagatttttggtttgcttttggcattctgtatctggtaacttacatgactaaggtgctgggagaaaaatctgccaccagtttattttactttatttttatttttttgagacggagtttcgcttttgttgccca

SEQ ID NO: 6254 - DNA, 1361 bp, Artificial sequence
  DNA replication origin
ccccacctgccccaggcacccgtctccaacaagggcacttctgccctgtggggccgctactgcgctcttgaagccgggagcttcgcacctgtgcgcagagaagccccgcccctcccagcggccacgccccaacaaccacgcccccacgcgtggccccgcacggtcctcgcctcggaggcagccccacccctctcttcggtcctctcatgaccacgccccttctcaccccgcccctggtgacaggccccgcccccgccgcggccccgccccacacgaccacacccgcctcggccccgcccctcgcctggccccgcctttcatggccgcgccccgcccctggccgcggccggtgtcgtcctccgtgggcgccggggctgctgctttccttggcgtcgcgagcgagcggtggacttgccggctgggtgcaagcagggcgggcgcggagcggggctcatctggggcggccgggccccacctgcagccgagcgacggacggcaggccctgtcctcccacagggacacctgtcctttcccttcgcaggcgttctttttcttcagctgtttcccgcttcctgagatctggaggccttctttttgcacaaatatgttgttttgaaacactgggcattgttctgaggcttcagtcacggcctgcagccaaacgcaactcgcatttcaaccgagcgccccggcactctggggaattaggggagcggatgaaagatttaaaaatccacggtcactgtgcagagataaggaaatgtgattcgtgtgtggctctgaaacatgacttttcactgaacgtcgcgtcctgggcatgttcccaggcgatccttcacattcctaaaggcctggtaatgcacccatacctggaaccccgggccaccctccagagtgacctcatcctcagcactgcctcagactcagacacccgaagctgcagaggtgggaccccgcatcacaagtgggaaggcgaggcctgcctggggtgtggactcccagctgctggaggaacattgtcctttggctcagaagagaaagccagtttctcttccggcctttccagttccagaggagcccccagggtgtccctggtttggggacagttcccacttacaagctgaaggagaatcccactcaccattggacagaggagaaacaggcccagcgaggggagtgcttgcctgtacagagtgagttggtggggaggtggataaaagtctcggggtgggagagacccccaggggtccagactgagcccacaccaggatggtcggacgacccagggccacctctgccccaggagctcacctgacaacccagggggcggtgagacctccttgttgggggcatcctccttg

SEQ ID NO: 6255 - DNA, 836 bp, Artificial sequence
  DNA replication origin
gactgaagcctcagaacaatgcccagtgtttcaaaacaacatatttgtgcaaaaagaaggcctccagatctcaggaagcgggaaacagctgaagaaaaagaacgcctgcgaagggaaaggacaggtgtccctgtgggaggacagggcctgccgtccgtcgctcggctgcaggtggggcccggccgccccagatgagccccgctccgcgcccgccctgcttgcacccagccggcaagtccaccgctcgctcgcgacgccaaggaaagcagcagccccggcgcccacggaggacgacaccggccgcggccaggggcggggcgcggccatgaaaggcggggccaggcgaggggcggggccgaggcgggtgtggtcgtgtggggcggggccgcggcgggggcggggcctgtcaccaggggcggggtgagaaggggcgtggtcatgagaggaccgaagagaggggtggggctgcctccgaggcgaggaccgtgcggggccacgcgtgggggcgtggttgttggggcgtggccgctgggaggggcggggcttctctgcgcacaggtgcgaagctcccggcttcaagagcgcagtagcggccccacagggcagaagtgcccttgttggagacgggtgcctggggcaggtgggggtacccgagggtttccagccacaaggaggggtgtggacgattgggggattggggccggtgcgtggtccgcgcagccctccgttccccaacagcagatccctgtccctcggccccgtccagcatctcgctctccagccccactctctccatcggcagaaccttcagaatgtgccgcggaagggaaggggcg

SEQ ID NO: 6256 - DNA, 1997 bp, Artificial sequence
  DNA replication origin
cgagggccacgcccagcccggcgccccgcgcgccccgttccccgcgccgcctccctccacccggctgagcgcttgtgcccgcaggtgcggcgccccccacccgcgtcgccgccatggaggtgctgcggcgctcctcggtcttcgccgccgagatcatggacgcctttgaccgctcgcccacagacaaggagctggtggcccaggccaaggcgctgggccgggagtacgtgcacgcgcggctgctgcgcgccggcctctcctggagcgcgcccgagcgtgccgcgccggtcccgggacgcctggctgaggtgtgcgcggtgctgctgcgcctgggtgagtgcgccctggtgggatccccagctgcgcctcctcccctgctgggccgcagcctccctccgaggccgagatgggggtccggcccaggggcgcccaccccctgcctgggacggccaggcgctcgggacagggccacccaggcgggtgctcccggatctgccctctcaggcctcccacgccacaggcccccccatcagctgcctgctcagcccagatttcagtcatgctggccataaacaatagaaagctccagaaagaataatctattagtgggtggctaagcttccacagtgacccttgttctcagctgggcacagaaaccctttgtaggagcacgtgtcccgatgtttattttggaaaacagattcttgctgttactggccgagatcccgcccgctgccctctggattccgaggcctccgaggcccccccattggaaactgcgcccaccgggctgggtagccaaaacctcagtattcgttggtgctgtgaggacatctgggggtgctcggttctggggtcacacacggtccactggctgcccccaccgtctccaaggtctggacccaagagggagggaccagccccactgtgactgtccagtcccctcaccacagctgggctgtggccgtcacctgggaatgtttatgtgatgcccgaagagggcacatggggcgcctgtggctgagcccgggaaggggaggtgacagcataggtgaaactgaatcggtggctctccaggcagggggttggagtcggagggcacgaccccgtgaggggacacgctgcctcctctcaggctggcgctggcatgggctctaggtggcccctgcccttacgtggtgggctgggcccagagagcaaagctgtgtagacctggcctgcccaggagtgtgtgtggggtgcagacagaatccatggggaccagcacagagcctccaggaggaggtggagtcccatctgagaagttcagaaggagggagaggtctctgggtgggagctagggggttggtggggctccatgagatccgccgcctgctgctgcctctagtcgggctctgagaatgaccctaggggatccttttagtggccttctgaaaagatgatgccagacccctggaatggctgggaagaagtcccagatgtctagggggaccccagagggacacagctcagacctgcatctgccctcacggctgctcagggtcagtcccttgaggccagcgctgtctccctgcccttgggcagtgcagacaggaagaagcccgggttgtgtccccaccttcagtctggggccagcctgcagcagccccggagatctgtgtttgggagctgccgggtcagtcctgggaatttccatgtcgtcccccgcccccagccagcctctcatgggctctgctctgcttccagatcttaattaatgagatacagagcagcctttatcagctgggatggtccggtcagcagcattaccctgtttgctttggctggagaactggccgggctgcggactcccaatcccagggccctgtggcattctcggcaccatctgccccgtgcctgtgcgctgctgctgccaagggtgccacaggcagcactggggcggtgggcctgtaggggccatcctcggctgccaggggcagggctgatgcagtgccacc

SEQ ID NO: 6257 - DNA, 978 bp, Artificial sequence
  DNA replication origin
caggggcccagccagcccaggtgggagcgtggcagtgcgggtggcccaggacagcggcccagccagcccaggtgggagcgtggcagtgcgggtggcccaggacaggggcccagccagcccaggtgggagcgtggcagtgcgggtggcccaggacagcggcccagccagcccaggtgggagcgtggcagtgcgggtggcccaggacagcggctcagcctctgcatctgagtggtccctgagccatgctagggcctgagccgggctctcgggctgtcccctgctctcaccccaatgctttctctgcccagcccctccccacgtcgggctcccctgctctcaccccagtgctttctctgcccagcccctccccacgtcggggtctggccgtctgcctggtccctcctgctctgggcagctcggctgcctgtcggctgtgagtcaccagcaggcacggcccacgctctcgcaggattcccgccccaccggcttggccggctaggcttaggggctggctcgtcagaggggcgggactgggggcgccttcagtacttccttggtcttctggtccctaggggccaaggttgggggatggcccaagggaggtcagatggggtcaagtggaggtgggaatcagacaagtgaggaacaggctggaattcaagcatggtcaggtgggggtcaggtgcagggtgtgccccaagccagtcgtgtcccaggaagctgggacgtgggctgcctctcacctgctcttgtgaccacacaggcgatgagctggagatgatccggcccagcgtctaccgcaacgtggcgcgtcagctgcacatctccctgcagtctgagcctgtggtgaccgatgcgttcctggccgtggctggccacatcttctctgcaggtatgcccagcctgcccgtcccatgggacctcagggagggatccagggtctgtggctcaggctcacagggaccccacgagctggcc

SEQ ID NO: 6258 - DNA, 1606 bp, Artificial sequence
  DNA replication origin
caggtgtggtctgaggcactccagcacatgctgtggcaacaagacaagcccggaggcaggaccagaccccgcctggactcccatccctggactcagccttcccgctccagcagcctgccaggtcgccgctgcatcccagccacagtaacttctgtccagggaggtcagcagtgagcaagcgtggcactggagaggccggattctgtcagaaaatgctcgcagcccccgccgccttggcctccagccgagggtgtcagccccgctctgtccccatctggctggcccaccaggggtcggaggagacgtctgggagaggagctggaggacaccccacaaaggtggggtctgcctgagcgagaggcagtggtcctcacactcctggcctcttccccttgccctccggtgggtggaggtcccgaggccatctgaagacccctggctctgagggtcaccccgtggcgtgggatgcatctcccacagcgagggtgtggcttcctctggcgcctgatgcctggctcctgctgctgtcaggactgcctggagacaaggcagctgaggccacagagatgacagcaggccacagtcacacagctgactggccacggacccacaccagctcccagacaagggtgtgcaaggcctccctgctgtcaggggtcttccaaaaaactgccccaggggaacagcatgcccctcctccaagcttcagggaatcctgcgcaccccggggttcactggcccagagctgtgcccagcacctggacagcacttggaaaacagctgaggaatgtgccaatcagggaggtgccacatcagggccggcgcaccactcaccccaacagcagcacccagcgcctgccacacccaggggcagctcatagcacggggtgccaggacaggacccaaggtcacagaggtcaaaggcagggggctgaggtctgcagggccagacctgatgacatggggcaagcggacagaagccacactgggcaaatccaggccaaggcagctggacaagtggacagcgggcaccgagtaggggagacaagccctaagcctcccgtgggcctagaagcatgtggacagccgggagcagcaggagcagggaggcagggccaggagatgcctctccagggcagagatgggagcgcacaggagggtcacaggtgaggcaggcacagccaggtgagatgcgctgctgttctccggatgccctccgggagccagtctgcttggacccccatgctctcccctctcctggacgctggagccctgaggctcgcttctgaccatcagaatccagcagagttacccgtgacttctgagggtatatcctaacagcctggcagcatctactcgggagctgtctgggaaacctgctccttgccactcctccttgggacacagcaccatgctgtgagaagcccaagccccgctcgggggcccctgcaggaaaccaggcagccctaggacgtgccaccccacaggactgcaggtcacgcggccccacggatgctggaccacaactacaaccaatcaagaagcctgtgccagctgctcagcatgcccaccagcctgcagaaccacaagagaccctgaatgctgt

SEQ ID NO: 6259 - DNA, 1080 bp, Artificial sequence
  DNA replication origin
cccgtgctatgagctgcccctgggtgtggcaggcgctgggtgctgctgttggggtgagtggtgcgccggccctgatgtggcacctccctgattggcacattcctcagctgttttccaagtgctgtccaggtgctgggcacagctctgggccagtgaaccccggggtgcgcaggattccctgaagcttggaggaggggcatgctgttcccctggggcagttttttggaagacccctgacagcagggaggccttgcacacccttgtctgggagctggtgtgggtccgtggccagtcagctgtgtgactgtggcctgctgtcatctctgtggcctcagctgccttgtctccaggcagtcctgacagcagcaggagccaggcatcaggcgccagaggaagccacaccctcgctgtgggagatgcatcccacgccacggggtgaccctcagagccaggggtcttcagatggcctcgggacctccacccaccggagggcaaggggaagaggccaggagtgtgaggaccactgcctctcgctcaggcagaccccacctttgtggggtgtcctccagctcctctcccagacgtctcctccgacccctggtgggccagccagatggggacagagcggggctgacaccctcggctggaggccaaggcggcgggggctgcgagcattttctgacagaatccggcctctccagtgccacgcttgctcactgctgacctccctggacagaagttactgtggctgggatgcagcggcgacctggcaggctgctggagcgggaaggctgagtccagggatgggagtccaggcggggtctggtcctgcctccgggcttgtcttgttgccacagcatgtgctggagtgcctcagaccacacctggggaggggcagtgacctcaggctgtggtgtggggtcaggaggcggaaccaagctgggtgcgggcgagactccctgtctggcgctcctggggtggcctcagagcctggactctgtcactgctcctgtgttcctttgggagatcgtaaatgaatcctcattggcagtttggctccaaggcccccacgtggcagct

SEQ ID NO: 6260 - DNA, 1200 bp, Artificial sequence
  DNA replication origin
ttcctttgggagatcgtaaatgaatcctcattggcagtttggctccaaggcccccacgtggcagctgagggtggggggccgggcccaggccaggctgaggcgtgtcatggggcagacctgagtcggctgggggtgcatatgggtaggggctggggagtgggcaggtggtgtggctcaggggccgggtgggcagggggcagggttcacggcacagtgggcagcggaagcatggtggcaggagctggcaagctggtgcccgcccctcctgccgccagggtgacccaggcaggcacggggcaggcagtgggtggggccccggaaggaagccaggggtggaaggcatcctgggctgacgaccactctcagccctcccttggccgacgccggcgcgtgggtggccacccgggtgtctgtctcggggccgctgggtttacgagctgcaggctggctttaaaaggaacagtcatttctgagaatgcagcagcctgcccagaggtggggcgcctcccccttcggcagggagagaggatggggccaggatgcccctacccgcccggccttgcttgagcagggcctggcctgaggtgggggcggtgcctaggaaggctctggttggttctgggagggcacctgggggccagggagggctgaggggaaggggatggctggacgagcgggcacacagctgacggggaatgtgggcggcaccggccaggtggcccgggctatgtgtagagttcagtttaagtcttgttttcactggaaaaccggagcccactcccctgtggtcagcatcccccaccccacccagcgccccaggcttgtcccacgcaggcccggctctggccatgtggcagcccccacacccccacctgctgctactctgaggcggccctgcccgaggggagccacgcaggttgaagcccaagagcctcgtgacctgcaacgggtttctgaacctccctgaaccagagccacctgactagggagctagggcagggccgccccttctgcccctcaggcccactggcagttgcacccccagcccccttcacctttgtccatcccagtcctcttgggcccttttgtctacagggcgagcctccagcctccaagtgctttacacatccttgcctccctgcctgaggcccctcccacgccagccatccctgcacgctctgacccccggtcttcctccct

SEQ ID NO: 6261 - DNA, 1883 bp, Artificial sequence
  DNA replication origin
tcagcttctttatgtgtaaaatgtggacgccaggcctgttgtgggaacaggcagcccaggggtgccacccgtgaggtcactggctgctcactccatctgctgctgccctcagttccctcgcctcaccccacgttgtccctgcggcctcctgcacagacgtgggctgggcaggtgtgcagtggaggccgagaaacctgcctgcccaagaactacctgacaggcatcctgtcagggagcggtccccccttgggacggtccctggtcattagctggacggcaagcaggacagcggctcagagaggcccagccccttccttaagtgctcccgtgggcgggattcaagtcctgatcttgaccatctctctccctgcaggcatcacgtggggcaaggtggtgtccctgtatgcggtggccgcggggctggccgtggactgtgtgaggcaggcccagcctgccatggtccacgccctcgtggactgcctgggggagttcgtgcgcaagaccctggcaacctggctgcggagacgcggcggatgggtgagcgcctgagtgcccgtgtgggtgggagagctggggtgcgagggtgcagaggtacaggagggagtggtggatgggtgagcctctgagcgcctggggggtgggagagctggggtgcgagggtacagacgtacgggagggagtggcggatgggtgagtgtctgagcgcctggggggtgggagagctggggtgcgagggtgcagaggtacgggagggagtggcggatgggtgagcctctgagcgcctggggggtgggagagctggggtgcgagggtacagacgtacgggagggagtggcggatgggtgagtgtctgagcgcctgtgggggtgggagagctggggtgcgagggtgcagaggtacaggagggagtggtggatgggtgagcctctgagcgcctggggggtgggagagctggggtgcgagggtacagacgtacgggagggagtggcggatgggtgagtgtctgagcgcctgtgggggtgggagagctggggtgcgagggtgcagaggtacaggagggagtggtggatgggtgagcctctgagcgcctggggggtgggagagctggggtgcgagggtacagacgtacgggagggagtggcggatgggtgagtgtctgagcgcctgtgggggtgggagagctggggtgcgagggtgcagaggtacaggagggagtggcggatgggtgagtgtctgagcgcctgtgggggtgggagagctggggtgcgagggtgcagaggtacgggagggagtggcggatgggtggtcacctgagcactcctgggggagatgggtgaggcagggggtggggcaagggccgagacctacaggcaggccctggactctcctctgcccagatccagcactgacttacccccgatcctacccctgtgctaaggacccgctgccccagcccccgccctcccgagtgggaaaagcaaggccccgaggggtgggtgtcagagccaaacccttcctctgtctccacgcccccaacttcctgccctgctccggccagaccgcagttgccgctgggccctgggtgtggagggtggctcccctgccgagagtctagccttctttcctgtacagcgggtgttggcctggtgtgtaaatcagcggccaggggtgacagcgctcagacccctctgctggggccttagctttagcatctcgagagattgaggtcacgtggtctgcgggggctgtggtctcctctgaaggctgaattgggggtgcagagggcaatgtcccaagatgtcgcacatggctacaggtgtccctcagcacagaaaccccaagacttccgtcccctcctgtcttcctcctgtggagtctggcat

SEQ ID NO: 6262 - DNA, 1112 bp, Artificial sequence
  DNA replication origin
tagcaggttgtggtcggcccatgtagagattttagaaacatctcacacttcatgagatcttagaaacatctcacacttcaggttcagtcacccgtgtccagtgtccacaggaaggcctgtgcaaggcctcatgggaaacagggtggtccaccaggcctgccctcaagggggccccgtcccggagaagcagatgcacaaagctgagggacacaggtcgtgggccttcttgtgtggctccttggccacggcaccgcagcacctgagagccaccgctggagaggcaaacgagccctgcagcaggcccgaaccagagttcctgggcacggccgcgtgcacccagtcgggagcttccctgctaagggtcagcgaaggcttggggtgctggcattagggctgggtcctgagggaagatgagggagagaagtataggaggaggagggagttgaaggctgcagacaggaggaggaaggggagggagtagggctgccaggggaggggtggagggctggataaggaggagggctacaaagaaaagagtagagctgcagggaaggagggtggagggctgcagcgggaggaggagagggaggaaggctgcaaggggaggaggagtattgcaggggagggggaggagagctggcaggggaggaggaggagggctacaaagaaaagagaactgcagtgggagaaggagagtggtggagagttgcaggggaaggggagagggaggaggactggaggaggaggagggatgtaggaggagggtagtggagggctgcagaggaggaggaagaggagaatagggaggacaaatccactctagcaggggaacgaaagcagcatggggcagacaaatccactctagcattccaatctccctaagcctttgaatcccttcttctacactaaccatgggcggccaggcatgtccagttatcccatggtgggccatgttttggcccatgtttcagccaagcagccaaccaaccaattagagccctttctaaatgcggaatctctgcttagtgagcccgtatcaataaacttggcctgatctaactctgtgttcctcctaccattctcccaggccctcaatatgcattcccacggtc

SEQ ID NO: 6263 - DNA, 889 bp, Artificial sequence
  DNA replication origin
tctgtgttgcccagccctgtctcaaattcctaggctcaagagatctacccgactgggcccctgaagtgctgggattacggccttgagtcaccatgccagcgagttagtttttaagccgtggttttgtgccctcagttcaagatgcaggtgcctgtcttttactgttgagaatttgcactaatgatgaagggtgataagaaaccataccataactcagcacctgttctgttttttaccgtaggaattgattagattcttacacaagagcatagctcaaaagagaaagattgtgttagggtgaggtttactgcaagggagtgctgagggctgacactgtgtgaggcctgggctaacgggcccagggcaaggatatgccctgaggtgattaagaacagtgctgtcttcaggagctgagggtcagcaggcaagacagacacagccaaaatgagcaaggtggtggagggggcgggcaggtgtgcgggtgtggctggaacagcccgtcttcaggagctgagggtcagcaggtaagacagacacagccaaaatgagcaaggcgctggagggggcgggcaggtgtgcgggtgtggctggaacagcccgtcttcaggagctgagggtcagcaggcaagacagacacagccaaaatgagcaaggtggtggagggggcgggcaggtgtgtgggcgtggctggaacagcccgtcttcaggagtggagggtcagcaggtaagacagacacagccaaaatgagcaaggtggtggtaggggcagacaggtgtgcgggtgtggctggagcagccacctggagggcaccctggacagttctggcatccacgcagcccacgccatcttggaggccagtgcctgggcttctcaactccaacttcccgt

SEQ ID NO: 6264 - DNA, 1488 bp, Artificial sequence
  DNA replication origin
tcaagattttcgttgcaatctttcacggagataaggaatagaagcttctgaatccaatgtgtggcctctggaacgaggcttgtgatctatcatagctgatcaattctttcatcattcaacgtgctggacactcttccagggagaagctgacggaacagtcatacatccctacggagcatacatcctagcgagggcagacaatacacaagaaatgagtgaatgatgcagaactgaatgtacattaggagatgaggcagaaagggagacagggctgttggggcactgtgaaaacctacccaaaagggacaaggacaccctccctgagaagtgtgcacagaccaggcaggggatcagggtccctgcagctaccctggagaagagcagaccaggtggaagtgccagagacggaggtcctgggtacgtaggcctggtcttgctggagaggaacaggaggccagtgtggccaggggaaggagatcctcacccctcggaagggccgtgaccttgactctgagcagacagaagccctcgagaaggctgagtgggagggacgaggtctctgactgcaaccacaggaagccagggagggcaatggcaaaaacccttgtggcagaggagggtggcctgggccaggtggccgtggtggaggcagtggaaaggacctagcttctggatctatcttgaaggcagagccacccggatgtgctgatggtttggatgtgaaacacgtaagaaaagatggtaacggaggtttctggcctgagcaattgagaagacaagttaccattaatggagaaaaggaagaatgagaagaaccttgggaggtgtgaaacagcaaaactcagtcacctgggatagcccaagtcctaagatgggctaaacaaacaccataatttctcagacagccagctatagccttggagacctttcagtttggtagactttatccagctcagcactgaaaagaaagaggctttgggccgggcgcaatggctcactgaacctgtaatcccagcactttgggatgccgagacgggcagatcacctcaggtcaggagtttgagaccagcgtggccaacgtggtgaaacgctgtctctattaaaaatacaaaaattagccgggcgtggtggcacacgcctgtaatcccagttactcgggaggctgaggtacaagaattgcttgaacccgggaggcggaggttgcagtgagccgaggtcgtgtcactgctctccagcctgggcgacagagacgttttctcaaaaaaaaaaaaagaaagaaagaggctttgcaaacctcaggtttttgggccggctctctggcctgtgcggagcacaccccacagcgactgccacggggctctggctctcctgggaccgggtggacccacttccactggtgagcgcagcctgcatgggagctgaaccctgtgggaagcggcaccccgggcgctggggagcagcgatccagagtccaggttctgagctgct

SEQ ID NO: 6265 - DNA, 1062 bp, Artificial sequence
  DNA replication origin
tgggagctgaaccctgtgggaagcggcaccccgggcgctggggagcagcgatccagagtccaggttctgagctgctgcaccggggccgcgatctccacccctcacgcccgagtccccggcacggccaccaccggcccctgggtcccgagggccccgaggaagaggccaaggggcctggcggcgccccccagggtcccagtggaacaggggcaccagggccgcggcgccgggcatggccttcacactccccacgaggcaggacagccccgggctagggtgaggggcacgcgccgcaagtcctgcctctgctcccgggcggccccctccagcctccgccggccccgccccggaagcgcagccccgcctcaggcgccgcatctccgccctctcttgcgcctgcgggaccgggagggccgcgctcgccccccagcgccagggtcacgccaccgcgccctgtttggggagcggcagaggagtcagggcggaggctgggcggcgctgggcggtggggcgcgctcactggctgccacctcacctagcaggcgtcacagggctcactcaagagctccagcaagagcagaggcgggagcctcgccagcccctccacagaccacagcgaccgcgcccctcggcccggaggccccgccctccccactcctgcttccccagccacggggtcttctcccggcccctcatctacttggcagacgcctctcaccggcagcctctgcctccccctggtctttccctcccaccacccaccgtggagtcctctccgggaggccctgtcctccatccagcgctcctcagaggggaccggagaggaggcgctccttaaatggggaagaaagacggacagagccagggacagcgagagacgggacggggacagagacacagagacagagagacagggccagagagacacggggatggggccagagacggggccagagacagagacacagaaagggatcttactctttcttcccttaaaaccagcttctgggggtctccgagggggactctcaggtaagtaacaatattatcaccttccctccc

SEQ ID NO: 6266 - DNA, 2015 bp, Artificial sequence
  DNA replication origin
ttaaatcgagtcacaggctggagcctgcttcccctcccagccctgcaggctccagcataacatcctgggtgggagtggaaagggcccaggcgcaggctgtggaaggcatgctcggagaaactccacgacaacagggagacaaaacaaggacactcgaggaattttacagccactgcaggattaaacacagcccgagtgccagccaggttaaggggatggatgccctccaaacaaggcacacttacttcacctttcagtcaagcagcacttactgatgggggatgcgttgacaaacacgtcatgaggcaagttcatcattgtacaaacgtcacagagtgcacttaccgcgtaccacgcacctaggctgtatggcacagcctgtgctcccaggctacacaccccagtgtgttactgaatactgtaggcagttgtaacacagtgccaagggtgtgtgtacctaaaacacatctaaacatagaaaacctacagtaaaaatatggcataagagacaaaaaatggttcacctgcataaggcacttaccagcactggagtgtgcagcatgggcagttgctctgggtgagttggtgagtaagttggtaagtgaggggtgaggggtgagtgagtcggtgagtgaagggtgagtgagtcggtgaggggtgagtgaggggtgagtgagttggtgagtgaggggtgagtgagtcggtgagtgaggggtgcgtgagtcgtgagtgaggggtgagtgagttgtgagtcgtgagtgaggggtgagtgaggggtgagtgaggagtcggtgagtgaggggtgagtgaggggtgagtcgtgagtgaggggtgaatgaggggtgagtgaggggtgaggggtgagtgagtcattgagtgaggggtgaggggtgagtgagtcggtgagtgaggggtgagtgagtcagtgagtgagggatgagtgaggggtgagttggtgagtgaggagtgagtgaggggtgagtgaggggtgagtgagtcgtgagtgaggggtgagtgagtcggtgagtgaggggtgaggggtaagtgagtcggtgagtgaggggtgaggggtgagtgagtcggtgagtgaggggtgagtgagtcggtgagtgaggggtgaggagtgagtgaggggtgagtgagtcggtgagtgaggggtgaggagtgagtgaggagtgagtgaggggtgaggggtgagtgagtcgtgagtgaggggtgagtgagtcgtgagtgaggggtgagtgagtcggtgagtgagtcagtgagtgaggggtgagtgagtcggtgagtgaggggtgaggggtgagtgagtcagtgagtgaggggagagtgagtcggtgagtgaggggtgaggggtgagtgagtcagtgagtgagggatgagtgaggggtgagtgagttggtgagtgaggagtgagtgaggggtgagtgaggagtgagtgaggggtgagtgagtcggtgactgaggggtgagtgagtcaggagtgagtgagtcggtgagtgaggggtgaagggtgagtgagtcagtgagtgagggatgagtgaggggtgagtgagtcagtgagtgaggggtgagtgagtcggtgactgaggcagtgactgcggcggtgagtgaatgcaaaggcctgggagatgactgtacactatggtagactttctcaatactgcacagaggctacactaaatcgattaaaaaaaattgtactacgatgttacaatggctacaatgtcactaggtgacaggactctctcagctccattataatcttacgggactaccatggtgtatgtggtctgtcattgaccaaaacatcatcatgtagcacacggctggatctgatatttcatgtctactttgcaaccaaaaataacgagacatgctaaaaggcaaaaaaaaaaatctgaagagagagagtgagcatcagaaccagactcaggtacggcagagattttagaattaccacacggagaaattaaaattactggttagtttggggacagtggctcacctctgta

SEQ ID NO: 6267 - DNA, 1575 bp, Artificial sequence
  DNA replication origin
cgtgagcccctctttgtgtaactgttgagagctgatcggtcctgtgtgccaccttccctaggtggaggctgtatgtcatcttagttccggtgcttcttattcccccatcaagcaaccatgattattagattgaagtatacattttactggttactttatttaccattgtttgctgtatccaagtttcccctcctttttggcagtatttaatgactttttttttttttttttttttttgagacaatctcagactggagtgcagtggcatgatctcgtcttactgcggccacgaccccctgggctccagcgatcctctcacctgagcctcctgagtagctgggactacaggcatgtgccatcatgcccggctaattttttgtgtgtttttttgtttttttgttttttttgttttttgtttttttttttgtagagatggggttttgccatgttggccaggtaagccaccgcacccagccatgactttaaaaaaaaaaaatcctattccagtacagttttgaggggggcgctggtgactgttgtggcagtcccagggtagatggcgatggctcagactttagggaggaagtggcggtggtagcaatgctggagtactggctgggttcagggggttgagaggcaaaagatcagcaggccagctacagggattaggcttgagcacctggaggatgctaagtgggagaggcttttggggaggagcaggagatgggggtgaggaacggagtttgagatgctcttgggtgctgaggccagagtttgaacaggcagtctgaggccagcagctggcctctgggatttgggcatgtgagtgtgggggtggagggcagaggtgtttgaagccttggggggtcgagtgtggttctaggctgggcttcagtgcccggcccaggagcaggcctcgctgagagaggggcagccgaggcgggtccaggggaaggctgaggggttgttcaggaaagaagggtgacttgctgtgctgggtgctactctgaccagaatggagagaagggggctggatgtgccccaggatagtggagagaagggggttggatgtgctcccagggtcgctggttactggaatctcactggagaggctggtggagctgggcggagagggggccagtgatgaggggtcagggccaggtttggccgtgaagtggagtgaggcaagtagacaggagccagagggagtgtggctccaaagagagtgtgtcagtggggagggctgtgaagggccaggctctggagagcaagggacaggtgcaggcaccaccctgcatgccttgtgcccctccaaaggtgaggccaggccacggctgggcatgcggtgtgggcacaggggtggcaggagcgagggtgtggtggggagaggacatcctctccctggggttgcagtctgtcacgccggcgtcgcaggccctggggtctgcactctgtggttcttgctgtccgtgtggatttgttcttcagtgacagactctttgggtcattctttagggatttatgtggaaagcgccgcacacttgtctattcagctcgctagccagtgtctgcttt

SEQ ID NO: 6268 - DNA, 803 bp, Artificial sequence
  DNA replication origin
cgctcgggtcagtcggcggccggactgggaagatggacgcaggtgaggagttgccgggggtcggtctttccgcaggaggtgctcgccttatcattggcctcccctgctcgggtcgggctgccgcgactcgcctcggggcacgccggtgcgggccaggctgggccggggcggcgggcgctgcgggagcgcggggcggtgttggtgggtggtgggcggtgggagcgggagggggacggcggcgcactgcgccgcggaacccgccgtcggttgcgctggagcttctgcttttccggtcccgtccggagcgctccggaggttgtggctgcacaggcccttgcgccaggtcggccgtggagggcggcggagcctgccgggcggggagaggcgcggcggcgaacggggcggccgcggtccgggccggggacgcgagcggcgggcgaaagcgtagcctttccgcagctgagcgtgaagggatggaagctctttaacttttatgaagttattggtaggttggaggagagaaacgtgacgtgttcatcacagtatacgtatcttttttgtttttgtcttcaatttagtaaccagtagattctccaagctgcttttccgtgacgagaaagagaaacagtgaatttgtatcatcgggtcttagtttcttggggtcctaagagagagagaaagagaaggagtgtgtgtgtgtgtgtatagggagtgttggtttttttcctatcctttcatgcttccgctccatttttgctagcaagattattttaagtcagcgccaaacccatcgctagcccagt

SEQ ID NO: 6269 - DNA, 819 bp, Artificial sequence
  DNA replication origin
gagttcttgaagattctgccttccttgaccatgtgtaatacagtttctgttctgatagtcattaattcaatacactgtttgttactgactgtcagatatgtgttaggcattgttctagacactaggactagagaagtaacaacatagatgaaaaccattgccctggggtagctaacgttctagacatgagaccagcattagcagcgaagtgcgtggctcctgggggatggtgatttgggccaaggatgaggaggattggaattgtagccaggatggccaggaagggtctcactctgaaggtttaagttttgacgaagacttaaagcagtgtaggaggaagggcaggtagcaagagcctggtgtggctcaggtgcagcgggtggcggtgggagaagcaggagctgaggatagaaaggtgacttaggctcagtgtagtggggccttgccagctcatagtgaggactcggtgtttattctgaacaggatggcagctcatagtgaggactcagtgtttattctgaacaggatggcagccgtttggaaggtttcattctagaggaggagtcacatgatagactgtgttcaacaggcttgctctggcatctcttttgagaatgtactgcagaggggcaagggcagaggcagcgagaccagctaagagactgttgaacaagccagcaaggagatgccagtggattagctcagggtgggtaagaggttgacttctgcatgtgttttggaggttgagacaatagaatttgtttgtagattggaagttgggagagggatgggtagagagggaggagttaaagatggccc

SEQ ID NO: 6270 - DNA, 1324 bp, Artificial sequence
  DNA replication origin
gcccaagattgcaccactgcactccagcccaggctactgagctagactgtctcaaaaaaaaagaaaaaagagaggagtcctggccaggcacggtggctcacgcctgtaatcccagcacttcgggaggctgaggcaggagaatcacttgggattctgagcagagatcatgccactacactccagcctggcgacagagcgagactccgtctcaaaaagaggggtctagaacaatcccagattttggtttgagcacctgaaggaccactgtaggagaagcaggctggggccagcacgggctctggctgtcaggtcaccatgcacacagatacccaggtggaaatgcagaataagcagctggacctgagcttggagtccagggacaaatcagccctggaagccgtccatgtgcctgagtgccacagcacttgcaggttggggaggatcatccagcaacaggggcgggggctggtggggagcaggcaggggaccaggagaaacagcgagcatggcgagtggcctggtgcttccagagaaacagcgctgacttggtggggccactccaggcagcagcaagagaagtgtgagtggaagggtgtggtgggggctggggagctgctggacagaggactctgaagggcatgcagtagggactgagcaggtgccacgccaaacacagggcgggccctggagacagagggagcagcaggctggggatgtgggacgggggtgacgtgggacgcgggtgacgtgggatgtggcagagacggacttgtgcaggaccccagggaacctgacagaaaagctgggtggagacagtgactgccatgctgaggagcaggctgtgggtgaggggagacagggccatttcaggaatgtggaacgtgggatgcctgagggccttgagtgggatacagaacaggcagatgcagaaggagaggcttcaagggggccgtggctgaagacaggctggggagacgctggccctcagaccagtggggaggagaccctgaggggacaagtcctgggggatctggccagagcctccccaaaaatgctgggatgccaggacacatggaatcagaccaaatgaccctggatgggtcaagaggagtgaagagtggacacgaagctgaaaccacaggcaagtttctggaactgcagggaaggtcatctcagaggaatctggggggcgggcacgcaatggggctgagtgaggtgcgaaaggaagcggtgcggagcaggtgcagagcacactttcagacgctgaggtgtatgggaaggtgagcgaggctacagggagtctccgggtagagtgagaaaggca

SEQ ID NO: 6271 - DNA, 2017 bp, Artificial sequence
  DNA replication origin
ggggggcgcgcggacggggcggggcagggccgcaagggaggggagggcgcggggggcgggcgcggggggtcccgccggctgggtcgcgccaattccaggtgcgtcacggcggggcggggcctggcgatgctgggcggggcttgcggcctcgaccccgcccacatattaggtcccgcccctacccaggccccgcctcatctccgcccccagctccggccccggccccgccaggtcccgcccgtccctgtcccgtctgcaggaggagctggcgcccgctgcggggctccgggccttgggggctccggggtctgggcctccgcctggctgtgcgcccgtgtgcgccggcctcttgtgtgaccgcggctggggagggcgtgcgggccgcggggcgtctctccccggcactggggactgcggcgcggaggcggggagggcggtgccgagtcggccctggtgggcgggctgtgctgtttccaggtggcagcaggtcggcgcccccagcggctgagcggacggtgctttccctcactttacacaccagggaaggtccagcgctgccgagcagcctgctcagggtctcccgctcgtagaggggcagaccccacgcgggacccctgacgtcggcccgggatgggcacagctttggggtcgcggtgtttggggttgtgccgggtggctctggagggcccttgtgggggcgctgcactggggatcctcatggtcttcggcctggcacccgcccaggggctgagacagtggcgagtgagccgtggcctggagctggagaccgctgccctagagggacgcccgattctgcccatgtgctccgctgtctcttgggggtctgagtagtggggggttccctgggtagaagagtcaagctggggagcacgctggaggggaggccttctctatcctggtgcccagccagtgggctggcctcccaaggagggttgactttgtgtgtgtctgggaggctgtgccagccgggaggctgtgcctctgtcctctaggggagctgggaaaacactggggctggaagcatcagatgcataagatagagttaggtttaaaatgattgcctggtaactgtgaacagcagatgggagggtggccaagactggaggaggcagccccccttaggagcctgtgtcagctgtgcagggggcggaggttggcctggtctagggggtaacaaagcagacgcgaaagcagcacgggggtcctcctggcagactgtggggaatggttgcgctagccacagggactatttaagtaaaattaaaaattgaatggcgttagtcccatttccagtgctcagtagctccctatggccaccactgtcttgggcagctcagagagaacatttcttttctttttctttttttgattttttttgaaatggagtctcaccctgttgcccaggttggagggtatgatctcagcacactgcaacctccacctcccaggttcaagcaattctcatgccctagcctctcgagtagctgggactgtagctgtgcaccaccacgcctggataatttttgtatttttagtagagacagggtttcaccatgttggccaggctggtcttgaactcctgacctcaactgatttgcctgtcttgatctcccaaagtgctgggattacaggtatgagccaccacgcccatccgagagaggaaacatttctatccttgcataaagtcgcgtgggcagcgtggctacactgctcaatgcactggatttctgggtaaagtaggggaagatcaaggaggacccaggggattttggcttgagccttggaagatgctgctcactgagggggggcagcctagagggtggggtcagttggcctcccctgcctgtgctgttggtttccaagtttccctctcccttctttgacttctgacagcttccgaagtgtgcacacagcctcttgtcagcactgtttggtacctgcatctaaaaatgagatcacagtccttccgctccgcaaaccctgacagagacagaat

SEQ ID NO: 6272 - DNA, 1464 bp, Artificial sequence
  DNA replication origin
tgtctgggcataacagaaggctcgcactcttctggtcactcctcactatgtcccctcagctcctatctctgtatggcctggtttttcctaggttatgattgtagagcgaggattattataatattggaataaagagtaattgctaccaactaatgattaatgatattcatatataatcatatctaagatctatatctggtataactattcttattttattatactggaacagctcgtgtcttcggtctcttgcctcggcacctgggtggcttgccgcccacagttggtatcgaactcctgacctcaggtgatccacctgcctcagcctcccaaagtgctggtattatgggcgtgagccaccgtgcctggtcagaaaaatcagttattttaggggatggtatgggtggtaatctttatgggttttgaatcattcctaatcccaggggtccaagatgccactggcctgctagtcaaagggagggcgtgtggaggtcaggtggtaagggggtccacagacctcatctgtggtcgtctttccagttcctgaatgtgtaattgcaacagttacccttgacaatgggcaaactcccacactcatctgcagagcaagggccagccaggtaggaagggccaggtggatgtctcctttccagggttgtatgaatgattcacctgggaagaaggtgagtggcctctggggatgtggttaaggaggacaggaatgactccttgcaactgctgctccagagcctcatcaccaggacaaatccagctcgccggttttctgtgtgactaccaggacccatctgctgtcacgggcgtagcctccacctcttgcacagctccgcagtcctgcctcgggccaagtgtggtctcctgctctctgccctcatctgctcagagattggcatcctctgcacccgctagggttctatggaattgggtgagctgaagtaacaagtgctttgggaggccgacgcgggcggatcgcttgagtccaggagttcgagaccagcctgggcagcacatgagacctcatctctacaaaaatacaacaacaacaaaaaattagccgggtgtggtggtgcacgcccgtagtcccagctacttgggtggccgaggtgggaggatggtttgagctcgggaggcagaggttgcagtgagctgagatcaaccccagaactccagcctgggcaacagagctagaccctgtctcaaaaaaacacaaaacaagtgctggcgatgcctcaggcaggggatcccaggccgggaggctcctcgggacagcagttactgcgtcaggagggcaggagctccccaggtgtgcaaagggtttgagggcacggagggctgaacaggcagaagggacagggaggcaagaaaacacctgcaggaggcagctgccccctaagctaaggctggggacccaggaggggtggtccgtgcaggagctggggaggccgc

SEQ ID NO: 6273 - DNA, 1268 bp, Artificial sequence
  DNA replication origin
agctccccccacgctgtctcataggatcttcttcctgtcacaggctgtagcaaggtgctgctgaggccacggacgtcggaggaggtgtcccacatcctcaggtgaggtggtggctcccggctcccccagccttccctgttgcctgtgggtcatttcctcatggagcctgtgggcagctggggtgacgcggtgcgaagccagccgatgacatcttggtttgtgtgtctcagtgtttgttctgtggtttttcggtgctatctcaatgcatctgtggtgtgtaatcatttccccccatttggcaatgcccatgcccatttcttggcactgtctgtaacagcaaagctcctcccccatgaacacactacagggtggcactggtctccgggtgtccatgactgtggacagtgctttagatcatcctcagcaggtgctttggggcaacgtgcacttactctgttaaactccatccctgggacttgctgtctccagggtttatttcatgtgtggggcttgctgtctccagggtttatttcatgtgtggggcttgctgcctccagggtttatttcatgtgtggggcttgctgtctccagggtttatttcatgtgtgggacttgctgtctccagggtttatttcatgtatggggcttgctgtctccagggtttatttcatgtgtggggcttgctgtctccagggtttatttcatgtatggggcttgctgtctccagggtttatttcatgtatggggcttgctgtctccagggtttatttcatgtgtgggacttgctgtctccagggtttatttcatgtgtggggcttgctgcctccagggtttatttcatgtgtggggcttgctgtctccagggtttatttcatgtgtggggcttgctgtctccagggtttatttcatgtacatgggcagattccttttcccagagcacggaactttggtttctccaaacccctagccactgggtgtgctctaggctttggggctttgcaaaggtgcaggctggttgggagggaggtatccttgggcacacgtctgggggataatgggccgagggtggggagatgcaggcagagggtggaaggcagtgggggcagtgcggtcgaggaaccctgagctggaccctctgtgagcatggtgtgaacgggaaggatgggagccgggcgtgtaggacgttctgtcctttgagggaagccttgtaggacgtcagaatcggggcctccacttccgtctccctgtgcacagctttcggattggcc

SEQ ID NO: 6274 - DNA, 935 bp, Artificial sequence
  DNA replication origin
ttttcctctcttttcatgttactcattttttttttgtgtcaccataattataaaggtcctgtgaggcccagatgttttcgtccttgggccagcgatgtgggggtgcctcttctcctcagccctggcgctgaggctgatgttccttctgggtggcttgcctgtgcaagatgggggttgggactcaccagcccgggggcccactggaagccaagtgctgcggcagcctggtcactctctgcaggaattctggtttgccaggcgggctgcgtcctggaggagctgagccggtatgtggaggaacgggacttcatcatgccgctggacttaggagccaagggcagctgccacatcgggggaaacgtggcaaccaacgctggaggcctgcggtttcttcgatatggctcactgcatgggactgtcctgggcctggaagtggtgagctggggcagctgcttggtgcagaggtcgccacggggtgtcctctcacggctctcatgggcccacgtggtggcacaggtgcatggggcccctcggggtgggaggtcttggttcctggccctgggcccctcaaggatgtgtgggctacatacacccccatcctgagggaggcctggccctgccctgtcctcccacgagagggtgattttgtgtccactgcctcggggccacacagagaggatgcagttacaggggacaccgccccggcagtggtgggcttctgggagccgggtgtgaaggaaggctcatccagggtcagcttcgtgaccttctgctgcccactgttcctccagggcccctctgtttacccgcaccctcaccagccgagtgtcacaggcagagctctctgtcctgtttacccaagtggacgaagcaaacacaaaaccatgctttggtgccatccagtaaattatgacgcttcagtagcttttttttct

SEQ ID NO: 6275 - DNA, 825 bp, Artificial sequence
  DNA replication origin
tgggacaagagtgcctcgtcggaagtcgccccagctgcaggagagcaggagccagggctgactggggccctggagagctggaccgagcccacgagcacgagggacaccaggaccatcctcacagggcctgttccacccggcttagacgtgggcgtggcacgaagaggcgagtgactcctgtctgagacctggagtgcgaagagcaggatgcggcagccgggctggcctcgggctcccaggaccacaggcgggcggcacacaggtgactgcagttggagtgggatcagagcagaacacagaaaacctggatgaagaggaaccaccgatccagatggcactgccgcccagagagtaagtcggcagaagcagtcaaggctgccccagccgttccggggtcaggtggtgaggagccccaccaggggctgaaggtggagggcggggaggaggcggtgtgggggcagcatcacaggccaggcttgtgccggaggcaatgggcgagaggggcaatgagaactgatggctgggttggctgtgggaggacagtggcagccatggtgggaggggcaccagtgaagcgggcaaggcctgattggggcagatccaggagaaggggcctccacccagcagcaatgggctaggccacgtgacccagtgcccagtgaaaacaccacaaacgctgggccaaaaaacaccaaagaaaccgctgaagaggccgggcacagtggctcacacctgtaatcccagcactttgggaggccgaggcgggcagatcacttgaggtcaggagtcacagaccagcctggccaacatggcaaaaccctgtct

SEQ ID NO: 6276 - DNA, 956 bp, Artificial sequence
  DNA replication origin
ctgggattacgggcacctgccaccacactcagctaatttttgtatttttagtacagacagggttttgccgtgttgtccaggctggtctcgaactcgtgacctcaggtgatccacccacctcagcctcccaaagtgctgggattacaggtgtgagccactgtgcccggccaaagacgactttttaaaccttctgaaagtcagcttaaccagagagctgtgtgctccgcaggctgcctgggtccttcttggccacgaaagatcagtggttgctattacagctgttctgcccgagcagccctgattcttgccctggcagccggagcctctgctcactctgccttccttgctcacttctagagagtccgttttacgtcctcatcgagacttcaggctccaacgcaggccatgacgctgagaagctgggccacttcctggagcacgcgctgggctccggcctggtgaccgatgggaccatggccaccgaccagaggaaagtcaaggtgccctgtgtcctgcttgcaggtccccgctctctgtccgtccagtccagccttgtcttgggatgcctggaacggtcattggtgcagcctagacagtgtgggatgtggctgaaatgtgactgggtttcatggctttgagagagtagcctctttggatggaaaatgtattcctggtgtctaggccattttcattaatatttaaaaagtacttcctccccaccatgaccctccccaaccccatgctgtgggatgagcaaggggactgccccattgctggtcccctgcagcctgtggttaagcggccagtcagcggcagctccgcatagagtcgtgtggaaggagtggaggcaggaggagcccctggggctgtggaggcttagcctggacctcgggagtcctaggatgggcagttttccttccctaggaggaaggggcgttgactgtgtgaccagatga

SEQ ID NO: 6277 - DNA, 1317 bp, Artificial sequence
  DNA replication origin
aaatgtgactgggtttcatggctttgagagagtagcctctttggatggaaaatgtattcctggtgtctaggccattttcattaatatttaaaaagtacttcctccccaccatgaccctccccaaccccatgctgtgggatgagcaaggggactgccccattgctggtcccctgcagcctgtggttaagcggccagtcagcggcagctccgcatagagtcgtgtggaaggagtggaggcaggaggagcccctggggctgtggaggcttagcctggacctcgggagtcctaggatgggcagttttccttccctaggaggaaggggcgttgactgtgtgaccagatgatttggccttttgaggccaaaggaaggaggggcaaggcctgggcagggggagccctcggtcaccgtcaccggggcctgggcagggggagccctcggtcaccgtcaccggggcctgggcagggggagccctcggtcaccgtcaccggggcctggatagtgggagccattggtcactgttaccgggacctgggtgggaggagccctcagttaccttcaccggggcctgggcagtgggaggcgcccttggtcaccgtcaccagggcctgagcagtgggcgcaggactttactcccgcttagttgatttcaggctcgtgttagcctgggtgttgcccttgccatcttcccccctcacctttgccgcctgactgtcatgattccagtgcttctgggcaaaacggtgtctgctcccaagggctggggtgcggtcggctgggctcacttgtgtgtcctgatgcccagcccaggggcgtcctctgggcgaatggcagctgtgtggtgccatctctgttgactgaggcatgatcaagtgtgcgtccttcctaggtctctgcctgccattcctgcatttttctaagtggactgtgacagtcagctcccttacattctgccgcagtaacaagcaatccccaggccccagggaccacacgaacagaggctcaccctccctcgcgttccgtgtgggtgatcgctgtggctgcatgtgctcctgtggcttccagtccaggggcccgggctgaggcagctgcccagccagtcagtctgttttcccagcagaaagagcaggacagccgccggggattctctcagcttctgcttgagatggggcgggaacgtgagcccaactgcccttggtggtgcgggtggggaccctcatcccgcactggctgctttgctggagtggcagtcagtcatgcagcccccacaccacccccaggagggcgaccctggcaccccagcctccacacatcagcc

SEQ ID NO: 6278 - DNA, 1654 bp, Artificial sequence
  DNA replication origin
gcgggccgaggcgggcgcgcaggtcagtcacgatgtcgtagagccgctccacagggagggagaggtcgtacttgtacacgtagccatcccggctcagcgcctctgtgatcctttccctcagggcccacagcatctagaggatgagacgagatgagacaagggctggctatgggaacgacacccggggacagggggcacaccacacggggttagggcagcagcatgttctgtatcttcaccaggtgaggctccgaccccggacagcaaatgccccagaccaggtgtggctccaaccccagacagcgaatgtcccagaccaggaggggctctgacccaggacagcgaatgccccagaccaggtgtggctccaaccctggaatcaatcccagacagtgaatgtcccaggctccacgacagcaccgagcaccctgggactccggcaatcaggcggctgggacacctcacagaagggggacagccatgacggaagggggaggcgcccacctgcagcttcaggtcatgacacggcacagagtggcaagggccagggaaggccctgaggatgagaatgggcctggacgctccctgaaccagggtggggcagggtagggaagggggcgcagagtcacacaggcagtggggacaacagcagggcccaggcagctcaaggggcatgtcgggtgggaggcagggacatggcgggtgggccacaggggagggaaggacatggtgggtgggccacgggggagggaaggacacggtgggcgggccgtggaggaggagggacacggcgggcgggccacgggggaggaaggattctgaggaggagcagacggtgctggtggctgaagcagaaccgggccaaatcctagggctcagacagatcggcctgtggtttgcgtggcttttgcttgcttcgaacttccattgtggagatctgcaccatgaggaacaggacagagccatcctctgtgggctgcaggaccacctctcccctgcagggtcctacccagggctcaagcccagcacctgcccctccagagaccctatcatttcaggaaattctaagagaaacacttggccgggcgcagtggctcacgcctgtattcccagagctttgggaggctgaggcaggaggatcacttgagcccaggagtttcagaccagcctgagccacacagggagaccccgtctcttaaaaacaataaaaatcagctgggtttggtggtgggcacctgtagactcagctactcgggaggctgaggcgggaggattgcttgagcccaggaggtcgaggctgcagtgagctgcaactgtgtcactgcactccagcctgggtgagagcgagaccctgtctcaaaaaaaaaagacaaaaaaagactctgttttattgaggcaaccacaatgccacactgacacttaaaaaaataccacctcctcgccaccactgggaatccggccggcgcccaaaattcccgcatttccccaccatcaattttttgtttttttgaagtctcccgatgttgcccaggctcgtctcaaactcctgggctcaagtgatcctcctgcttcagcctcccaaagctctgggattacagcatgagccaccgtgcccggccccttttacaaacttctagagctagttcggtcagat

SEQ ID NO: 6279 - DNA, 3439 bp, Artificial sequence
  DNA replication origin
gctttccttggatctgccgcttctcagttgcctttgtgggaaaacagccctcaccccaacatggcacagtttggggtggtgcgtcctggtttgcctctggagctcctcctcggtgtgcagctctgcgttaaaagccgctgtccttgtctgggcagcccttgagctggtttctggctccctctcctgctggcccggaggtggggcggggtcctcacttcactctgaccctggctgtccccagcctcttctctgagccgtcgccttcttgacctctgaggtcagaagaggaggttgtgcgtggggcgggccagggccagggtgtgcttggagagctgctgccctgggggctcagtgtgggctaagtggaccagagaggaggcagctgggagccaggactttgtctgcagtgggcactggctgggcagctccaggggcgacacccatgggggtgggggcgtccagatagagctgccctgggcgccactgcggacccctccatccgaccaggtgctggggatacagactggaagacggtctggactcttccaggtcaggagggaggcagtggcaggccatgcggtaactcaggtggccgctctctgcctggggagatgggagccccgggctgagggagtaggaagaggggggagaacttggggagatgggagccccgggctgagggagtaggaagaggggggagaacttggggagatgggagccccgggctgagggagtaggaagaggggggagaacttggggagatgggagccccgggctgagggagtaggaagaggggggagaacttggggagatgggagccccgggctgagggattaggaagaggggggagaagttggggagatgggagccccgggctgagggagtaggaagaggggggagaagttggggagatgggagccccgggctgagggagtaggaagaggggggagaagttggggagatgggagccccgggctgagggagtaggaagaggggggagaagttggggagatgggagccccgggctgagggagtaggaagaggggggagaagttggggagatgggagccccgggctgagggagtaggaagaggggggagaagttggggagatgggagccccgggctgagggagtaggaagaggggggagaaggtggggagatgggagccccgggctgagggagtaggaagaggggggagaagttggggagatgggagccccgggctgagggagtaggaagaggggggagaagttggggagatgggagccccgggctgagggagtaggaagaggggggagaagttggggagatgggagccccgggctgagggagtaggaagaggggggagaagttggggagatgggagccccgggctgagggagtaggaagaggggggagaacttggggagatgggagccccgggctgagtgagtaggaagaggggggagaacttggggagatgggagccccgggctgagggagtaggaagaggggggagaagttggggagatgggagccccgggctgagggagtaggaagaggggggagaagttggggagatgggagccccgggctgagggagtaggaagaggggggagaagttggggagatgggagccccgggctgagggagtaggaagaggggggagaagttggggagatgggagccccgggctgagggagtaggaagaggggggagaaggtggggagatgggagccccgggctgagggagtaggaagaggggggagaacttggggagatgggagccccgggctgagggagtaggaagaggggggagaacttggggagatgggagccccgggctgagggagtaggaagaggggggagaagttggggagatgggagccccgggctgagggagtaggaagaggggggagaagttggggagatgggagccccgggctgagggagtaggaagaggggggagaagttggggagatgggagccccgggctgagggagtaggaagaggggggagaagttggggagatgggagccccgggctgagggagtaggaagaggggggagaagttggggagatgggagccccgggctgagggagtaggaagaggggggagaacttggggagatgggagccccgggctgagggagtaggaagaggggggagaacttggggagatgggagccccgggctgagggagtaggaagaggggggagaacttggggagatgggagccccgggctgagggagtaggaagaggggggagaagttggggagatgggagccccgggctgagggagtaggaagaggggggagaagttggggagatgggagccccgggctgagggagtaggaagaggggggagaagttggggagatgggagccccgggctgagggagtaggaagaggggggagaagttggggagatgggagccccgggctgagggagtaggaagaggggggagaagttggggagatgggagccccgggctgagggagtaggaagaggggggagaagttggggagatgggagccccgggctgagggagtaggaagaggggggagaagttggggagatgggagccccgggctgagggagtaggaagaggggggagaagttggggagatgggagccccgggctgagggagtaggaagaggggggagaagttggggagatgggagccccgggctgagggagtaggaagaggggggagaagttggggagatgggagccccgggctgagggagtaggaagaggggggagaagttggggagatgggagccccgggctgagggagtaggaagaggggggagaagttggggagatgggagccccgggctgagggagtaggaagaggggggagaacttggggagagaagcagggagaagccaaggtagcagcggccccagaggaggggtcggcacgtccagggcgagtggcatgagggtgaggctcagccgggggtctcggggttgctggggaggggatcttgggaggggctgttgggggaggagtggggtcctgggggctgccctgcccagcctgacccatgtgcccttgtccctccaggagatggtaacctgcacctcaatgtgacggcggaggccttcagcccctcgctcctggctgccctggagccccacgtgtacgagtggacggccgggcagcagggcagcgtcagcgcggagcacggagtgggcttcaggaagagggacgtcctgggctacagcaagccaccgggggccctgcagctcatgcagcagctcaaggccctgctggaccccaagggcatcctcaacccctacaagacgctgcccagccaggcctgacggccactcctgctgctgccaaggcccactgggggtcggcgggtggctctcgggcgggggtgttgcggtggctctgagggatgagccggcagtgggcaggggaccaggcacctggttgaagg

SEQ ID NO: 6280 - DNA, 925 bp, Artificial sequence
  DNA replication origin
tgctggaccccaagggcatcctcaacccctacaagacgctgcccagccaggcctgacggccactcctgctgctgccaaggcccactgggggtcggcgggtggctctcgggcgggggtgttgcggtggctctgagggatgagccggcagtgggcaggggaccaggcacctggttgaagggactgggagcccgcactggggaactgccggacgcaggccctcgggcaggagcatctggcagagtggggggcgtggcaggcaccctcctttgcagggcgaggtggggcctctgcagccatcctggacaggccggggtggcggcagctttgcccacgtggaagcggggtgggtctcacttgcgtggtggcccctggccccatcttgcctgctgcggcctggggagcaggcgctgggtggtggttctgcctgcttgctgctcgttccccgggcatgcgtgggcagcggggggcatgcgtgggcagcagggggcgtgggcagcgggggcacgggcaggaccacgtgggccgtgatcgtgggttgccgagaggacctgagcgctgcggctctgctgaatggagccgggtccctcaggccgtggacgccctcgggaggggggtgactgtggcttgtgtctggacaggaatgtgtcatttcccacatcttctagagggctgccagctgggaagacagttatcagggcaagctgtgctctgagtttcgggttctgctcctacaaagaacgtgcggtgctgcgggcgagggccccggcacggacaagggccactgcagagtgtgtttctgctcgtcagctgccctgggcagcggatgggctgggcgatgcagctggatgcacatctcattctgtcatgaatgtccagtaaaaatctgaattggttgcaaccttctctttgcttctgttactggaaa

SEQ ID NO: 6281 - DNA, 839 bp, Artificial sequence
  DNA replication origin
acgaggcctgcagccacgcggaaagagcaatgaggagcacgtgtgtggggaggaaggcgggttctggccccgttccttccgcagcagctccggcctggcgggttctgacggaattctgcagcggctccagccagggtcgtcggggcggggtgggtgctcaggggcggcctttgtgttcggattagaagctggtgattgtcacattaagacctctaagctgctgcaatctgagaagatgttacacaaccagggcccctgagctgaggccaaggagggggccaggagagtggtgggaggggccccaggcagggccagagctgcctgtgtacagcaggggagaggggagaaggggtgggccgggtggtctcagccccagggagagtggagtgcccgcccctcccctcccccaggacggctggcccctgggagagcccctgggggagccagtttcctgtaagcagaagggcaagtggttgggacccagaggtgtctgacagttgtggacttagagcccagaggaagggtttggggtttggggctcctgggacgccgcaggcccctgaggacgtccatcaggatcctggcagtgtggaggtgtagggtccagccctacggggcttagcgggtgttttccctgtgtgtggagatgagggattgtaataaataaagacacaagataaagagagaaagagaaagcagctgggctctggggaccactaccatcaagacgcggggaccagtagtggtcccagagggctaggcccactgatatttattgcatacaagacaagggggcagggtaaggagggtgaatcttctcagtgattgacaaggtgaag

SEQ ID NO: 6282 - DNA, 1203 bp, Artificial sequence
  DNA replication origin
ttttcttctctgcacttataagaaagatcaaagactttaagactttcactatttgttttaccgctatctgctacgaacttcaaagaggaaccaggagtacaggaggagtatgaaatgcaacaaagagtaatattaaaagctaatgattaataatgtttataataatgattgataattgtccatgatcatctctatatctaatttgtattatgactaatcttattccaactattttctttattatactgaaacagtttgtgccttcagtctcttgcctcggcacctaggtactttcgcccacatggaggcagaggtgacaggcgtacagggcagtgtgtctggacccagatggcaggcacgttaacgaccagtgaccagggctctgcccacctggcccggcgcgttggccccccagcgatgtggcttcacgccggctgctttcctgagcgctcggggtttaggtcctgttctgctgcctctgagcacctgtgacctgaaaaggccctaccctcggcctgggtcccttggggtgccactgaccttctgggaccctgaagctgcctgtgtggtaggcgtgtccacccccacacccacccaaacgatgcagaggagtgaaaaatgattcctcgaggagctggtccagggccgggcgcggtggctcacacctggaatcccagcactttgagaggccgaggtgggaggattgcttgagcccaggagtttgagaagagcttgggcacacatggtgagactctgcctctacaaaaaattaaacatagccaggcgtggtggcatgcacctagagttccagctacaggaggctcttacaggggaggagggacaagcctgagctcaggaggtcgaggctgtggggagccccacgtgactacaccactgcactccagcctgggtgacagagcgagaccctctctggaaaaataaaaaggagctggtcagggaggccgagagcaaatagctgctagaatgtggcgctgcctgggacggggagggctgggggcccttggggtggaccaggagcctgagttgagggttaggggcaggtggaggggctgggaagctcggggctgtcttaggagagccctcctgacacctaggccctgggccgggttcctcctggtggaacatcacagacctgagccctcccactcacttttccttggaccccacaggcaaggagctggg

SEQ ID NO: 6283 - DNA, 1040 bp, Artificial sequence
  DNA replication origin
gccagtggggccctgctgggagccccagggagtcagggtgtctgcccggccccagctccccgctaagaatcagccgctctggcagcctgcctggtccacggtgactcaggaacaccaatcaaatgcacacgttgtttgtcagagcagatgcccacgcccccatggcagagccctaacccctggggtgcggacggggctggctggaggcccctcagctgcttcgagtaagggacaggtccacatgcccaggaacccgcctccatcggcattggcattgccgtgcccatgtgctccagtgtgtggcctggtcccactaggagggccacacccaccagacccaaggccggtggggagcagctggggagcagccgggagcagccgagagcagccgggagcagcggggagcagccggggagcagccggggagcagccgggagcagcggggagcagccggggagcagccgggagcagccgggagcagccggggcgcacgcacgttaccctcttcagccgacactgcaggcgggcgggcaagcccagggccacctcggggcaggggcaggggtggcctagctcagaacagagcagtcaaaggatggagtcagcttctaggtctcagatcccgggtccggggctgcaggaaggaagtctcctgccccgggcaggcagtggtcgactgtgggctgggcgctggcaggaggtgggggccctacagaactcccggccagtccttcaccagtccagggccacccatccgcccacgtccacagagggccgaggccacagcccccagcactgtgctttgaagtgggccctgctccacggtctctgctttccggagtcaaggggcaaaccctcaccaccaggaagaacaggtttcaccccttccaccggtgacgctgaacacccctggccgctgtgcatcccattccctccctgtccccagggccccagggccccagggccatggaacccggaaggtagctccaggtgccacacactctgccagaaacaaagggagcatcacctcgcttcctggc

SEQ ID NO: 6284 - DNA, 1503 bp, Artificial sequence
  DNA replication origin
ggtggaaggggtgaaacctgttcttcctggtggtgagggtttgccccttgactccggaaagcagagaccgtggagcagggcccacttcaaagcacagtgctgggggctgtggcctcggccctctgtggacgtgggcggatgggtggccctggactggtgaaggactggccgggagttctgtagggcccccacctcctgccagcgcccagcccacagtcgaccactgcctgcccggggcaggagacttccttcctgcagccccggacccgggatctgagacctagaagctgactccatcctttgactgctctgttctgagctaggccacccctgcccctgccccgaggtggccctgggcttgcccgcccgcctgcagtgtcggctgaagagggtaacgtgcgtgcgccccggctgctcccggctgctcccggctgctccccggctgctccccgctgctcccggctgctccccggctgctccccggctgctccccgctgctcccggctgctctcggctgctcccggctgctccccagctgctccccaccggccttgggtctggtgggtgtggccctcctagtgggaccaggccacacactggagcacatgggcacggcaatgccaatgccgatggaggcgggttcctgggcatgtggacctgtcccttactcgaagcagctgaggggcctccagccagccccgtccgcaccccaggggttagggctctgccatgggggcgtgggcatctgctctgacaaacaacgtgtgcatttgattggtgttcctgagtcaccgtggaccaggcaggctgccagagcggctgattcttagcggggagctggggccgggcagacaccctgactccctggggctcccagcagggccccactggcaacaggcagcctcctccctctggccgccgggcctccgtccctttcccagcctggggctgggaccaccgctccacaccacactgcactgcccttgtctgccccagcagggggtgaaggtggctggtggctgaggaccccctgcccaggcccacacttcttgctcaggccccataagtcacttgggatctggagagctggggactttgacctgggagggaggcatctggtcgtgaccctcaggcgtgtgtagggaggtgcctggccgtgaccctcaggcgtgtgtccctggcaggttgctctccaccggccccaccgtttgtaacacatggctcggccaaggtgattctggggtaaggacccatgaggcgccatcttctttgttcctaggctgagcctgtggtgccctgggcagggtgggtggaggaagcagcagggaggctccttaatggtggagtgaacacccacacggatgtctctggatagtggaatgcggaggatgcagggcacgccggtggagagctgcccagccgtgccagcaaggccccggcatccctcccacctgccgttagcaccgggagctgctctgctggcccctcccacagactcgggct

SEQ ID NO: 6285 - DNA, 2417 bp, Artificial sequence
  DNA replication origin
gcagcgtctggcagcgggtgagctgcacctgctttaacgttgttcgtctcaaggccagcgtttgggtgtcagagaaaaagaaaactcccgtggcaggtagaacataaataagtgcagcgtgtgtgacttcgcccctgcccggcatggcctcaggtcccgttgataatgtagcgtcttatggccacagtcagttctgctgggccatggtctccttttattttttaatttttaaaaaatttactttaagttctgggacacacgtgcagaacgtgcaggtttgttacacaggtatacacgtgccacggtagtttactgcacctattagcccgtcatctaggtttcaagccccgcatgcattaggtatttgtcctaatgctttccttccccttacaccccatccccgacaggccctgggatgcgctgttcccctctctgtgtccacgtgttctcattgttcaagtcccacttatgagtgagaacatgcggtgtttggttttctgttcctttgttagtctgctgaggatgatggtttccagcttcatccatgtccctgcaaaggacatgaactcattcttttttatggctgcacagtattccgtggtgtagatgtgccacattttctttacggtctctatgtaacattcacacccggcagctgctgggtctaaaccgcaaaggggagggggtgtgacgaggcgtctacctcccatcccatcactgctgggaactcagttttaaggtgggtctggggtccccttggccaagatggggttcatttagggttttatttttagttctcgggggcacagggttgggggagcatggttacgggagacagttgggggagtttgtgttcgggccaccagctgggaggttgtggagtggggcaaggattggggccatgggtcggtgcctacccagttggccccctggcctagagttggggggctcaggttgggaggtctctccttgcggttgccgggctgggggtcgctgttgggcgggggttggggcatctgcacccttgctgaaggctgcgtgtgccttccctcccagcctgtttgggggccaggctgaggggccgccggtcaccaacatcatgttcctgaagacgcacaagacggccagcagcacggtgctcaacatcctctaccgcttcgccgagacccacaacctgtccgtggcgctgcccgccggctcacgcgtccacctgggctacccctggctcttcctggcgcgctacgtggaaggcgtggggtcgcagcagcgcttcaacatcatgtgcaaccacctgaggttcaacctgcctcaggtaccgcgggcctgctggggaggagggcgggctgcagccgtgcctgtggctgtgggtctgggtggtgtagcctggaggctggagagaaggagtgtaaggcttgggggcggggcgtgcagaaggcgggttgggagggcctgggccgcacgccctgctgagccaacccctgcccctccaggcggccagtcgcctgccgttgctcttggaatgagacctgggagccccacagcccctgcccaagggcgtccccagcgctcccccgcttctctggcctcctagttgtgcacaggcccggctctccccaccctgtgaccttcgcttctgtggctgcaggcccttctttgggtcccttgggtctcagcatagagccggcttccccccagggcttccctgaccttccttacaaaggaagcagggcagggagtgtgggtgggagggctgtgggcaggcacaggtgttttagggtcaccctgagcgctctgtggagaatggccagcagaggctaggtgaccaggcggggccagagggaggccgggtggggagaggtgatgggcagagagcggggcagcgggggtgtgctgtggggtgggggctgcggggcagagggaggaggaggggccgggaggaggggaaaggaagagggtgggggcagggaggaggcctcccactgttctctccctgggtttctgaggatggagaagcaggcggtgtagttgggcgtgactttctgcaagactttactttctgtgggtggggtatatcctccaggacctctgagggggcacaagcgagggtgagtccagacccaccctgtggggaacctgggtcacggaccttctctgggcctcagtttctttgtctgttaggtgggtgtcaccctggcctgtgggcagctggtggagtgctgaagccccctgtgccaggggcccgtggagggcccttcgtgctgtctgtgcgccacagcatcccactcctagaggcctctgggtctcctcgagatgccagtgggagctcctcctccctcctcctgctctgcccacggactcctcctcctgaggccccttcctggcgtccttggcctctgttctgggcacccgggaaccag

SEQ ID NO: 6286 - DNA, 1631 bp, Artificial sequence
  DNA replication origin
cagtgggtcccgcctgacccgtgggtgtgcatgggtccccgtcgtaggcaggcgttctgccctggccaggcgtggtgtccggcatccggccatctccctcctccctccttcccttagccccgcatccaggtgccccgtgtgcccggcctgggcggctggccgtggatctgaccgctcctgcatggtggaggaccagcgttcccactgtctgcagctgtgccacctccctgtgccgggctgtgcgtgctcacgctcggctccgtctgcctttgtgcgatcagactgagagaccccccaggcaggtcccgcctgcaacaagcagaccccatgcgtgccccaaatgccccctcacccgggccctgccctggtgggtgttgcctgggagcaaactcccagaatggccgccgggccccactcggctttggagcttctgattcctgtgggcgcttctcaggtcagggccctgcaggtgggaagcaccaggcactggaatgagggcactgtggggccagctgcctgcaggcaggggtctgatcaccaagcacctgtcccctgcaggatccctggctgtggctcccccgatgacgttcaggaagtgggagccgatcccctgtccccagagagccccgtgactcccccgatgacgttcaggaagtgggagccgatcccctgtccccagagagccccgtgactcccccgatgacgttcaggaagtgggagccgatcccctgtccccagagagccccgtggctcccacaggtccctgtgggctcacctctttgtgtctctgctgtggcttccacggtgctgtggcctctattctggggacactgagctcctccttgctcgaggttttgggtcctcattgtccacatgacctcctgctgggcgaattctgggatgaccctgtgtcctgggcacatggctggcagggtcccgggggctctctggccagcctcccctgcaccctggcaccaaccagcctggccgagggtcagctcccagagccgtgttgagaggggaaggggctgattccacagacatttggggtggagtgggtgcgagggagggtgggggaggggctgctccagatctggggtgagggagtcagaaacagggctgaccccaaggtgggtacaggaagaggcccaggtgtgggcaggagctgtctgcacctcctgagcgcattccccagtccagaccgggagcgagtgtggggctccctgggcctgtcttgctgacctgtggccctgtactgaccagcagagcatgggggtccctcgtaccccttcacggacagtgctcttcgagcgggagaggacgggcctgacctaccgcgtgccctcgctgctccccgtgccccccgggcccaccctgctggcctttgtggagcagcggctcagccctgacgactcccacgcccaccgcctggtgctgaggaggggcacgctggccgggggctccgtgcgggtgagtgagtggccgggggctctgtgtgggtgtagtggccggatctgctggggctgcacaccccgggatggggcgggggtggcggcggcaggcagatgcccgaggtagagatgagcaaaccaggctcagcgatcctgggtgccctgcggggggctgtgccc

SEQ ID NO: 6287 - DNA, 1559 bp, Artificial sequence
  DNA replication origin
tggggagtgccagggtccaggaccccacatccccactgaccccaggcctggggccaggctgcctggggccatccccccgaggctgcagacggctgaagggcccaccaggcacctggcctccacgggggtctacagcagcctcctctgggggttcgtggactccaggaccgaggagtggaggctggaggggactcccggggcccactgaccaactgtcatcccgtggcctgttgggggcgggggctgggaagcccacgatgctgccctggcagccccaggcagtctcgggcagggaagccacgcgctctgcgggcaggaaggaggtgccctcgtcagtgctgagcgcctgcacacggctgcccagtgggctccgggcattgcagtagaggaagctgccggcctgcccaccgtccaccgctgccagctggcactcgcctgagcgcaggttgggcacgaggcctccacagcgccaggtgcggccgtggtcatcgctgtagaaggcgaaggagtgagggctggtccggcagatcttgccaaaacactctcggcggtccacgcggtaggtgtaggcgggtaccagcaggcggcctgagggcagctgcacaccgtggccgggacccacagcgaatgtggcccagtctgcagggaggagggcagaggtgggaggggctgctgggtccccgaggtcggggggctggaggaaggcacagggggacggggaaggaggggctggtgcctcgggttaggaccatcgcactctgaccgcccttccacacgactcatcccagccgccctgagtcctcccaggctgaacaagcctctcacagcccttagcagccgagcccaggtggacggcacccagggaggctggtgagcgctgcccacacagagagagcggagggcaggcggggggcatgaggccctgcagtggggtccctgggttggccatgtgtctgctgcactccctgctgtagctcccacgggccggggtcaggtggccacagaggatggggtggagggaaagttgtgggtgaggcctggccaggccctgggcagggtgagaagggagtaaagaataagaggaaggggtggggcggggtggctgttggtttgggagctgagagacacctcagcgtccagccttctcctctgcagataaagagattagcgggggggatgagagagagtcgggtcagccatagagggcctgctcctgcccactgggtgactgggggtgatcaatacccatttgcctgggacgggaggtgcaggacggtcctggggagagggatttgcctgggacgggaggcgcagaacagtcctggggagagggatttgtctgggacgggaggctcaggacggtcctggggagagggatttgcctgggacgggaggcgcagaacagtcctggggaaagggatggttggttcccttgtggctggagacaggggtggggcagaatggcaatttcccgctggaatctcccttccatgtggaccgtggccaatcaaagggacccagaccggcaccctgcccgcctaccctgcacggcaccaccg

SEQ ID NO: 6288 - DNA, 912 bp, Artificial sequence
  DNA replication origin
cagagccctgggtgatctacgagggccccagcggctactccgacctggcgtccatcgggccggcccctgaggggggcctggtttttgcctgcctgtacgagagcggggccaggacctcctatgatgagatttccttttgtacattctccctgcgtgaggtcctggagaacgtgcccgccagccccaaaccgcccaaccttggggacaagcctcgggggtgctgctggccctcctgacaggccttctggccgtgcccatgccccttgggtgcctggggcagaggggtggaatacgttggggtgccccacgatagctgtggggggggctcttagtgcaggatcctgtggattagaaacaagttgctcctcagagctctcaagcagggactgctctttaggaaggggagcagcggctgggagtgagcagggcagggtgggggcagggtgggggcacgaagtgggccctgggtgacccccacagctcccttccgaggctgcagggccaggcgcgggaccgcaggtagcccagggtgttgtgggtggcagcacttgtttactggctgctttctggctcgaaataaaggaatcgtgcttgtgtcggggtagacgtttctttccttttcaggttccagccctggggaggggagttctgctgtagcccacttctctgacccccatcccaaaatcccgctgccttagcaaagctctactcctaaatgtcctggggccagcagagggaaggcgggagggaggaagtggcctccgcccctggcctccggtgacagtgatttgcaagtggtctgctgtgctctctgaacttcctgctggaggagtaggaggtagggcctctccccgcagagttgaacgccaggagggggtcaccttccaggaccagtccagtgtcctgctcccc

SEQ ID NO: 6289 - DNA, 1491 bp, Artificial sequence
  DNA replication origin
acagccctgagttcccacaatcaccccgggcccctccccacctcaggcagcctcagcccctcataggaggggcccgttgcccgggccctggcagtgctggttttagggggtctgtgtcttagtcccttggggctgccaaaatgaaatacacagaccaggggccttggaaacaacagaaatgtatttatcacggttctggaggctataagtccaaggtcaaagtctgtgatcatgagggcaggctccgtgtctggtaagggcccagtttccggctagtggatggcggcctctggctgtgtcacacacggcgggagggagaggtctctcctgggtctcctgtatgggacactatcccattcatgagggctccaccctcccaggaggccccacctcctgaccttatcaccctggagttaatatttcaacatgggaatctggggtgcacgtgtagatcacgtgctgggtgccttgtgtcacgtgtgtgtcctgacttgtggcccgtgtgtaggtcacatgctgggtacattgtgtcatgcatgtgtcctggctcatggcccgtgtgtaggtcgtgtgctgggtgcatcctgtcatgcgtgtgtcctggctcgtggcccgtgtgtaggttgtgtgctgggtgcatcctgtcatgcgtgtgtcctgcctcgtggtgtgtgtgtaggttgtgttctgggtgcatcctctcatgcgtgtgtcctggctcgtggcccgtgtgtaggtcgcgtgctgggtgcatcctctcatgcgtgtgtcctggctcgtggcccgtgtgtaggtcatgtgctgggtgcatcctgtcatgcgtgtgtcctggctcgtggcccgtgtgtaggttgcgtgctgggtgcatcctgtcgtgtgtgtcctggctcgtggcccgtgtgtaggtcgtgtgctgggtgcatcctgtcatgcgtgtgtcctgcctcgtggtgtgtgtgtaggttgtgtgctgggtgcatcctctcatgcatgtgtcctggctcatggcccgtgtgtaggtcgtgtgctgggtgcatcctgtcatgcgtgtgtcctgcctcgtggtgtgtgtgtaggttgtgtgctgggtgcatcctctcatgcatgtgtcctggctcatggcccgtgtgtaggtcgtgtgctgggtgcatcctgtcatgcgtgtgtcctgcctcgtggtgtgtgtgtaggttgtgtgctgggtgcatcctctcatgcgtgtgtcctggctcgtggcctgtgtgtaggtcgtgtgctgggtgcatcctgtcatgcgtgtgtcctgcctcgtggtgtgtgtgtaggttgtgtgctgggtgcatcctgtcatgcgtgtgtcctggctcgtggcccgtgtgtaggtcgtgtgctgggtgcatcctctcatgcgtgtgtcctggctcgtggcccgtgtgtaggtcgtgtgctgggtgcatcctgtcatgcgtgtgtcctggctcgtggctagcagggtcatcacagtccactctt

SEQ ID NO: 6290 - DNA, 1473 bp, Artificial sequence
  DNA replication origin
cgggctgcggctgcgctcccgccccacccacgcgccccaggcgggtcggcccggcctcgcacagcagctgcggcggcttcaggagcgccctgggtgtggccgggcctcggggctccccgggggacagtgccgggaggaggccggggcgcgtgggacccggagcgagagaggcgcggccccgccccgtgtcccaggcccctgagcccggccagctccacccacgcccgcgcccccgcgcccccgcgcccccgcgcccccgaccctgcagcgccgcccccacccctgcgccccaccccagccccgcccacacccaccggccgggtctgcggagtgcgtgggcgttggacgccttactctgcacgggggaccgcgggtcctgtgggcctcgtggatggagcccggggtccttggaattgggcggggtgggggggagtccgcccagggctcccagcaggagcgaaggtgagcggggggcctctgaaagggaacccaccctcgggctacaggagaccgggctggcgatctgggtgcagcgccaaggccctgggggctggtggggccgcatggggggctgcggtgtgagtcctggtggtctctaccctcgtgcgtcagggctccagtgtggacaaacctcgctctgagtctgggtgaggctcctgagattctggagagttcaggatgtggagggtcctctggagggtgaccgaggccgtgtgaccacaccatcgccgtggccccctcgactgtggcacaatcgctccccttcttgggtggatctccgcgtgttctccccatacctctgaccccagtcagtctgccgcacccaccagtgggggcccctgtgtttgtccagccttagaaaacctggccggggtgtggccggaggggcactgccggtgccactggccagggctgtgagagcgcaggatgcctgccccgggcacgggggcaccgtcgtccccaactgcttagccacagaatccaagattggtttggggtcttcagtttttatctcaattcaacctgcaaaaccaagttattacatacatggaggagtattcagccttaaaaagatggaagtcagtgcaccccattcccagcagcgcaattcacaatcagcggccatgtggaagcagcagctccgtgtccaccgccggaggaaggaacggacagcacggtgattccgcacagagggagtcacctcaggaaggaagggctcccacacccgccgcagcgtggaggaacctcgaggacgtcacaccgaggggcacaagccacaaaaggacaaacactgtgtgactccccacacacgaggtccccagagtgggccggttcataggcagaaaaagcagacggtggggcccggggtcgggggagccagcgggaagtgagtgtttaatggggacactttctgttttgcaagagaaaaagagtttctgtttctgggctgggaggtcagccgctgaaccgctg

SEQ ID NO: 6291 - DNA, 1304 bp, Artificial sequence
  DNA replication origin
aataaaggacatcaggcaacaattaaagagaagactgatacactgaactccatatattggaaaacaaaaaactttagcttggcaaaaaaaatcataaacaaactgagggaaaatgtttgcaccaccacaaaagagcgaatatgccagtcgtaggaagatctaagagtctggaaaaagcaaggtcaaaaatacacgagaaagtgcaggagacataacccaacagctcagagaaaatgtgtgtgcgtgagcctgtgtgtgcacgtgtctacacgtgtgtagacatatgtgtgcatacaaatgtgtgtatgtacatacacaggggtatgtgtgtgggtgtgtgtgtacaggtgtgcggacgtgtgtatctacaatatatgtatatacggcagtgcctgcgtgcatacccatatcccttaaacaatgaaaggttgttcaggttctctcaacaaaaatacaagttgaaactacatccaccaggctgacagagctctgacaacggtgcggctgttggcgaggcagcagggagcaggcctgaggggctggcggggaagccgagctggagacgcaccggtgctgtctggtaggcggtgggcacttgccctttgccccctcaacccccatcctcgtcgaaacacttcccagaggtcaccggcaaacatgtgcagacgcagagcccacgagctcacggcgctggctcggcaacggcaaagccgtccaaagccggccgggggcttgagcccgccccggagcctccatcagctgagagctggggccgcgggagcagggaggaggctcagggctccccacagagggtcaggtcactcaagaccatgaggggacacacgcgcaggacagaacaactcgctgtccccaacttgctgtcgtgtgaaaatgacacggcagcagtctgagcatcaaacaatgccaaattaaaattaaaaacctaactgaggcttggcacggtggcactttgggaggccgaggcgggagggtcgcttgagcccaggagtttgagaccagcctgggcagcaaagtgagatcctgtctctaaggaaaaattttaaaattagccaggtgcggtggtcccagctcctcgggaggctgaggcgggaggatccctggagtcccggaggtggaggccgcagtgagccacgatggtgccactgactccagcctgggcgacagagcaagaccctgtcaaaaaaaaaaaaaaaaaaagcctaattgattgacacactttgagtacgttaaaaagaacatgagctcagatcgatactcacaaaaagagacaaggcgggcgggga

SEQ ID NO: 6292 - DNA, 2144 bp, Artificial sequence
  DNA replication origin
gttctggatgctggcgcgctgcgctgtgaatgggtgtttgagagccttgagttctggatgctggcgcgctgcgctgtcagtggatgaatgagagacgtgagttctggatgctagcgccctgcgctgtcaatggatgaatgagagccgtgagttctggatgctggcgcgctgcgctgtgaatgggtgtttgagagccttgagttctggatgctggcgcgctgcgctgtcaatggatgaatgagagccttgagttctggatgctggcgcgctgcgctgtcagtggatgaatgagagacgtgagttctggatgctggcgcgctgcgctgtgaatgggtgtatgagagccttgagttctggatgctggcgcgctgcgctgtgaatgggtgtttgagagccttgagttctggatgctggcgcgctgcgctgacaatggatgaatgagagccttgagttctggatgctggcgcgccgcgctgtcagtggatgaatgagagacgtgagttctggacgctggtgcgcagcgctgtcaatggatgaatgaaagccttgagttctggatgctggcgcgctgcgctgtgaatgggtgtttgagagccttgagttctggatgctggcgtgctgcgctgtcagtggatgaatgagagacgtgagttctggacgctggcgcgctgcgctgtcaatggatgaatgagagccttgagttctggatgctggcgcgctgcgctgtgaatgggtgtttgagagccttgagttctggatgctggcgtgctgcgctgtcagtggatgaatgagagacgtgagttctggacgctggcgcgctgcgctgtcaatggatgaatgaaagccttgagttctggatgctggcgcgctgcgctgtgaatgggtgtatgagagccttgagttctggatgctggtgcgctgcgctgtcaatggatgaatgagagccgtgagttctggatgctggcgcgctgcgctgtgaatgggtgtttgagagccttgagttctggatgctggcgcgctgcgctgtcagtggatgaatgagagacgtgagttctggatgctagcgcgctgcgctgtcaatggatgaatgagagccgtgagttctggatgctggcgcgctgcgctgtgaatgggtgtttgagagccttgagttctggatgctggcgcgctgcgctgtcaatggatgaatgagagccttgagttctggatgctggcgcgctgcgctgtcagtggatgaatgagagacgtgagttctggatgctggcgcgctgcgctgtgaatgggtgtatgagagccttgagttctggatgctggcgcgctgcgctgtgaatgggtgtttgagagccttgagttctggatgctggcgcgctgcgctgacaatggatgaatgagagccttgagttctggatgctggcgcgctgcgctgtgaatgggtgtttgagagccttgagttctggatgctggcgcgctgcgctgtgaatgggtgtttgagagccttgagttctggatgctggcgcgctgcgctgtcaatggatgaatgaaagccttgagttctggatgctggcgcgctgcgctgtgaatgggtgtttgagagccttgagttctggatgctggcgcgccgcgctgtcagtggatgaatgagagacgtgagttctggacgctggcgcgctgcgctgtcaatggatgaatgagagccttgagttctggatgctggcgcgctgcgctgtgaatgggtgtttgagagccttgagttctggatgctggcgcgctgcgctgtcagtggatgaatgagagacgtgagttctggatgctggcgcgctgcgctgtcaatggatgaatgaaagccttgagttctggatgctggcgcgctgcgctgtgaatgggtgtatgagagccttgagttctggatgctggtgcgctgcgctgtcaatggatgaatgagagccgtgagttctggatgctggcgcgctgtgctgtgaatgggtgtttgagagccttgagttctggatgctggcgcgctgcgctgtcagtggatgaatgagagccgtgagttctggatgctggcgcgctgcgctgtgaatgggtgtttgagagccttgagttctggatgctggcgcgctgcgctgtcaatggatgaatgagag

SEQ ID NO: 6293 - DNA, 975 bp, Artificial sequence
  DNA replication origin
gggcacacctggagaccgcaggcaggcacatatgtgggccgggcacccccagagaccgcaggcgggcacacgcgtgggccaggcacccctggagaccgcaggcaggcacacacatgggccgggcacccccggagaccgcaggtgggctggggccccagatcatggctttagggattgaggttgctgcctgggggctggggaggtggggtcctggctataatagaatgtgagtcctgcaggccgtgtggtcccagcctgtccttccacctctgcccacccaggaaggaaggcacagtggatcatgcaggaaaagagtgagactcaccaggggctggccggtgcgcctggctcctattgtccctgcagagaaacacacttggggtcaccaggccgaccctgagccgtgctcctaggtggggggtcttagtccaggggccttcatcagggacttagcctggcggggagatggggggaggtggggtggggtgagggaagggtggaggaaggggaggcgggagtgagggccgccagcagggttagggcagggcaggccgaggggctgggatgacgttacctcgtgcggcccgggagcagatgacggccaggacccagactagcagcaccaggctgcccagcaggccgcccacgacaccaaccaccagggtttggaactggccggctggcctgggtgaggggctggggtgggctgtgggcacttctgcccttctctctggaagggcacaaaggtcaggggttaggacggggtcagggtggagggtcagggtcaggggtgagggcagactagaggggctggggtgcttccagagctagaggacagagatgccggtcaccattccccaggtgcaggacagagccctggactggagctggggggtccctgccctacgaccctggagctcctgatcctgtgcaggaggggacacccaccccaggaccggctcagctcacccctgc

SEQ ID NO: 6294 - DNA, 1565 bp, Artificial sequence
  DNA replication origin
gctactcaggaggctgaggtcggaggatcgcttgagcccaggaggtcgaggctgcagtgagccaagatcacaccactgcactccagcctgggtgcagagcaagaccctgtctctaaaagaaaataaacagacaaaaaccacatacaactttgcttgttgtaaattatcttttaactgaatgccctggattgaatctggctgctgccatcccagggccagtgatttggatggggtatgaccctctgtgaggaaggagcaggcggtgggggaagggcctgggtgtccaggttccctgggaaggaaggctgagaaaaggagatgggggaggggtgcgcagggccggccagccaagggccccttagccccatctaccctgctccccggactccgcctgcctttcctcctcgtgacagaagacagtggaagcctactgggtggaaggcacgggcttaggatgtgtgtgggaggaaagtgtgtgtgctggggagcatgtatgtttgggagttgtgtgtgttggaaatcgtgtgttggggattgtgtgtatattgcagattttgtatgtgtgttggggattgtggtgtgtgggtgttgtagattgcgtgttggggattgtgttggggattgtgtatgtgttgggggttgtgtgtgtgttggggattgtgtgtgggggagattgtgtgtgtgtgctggggattgggtgtgttggggattgtgtgtgtgttgaggattgtgtgtgggggagattctgtgtgtgtgctggggattgggtgtgttggggattgtgtgtgtattgggaattgtgtgtgtgttgaggattgtgtgtgttggggatttgtgtgtgtgttggggattctgtgcatgttgggagttgtgtgtgagttggggacaatgtgtacagaggattgtgtgttggaaattttgtgtgtgcgttgggaattttgtgtatgtgttgtggattgcgtgtacgttggggattgtgcatgttgggaattttgtgtgtgtgttgagaattgtgtgtgagggaattgtgtgtgtttgagattgtgtgtgtattgggaattgtgtgtgtgttgaggattgtgtgtgttctgaggattgtatgtgttgggaattttgtgtgtgtgttgaggattgtgtgtgttggggattctacgtatgttgaaagttgtgtgtgtgttgggattgtgtgtgtgttgtggattgtgtgtgttgggaattgtgtgtgtgtgttgaggattgtgtgcagggggattgtgtgtgttggagattgtatgtgttgggaattttgtgtgtgtgttggggactgtgtatgttttggggattgtgtgtgttgggaattttgtgtgtgtgttgaggattgtgtgtggggggattgtgtgtgttggagattgtgtgtgtgttggggactgtgtgtgtgttggggactgtgtgtgttggggtgtggtgtgttggaaatcgtgtgttggggacaccgtatgtgtttgggggagggtgtcaataagtggtctggagtgtgatattggggtgcaggctccatgagtccccaccccacacctgagccctgg

SEQ ID NO: 6295 - DNA, 2394 bp, Artificial sequence
  DNA replication origin
cccgaaactgcttctgcagtgggaggcgccgggcgcccggctggccgggtggaaaccacgctgcagccgccgggccaagggcaccgcggtggggaggcagcgcctgattcacagcaatttctgaggttggaacaggaaatggttaatagtgtttgcaaataaaaactctctgttctatcctgttttcgaaacatttcccagaagttaaaaaataacacccaatttatctgcccaatttaagaataaactttttaaaaattgaatgagatatttccacaatttattatacacacaaaaaaatcgttgggctgtttgttaagggggggtggcaggtgatttctagccaccccccccgctgttttctaaactttctagaatgtggttagtagtttagatgtcaatttatgttctaaatctcccagtgtgtacatgtatatgtgtgtgtgtaggtgtgtgtgtttatgtgtactgtatgtggtatgtgtattgtgtgtgttggtgtgtatctctgttcatgtatattgtgtgttgtatgtagtatgtgttatgtgtgttgtgtgtagtgtacgtggtgtttggtgtgtgtagtgtgtgtggtgtgtgtgtagtgtgtgtggttgtagtgtgtgttgtgtgtgtagcatgtgtgctgtgtgtactgtgtgtgtttgtgtgtgatatgtgtgtgctgtgtgtggtgtgtggtgtgtgtgtagtgtatgtggtgtatgttgtgtgtgagctgtgtgtgatgtgtgtagagtgtggtgtgtgtgtagtgtgttgtgtgtgtggtttgtgtgatgtgttgtgtgtagtgtgtgtggtatgtgtgctgtgttgtgtgtgagctgtgtgtgatgtgcataatgtgtggtgtgtgtggtgtgtggtgtagtgtgtggtgtgtgtggtgtgtgtagtgtgcatttgtgtggtgtgtgtggtgtgtgtagtgtgcatttgtgtgtggtgtgtgtggtgtgtgtagtgtgtgtggtgtgtggtgtaatgtgtttggtgtgtgtagtgtgcattgtgtggtgtgtgtagtgtgtacgtggtgtgtggtgggtgtagtgtgtgtgtggtgtgtgtagtatgtgttgtgtgtgttgtgtggtgtagtgtgtggtgtgtgtggtgtgttgtgtgtgtggtgggtgtagtgtgtgtggtgtgtagtgtagtgtgtgtggtgtgtgtgtggcatgtgtggtgtttggtgtgtgtggtgtgtgtagtgtttttatgtagtgtgtggtgtgtgtcgtgtgtgtggtgtgtgtcgtgtgtgtagtgtgtgtgtggtgtttggttgtgtagtgtgtgtggtgtgtgtactgtgtgtggcgtgtttggcgtgtgtgtttgtgtgtggtatgtgtagtgtgtgtggtgtgtgcggtaatgtgtggtgtttctgtggtgtgtgtagtgtgtgtttgtggtatgtgtagtgtgtggtgtgtggtgtagtgtgtggtgtgtgtggtgtttggttgtgtggtgtgtgtagtgtgcgtttgtgtgtggtgtgtgtagtgtgtgtggtgtgtgtactgtgtgtggtgtgtgtaatgtgttgtgtgtgtgtagtgtgtgtgatgtgtgggtgtgtgtgtagtgtgtgtggtgtatgtggtatggtgtgtgtgctgtgtgtggtgtgtgtagagtgtgttgtgtgtgtagtgtgtgttgtgtatggtttgtgtgatgtgtgtgtagggtggtgtgtgttgtaagtgtggtgtgtgtagtgtgtgtgtgtggtgtgtgtaatgtgcgtttatgtgtggtgtgtgtagtgtgtggtgtgtgtagtgtgtgatgtgtgtagtgtatgtagtgtgtggtgtgtgtagtgtgtggtgtgtagtgtgtggtgtgtgtggcatatgtgtcttgtggtgtttggttgtgtggtgtgtgtggtgtctggtgtagtgtgtggtttgtgtggcatgtgtggcatgtgtggtgtttggttgtgtggtgtgtgtagtgtgtggtgtgtgtgggtgcgtgtggtgtgtgtagtgtgtgtggtgtatgtggtatggtgtgtgtgctgtgtgtggtgtgtgtagagtgtgtgtgtgtagtgcgtgttgtgtatggtttgtgtgatgtgtgtgtttggtgtgtgtggtgtggtgtgtgtagtgtgtctggtgtgtgtagtgtatggtgtgtgtagtgtgtgtggtatgtgtagtgtgtgtagtgtgtggtgtgtgtggcttgtagtgtgtggtgtgtgtggcgtgtgtggcatgtgtggtgtttgtgtggtgtgtgtggtgtgtgtagtgtgtgtgtggtatgtgtagtgtgtgtggtgtgtgtggtgtgtggtgtgtggtgtcctgtgtgtgtgtggcgcccctg

SEQ ID NO: 6296 - DNA, 1543 bp, Artificial sequence
  DNA replication origin
ggcctcacagctgccagtcacagggagagaggcccccgcagggggggcagggccctcagcgatgggcacctggtcattgctggtacccacaagggagaaggggatggcgatgacaacgccacccttgccaaggtcgtcgccaggggtggacagcggtttgcccctggagacggtgccagtgccaccccaggccgtggcggggaagttgccttttgtggcgttggcgctccaggcggggtctggggccttctggaggaagcagacccccagctcacaggcctcacagcagccctcataggcctccctggggtgccgggctgggccggggccatccccgtagcagtcctgcaggatgtgcaagaccagcctgctgaggaagggctgctcgcccgggggcctcacctggcagtccccgggtgcggggcacagcctgcaccgctggccccagatgcgcatcttcaccagcccccggtggctggccctgtcccaccacaggtggaagaggacgtgcacatgggccgagtcccaggtccccggacagtgaccgcactggagcctgcggcggggaaagaagtgtgtgtgagtgcaggagaaagaggccccacgcccagccctcgcactctgctctgcggcctccttgcccatccgaccccagcgcctcgctgccccctgcctcacatcccacactcaaacctcaaacctcaccccccagccacccagggccgcggccaaggcagcctagcacctgctcctgcctgtgccgaggctctgaaaccaccagcccctcggccacacacaggcaaaagcaggcccatgcgcactagcccgcagccccctcatgtggagcactgagaagcaaagcaaacctcctctcagcagtttttcaacaaaacccgctccagcctggcctccgtgaggcgtcggcagcctgccacctgcgtggctctgctggtgttttgtgagttggggttaacacaggaagaggcaggcctgccgacacacttaggaggggaaaagcatgcatgtgggggctgtccctgggggctcagcaagtgggggtccctgtcctgactgagaggaggcgatccaggaggtcgcctgccagctgaggggaaggatgtcacggaggcctgcggtcatggcccgggcagccctgctgggcgtcaccaggcgaggagaggtttggggagagcactgggagggattggcttgtccatggcggtcatcagaccggtgaccatttgctagccacacaagcagctgtgagcttcagggaaccctgcatgagtgagaggctatgattcagttccaggcagtggaagtttctggatgacagaatgttctatagccacactgccctgcctgcagcctccaaccacactggccacagagcccgtggacacgttcgtgctggaggaactgaactgctgactttatttaaatgggactgaggagccaaagccacgggcgctggggctgcatgttggggcagccgtcctcagttctctcccgccagctgggagccgctcagagccatctccac

SEQ ID NO: 6297 - DNA, 1130 bp, Artificial sequence
  DNA replication origin
gcctcttccacaagacccctgggtccacacaggagggaggttaatttgcacctgacacggagccggagccaaagcttcctctcctatcccaggagccacacatggccaggaattcggaatccccaagagggagctctccccaggggaagaagcggtgggcgtgaggggcccctgcagggtggagggacagaaggaccggcccaggtttctctcacctggaaacctcccctaggtggagggctgcgtggctggctttgcttggttttattgaagttacacacataggaagaggctggagcacacaggcacagctcagggcagacccacaaaaccaggggcaagagacaggaggggctgagctgctggcgggggcggggtctcagaggtgaggcggggtctcggaggcggggggcggggtctcggaggcggggggcggggcctcggaggtgaagcggggtctcggaggcggggggcggggcttcagaggcaggggtctcagagaaaggggtctcggaggtggaggcggggtctcggaggtggaggcggggccacggaggcggggcgggcatctcaaaggtggggttggggggtgtctcagaggtgaggcggggtctcagaggcagggcggggtctcggaggcggggggcggggcctcagaggcgggggtctcagagaaaggggtctcggaggtggaggcggggtctcggaggcggggcgggcatctcaaaggcggggttggggggtgtctcagaggcgaggcggggtcccagaggcgagggttgcctgaacttcggggcgtcacacttgctgcgggtagatcccggggttcagccgacacatgcacatcagccagaagacgcacacggtcatggacacccagatccagaagtcctcgtagggctcggcgtgcggcctacggcaggcacggccagggcgctcgtcttcctcccggcggcacccacagcgggccttgtggaacctggacctcagctgcctcttctggtaatagccttgggagaagcagccattgccctgggggccgtaggcaacgtggccaccgcccttgcgctttatgacatcgaagactgcgaaggggatggtgatgcagccctcactaaccgtgatggggc

SEQ ID NO: 6298 - DNA, 1462 bp, Artificial sequence
  DNA replication origin
agtgaggggtagtgaagggaagggagggaggaagcaggttggcaggggagggggagccagtgagagggaggacgggaggaagcaggtgggggggcagcaagagggagaatgggaggaagcaggtggggggtgccagtgagagggaggacgggaggaagcaggtgggggggcagcaagagggagaatgggaggaagcaggtgggggtgccagtgagagggaggatgggaggaagcaggtgggggggcagcaagagggagaatgggaggaagcaggtggggggtgccagtgagagggaggacgggaggaagcaggtgggggggcagcaagagggagaatgggaggaagcaggtgggggtgccagtgagagggaggatgggaggaagcaggcggcggggggggcagtgagggggagggagggaggaagtccaccccaccctccagcctgacctgagctgtggctgcctctgagagggcagaagggccggcctgcaggcgatacgccccctgacacccactgagtgagaccgagggcacccccacctgaatcccctctatgaagcttaatgagcttaaaggagcatcggagctgggggaatggtggccccaaaagacatgtcccccgagaacctgcgagtgggacctcatggagaaagggtctttactgatgtaattaagtttaggttctccagatagaatcatggtggattagagcggtccctgcatccaatgacaggtgccgttataaagcagagaacacagggagacggatgccgcgtgaagaagaacggagccagagtgacgcatccacaagcagaggagcacgaagatgcagcgagccccagcatggcggagagaggcaggaaacgcatccccctcagagccacccccagtctcccctcagagcccccacagccccctcagagccactgcatccccctcagagcctccggagggaaccgaccccatcaccactttgtttcagacttcaggtctccagaaccgtgagacagtatccgctgttttgagccatccggtttgtggtaccttgttaaccttcttctacaaccctaaaaagcaaataccagcatgcactattttagattttaaaaccaggattataaaagaaccacagaaacacagggaaaggcgcgattatccagttttctcgggcagtcgctctgaagaggaaatgttggagaggaatttgcacaacagaagtgggttactgaagggcattgaggcagcctccttggggggcgcgggtggtctggtgggtgggggtgaggggcaaatggcagagagagagagagagagagaggtgggccctgcctgcatccttcacttcaggggtttgccttggccaaacagctagttctagccaagaaacttgggcaggggtgatgcagtccactcctggccctggctcataagaccctcgcaacagcctcctcactttcctcc

SEQ ID NO: 6299 - DNA, 1050 bp, Artificial sequence
  DNA replication origin
ttaaatacatttatagaaaactaacaactaaaactaaactaaaagtgacccatacttagggccacttttgacacttctgttccatactgtactgggggtcccagccaatgcaataaggcaagaaaaggaaacagagggcataaaaatcagaaagaaagatgggggagggagaggaaaaagagaggaagaaagccattatttgcaagcatgattatgtgttgagaaaaccctatgtaatctacaaaacaaactactgaaaatgattcagtgaatctagtcaggttgcaggatatctgatcaagtacaaaattcaattatcttcctatatttctatgaacaatttaaaaatgaaattgttaaacaattccatatgcaatggcataaaaaggcaccaaacctgaagaatagaagtaacggagccccagctagacagcagctgatgccccccgagaggtcccatgcagccatccccgggcagctgtcccaggtgcccaccccccactcaccaagagccctgaaaatcaagggtctgagcccaggggagcagacccagctcatgacaacaaatgtacaaggccaaacggaaggcacctgctgcttcttgcctcccagcctgacagacagttacacgtggtggggccagtgagagggaggatgggaggaaagaggcagggagtgaggggtagtgaagggaagggagggaggaagcaggttggcaggggagggggagccagtgagagggaggacgggaggaagcaggtgggggggcagcaagagggagaatgggaggaagcaggtggggggtgccagtgagagggaggacgggaggaagcaggtgggggggcagcaagagggagaatgggaggaagcaggtgggggtgccagtgagagggaggatgggaggaagcaggtgggggggcagcaagagggagaatgggaggaagcaggtggggggtgccagtgagagggaggacgggaggaagcaggtgggggggcagcaagagggagaatgggaggaagcaggtgggggtgccagtgagagggaggatg

SEQ ID NO: 6300 - DNA, 1314 bp, Artificial sequence
  DNA replication origin
ggttctattaactactaattagtgagccacagtcatgacatcctttgtaaggaaaaatgttcctaactgaagcgctcgcccatgtccgcggtgagacgcctgcatggggcggtctctgcttctccccaaggaccctcctcgccgcccgctcggctgcaccggcagatggtggcaggggacaaggacggcgcggtgggccccgcgcccagctcaccgcgagtgctgctcccttcacaaaacgctagagagaccagcaccctccttgccccgcccctgcttggggcctctctgtgcttggagaggaggcccaggcttcctcctcttcctggagcgggcgtgaggaggggtctgcaggctctgtctcccggacagagcagcctggaaagtcccgtgctccggggacgcctgtctttgactctgttctcctgggccgcaaggctgaggcccgagtgcggaggctgcacctgctcagctccactgtgacctcttggtgccggggacacgcctgcccccgcgcacattgccgcccggcccacctcctgtctgagccctctcagcagacaaggtccttggtgcctggagtcatcaggacagatggtggagcccaagtccctgtgtggggaggggaggagcaagtcctagtgtagggaaggggtgagtcccagcgtggtgagggggtgtctttcccgtccatggtgccccgtcgaagctccacacactggacaggccacaagttctcatgggactcgggcccatgcctggcccagtgtggacgccctactgaagcggcatcccaggccccagcagctcagactccccccagctgccctccccatgcccagcttgatgggtacacagtgttgcccgctagtgtccacgccctcccgaggggtccctgggctacagcaatgtttggtctgagtgaatgagccatgggggaacagacgcccctgtagctgcagaccccctgccacaaagcacaaggtggcagggggtgtcccagaaggccccgcagagaaggcagcttcgcaccaacctcgtgaggccttgggggtcagcagctgggccaggagctgacctgggaggcagggaggcagggattacctctggagccatatctggggctgggactttgcctgagccaggtgttctaggaatgcactttagctgcagagtccttatccatctggctcagcgctggggagggcaacagggagtggtggggtctgtggcaaagtgaggtgccgccatgtccacgggcggctggtgctgagctcacagctgctctgggcaaactttttccatagatgcctc

SEQ ID NO: 6301 - DNA, 1142 bp, Artificial sequence
  DNA replication origin
ttgggggtcagcagctgggccaggagctgacctgggaggcagggaggcagggattacctctggagccatatctggggctgggactttgcctgagccaggtgttctaggaatgcactttagctgcagagtccttatccatctggctcagcgctggggagggcaacagggagtggtggggtctgtggcaaagtgaggtgccgccatgtccacgggcggctggtgctgagctcacagctgctctgggcaaactttttccatagatgcctcaaatctgaatttttaggaagcatatccagattttaaggtgttgactaactactatttcacctaaaaaaaagccactgagccggctcccccatgtgggccggacacagcattgtactagaatcccagcagcgagggggatcccgcacttcctgggggcctgcgggggctgcagtgggtgtctgggattccagggtgggggcgaaaccctgcttttgaggagccctcagatgggggcggggagggagccattcagggacgtcctccatcgcagcaggcaggagctgagtggctgctgggaagggtgaagacattctcctctacactcaggaggcacacggggctctcagattagacggcaccgagtgggaaggtggtggtttcatgatcaatttcctgaccagagccacctgcagaggaatctttttcctgaataccatattttctaagctattaggagcacagcttggcaatgactgagggtgtctggacggtgaggtgtgcgctgggaagccttgaggtgccgtctggtctggcgtgccccaaggacacatgtggggagggtgccaggccctgagtctgtgggtgttgtcaggaggtggcccctcttttcctggttctttgcctgctggtgctggtctgtgaatgccctcggggcctcctcctggaagagcctcttccctgggcccgctgagctgcagaggctgcaggtgcgtctctgcatgtggctgcgctttgtgggctgtgtcctttctcctgctggctgggattggctgctgaggcgccaatccttcctctgcccagatgtggcttggttccgttggagtccagtgtcagagggctgagttggatgtttctagatcagctgtgtccacagg

SEQ ID NO: 6302 - DNA, 1116 bp, Artificial sequence
  DNA replication origin
ctaaacagaagcagagggaaggggccgcagggccggtggggagcaaaaggcagcgcagggcccgtggcccagcccccacctgatggcccccacacgccccagggccccgcgcacgccccgccccgcagctcgtgttgtttccagacgcgccctcgtgtgcacgggcagggcctcctccccaggctcagcgggcgtgcaggttggtcgtgtgtccgctggaggccgctttgccgcggggccctcagggaaggcctccagccacctgcgctcaccgggatgggctccggaggcgacggccgcgtgatggtcacgacggggctggctggcgggcagggggtggggggctccgtagccccgtggcttgtctgtgcgctccttcccctgcctgtgatctctgactcctcccgcctctcccgcagccctcggaggggaggtcctccacggcgggacgctgggcccgcgtagggctgcggaggacgcggtggggacggagtggctgctgtggctgtgcctgccccgtgggtgcacgatgggccgggagacgaaaactcacttgcacttgccgtgacaacaggcggcagacagtagggagaccttgagtctttggcaaagaccttgttttcctcggtgtttcccctcctcaccagttcacaatcccccagtgccctggaagccacagtggagacgccttttatccactcacccgctgcacctggaagctgagtgctcccttccacgggccggagtgggagaagagggtaggaatgattcccttgggggataagaatcctggactcaggattaagggtgaaactgaattgggacacacacattctgtatggtatgtgcaatgtgtaatattgtacacgcatatgtgggtatatgtgatgacggacgattcggcctccccgagacacagccaaggcctggagctctctctcatgttctcagggagcccagggtgcctgggggttgtgcagggtgtgtaggcattggtcagctctacctggggtccatgagctcatgctccccgagatcttaggatgctttggaagcgctctccactggccggccttgcggttgtcatcctgacatgctagccctgccctgaacgcc

SEQ ID NO: 6303 - DNA, 844 bp, Artificial sequence
  DNA replication origin
tggcgtcaggtttcctgcatagtctgcagcacggtgaccagttaaacctcctttctttacacttcacccagcctggggtgttctttcatagcaatgtgaaaatggactggcacaggccttctgggtgccgcctgacaaacccaagccaagccccagccggagcccgcggtgggagtgggccgggcaggtggggcttggggcagagggtgcagggcgggagtgtgtccaggtggaaccaagtttccagcgccacccaggggttgccgtggcaccagtgggcgtctgtggctttccgatggtccctacgtagggaccaggcacaacagctctcagatgcaccacgaggcctgatgggatttgcacaggtgcggggacactgtggccaaaatggcttcagatgatctttttcaggaaaatattgtctcagcagtttgcagcacccgtggaccatggtcacccctgacccgttttacagacctcactgactgtgaggggatgagtgtgatctgaactaggaagtgtgggtgaaatgagcatgcacgcgtgtgtgtgcgtgtgcgtgtgggtgtgcgtgtctgtgcatgtgtgtgtgtgagtgtgcattgtgtgtgtgtgcatgtaagtgtgcatgtgtgtgtgcgctttgtgtgtgcgtgtgagtgtgcctgtgggtgtgtgtgcgtgagtgtgcatgtgtgtgagtgtgcattgtgtgtgcgtgcatgtaagtgtgcatgtgtttgtgtgtgtgtgcgtgtgagtgtgcctgtgggtgtgtgtgcgtgtgtgtgcatgtgagtgtgcttgagtgtgtggccatggccgtggagggaagttcatgcca

SEQ ID NO: 6304 - DNA, 1144 bp, Artificial sequence
  DNA replication origin
gggggaatttcctcaacctgccctccagcgacagcctccacctcatggccaacccccgagggcggcttccggggcttgccctgctgtggatgaggccagctttgctccccactctctctggactgcgtggggagtgactcctggactgtctgcagcctcctggaccctggctccgagtcagatgagggttctcatctggttcttgcagagtctcctgctgagcctggtcttctgtccacacctgggtggtggagggcgccccaggagcctctttctccccctgcatgggaggccgggtctgctcagccagcgccctcacctgcggtcggtgagctgtgcacggggaagcagagcctggcggccacgtcggcctcctgtgagagggtcgagggctccagccccgaatgggacttgagcagtgcttcggcgacgtgtctgtgtgtgttcatgtgtgtgtctgtgtggtgtgtatgtctgtgtctatatgtgattgtgtgtctacgtgtgatcatgtgtgattgtgtctgtgtgatgtgtgggtctgtgtgtgataatgtgtaatcgtgtgtgtctctgtgtgtgtctgtgtgtgatgtgtaatcatgtgtgtctctgtgtgtgattgtgtctgtgtgtgatgtgtaatcatgtgtgtctctgtgtgtgtgtgtgattgtgtccgtgtgtgatcatgtgtctgtgcataatgatgtgtgtgtcttggtgtgtgatggtatgtttgattgtgcatgtgtctgtgtgtgattctgtgtgtgtgatggtgtctgcacatgtgattgtgtctgtgtgtgtgatgtgtgaccgtgtctgtgtggctgcacgtgtatgtgtctatgtgtgtatgtgtgatggtgtgtctggtgtgatggtgtgtgattgtgtgtgcgtgatggtgtgtgagtgactgcatgggtgtgatggtgtgtgtctgtgtgtgattgtgtgtgatggggtggatgtgtgattttgtgtgatggtgtgtcattgtatgtctgtgtgactgtacgtgtgtgtgaggtgggtgagcagggctgcggggcacagggcagaggagaaaggttgcatgtgggggttgatccctggctggaggaggctggagaagccctggtgggcagggacgcgg

SEQ ID NO: 6305 - DNA, 3041 bp, Artificial sequence
  DNA replication origin
taacggttctggccattctgctgggccattaaaggctaccccagggcctcagatatgagcgtggtgtctgtatgtggtcctttcatggagggcaggaagcatcataattacttttttttttaacggttttcaatttgtgttgacaaagagccttagtgaatctgttggaagaagagtgacttcaaaatgaacctgactccctgtatgttaggagtccatattctctgatacagttaacgttttccttccaacctcttcactgttcaagcaaagtggtattttagctattcactgtttgacactttaataggagttttgatgagcaatttcaggatgtggaattgctacactgcaccaggttcctgcaggagcagcagcctcagcctgtggatgggacgtgagatcttggtgtttctcctggaggaaacgctgtgctgctgtgttgatgacggggcgtgtgtggggttgatgatgggtgatggagtgtggggttggtgacaggtgacggagtgtggggttgacgacgggtgatggagtgtggggatgatgatgggtgatggagtgtggggatgatgacgggtgatggagtgtggggatgatgatgggtgatggagtgtggggatgatgatgggtgatggagtgtggggatgatgacgggtgatggagtgtggggatgatgatgggtgatggagtgtggggatggtgatggagtgtggggatggtgatggagtgtggggatgatgatgggtgatggagtgtggggatgatgatggagtgtggggatgatgacgggtgatggagtgtggggatgatgatgggtgatggagtgtggggatggtgatggagtgtggggatggtgatggagtgtggggatgatgatgggtgatggagtgtggggatgatgatggagtgtggggatgatgacgggtgatggagtgtggggttgacgacggggcgtggggttgatgatggagtgtggggatgatgatgggtatggagtgtggggatgatgatgggtatggagtgtggggttgatgacgggtgatagaggagtgtggggatgtgatgggtgatggagtgtggggatgatgatggaatgtgggattgatgacggatgatggagtgtggggatgatgatgggtgatggagtgtggggatgatgatggagtgtggggttgatgatgggtgatggagtgtggggttgatgatgggtgatggagtgtggggatgatgttgggtgatgaagtgcggggatgatgatggagtgtggtgatgatgacaggtgacggagtctggggttgatgacggggcgtggggttgatgatggagtgtggggatgatgatgggtatggagtgtggggatgatgatggatatggagtgtggggttgatgacgggtgatacagtgtggggatgtgatgggtgatggagtgtggggatgatgatgggtatggagtgtgggattgatgacgggtgatggagtgtggggatgatgatgggtaatgaagtgtggggatgatgatggagtgtggtgatgatgacaggtgacggagtgtggggttgatgacggggcgtggggttgatgatggagtgtggggatgatgacgggtgaccgagtgtggggttgatgacggggcgtggggttgatgatggggtgtggggatgatgacggggcatggggttgatgacggggcgtggggctgttgatggggtttggggttgatgacggggtgtgtggttgatgacggggtatggggttgatgatggggcgtagggttgatgatggggtgtggggttgatgatggggcatggggttgatgacggggcctggggttgatgacggggtgtggggttgatgacgtggtgtggggttgatgacggagtatggggttgatgatggggtgtggagttgatgacggggtgtggggttgatgacggggcatgtgtggggtcgatgatggggtgtggggttgatgatggggtgtggggttgatgaaggggcgtggggtttatgacggagcttggggctgatgatggggtgtggggctgatgatggggtgtggggctgatgatggggcatggggtttatgatggggtgtgggattaatgacggagtgtggcgttgatgatgaggcgtggggtttatgacagagcgtggggtcaatgacagggtgtggggttgatgacggggtgtggggttgatgacggggcatggggtttatgacagcttgtgtcagacgaagccacatcaactcattctgagcacccctttcctcaaaacataaggatgagcatgaccaaaatctcaagacatttttcctaagtccttaagacggatgaacttctacaggtaagtaggtagattaataaacagaggtaaggaatgttggcatgaagaagctccctaggctgctgtgtggctgaagctctgactggtcatgctggttaaggatgcgtctgagcaagatcggtcgctgacaggtaggtgtgtagaaaataacctatatgtggtggtccattttcagttctaagtgccttcatataggtttaagcaggctatgtggaaatagagaaataaagaagcagaaatgtactgagtcaccaccctgccctccttcctgctttccctttcacccagcggccacgtgcctatcagtaggagccccctcaactaccctctcctcaccccaccaaagaatttagtttaggctagcttgcaacataaataattataccctttcttatcagctacgtgcagccaccagggccatagtcaaatgtttgaagagtcctgagacagttgcaatgcatggtgggctgcaataaaatgcagcagaaagatcctaaagaacagacttgaaatcttaatccaacgaccaataggtgatgtccaggaagatcgtaaccccatttactcagtcaatgaggaactgggggagggacctgcgcactaggggataaattgcttgttgaaactctgctgggggtggctgcatgccagccagacacccagtcttgcaagactgtcattgaaaatctccg

SEQ ID NO: 6306 - DNA, 960 bp, Artificial sequence
  DNA replication origin
tgtattccctgggctcagcaagcaatgccgctttccatcttttttgtctctccaaagaaatgagaacttaatacacaccagccttgaactggggatcacgtgttgccaagaacacttaagagcagacaacgcactttgagctggatggaagcaccacacccatgcatggcctacatgccccatgcacacagcagctgcaatacagggcaacagctcccaaggtcaacctgtgcttctcctactccagatgtgggatcaagcatttccccaagggtcctggtcccagggaagggtattcacaagcaaaggtcttcatgctggactccaggacacagacaaggaacagaggcatccctgccgaggctgggagtgggggatggggaggggatgggtgggggatggggggatggggaggggatgaggaagggatgggggatgggggatggggtggggaggggaggggtgggggatggggaggggatgggtgggggatgggggatgggtggcacctcactctggagcgaggacagaaacccttgtgaaggccatggcaggatgggggcacaggccccatgaagtccaaagacagagaccagggaactgcccctccccaacccttccctcccctctaactgacaagctctgggataactggattacagctaagagacctgagagacacaggctgtccgaggaacagcaaaggaaagcccaaaaccacaaagggagacaaaaggaggtcacagagggatctgaagttatacacacacacagctacagcaaacacagcccggccctgggcagggttaatgcaaatctccaattcacaacctatttattcagaatcgattgccctcagccaggtgcggtggctcacgcctgtaatcccagcactttgggaggctaaggcgggtggatcatttgagttcaggagctcaaaaccagcctggctggcatggt

SEQ ID NO: 6307 - DNA, 1050 bp, Artificial sequence
  DNA replication origin
ttctaataggttggtgcagcagtcatgaaaagtaatggcaaaaaaagaaacggggaggagccgctgctgcggttcattaatagtaacggcaaaaaccgcgatgacttctgcaccaacctaacccggtaaccacgggtgtgtgaatgtggcgatgggcaagttccgagagctaggagagcatctagcttcctgggaagttccgagtggtaggagagcatctagcttcctgggaagttccgagtggtaggagagcatctagcttcccggagtcaggagacgggggttggcaacctgaccaaggctaagtccaagggaggggggtgggcggggagcgatatgtcagtggagactccaaggatgaatggtatttagagagtaaaccccagtggtgagagggggtgtgtggctggcacagagaagagcctgtgcaaaggccggcggggcgagaggacaccgggtgctcttccacctgaggggcgaccagcaggctggagctgagcgagctgaggatgcggagcccgggaaaggcaccccaggcagacggcacagcaggggaaaggctggagtcaggcctgagcctgtgtggtttgaagaactgacagaggcctgtccggcagaggggagagaccttaggccagagtagagggcagggccgtgttgggcactgtgggctttggatggtgctggcatttaagaggggggaccatagaccagggcagaggggagaggaggacctggctgggcaccagagtggagaccatagaccagggcagaggggaggggagggccgggctgggcaccagagtggagaccatagaccagggcagagggcagggccatgagggcactgtgggctgtggatggagctggcatttaagaggggagaccatagaccagggcagagggcagggccgtgctgggcactgtgggctgtggatgggagctgccatttatgctcgggtgatgggaatgtgttaaaagattttaaggaggggagtaacagttgggattaatgtgtattctgggaatctcaacaaagtaaattcatag

SEQ ID NO: 6308 - DNA, 3491 bp, Artificial sequence
  DNA replication origin
tgaatttcatgagaagggattgttcagggagggttgtggggcggaagacttggacggcagctagtgattccgctgttcaaacctgagggtggtggagctggagccttggggaggggccgatgctgccttttaagtctgagagtcgttgagctggacgtccacggaggagctggtgctgccactgatgtcttagattgtggagctgaaggcaatgaaggagctgatgtggctgttcctctgtgagggtcgtggagctggagatccagggggagaggtgtcctagtttgaggttcctgcagctgcagacccagagaggagctggtgtttcttttgtttgagggtcgcacagctgtagaacccgggaggagctggcgtttttctagtattagtgtcctgccactggagaggagctgatgttccaggaagctgatgttccagttagagggccgtgcagctggagacccggcgggggagctgatgttccaggaagctgatgttccagtttgagggccgtgtagctggaggcgcggtggggagctgatgttccagttagagggccgtgcagctgaagacgcaggggggagctgatgttccagtttgagggccgtgcagctggagacccgcggggggagctgatgttccaatttgagggccgtgcagctggagaccctggggagagctgatgttctagtttgagggtcctgcagctggagacccgggggagagctgatgttccagtttgagggctggggagctgatgttccagtttgagagccgggaagctgatgatccagtttgagggccgtgaagctggagaccctgggaggagctgatgttctagtttgagggtcatgcagctggagaccctagggagagctgatgttcccgtttgaggattggggatctgatgttccagtttgagggctggggagctgatgatccagtttgagggtcatgcagctggagaccctggggaggagctgatgttctagtttgagggtcatgcagctggagaccctgagggggagctgatgttccagtttgagggccgtgcagctggagaccctcgggggagctgatgttcctgtttgagggctgggaagctgatgatctggtttgagggccgtgcagctggagaccctcaggggagctgatgttccagtttgagggtcatgcagctggagaccctgggaggagccgatattccagtttgagggccgtgcagctggagaccctgggaggagctgatgttctagtttgagggtcatgcagctggagaccctagggagagctgatgttcccgtttgaggattggggatctgatgttccagtttgagggctggggagctgatgatccagtttgagggtcatgcagctggagaccctggggaggagctgatgttctagtttgagggtcatgcagctggagaccctgggaggagccgatattccagtttgagggccgtgcagctggagaccctgggaggagctgatgttctagtttgagggtcatgcagctggagaccctagggagagctgatgttcccgtttgaggattggggatctgatgttccagtttgagggctggggagctgatgatccagtttgagggtcatgcagctggagaccctggggaggagctgatgttctagtttgagggtcatgcagctggagaccctagggagagctgatgttcccgtttgagggctggggagctgatgatccagtttgagggtcatgcagctggataccctggggaggagctgatgttctagtttgagggtcatgcagctggagaccctcgggggagctgatgttccagtttgagggctggggagctgatgttccagtttgagggctgggaggctgatgatccagtttgagggccgtgcagctggagacccggggggagctgatgttccagtttgagggtcatgcagctggagaccctggggggagctgatattccagtttgagggttggggagctgatgttccagtttgagggccaggaagctgatgatccagtatgagggcagtgcagctggagaccggcggggagctgatgttgcagcttgagggccatgcagctggagaccctggggggagttgatgttccggtttgagggtcgtgcagctggagacccggggtgggagctgatgttgccgtttgagggccttgcagctggagacctggagggagctgatgttctagtttgggggtcatgcagctggagaccctggggggagctgatgttccagtttgagggctggggagctgatgttccagtttgagggccgtgcagctggagacccggggggagctgatgtttcggttttagggctgtgaagctggagacccggggggagctgatgtttcggttttagggctgtgaagctggagaccctggggggagctgatgatccagtttgagggccttccagctggagacccagcagggagctgatgttccagtttgagggccttgcagctggagactctggggggagctgatgttctagtttgagggtcatgcagctggagacctcgggggagctgatgttccagttagagggccaggaatctgatgttccagtttgagggccgtgcagctggagacctgggggggagctgatattgcagttagagggtggtgcagctggagacctggggggggagctgatgtgacagtttccgggtcatgcagctggatatcccagggggagcaggtgttttttaattggagggtcatgctgtagaacctgggaggagcttgcctctttcttgtatgagtgtcatacagctggagacccggagtggggctgatgttctagtttgcgagttgtgcagctggagacccggggaggagctgatgttcctgtttgagggtcatgcagctggagacccggggaggagctgatgttgtagtttgagggttttgcaactggagacctggagaggagctgatgttgttctagtttgaggctcctgcatctggagactcaggtagcagctcatgttttctgatcaaaaggtcctggagctggagacacagggaggagctggtgctgctcttgtttaagtctgagggtcgtggagctggagacccggggataagctgatgttctagtttgaggctcctgaagctggagacccaggtaggagttcatgtttttctgatcagagggtcatggagctggagacatggggaggagctgatgttttcctagtttgagggtcgtgtcgctggaaacccggggaggagctgctggtgttctagtttgtgggttgtggagccggagatccggggaggagctggtgtttttctcatgtgaggtttgtggagctggatacccaggggaggagctagtgtttttctagtttgagggtcgtgcagctgaccctcaaatgacctcaaactagaaaaacactgacccccaagggtgtccagctccacgaccctcaaactagaaaaacaccagctcctccct

SEQ ID NO: 6309 - DNA, 1932 bp, Artificial sequence
  DNA replication origin
gtcgctggaaacccggggaggagctgctggtgttctagtttgtgggttgtggagccggagatccggggaggagctggtgtttttctcatgtgaggtttgtggagctggatacccaggggaggagctagtgtttttctagtttgagggtcgtgcagctgaccctcaaatgacctcaaactagaaaaacactgacccccaagggtgtccagctccacgaccctcaaactagaaaaacaccagctcctccctgggtgtccagctccacgacgctcaaactagaaaaacaccagctcctccctgggtgtccagctccatgacgctcaaactagaaaaacaccagctcctccctgggtgtccagctccacgatgctcaaactagattaaaatcagctccttcccgggtgtccagctgcacgaccatcaaactagaaaaacctggggagtttttttttagtttgctgctgtttttctagtttgagggtcatgtagttggagacctgaggaggagctgatgttccagattgagggtcgtggagctggagaccaggggaggagctggtgttttttctagttggaggattgtgcagctggagacccagggagaagctgatgttgtttcaatttgagagccgtggagctggagacccggagaggagctgatggtgttctagtttgacagttgtagagctggagacccagggaggagctgttgtctttatagtttgagtgtcatgcagctggagaccctgggaggagctgatgttctagtctgagagtcgtgcagctggagaccctgggaggagctgatgttctagtctgagagtcgtgcagctggagaccctgggaggagctgatgttctagtctgagagtcgtgcggctggagaccctgggaggagctgatgttctagtctgagagtcgtgcggctggagaccctgggaggagctgatgttctagtttgacagtcgtgcagctggagatccagggaggaggttgtcctgtggttcaaatctgagggtcctggagctggaatctatgggagaagttagagacctgcagaggagccggtgttggtgtttctagttgagggtcgtggatctggagatacagcatggagtggtgttgttctagttgagggtcatggagctagagacccggagaggagctgctgtgtttctagttgagggtcatggagctggagaccaggggaggaactggtgtctttctagttgagggtcgtggatctggagatacagcatggagcggtgttgttctagttgagggtcgtggagctggagacccagggaggagctggcgtgtttctagttgagggtcgtggagctggagacctggggaggagctggtgtgtttctagttgagggtcgtggtgctggagacccggggaggagctgctgtgtttctagttgagggttgttgtggtggagacccaggaaggagctgatgttccagttgagggtcgtggagctggaaacccagggaggagctggttcttctgttgtttaagtctgaagatcgtcgagttggagatccagggaagagccagtgctgcggttcaagtctgagggtcttggagcttgagcccccaggaggagccggtgctgccactaatgtcttaggttgtaaagctggagacccgcggaggagctggtgttgctgttctagtgggaggcttgtggagctggagactgagggaggagctggtgtgtttctagttggagggtcgtgcggttggagacccggggaggagctgatgttttcctagcttgagggtcgtggagatatagacccacggatgagctggtgctgctgttgtttaagtctgagggtcatggagctggagatctggggaacagctggtgctgcggttcaagtctgagggtctcagagctggagccccctgggaggagtaggt

SEQ ID NO: 6310 - DNA, 1177 bp, Artificial sequence
  DNA replication origin
caggcgcacgctgcgggcgtcaggacccggcagcaacactgccacgcgaatccgcgccggccaatcagcatggccaggggcggggcttccctgaggcgcgccgagaggcggtggcccacttccggcaataatcgcctggtcgccgtcaggtgccggcccaggtggcaggcgcgcccgttgggcactgggggacgcgggcgcgtcaggtgaagactgggggctgcaggcgcgctaggtaggtacggggtgccgcgggcgcgtcaggtgaagactgggcgccgcaggcgccttaggtgaagattggggatcgcgggcgcgtcaggtggggacgatgggccacgggcgagtcaggtgaagaccgggggcggcgggcgcgtcaggggaagacatggggtcgcgggcgcgtcaggtggggaccgggggtctcgggcgcgtcaggtggggacggggttgtcgcgggcgcgtcaggtggggacggggttgtcgcgggcgcgtcagatggggacgggattgccgcgtgcgcgtctgctgaggtctgggtccgcgggcgcgtcaggaagggacgatgggccgcgggcgcgtcaggtggggtctgggggcggccggcgggtgtggagggttcattcagggagctgcgggcgagtcaggtgggcacggggaccgcccacaggtgcatcgcgtgtcctcagccgcttcccctgcccaccttctgcgaccccttcccgcccccaccctcctgggccgtcttgcaggcccgagcttgtgtccgcctcgctgggcaaggtgtttcggggacgactcctgccggcgtttgccctccgggctcggcccttgcctcttcgccggtgggcacctgctaggtgtgacccctcattcctccaggccactctgccccgtctgctgcttacctttttttccctactcctggtctgtggctctggctctgtctctgtctcctcccttaatttctttccatgcttatttttcttgcagcagacactaattttgcatccttcccctcacagtaagctcaatttgacctttttctcaattagattccacctctgtccttgggtctattcaaactcattttgaagactaaagaatctagagaaccatttcttcccttatgaagctgtctcttgctgcctccaaatccttaccatccggccctaat

SEQ ID NO: 6311 - DNA, 992 bp, Artificial sequence
  DNA replication origin
atagcttttcctctatagtttcttctagaaattgtatagttttgcatttttagtgtaatgatgattttgagtgattatttgtgtaagttgtaaagttttcgtctacatgcatatcatttcttatggtttccaattaatcattccctcactatttttgggaaagacacaggatagtgggctctgttagagtagatagctagctagacatgaacaggagggggagctcctggaaaagggaaagtctgtgaaggctcacgtggagggaccaccaaaaatgcatatattagtagcatctctagtgctggagtggatgggcacttgtcaattgtggttaggagggagaagaggtacctacgcagaaacaccctagaacttctcttgagatgccccaatcatcattcactctgcaataaaaatgtcagaatattgctagctacatgctgataagaaggagaaaggggacattcttaagagaaacctggcaccataagtacagattagggcagagaaagacattcaaaagaggcagctgcagtagatacaaacgtgaccgctgtcagcctgcctggtatggcgggaaggaggctggtgccagagtggattcgggttgatcaccacacatgtacctcaatcaacagtgaggaggtcccacaaggctaagtggggcaagtcggggacctaaggcagtagcaggaaaaccaaagaaaacaggcggagacttgagacagaggcaggaatgtgaagaagtccaaaataaaaatccctgcacaggactcttaggctgttatcatgcactatcagcctactcctccctatttttgtacaataagctctttacactgtatttcttttcaatgaagttatcttccatctttgtactgcctcttggtgaaaagctgtcttccaagttaataactgggacatcagctctccgcagtaatagctccttttcagttttaatttgcagaactgatggggattaataactggcg

SEQ ID NO: 6312 - DNA, 930 bp, Artificial sequence
  DNA replication origin
gagaacgcagctccgccctcgcgatgctctccgggtgtgtgctaaagagaacgcaactccgccctcgcaaaggcggcgcggggcgccggcgcaggcgcagagaggcgcggggcgccggcgcaggcgcagagaggcgcggggcgccggcgcaggcgcagagaggcgcggggcgccggcgcaggcgcagagaggcgcggggcgccggcgcaggcgcagagaggcgcggggcgccggcgcaggcgcagagaggcgcggggcgccggcgcaggcgcagagaggcgcggggcgccggcgcaggcgcagagaggcgcgccgctgttggggagacgcggcgcagggcgtagacgcacgccggcgcctccccggaggggaggggttgctgagcgggcgggagtgaggcgcggcgcaggcgcagagacgcacgtcgctgggctgagggtggcggggagtgttgcagtcgcacagtcgcgcgccgccgggcggggagcgcgggggtggcgcggtgcacgcgcagagacacacgtccccggcggcgcagagacgagtggaacctgactaatctgaaaagcccgtttcgggcgccccctgcttgcagccgggcactacaggaccagcttgcccacggtgctctgccattgcgtcccctactggcgactaggacaactgcagggccctcttgcttacagtgctgtccagcgccccctgctggcgccggggcacggcagggctctcttgctcgcagtatagtggtggcacgccgcctgctggcagctagggacattgcagggccctcttcctcacattatagtggcagcacacccgcctgctggcagctgggcacactgccgggccctcttgctgccattgtcgtggctgcacgccacatgcaggcagatggggactacgcagggccctcttgctcccggcgta

SEQ ID NO: 6313 - DNA, 954 bp, Artificial sequence
  DNA replication origin
cgcgcgactgtgcgactgcaacactccccgccaccctcagcccagcgacgtgcgtctctgcgcctgcgccgcgcctcactcccgcccgctcagcaacccctcccctccggggaggcgccggcgtgcgtctacgccctgcgccgcgtctccccaacagcggcgcgcctctctgcgcctgcgccggcgccccgcgcctctctgcgcctgcgccggcgccccgcgcctctctgcgcctgcgccggcgccccgcgcctctctgcgcctgcgccggcgccccgcgcctctctgcgcctgcgccggcgccccgcgcctctctgcgcctgcgccggcgccccgcgcctctctgcgcctgcgccggcgccccgcgcctctctgcgcctgcgccggcgccccgcgccgcctttgcgagggcggagttgcgttctctttagcacacacccggagagcatcgcgagggcggagctgcgttctcctctgcacagacttcgggggtattgcgaaggcggagcagagttcttctcaggtcagacccgggcgggcgggctgagggcactgcgagggtggagctgcgttctgttcagcacagacgtggggggcaccgtaaaggcggagcagcattcttctcagcacagacgttgggggtactgcctgcctttgggataactcggggccgcatcgacggtgaataaaatctttcctgtttgctgccctgaataatcaaggtcagagaccagttagaacggtttagtgtggaaagcgggaaacgaaaagcctctctgaatcctgcgcaccgagattctcccaaggcaaggcgaggggctgtattgcagggttcaagtgcagcgtcagaactcaaatgcagcattcctaatgcacacatgacaccctaaatataacaggcatattactcatggagggttagggttcacgttcgggttcgggttcgggttcggg

SEQ ID NO: 6314 - DNA, 1403 bp, Artificial sequence
  DNA replication origin
gacggagcggcgaggctgaggcgcgggaactgcttgaccccggaggcggaggtcgcagtgagcagaggtcgccgcactccagcccgggcgacggagcggcgaggctgaggcgcgggaactgcgtgaccccggaggcggaggtcgcagtgagcagaggccgccgcactccagcccgggcgacggagcggcgaggctgaggcgcgggaactgcttgaccccggaggcggaggtcgcagtgagcagaggccgccgcactccagcccgggcgacggagcggcgaggctgaggcgcgggaactgcgtgaccccggaggcggaggtcgcagtgagcagaggccgccgcactccagcccgggcgacggagcggcgaggctgaggcgcgggaactgcgtgaccccggaggcggaggtcgcagtgagcagaggccgccgcactccagcgcgggcgacggagcgagactcctcgcgggcagcggggtagtgggggcgggggggggcgcggggcagggcttgggggaggccaaaggcgacctctgagctcttgtccttaccctgggagagtatggaactcagagaaatcatctgacccgggtaatgtatgacaacaagcaggaaagctttgcttgagaaaaaaaatgtcttgttttaaatgctgaggctttgggaccacagtttcatgatgaacaaacattcactgaaccccctaccttatgccagaggcttttccataattatctcctttaattgtcacaaaaaaactcggcaagtgtcagagttattgccatgctacagaagaaacatcgagacttagagaggtgggacagctttgccgagaccacactgaagagcgtggtaagtggcagaagagaccttaagagccagctttgttcagcctgcaggatgctctctccacctgcgactggcaggttaagaagaccctgggtctgagatggtgatcggcaggcagccagtgaataggctctgctcactatcgggtggtcactaaccatatccaggagccaaagcagggagctggtagcttgggagcagggacatcacttctgacagcaatgggatgctgaataaatcagttattgaactaaagaatagagaaagagagagagagagcatgtaacataaaagtctcctcttttgtgatcttaataagataaatgtttcattgttctcacctctgattggggcctattttcaacaacaaaagaactgctttggaactatgactattctgctgattagacaaactaggttcattagaaagatcaaacagaaaagttacagagaaaacagaatttaccagcatagttcagactcaggggcttaccacggtttcattttctccataagtggattcttgaaacagcaaagaattcttttctgtcatcac

SEQ ID NO: 6315 - DNA, 1540 bp, Artificial sequence
  DNA replication origin
ggaagagctggtgctgcggttcaagtctgagggtcctggagcttgagaccccaggaggagatggtgctgccacgaatgtcttaggttgtaaagctggagacctgcgaaggagccggtgttgctgttttagtgtgaggtttgtggagctggagtcccagggggaaaatggtgtttttctggcttaagggtcatgcagctgaccctcagatgacctcaaactataacaacactgctccaccctggatctccagctccaaaatcctcacaatagaaaaacatctgctcctccctgagtgtccagctccacgatgctcaaactagattaaaatcagctccttcccaggtgtccagctgcatgaccctcaaactagaaacacccggggaggttttattagtttgctgctgtttttctagattgagggtcatgcagctggagacgtggggaggagctgatgttgttcgagtttgagggtcatggagcttggagacccaggcaggagctggtgtttttctagtttgagggttgtgcagctggagacccagggagaagctgatgttgctcttatttgagagctgtggagctggagacctggagaggagctgatggtgttctagtttgatggttgcagagctggagacccagggaggagctgttgtttttctagtttgagtttcgtgcagctgaagaccattggaggagctgatgttctagtttgagggttgtgcagctggagatacagggagaaggtggtcttgcagtttaaatgtgagggtcttggagctggaatccatgggaggagccaatgctgccactgatgtcttaggttgtggagctgaagacccgcagaggagccagtgttggtgttccagtgtgaggttcgtggatctggagacccacggaggagcaggtgttggtgttctagtgtgagggtcatggatctggagatccatgggggagtggtgttcttctagtttgtgggttgtggtgctggagacccagggaggagctgattcttttgttgtttaagtctgaaggtcgtcaagctggagatccggggaagagctggtgctgcgattcaagtctgagggtcctggagcttgagaccccaggaggagatggtgctgccactaatgtcttagattgtaaagctggagatctgtggaggagctggtgtttctgttctagtgtaaggtttgtggatctggagtcccaggggtgagcagtgttgttttagtttgagggtcatggagttagagacccggggaggagctgatgttgtagtttgagggtcgtgcagctggagacccagggaggagctggtgtgtttctagttggagggttgtggagctggagattcacagatgaactggtgctgctgctgtttaagtctgagggtcatggagatggagatccagggaagagttggtgctgcggttcaagtctgagggtcctggagctggagcccctgggatgagtttgtactgccactgatgtcttaggttttggagctggagacctgcagagaagccgggctggtgt

SEQ ID NO: 6316 - DNA, 1242 bp, Artificial sequence
  DNA replication origin
ctggagaagagctgatgttctagtttgagggtcgtgccgctgaagactcagggagaagctgatgttctcgtttgaggatactgcagctggagacctggagaggagctgatgttattctagtttgaggatcatggagcttgagatccacagaggagcaggtattgttctagattgaggttcatgtagctgaagacctggggagcagcgggtgttttttagtttgagggtcatgcagctgtagaacccgggaggagctggtgtttttctagtatgagtgtcctgcagctggagacctggagaggagctgatgttgttctagtttgagggttgtgcagctgaagacttggaggggagctgatgttgttcttgttgagggtctttcagctggagacccagagaggagctgatgtggttctagtttaagggtcatggagctggagacccagagaggagctggtgttgttctgatttgaggttcatgcagctggagacatggagaggagcgggtgtttctttagtttgagattcatgcagctgtagaaccggggaagagctggcgtttttctagtatgagtgtcctacagctggagaccaggagaggagctgatgttctagtttgagagccatgcgactggagatgcaaagaggagctgatttggttctagtttgagggtcatggagctggagacccagagaggagctggtgtttctttagtttgagggtcatacagctgtagaacccatgaggagcttgcatttttctagtgtgagtgtcctgcagctgaagacctggagaagagctgatgctttcaattgagggttgtgcagcttaagactcagggaggagctgatgttctagtttgagggccatgagcttaagacccggggatgagctgatgttgttctggtttgaggttcatgcacctggagacctgaggaggagcggttgttttttagtttgagggtcgtgcaacagtagaacctgggaggagcttgtgtttttctagtatgagtgtccagcagctagagacccagagaggagccgatgttctaggttgagggtggtgcagctgaagactcgggaaggagctaatgttctagtttgagggccgtgatctggggacttggagaggagctgatgttgttctagtttgagggtcaggcaactgaagacccggggaggagctgatgttgttctagtttgaggttcatgcagctggagacctggggagcagcgggtgt

SEQ ID NO: 6317 - DNA, 1167 bp, Artificial sequence
  DNA replication origin
ggggtttgggggccggaatttaatttttggagttttatttaatgtcgggagcagattgggtaataaaatgtactttgagaataagatggccttttgaccttttagggtctagggctgtaaagtgtctcagggttgctgccgaacgagccatgaactgggctgggtttttcatatttgatgaaagagactaaacgctcactgatttgggaaaggtctgataaagaaaaaggagcattaaccttgactatgcctttagcttcaccacctttttaagagtaaattgctgggcaggtgcgggagggctagacgtgcaatgaaactgtaagcaggacccggtgtgaggaggggaggtgataaaaggattatagggtggaggagccgaggctgaggaagaattgggacctagctcagcctggtgaggagcagcctggggaggaggggagaggtcagatgggtctgtagaaaaggaagattagaaagactcagtgacacttggggttgggactgaggggacaggcgggagggaaagaaggaagattgggggcgagttgcactgggtacagagactagggagggactgatgtgtaaaagaatgcctggacatcaggcacctcagaccgtttgcccattttacaacaagaattatttagatcttgcgggatggaaaaattgaaagtgccgttttctggctatttggaactactgtcaagtttgtattggggtcaactggcattgcagaggaaaataagatgcttagattttaggtcaggtgagagttgaagaggttttaagttcatgagaacacaggctaagggagaagaaggaggaatggaaggtggaagcttgcccatagtgaaagaggcaagcccagagaaaagagtagagacacggagaaggggtcgggggttcttgccctccagaaaagcagagaaggggttggggcacagagatattaggtcagggtgcagaaataagggatcagggtgcagagatataagaggtcggggtgcagaaataagggatcagggtgcagagatataagaggttggggtgtggaaataagggattggggcacagagatataagaggttggggttcctgcccctcctctagaaaagcgggacttgccgctaagagtgaaggagaaggggttggaggtttcttgcc

SEQ ID NO: 6318 - DNA, 980 bp, Artificial sequence
  DNA replication origin
gaaggaaggaaggacggaaggaaggaaggaaagaaggaaggaaggaaagaaggaaggaaggaaggaaagaaggaaggaaggaaggaaagaaggaaggaaggaaggaaggaaagaaggaaggaaggaaggaaagaaggaaggaaggaaagaaggaaagaaggaaggaaggaaagaaggaaggaaggaaggaaggaaggaaggacggaaagaaggaaggaaggaaggaaagaaggaaggaaggaaggaaggtaggaaggaaggaaggaaagaaagaaggaaggaaggaaggaaagaaggaaggaaggaaagaaggaaagaaggaaggaaggaaggaaagaaggaaggaaggaaggaaagaaggaaggaaggaaggaaagaaggaaggaaggaaggaaagaaggaaggaaggaaggaaggaaatcttgtcccacttgtgagccccttaagagcaggcgccatgggactattttatttttaagaagagaaaatgaaatgacaatcaggtttatgatttggaaactttgttggcttcagtggacagacaaactgtaaagaaatgagatcaagatcaagaaggttaagtaccttgctcaaggtcacgcagctagcaggtggcagaggataacacacatcccgagagtgtggctccaattctagcccatctgaatgtcattccactacctttgtaaacaattcctgagtccttctgatattaaagttttcttacccttagtgcacatagtaataactcacttggattaacataataattttctaactgatgtccttgacttgaatatttagtctccaggaatccatcttccacagggatatcataatgatctataaacatacacacacactaatgcatacaaacaccaagtcctctcatatcacacattaaaaaaacacacacacacttcaatgctttcctatcatgcaaagaaggtataagctcattagcagatacatacagaggt

SEQ ID NO: 6319 - DNA, 1167 bp, Artificial sequence
  DNA replication origin
ccttcgggcaacccgcgcggaccctgccctttcccccccacacccgcgaccgcgtccccggggcatcgcgcgcccacgcaggagccggacccgcacagctgccgcctcacttacctcagcaccggggcgccgggctggcgagagcctcgggtgcggcgccggcacagtccgaggggcccggggcggcggcgaaagctccctacttgcagccaatcctggcgtcgaaccccgggctccgtctggcgcggcgctgccctccctcccggcgctcgcggcggctggaaaaacctggcgcgccggagttcgggctgccggctccttagccgcggggcgggggagacgctcggggaaggggagaggcgcgggcgggtgggaacgggcgggagacgagcggggacggggagacgcgccggaggcccggagcccgcgcatgctcagtgcgcggccggaggaggcgagcgctggggacgcagcacctgccccgcgcggccgagaggcggcagccccaggtccccagcgcgcgaaattagtaaagggcgcctggcccgattctcaggcaagaggagattatcagccggattcccgtgcggggacgtaggggttgcgttgttcagcggccagggatgcgccgaggcgatgtctcctccctttacaacccgagtatcggggcacgaggaggcgcgaccttcctgggtacccaaacctctggcctccgggagacgcggaattcgggggatcgttaaggcgccctggccagggaaacagatgcttctgcgtctgggctgaaaattgctgaaccggggaatgtgggtgggcgggtggcattgaacttaggccagaagagggggctttggtaggtttttacctgcctgtccttaggcggaggacactggctggacaggctgcgttacacacctgaagtctcatccacgcaaagtgctttcaggttggaatgtggggcgggggcggggggaggtcagagggaacagttgctgtaaattaggtacaaggatcaatttgtggtgtgttgtgcgcgggggtggggcatgtcgaaagccttgttattcgaaagaatgtgctttgaacgacgttgccacggtcattctacattatgaatctactgtttccttgcagaagtggctcccttcgccgcaactccacacctcg

SEQ ID NO: 6320 - DNA, 845 bp, Artificial sequence
  DNA replication origin
gaggctgatgtctgtggcgcccgctgggtgccgggctggctgctgagcgctgaggctgcggcggcgagcgacaggccaggtgcctgctcttagggaaggtacctggcttccccagtctctgccgcgggagcctgttgggtggcattcgtttccagcaacttctggggggtttccagtttctttcgagaggcaagacaaccgccccgtcccctccccgggcccagacggcggcgaactgtgcgccgggcgccccacagaccccaatccactcactctccttctggaacgcggggctcaaaatcttcgtgcattttctctcttgtgcttcgtgtatatgttttactatttatgaagggtgtggaggtgagggtaggaggacgtgggctcctgaatccctctgaaccagccagagagtcggctgcatggaaacatttcgcagcgaagctcctgcgaggaggcggcttcgcgcgtcgggaagatcaggcggttgcttgctggccagggtctgcagattcggtgcgaagaagctggcggaggttgtgtagggcgagtcagtgtgactgagcaccctgggtgtgtggtctgcgtggaggagagtgggccggatcttgaggtgtgttggaggtttatttgtaagaggagttcctgaaaggaatgtcgtggaactttttctagttttcctgctggaatcaacataggggcgggcacatgtttgtcagaataacagtggcatttaactgcatgggaagctctttcaattttctgtagtgggagctggatagttcaaggagtaactccacataactgagtcgtttggatacccacacaagataatttggaacgcg

SEQ ID NO: 6321 - DNA, 1386 bp, Artificial sequence
  DNA replication origin
ggcgccggcaacgagccggtgaacgaggcgaggcccgtgcgcccgcggctgcaagcgcccgcctggcggggagaggggccgacggcgtcagcccgggcggcggcatccctaggcgcctggggcgccttcctccggacctggccgctcgctgccccgccctctgcaccccacttctccgaccctccttcccagtcctgcctccccctgccctggcctctgagagccgactgagcccagccccgtgcagcagcggttgcctgtgtcgccgcctagtctccggtcttggtgctctcccgggggtgccccaaggagccagtgcgcgctgcgggctgggaaggaggcgccgctcagctagtcctcctcctcctcctcgtctttctcctcctcctgctgctgctgccgccgccgccgccgtgggtgccgggtccgcgcgcaccccaacacccccaccagctgggcctcggggtaagtccctggccggccgcgccgcggcaggaggtgtgggaggcagcgaggggaagtcgaggcaaacttggtggcgtgggagaccctacggggtctggggaacctcagggtaagatcgcgggcctgagggggacgagggggcgcggctcacggagctggggaaaatgacgaagtcgggaaacgagaatatagtgccccgtttccccccgtcccccttgccaaaaaaaaaaaaaaaaaggtgtgggagagcgatagttgggaaggcaggccagatagaaacaggcaaaaaaaggcagtgaccggagccgagcctgctggatttcaggggccgaccaggggagggaggtgcccggggacggggagggaggagggctgccgggatgtgaaccggggaaggcagctggggctggagagcagcgcggaaagggggcccagggagctggaaagagggccaagaggagggcaaggaaggtggcgggcgacggggagaggaaagaaaaagggtgtcttggcggtggccttggtaagagaaaggggcaaggggtataattgacaaggcactgaaagtattgaagtcagagccttgggaaggatctaccgaactctcggcggtccacgcggggacagacctcagcccgtgagccttgagctccacgcggggacagacctcagcccgtgagccttgagctccacgcggggacagacctcagcccgtgagccttgagctccacgcggggacagacctcagcccgtgagccttgagctccacgcggggacagacctcagcccgtgagccttgagctccacgcggggacagacctcagcccgtgagccttgagcccagaaggagtggcagcctcaggacgtttgccaggtggcctggaatgtgagggaagcctcagccccgccaggaacagagct

SEQ ID NO: 6322 - DNA, 967 bp, Artificial sequence
  DNA replication origin
tggggagggaccgaggggcggggcggatgtcaccccatgggaagcgggccgacggccaagcgcaggggcagctgaggctgccgccgagcacgccgcgcgcacctgaccgtggagggtgtgagccgagggcccctcgctcccaggagctccgctcctgggcacaacctgcgggcgggcgggcacccggttgcgcagccccctgggtgccccagtgtcacccccttcctcccggccagtcaagcgcagaaagataccgggcgctgtgcccggcgctccctccctcctctgccccctccggagcagaggcgccccggtcgcctcccctccggctgcagcgttacacaaccgcggcggcggcgcctgccctgcagcagcgcagggcgtgacgcttcacgtggccgggctcaggtcgtagcaccgcggaccgcgagcctctctgcgttgacccagggactgagaccccggggacgtggcgtgccagcccggatcggccctctccctgcctgttgggaagttcggcggcgctgttcgcggtctgcacccagggcaggagggatgagagagacaagaaaaaaaaaccgcctgttacagggaaatcttagcaatcatgcggtcgacacgtatttcttgagccccctgctctgcactaggcgctgcactagttgatgaatccgacacggatcctgcccttgaacttgcagaacctctaggaagaggttaaattgagcaataaaggaaaggcagccctgggaaaattgtatcgaggccactggctgacagaggggaaaaacaatgagaacttgtgttgctttgtgttttgtttttaatttcattgtaaccgagatgcctaggtagagaagcgggggagaagctaacccaaagccccaagcccggggcggaaggacctcctccagcggccccagatctctgcaatctcacttaggctgccggagggccccacccacct

SEQ ID NO: 6323 - DNA, 785 bp, Artificial sequence
  DNA replication origin
gcgtgcatggcccggtgtccccgcggcctctggctccgactcagcgcacagactggcggtgtgtgctccctgcgcggtctgtctgcgccgtgcgagccaagtgaatgagaagtggggcgggcggggaggcgggagggagcgggtgaggggggggcggttagggcggagtgggggggtgggggggcaagccgaggagtaatggagaggctgcgggctgggttaaatgggagcgagtgggtgggttggagctacgtgttctaccctgtgactccaggcacgtctggccactgccggggagggaaggagcgacctgcccgccctcccccggcttcatcacatgagtctcacgtgttggacaacgctccggcggctgctagggagcccccacccccagccccggcccccaggtgtctgcggctgcggccgcctttccccgaagagggggtggcagcacgacctgggtcctgcccagttgggtggggggcgcggaagctggaagggacgggggtgctgggggagggggagaagttggtaacgtgggcgaacctgccccagggaaatgaagtaagttcccgtctcctgggagggaacgggggaggacggatccgcccgcgtctgactcaagccgggagaggaatatccccttgctagctccagcccagccctcttcctcctcccccgcccggcccgcttggaggaaccggcgcgctgcggagggagtcgcccggccccccagccttccccagaggctggggtttctttccgtcctggcttccctgccccca

SEQ ID NO: 6324 - DNA, 888 bp, Artificial sequence
  DNA replication origin
cccagtctggaaagtgaggagcgtctctgcccggccgccatcccgtctaggaattgaggagcgcctcttcccagccccatcacatctaggaagttaggagcgtctctgcccggccgccgtcccacctgggaagtgaggagcgcctcttcccggccaccatcctatctaggaattgaggagcgtctctgcccggccgcccatcgtctgagatgtggggagcgcctctgccccgccgccccgtctgggaggtgaggaacacctcggcccggccgcagccccgtctgggaggtgaggagcgtctctgcccggccgccccgtctgagaagtgaggagaccctccgcccggcagccgccctgtccgggaggtgaggggcgcctctgcccggccgcccctactgggaagtgaggagcccctctgcctggacaccacccagtctgggaggaggtacccaacagctcattgagaacgggccatgatgacaatggcggttttgtggaatagaaaagggggcaaggtggggaaaagattgagaaatcggatggttgctgtgtctgtgtagaaagtagtagacatgggagacttttcattttgttctgtactaagaaaaattcttctgccttgggatcctgttgatctatgaccttacccccaaccctgtgctctctaaaacatgtgctgtgtccactcagggttaaatggattaagggcggtgcaagatgtgctttgttaaacagatgcttgaaggcagcatgctccttaagagtcatcaccactccccaatctcaagtacccagggacacaaacactctgcctaggaaaaccagagacctttgttcacttgtttgtctgctgaccttccctccactattgtcctatgaccctgccaa

SEQ ID NO: 6325 - DNA, 1017 bp, Artificial sequence
  DNA replication origin
aaagtctcccatgtctactactttctacacagacacagcaaccatccgatttctcaatcttttccccaccttgcccccttttctattccacaaaaccgccattgtcatcatggcccgttctcaatgagctgttgggtacctcctcccagactgggtggtgtccaggcagaggggctcctcacttcccagtaggggcggccgggcagaggcgcccctcacctcccggacagggcggctgccgggcggagggtctcctcacttctcagacggggcggccgggcagagacgctcctcacctcccagacggggctgcggccgggccgaggtgttcctcacctcccagacggggcggcggggcagaggcgctccccacatctcagacgatgggcggccgggcagagacgctcctcaattcctagataggatggtggccgggaagaggcgctcctcacttcccaggtgggacggcggccgggcagagacgctcctaacttcctagatgtgatggggctgggaagaggcgctcctcaattcctagacgggatggcggccgggcagagacgctcctcactttccagactgggcagccaggcagaggggctcctcacatcccagacgatgggcggccaggcagagacgctcctcacttcccagacggggtggcggccgggcagaggctgcaatctccgcactttgggaggccaaggcaggcggctgggagatggaggttgtagcgagtggagatcacgccactgcactccagcctgggcaccattgagcactgagtgaaccagactccgtctgcaatcccggcacctcgggaggccgaggctggcggatcactcgcggttaggagctggagaccagcccggccaacacagcgaaacccccgtctccaccaaaaaaatacgaaaaccagtcaggcgtggcggcgcgcgcctgcaatcgcaggcactcggcaggctgaggcaggagaatcaggcagggaggttgcagtgagccgagatggcagcagca

SEQ ID NO: 6326 - DNA, 1113 bp, Artificial sequence
  DNA replication origin
tgggtacttgagattagggagtggtgatgactcttaacgagtatgctgccttcaagcatctgtttaacaaagaacatcttgcaccgcccttaatccatttaaccctgagtggacacaacacatgtttcagagagcacggggttgggggtaaggttatagattaacagcatcccaaggcagaagaatttttcttagtacagaacaaaatggagtctcctatgtctacttctttctacacagacacagcaacaatctgattctctttcctttccccacacttcccccccttccactcgacaaaaccaccatcgtcatcatggcccgttctcaatgagctgctgggtacacctcccagacagggcggcggtcgggcagagacgctcctcacatcccagatggggcggtggtcgggcacagtcactcctcagttcccagacggggtcgcggcagggcagagatgctccccacatctcagacgatgggcggccaggcagaggtggtgctagacgtctaggtggcacttcctagacggggtggcggccgggcagaggctgcaatctcggcactttgggaggccaaggcaggcggctgggaggtggaggttgcagcgagccgagatcacgccactgcactccagcctgggcaccattgagcactgagtgaaggagactccgtctgcaatcccggcacctcgggaggccgaggctggcggatcactcgcggttaggagctggagaccagcccggccaacacggcgaaaccccgtctccaccaaaaaaatacgaaaaccagtcaggcgtggcggcgcgtgcctgcaatcgcaggcactcggcaggctgaggcaggagaatcaggcggggaggttgcagtgagccgagatggcagcagtacagtccagctttggctcggcatcagagggagactgtggagagagagggagagggagaccgtgggaagagggagagggagaccgtggggagagggagagggaaagcgagagcgagaacgagagcgagagcgacagcgactatggtcattttctaacagtcctttcatggagtctcccaaaggtttctgtgtcctttcccagagatgggctgcatatctatctgt

SEQ ID NO: 6327 - DNA, 841 bp, Artificial sequence
  DNA replication origin
agtgaggagcgcctcttcccggccgccatcccatctaggaagtgaggagcatctctgcccagccgcccatcgtctgagatgtgggaagcgcctctgccccgccaccccgtctgggatgtgaggagcacctctacccggccgcgaccccgtctgggaggtgaggagcgtctctgcccggctgccccgtctgagaagtgaggagaccatctgcctggcaaccaccacgtctgagaagtgaggagcgtctccgcccggcagccaccccgtctgggagggaggtgggggtcaacccccgccaggccagccgccccgtccaggagggaggcggggggggaggtcagccccccgccgggccagccgccctgtccgggaggtgaggggcgcctctgcccggccgcccctactgggaagtgaggagcccctctgcccggccaccaccccgtctgggaggtgtacccaacagctcattgagaacgggccatgatgacaatggtggttttgtggaatagaaaggggggaaaggtggggaaaagattgagaaatcggatggttgccgtgtctgtgtagaaagaagtagacatgggagacttttcattttgttctgtactaagaaaaattcttctgccttgggatcctgttgatctgtgaccttacccccaaccctgtgctctctgaaacatgtgctgtgtccactcagggttaaatggattaagggcggtgcaagatgtgctttgttaaacagatgcttgaaggcagcatgctcattaagagtcatcaccactccctaatctcaagtacccagggacacaaacactgtggaaggccgcagggtcctctgcct

SEQ ID NO: 6328 - DNA, 1150 bp, Artificial sequence
  DNA replication origin
gcacatgtttcagagagcacagggttgggggtaaggtcacagatcaacaggatcccaaggcagaagaatttttcttagtacagaacaaaatgaaaagtctcccatgtctacttctttctacacagacacggcaaccatccgatttctcaatcttttccccacctttcccccctttctattccacaaaaccaccattgtcatcatggcccgttctcaatgagctgttgggtacacctcccagacggggtggtggccgggcagaggggctcctcacttcccagtaggggcggccgggcagaggcgcccctcacctcccggacagggcggctggcccggcggggggctgacctccccccccgcctccctcctggacggggcggctggcctggcgggggttgacccccacctccctcccagacggggtggctgccgggcggagacgctcctcacttctcagacgtggtggttgccaggcagatggtctcctcacttctcagacggggcagccgggcagagacgctcctcacctcccagacggggtcgcggccgggtagaggtgctcctcacatcccagacggggtggcggggcagaggcgcttcccacatctcagacgatgggcggctgggcagagatgctcctcacttcctagatgggatggcggccgggaagaggcgctcctcacttcctagatgggatggcggccgggcagagacgctcctcactttccagactgggcagccaggtagaagggctcctcacatcccagacgatgggcggccaggcggagacgctcctcacttcccagacggggtggcggccgggcagaggctgcaatctcggcactttgggaggccaaggcaggcggctgggaggtggaggttgtagcgagccgagatcacgccactgcactccagcctgggcaccatcgagcactgagtgaaccagactccgtctgcaatcccggcacctcgggaggctgaggctggcggatcactcgcggttaggagctggagaccagcccagccaacacagcgaaaccccgtctccaccaaaaaaataggaaaaccagtcaggcgtggcggtgcgtgcctccaatggcaggcactcagcaggatgaggcaggagaatcaggcagggaggctgcagtga

SEQ ID NO: 6329 - DNA, 1731 bp, Artificial sequence
  DNA replication origin
aagtctgctattgaaactctctactgcatttattagtttacttattatattattattattatttttgtgtgtgtacttattgtattcttcaactccaaaatttctgtttggttctttttatgtttttaaatctctttgttcaacttcttattttattattgtattattttcctcatttcattaaattgcttatcagtattctcttgtagctcactgagcttctttagaacaagtattttgagttctctgtcaggcaatttgtggatctcaatttatttggggctggttactgaaggtttattataatcttttggtggtgtcatgtttctctgattattttggtgtgttctttacatccttatgttgattactgcagacttcaagaagtggtcacctcttccagactttatggactggcttcactaaggaaaggccttcagctctagaggtgagatggtgctaatgggggtgtagtaccttgtggtcctgtaatttgaagcaccaatctgtggcatcagatcaatggggctctaagtgcaggggtgtgtggcagctccgagttcaggtgggaatagtgtttgcagacccctggggtctgtgatattggcaactggatggctcttggcagcaaacatctatgaagggtggtctgcagtggttgtgaaggctgttggggtcctcagaggcacctctgggtccagtggaaagtgtgcttgggtaggtgggggcaagagccagtggtctgtgtccacatggcagttggggctgatggtaggggttggggttgactgtgtgcatgtgcatggctccaggggtcagggctggcagtgtgcatgtggtggtgggggctgaggccagcttatgggtgtttagtggctccattgggttctggggtcagagtgcccttggtgcactggctgggacaggtctcacaggagaaatgggtgggggaagtggtgggtcaggcaggtgtattccatgaaggcaaaaaactatggggccctcagtggcaaaagttgcaacagggtctgcagtagctgtactagttgttggtttcctcagtagcaaagctgctggggtcctctttggaggggtcttctgggttctatgatggtgatcacttcagggtccttaatgatgaaagctgtggaggttgcatggtgatggcagaagatgttgagaacctcagtggtgaaggctactgggttctctgcagagtaggccactgggggcatttaatactcatagtccccacccttcttttttgctcctagccatttccagctgtctcagctgtgtcagtctccctgctgatctgggtggatgaaactaaagtgagttctttttgcagcactgtgaaaggctggagaagctggaatctcattctgttcttcttttcttccacaaggggaactcaggggctggggatatccctctcagcactaagctgtgccaccctgggtgataggatgatgcaggcaaaataaaactgtcctttctatcctttctgtgtagttattcttgaattttgcttcactgtgttgctgaagcttcttacctagacttgagctctctcaactatttttgttcattgatagctatctaattttgttttgctttgtgtgtgtgtgtgtgtgtgtggggtggggaatgaaggctgggatctcctactctaccatcttgctgatgtcactgctgctattaccagacactgtcttcttattttggaaa

SEQ ID NO: 6330 - DNA, 1954 bp, Artificial sequence
  DNA replication origin
gcttccagcctgtggatcccgttttccctcttgatgtcgccgcagggcactccgctgggacccttggcgtgcacggggaacagccccccgagggtgacgtccccctcgatccggattgagtgcggggcgtacatctcctggccgcgcgccgccgccgccagcgcgcacaggagcacctccagcacgcagcaggggaacttcatcaaagtcaggacgcggagcagcttcctcagctggaccatgctgctccggctgctgcggtggcggcggcggcgctggagggaacggtggtgggctcgccgaggtccgggcccttcagggcgagctcctccgggaaagcccaggggctcctgcaggcacggagggtgggggaatccggggaggggcgaccagagagggtgaggggtcccgcggcgcctgccagcctggggcgcctcgcgctctcgggttagccggccggcgcgccgcgctcgcgctcaccggcttgctgctcgctctctccaacagcccagcactggggagagggcagggactgctatcgctttaaatggtcgttcggctccctctcctcctcctcccactccctccctccctcgctggctctccttctctccccacccttcccagcgccagccctccccactggtttgcatcatcacgcagggaggggctgcgtgctgaggtaagggggggaaacgggtgggcggctggggaatggggggaggtttcctcggaatgggagtttcgtggtccccagggaatctagggattgcggggagcaagcgagagcctagctctcgaccctaactcactgtggaagcctccctacccacacccacgttctgggcacgggtgtcatcagccgcgggatggggcgaggacgtcgtgctgactgctcccaaaccctaggtccggagcctaggctcttagctctgggagaaagcgaggcaggggcagagaaaccagtgagggaggggcgcgggaagaccctagctagactctactcctgagccgcctgtgctagttttttgctaagaaagccacacgtgcacacaggagcctgattcttgacttaaagacgctttacccaaaggggtttccagggccaggagctgagcttggctgcagggaaacagaagtcaagaggagatgctaggcatgggagtgcatcactggtcttcagtagtcactagagtcagagctccttgaactgacgcgtttccccagcatgtctgtgtcaaaaacctcggacgcatcccttctttttacttcgttgcagagagggaacaactgagaactccgcagagcgcactttctagcactgacaggtgtaagactccctcctacctatttccagagatgcatctggtgcacctggtggcagtttttgccagtaagaaagagcaggaaagaggtgatggcaggaagaagaaagagggggcaggcacaagtgtccccattgattgggaatgcctttctttgtctttctctggctggggtttgggggcaaagtcaggatgccagtacaggttgcagtgcaattgagaagctctttatgagcggcgtctcctcctgcaggtccagaccgcatttggcccattaaagcaacaagtggctctacttccaattcaaggaaagtgaatgtctgtccttggggatgggagcggacttaaggaggttaaaccatctcttcctgaggctttctgttggagggcagcaaaatcatattatacagattttagggcggagagaaaaccagaaacaagactatactttttgtttttgttggcaatgtaacgaagaaacctatcatcatcgtaggggggaaaacgtcaaaaggcacgtagttggttgtctccgccaccgaatacttgtgtgctctcagcacttctgttcctctgtctgggttttagtttccccatctggaaaatgatgagattgaattggatgccct

SEQ ID NO: 6331 - DNA, 1510 bp, Artificial sequence
  DNA replication origin
gacggggcggctggccgggcagaggggctcctcacctcccagtaggggcggccgggcagaggcacccccacctcccagacggggcggctggccgggcagaggggctcctcacttcccagtaggggtggccgggcagaggcgcccctcacctcccggacggggcggctggccgggcagggggctgacacccccacctccctcccggatggggcggctggcagggtagagggctgacccccccacctccctcccggacggggcggctggccgggcagaggggctcctcacttcccagtaggggcggccgggcagaggcgccccccacctcccagagggggcggctggccgggcggggggctgacccccccacctccctcccggacggggcggctggccgggtggggagctgacccccgcacctccctcctggacggggcggctggcctggcggtgggtgacccccacctccttcctggacggggtggctgccgggtggtgacgttcctcacttctcagacggggcggcttccgggtggaggggctcctcacttctcagacggggcggccgggcagagacgctcctcacctcccagacggggtcgcggccgggcagaggcgctccccacatctcagacgatgggcggcggggcagagacgctcctcacttcccagatgggatggcggccgggaagaggcgctcctcacttcctagatgggatggtggccgggaagaggtgctcctcacttcctagatgggatggcggccgggcagagacgctcctcacttcccagatgggatggcggccgggaagaggcgctcctcacttcctagatgggatggtggccgggaagaggtgctcctcacttcctagatgggatggcggccaggcagagacgctcctcacttcccagatgggatggcggccgggaagaggcgctcctcacttcctagatgggatggtggccgggaagaggtgctcctcacttcctagatgggatggcggccgggcagagacgctcctcactttccagactgggcagccaggcagaggggctcctcacgtcccagatgatgggcggccaggcagagacgcttctcacttcccagacggggtggcggccgggcagaggctgcaatctcggcactttgggaggccaaggcaggcggctgggaggtggaggttgtagcgagccgagatcacgccactgcactccagcctgggcaccattgagcactgagtgaaccagactccgtctgcaatcccggcacctcgggaggccgaggctggcggatcactcgcggttaggagctggagaccagcccggccaacacagcgaaaccccgtctccaccaaaaaaatacgaaaaccagtcaggcgtggcggcgcctgcctgcaatcgcaggcactcggcaagctgaggcaagagaatcaggcagggaggttgcagtgagccgagatggcagcagtacagtccagcttcggctcggtatcagagggagaccgtggaa

SEQ ID NO: 6332 - DNA, 926 bp, Artificial sequence
  DNA replication origin
gtccgggagggaggtgggggggtcagccccccgcccggccagccgccccctctgggaggtggggggcgcctctgcccggccgcccctactgggaagtgaggagcccctctgcccggccagccgccccgtccgggagggaggtgggggggtcagccctctaccctgccagccgccccatccgggagggaggtgggggtgtcagccccctgcccggccagccgccccgtccgggaggtgaggggcgcctctgcccggccacccctactgggaagtgaggagcccctctgcccggccagccgccccgtctgggaggtgggggtgcctctgcccggccgcccctactgggaggtgaggagcccctctgcccggccagccgccccgtccgggagggaggtgggggggtcagccccctgcccggccagccgccccgtccgggaggtgaggggcgcctctgcccggccacccctactgggaagtgaggagctcctctgcccggccaccaccccgtctgggaggtgtgcccggcagctcaatgagaacgggccatgatgacaatggcggttttgtggagtagaaagtggggagaggtggggaaaagagtgagaaatcggatggttgccgtgtttgtgtagtaggaggtagacatgggagacttttcattttgttctgtactaagaaaaattcttctgccttgggatcctgttgatctgtgaccttacccccaaccctgtgctctctgaaacatgtgctgtgtccactcagggttaaatggattaagggcggtgcaagatgtgctttgttaaacagatgcttgaaggcagcatgctcgttgagagtcatcaccactccctaatctcaagtacccagggacacaaacactgcggaaggccgcagggtcctctgcctaggaaaaccagagacctttg

SEQ ID NO: 6333 - DNA, 810 bp, Artificial sequence
  DNA replication origin
ctgcctcccccctacgacgggggtcctaagagccagtgggggaagaggggctggctctcagtcccgggctcgccgggggtgcctccccatcctgcgatgggtgtcctcagagccaggggaaaaaaggggctggctctcagtccccgagccgcggggggtgcctccacccccgcgatggtggtccaaagatccagggagggaagaggggctggctgtcagtccctgcctcacggggttcctcccaccctgcgatgggggtcctgagagccagggggggaagaggggctggctctcattccccgccttgcatggggtgactcccccccctgctatggaagtcctaagaggcagggggggaagaggggctggctctcagaacccgcctcgcgggggtgcctctcccccctgctatggaagtcctaagagccagcgggggaagagggggtggctctcagtccccgccacttggaggttgcctcccccactgcgatgggggtcctaagagccagggagggaagagggggagaggatgataataattccagcatcacaggcagtgttcacccagcctgtcaaattgttattaatatcctgaaagggagaggatgatattactccccataatagacagatacggctccccataatagagaacgaggtgtacacccaccctgcaatattctttccaatattcagaggccgagaggttgatattactccaaatatcgcagtaagtatacacccctgtgtgagatgctccttcataatataccaaggcggagggggtgatatgacttcatgtatggcaga

SEQ ID NO: 6334 - DNA, 1109 bp, Artificial sequence
  DNA replication origin
cagttgctgtgggacatcaccttccgcttctacgggcccgacctgctgtgccgcctggtcaagtacttgcaggtggtgggcatgttcgcctccacctacctgctgctgctcatgtccctggaccgctgcctggccatctgccagccgctgcgctcgctgcgccgccgcaccgaccgcctggcagtgctcgccacgtggctcggctgcctggtggccagcgcgccgcaggtgcacatcttctctctgcgcgaggtggctgacggcgtcttcgactgctgggccgtcttcatccagccctggggacccaaggcctacatcacatggatcacgctagctgtctacatcgtgccggtcatcgtgctcgctgcctgctacggccttatcagcttcaagatctggcagaacttgcggctcaagaccgctgcagcggcggcggccgaggcgccagagggcgcggcggctggcgatggggggcgcgtggccctggcgcgtgtcagcagcgtcaagctcatctccaaggccaagatccgcacggtcaagatgactttcatcatcgtgctggccttcatcgtgtgctggacgcctttcttcttcgtgcagatgtggagcgtctgggatgccaacgcgcccaaggaaggtagccagggctgggagacccaggaggagggagcctggtggctgggggaggcccttatcttgctgcctcagaatgtccaggggtctgtggacttcctgggggataagcgggtttgaaatcccacagagtcactgctctgtcatcccttgaccaagtgacttagggcaattaacctccctgagcctccactttctcttctgtaaggtggcaataaggataaaagtaccaactgtcaccaggcataggggaatgccacgagaaaatgcagttaaagtccttagcacagtccttgggctgcatatgggctgtatggtttactgtggtggtggaaacaggttcaagggactccatctgctttcccacgtggttaggaggaggtggtggaggtaagtttggaacccctggccaagctcaagctccttcaactttaagttcacgttaagatgaacttccactttaagttcaagaaatc

SEQ ID NO: 6335 - DNA, 1387 bp, Artificial sequence
  DNA replication origin
ctctcgcagttttaaaccactgcaaaataaacccatttgttaaggctctgggaccaacgctgggcgaaccagctccgctccggaggggtctgcgcggctggcctcgcccgccccctagcggacccgtgcgatagtgcagcctcagccccagcgcacagcgccgcatccagacgctgtccgcgcgcgcagcctgggaggcgctcctcgctcgcctcctgtacccatccagcgaccagccaggctgcggcgaggggattccaaccgaggctccagtgagagacctcagcttagcatcacattaggtgcagccggcaggccatcccaactcgggccgggagcgcacgcgtcactggggccgtcagtcgccgtgcaacttccccggggggagtcaactttaggttcgcctgcggactcggtgcaggtagctgggtgctaagcaggggtggacgggatggctagggccggtggagccatcgggacccgagtggaggtggtggggtgcctcgcactccttgttcctggaggagctcggggtgttccgagagattgtaaagtgacttctcgggattgagactcagagtccttgattatctgggtccaaagcgcaagtcaggggttccagaactttcgaggctgccgggctggggaggagccccgcgggaggtgtctatgccagggtctgggaacagcgcttgggcatcttgggctttgaggcaggggttcccccagcagggactgcagaaccgggtttccaccgaagcaggtgctgtggaagttcagggagtgacggccgaccgtcttagaaaagggggttagacggggaaggaccagagctggggtttcccaggcaagtggctatttggggatttccggaggaagtacttgaattaatgtttactaggagaggggctggtttgggggtcccgcggcaggtggatatgctgagggtcggagcctggggcgagtaggtagtttggagattccctcggggaggtgatttggttttagattcccactcccggaggaacgttgctgattttgaccctcccttctcccccagtggaagccgctgaacatcccgaggaactggcacgctgggggctctgggcttgtggccggtagaggattcccgctcatttgcagtggctcagaggaggtacctccaacggggatttctggggtggcggctgagcaacccgaggccggcggttgtgccctgttgtttcagatgagttgggttcctgggaatgggacaagcacgccctacccgcgtcggaagagaaacgcggcggtctcctcacggccctcccggtttgtttcagggtggacccagcagatccgtccgtggagtctccaggagtggagccccgggcgcccctacaccctc

SEQ ID NO: 6336 - DNA, 1357 bp, Artificial sequence
  DNA replication origin
taaaagggcgggacacccactgcctcctctaacgtggtattatttaataattgaggatggccgctgaccggcctggcttgataaaggttaataaagaatggcctgatgtcggtcgttggccgaatacaggaaggggagagggagagactacagggtgccaggagcttgctcgcgtctgcgaagaaggaatccgaagagatggcttaggagcccgctttcagccaccccggctgctgcacgtggcgcgcggggcggggcggggcggtcggggggggggggggtcccagcgacggttgccgtggcaacggcgcgcggcggctgaccccggcccggcatctgctgcctccagccccggcgctgggcgcacggatcctgcggaccctcggggccgtcccggaagccgcctctcggtgtacaggaggctaggagaagggcggcaatggggagcccgtgtccgggcagcgcacgagtcttttgtgcagggcctagagaaggagcgaaacgtgggccaggcctgcgaggagggcgggcggggaaggggaaccagcacagagaggctggaagaaggtggctggtgacacagccctccttgtgggactgtggacgcggggcgcgagatggcgcctgggaaacacttagctcggtgcccagcgtgcctggtgctcacggtccatgactacagcagccgccatggctcatttcttgcgtccctgcagtgccccaggcaccacgcgcataccacccctcacccttttaacaaccccaggggggaaggtattattccctattttacagatgagaaaacagagaccaggctgaagccacttccccaaagtggagaaaaccagatttggagcctaggctgactgtcctcagaacttgtgagcttgtgagtgcatgcccttccgctgcgccatgccacctctgtatagatgctattcgccgagggtccaccaggtgcctggcacatcatgtgcattatttccagtctgatcctggcaacaaccctgcaagataagaatacttacttgccttttacaaatccgaagacagctcagagaagatactgagttgactgcccaaggcttcacagtgcagatccggcagagacaataatcaaccctgtgagagtggctccagagtccaggctctgctgggtctatccactgggccacatcatctccgctagggctggagttggagggcaagggaccccaccaggatgctgggttttgggctgggagcaaggagagtgagtctccatcatcatgttttcttgaggggagggtttggaagactccattacactgctcttgttggagaggtcgtgcgcaaattcggagtaataaaacatagt

SEQ ID NO: 6337 - DNA, 1499 bp, Artificial sequence
  DNA replication origin
tgtagagatgctgggtgtgcgggcgcggccggcctcctgcggcgggaggggagggtcagtgaaatcggctctggcgcgggcgtcctcccaccctccccttccttcgggggagtcggtttacccgccgcctgcttgtcttcgacacctgattggctgtcgaagctgtgggaccgggcccttgctactggctcgagtctcacatgagcgaaaccactgcgcggggcgcgggggtggcggggaggcgggcgttggtacggtcctccccgaggccgagcgccgcagtgtctggccccgcgcccctgcgcaacgtggcaggaagcgcgcgctggaggcgggggcgggctgccggccgagacttctggatggcggcggccgcggctccgccccgggttcccaccgcctgaagggcgagacaagcccgacctgctacaggcactcgtgggggtgggggaggagcgggggtcggtccggctggtttgtgggtgggaggcgcttgttctccaaaaaccggcgcgagctgcaatcctgagggagctgcggtggaggaggtggagagaaggccgcacccttctgggcagggggaggggagtgccgcaatacctttatgggagttctctgctgcctcccgtcttgtaaggaccgccctgggcctggaagaagccctccctcctttcctcctcgcgtgatctcgtcatcgcctccatgtcgagtcgcttctcgattatgggcgggattcttttgcctaggcttaaggggctaacttggtccctgggcgttgccctgcaggggagtgagcagctgtaagatttgaggggcgactccgattagtttatcttcccacggactagagttggtgtcgaggttattgtaataagggtggggtagggaaatggagcttagtcattcacctggggctgattttatgcaacgagactgcggattatcactacttatcatttttggagcatttttctagagacagacataaagcatgatcacctgagttttataccatttgagacccttgctgcaccaccaaagtgtagcatcaggttaaatcttaatagaaaaattttagcttttgcttgagaaaccagtgcttccctccctcaccctctctccccaggctctctacccctttgcatccctaccaggcatcttagcaactctcactcatacttgatcccattttccatttgttgtacttgctcctctagtattcagacatagcactagctttctccctctcttgatcttgggtagcctggtgtctcgcgaaaccagacagattggttccaccacaaattaaggcttgagctggggcttgactcttacccagcagtgcttttattcctccctagttcacgttcttaaatgtttatcttgattttcattttatcctttttccttagctgggattctgtccctgaccgtcttcacagtccaggtgatcttgactactgctttacagagaattggatctgaggttaggcaacatc

SEQ ID NO: 6338 - DNA, 1025 bp, Artificial sequence
  DNA replication origin
gtgaggtgggggtggggggcagaaaggcggagcgagccaaaggcggggagggggggcagggccagggaaagaggggggccggcactactgtgttggcggactggcgggactggggctgcgtgagtctctgagcgcaggcgggcggcggccgcccctcccccggcagcggcggcggcggcggcggcggcggcggcggcggcagctcactcagcccgctgcccgagcggaaacgccactgaccgcacggggattcccagcgccggcgccaggggcacccgggacacgccccctcccgccgcgccattggcctctccgcccaccgccccgcacccattggcccactcgccgccaatcagcggaagccgccggggccgcctagagaagaggctgtgcttcggcgctccggctcctcagagagcctcggctaggtaggggagcggaactctggtgggaggggaggtgcggtacactggggggatgggtggctaggggggccgtctggtggcttgcgggggttgcctttcccgtgggaagtcgggaacataatgtttgttacgttgggagggaaaggggtggctggatgcaggcgggagggaggcccgccctgcggcaaccggagggggagggagaagggagcggaaaatgctcgaaaccggacggagccattgctctcgcagagggaggagcgcttccggctagcctcttgtcgccgattggccgtttctcctcccgccgtgtgtgaaaacacaaatggcgtattctggttggagtaaagctcctgtcagttacgccgtcgggagtacgcagccgcttagcgactctcgcgttgccccctgggtggggcgggtaggtaggtggggtgtagagatgctgggtgtgcgggcgcggccggcctcctgcggcgggaggggagggtcagtgaaatcggctctggcgcgggcgtcctcccaccctccccttccttcgggggagtcggtttacccgccgcctgcttgtcttcgacacctgattggctgtcgaagctg

SEQ ID NO: 6339 - DNA, 1555 bp, Artificial sequence
  DNA replication origin
gtaaaccttaaagactctaatcccataacaggccagaatttttggctacagaagagaactaatgatcctgagaaaactggaagaaatccaatagaaaaaaaaaagccctacgtcctctatggagcccagaaacctctgattacgtgggtattctctgctttagtcctagctcagatcccacacatctaaaattaccacttagaactttctgtgacctaaaaacattaataatataaaattaacaaccaaaaaataatttcaaatagggagtacacactctcctaaaaagctcagcacactccactcagctggatcctccccaatcacaagtatagctatgtaacatctgtccaacaaagaaatgtaaatatgaccttggtcacaaatatgtcatctaaaaacttgtttagtcaactgatgaaggtaattagcacagaacttggggattcgttcagtacctatgtgcaggaaggaaactggagaaatgaacttaaatatagacaaagcccagtggaacccagaggtctgggaaagaaatgagttaccggtgaatacattgcacaagtaacatgagaaagcagaaaatgcaggtcatacacgcacccctgacccagaccagcagagctgactgcagcatccatatccaagagaaagaccactgacgcccaagaagtgagacaagcaaggactctatagaatcaattagcatagaaggggctttcccaacagtttaactttccctctcatgcgatttacctacttgaaccagggctctttcctacactcctcttcacattcccgacttacacgcagagggaaagagaattcataaagggaatatttttctgcctttgaagatattctcacaagatcgttctccacgcccaaggcaagtaaaacgacacaatctggctcaactccaggctcgaaccctacacattcaacgaggctatctcagacacgctgtggcacacgccacggggagccagagaacgtgtggtgggggtggcgaaggtaatgcctttgggaagcagccatctgaggtgggaagccagaaaacgagagggaaggcgtccaggaagattacggaggggagatcgcggcccccagagcgatcagagttgtctgtcacaaggccgcgagaacgggggtagggagtgggggatcggggagagaaaaaaagtatgcctgtgtatttcgagcggagggcagcaagaggcctctcctcaagggaaaggtaaacgtggagtaggcagttcccaggaaagggggtgaagaggcgttgggggaggggaagcgtcctgacccaggaaaaacatgaaagggggagttgggtcgcctagattagagggggatctctctccctgggaaaatggggtgttgcaacggtgtgtgcaaggcggcgaggggggtgagaagtggcagcatcctcctaagagcttggggagggccaggcccacgacccaaggagagcgagcgcggggagacggaggaggtgacccttccctcccctggggcccgatcgtgaggttcggtctcttttctgtcggaccct

SEQ ID NO: 6340 - DNA, 1029 bp, Artificial sequence
  DNA replication origin
gcacagagaaacagcgcgaggaggagagatcgagagagacggggcagaggtggagagagatgagagaccagctgagaggctgcccgagagcttggggtgggggaggggaaatggatgaaaaggcggaaaaaggactcgggagcggggaagaggtaaatggagatgtgggttgggggcaagaatgggatgcagaggaaggagaggaggatgaaggagccaggatgcggggcagtggggagggggttgctatctgggcactgggtgaggggagagcttgttcccccaaggacgcctgccaccaggtgtccttgccacaccttgttccccaaggacacccaccaaacctgtgccctggtgcgggggatagaactgacctttcagaggctggaggcccggggcacaggcagccaaggccgcatccttttgggaagaactggagtgaaggaagccacttcagaggacgtagtgggtccagctgacttaggagtgggtcagcgccgggtggagaggagggaggctagttccctggtggggtagcctggcaacattcccattccaccgcacctggccagctgccatcttggcagagccagggggagatgcaccagggagtttggagtcaggaaggcagagttgtgtgggctgaagtctgcgggaaccccagggtgacacaggcaaggggtagaagtcagagtggggaccaaaccatagactggggccctgggttctgcagaggtgtggatggggcaggtggcaggtgctccagtgggggccccaggtgaggccctgatggccctcctggggcaataaagacatcatgggaagggggctttgtggtttgcctctgctctcgtcgggcgatctggctttagccttcaggaggaggtaagcagaggagatcagtgcctgtttctgaccccaggagggccttgttgggctccaacctagagccttccggcttcaggtcccaagagaagtccccccctaactgtgacccccctaactgtgatcaggggtctgccattgccc

SEQ ID NO: 6341 - DNA, 1026 bp, Artificial sequence
  DNA replication origin
cggcttcgtccagcgccccctcctggcggcctggacctgcagggaaggggcggtgccctgcaggatgccaggggaagccgcctcgggcctcggcggaggggagagggtcgcttgagcgccatgtgtttgccaaccttgtgttcatttccacaggacttggacctgagagttagggtttccaagaaagaccctagaagtcccctgcctgtctccccactctggaccctagccggaatcagatgttgggacctagtgggttcctgccacctggaacttaccaagtcccgacttcactcctccacttactcctcccgggcaaagcctccccgcagtgctctggtcccagcgctgggctccccttccccgccggcgccttcccggacagtccagtcggcctggggtaggggcgctgcgggacagagggtccgagttaaatgcgggaggatgcgggagccccgtgggagggagttggggtaggagggagttcctcaaagatgcaaaccaagcccagcgttggagggggagagcagagttaggagagagtgaggggaggggcgcagcaagcgactgggaatgggagaagacactggggtgaggagaagaggggtgcagagacagggagatgagagatgattggagaaggagcgagggggacgcacaggcacagagaaacagcgcgaggaggagagatcgagagagacggggcagaggtggagagagatgagagaccagctgagaggctgcccgagagcttggggtgggggaggggaaatggatgaaaaggcggaaaaaggactcgggagcggggaagaggtaaatggagatgtgggttgggggcaagaatgggatgcagaggaaggagaggaggatgaaggagccaggatgcggggcagtggggagggggttgctatctgggcactgggtgaggggagagcttgttcccccaaggacgcctgccaccaggtgtccttgccacaccttgttccccaaggacacccaccaaacctgtgccctggtgcgggggat

SEQ ID NO: 6342 - DNA, 1208 bp, Artificial sequence
  DNA replication origin
gaagaaaagcgaaaagcaggtgatgcagccgaggatcagcaccatggagagcagcacgaagaaggcggccgccttgaaggcgctggacgggatggtgctgaagtcggtgaaggagccccggcaggtgagctcgcggcccgccagcccgctgcccacgcagtagtggaagaggccgaagtagccaggcttgggggtgctcacgctgtcgcccacccagtagggctggatgaagaccaccacgttgatgatggcgaagcagatggtgaagatggcccacagcacgccgatggcccgcgagttccgcatgtagtgctcgtggtagagcttggaggcctcctgcgagggcagcatggtgcccggaggcggggccggcggcggcggcggctggcgggggccgccggcccgggacggagcgccgggctgccgggcgggagctggggacgcacgcgagaagcggccctgagtcaaggaacccgcgagggcggggcctggggcagagctgggggcgtctgggagctgctaagggagagaggaaggggtcatgagagtgttgaggccgtgtctagggggactggcaaaggtctcctactggggggcctaggagggggccatgagaaagttggggggcgcctaggatggggatatgagacctggaagtgcggggggaggtgcttgaaagtggccatgggggagttggggagggggtttgagagctggtattacgggagtaggaggggacaaggggaggtggaatggaggctggagactggtgttggaggactagcagaggggctgaatttagggagctcagaagggaatttggggactggtattaaggggtagaaggaggtctggtattgggtgtctagcaagggactatgaggcggtggtgggcgcttctaggatgggggaagagggaatttaagaggctgggactgggtggttgggaaggtaatatgggggctgggacggggaatgggggctggtatgagggtctaagagggcaaagtggcagaattaggatacagctagagcgggatcgggggctgggactgctggacacggggcgaggaagggggggctgtcctcagaagccagggctggaggtaggctggagggagcctaggattggcgggccagggttggagagagggggtttccaggccaaaggaacgaaagaccggggccggtgagcagcggggcccgcg

SEQ ID NO: 6343 - DNA, 1423 bp, Artificial sequence
  DNA replication origin
agggctggaggtaggctggagggagcctaggattggcgggccagggttggagagagggggtttccaggccaaaggaacgaaagaccggggccggtgagcagcggggcccgcgaggagcaggcggtgggcaggggctgtccccggggggctggggagcggccgggcccgagtagggccggggttgggggggcggctgccccgcgcccaggccggacgcgcgcgaggctgcggccgcggggaaagggtgcggggagaccaacctgggcacggccggaggcagcggatccgggactggcacggcctaggcgccgcggctcggcgctcccagcagcggctgcctcggcccaggcggcggcctctgcgcggcctccatcttgctcgggttctccccggggcgcgctcccgcgccgaggcgcgcgctctcgtgcaccggcgcggcccggcggaggcgcgctcccgagcgggcgtgcgggacggggcggggcggaaccggggaagggtgctcctggttctggcagttggggggaagggtggccacgatacctggggtcccccagccggggcagcaagcacacctccacagtagggcccccgatgtaggggactcccttcttccagcctgagctaaggggctgtgaggccccacaaagcctatgggagtggggaaggagctggagggggtattatttgacaggatttgaacggatctcttactcccaattacctcccctggaacctatcacagtgcctgaagttgcaccattacgctttcagtcctttgggtcttggaggcgttgaaggttcccagagtctcctaggaaactgccaacacccctgggagagggaaccccttaaactggtagcagcccacgcctgcgatggggattcgttggctgccagggcaaggagcgaggcctggggaaccagacccggagtgagtactaggggacaggagagaaaggggctgggacatttttggtttccctccctacactctcccctgcccccagctcagcgcctggcatgaagtaggcacaccataaagatgtgttaaggaaaaagcatcaaaggccaggcacagggttaggtcacagaacaccccaggcgcaccccaagggggagccggcgtggttcatttctttccctgctggaaaatagcctttggcttaggatctgtcaagatgatgtgggtttgaacccagacaaactgagtctaaaactgtctctgtgaccttgcactaccactctgtctaaacctctgtttcctcatctgtaaagtgggcagcttaagtcacacttcacaggcatgtaagtggggtggggtggcaaaaagcaatccatgttagcaggtctcaaatactggaccccatacacgggtcaatctcaaaatgtgtatctggagctgggcacagtgtcttgtgcc

SEQ ID NO: 6344 - DNA, 1236 bp, Artificial sequence
  DNA replication origin
atccacctacctcggcctcccaaagtgctgagattacaggtgtgagccaccacacctggcctgtacgccataaatttatacattttttttaaacaacaacaacaagccaagctcacaaaaactcttaggtatcagggttagaatacaaatatctgtttatctgactttaggatagctctgattcctacccttaggggcttaggaacttcggaaagtttgatgtaagggatgcatgcatgaggtgtgggtgaaaacacacacaggtttcaatcctggaatgcccactttctagctatacaatatatatatatttttttctcacctcccggacggggcggctggccgggcagaggggctcctcacttcccagtaggggcggccgggcagaggcgcccctcacctcccagacggggcagctggccgggcggggggctgacccccacctccctcccggacgggctggctgccgggcagaggcgctcctcacttcccagacggggcgacggggcagaggcgctccccacatctcagacgatgggtggccgggcagagacgctcctcactttccagactgggcagccaggcagaggggctcctcacgtcccagaggatgggcggccaggcagagacgctcctcacttcccagatgggatggcggccgggaagaggtgctcctcacttcctagatgggatggcggccgggcagaggcgctcctcacttcccagacggggtgacggggcagaggcgctccccacatctcagacgatgggcggccgggcagagacgctcctcactttccagactgggcagccaggcagaggggctcctcacatcccagaggatgggcggccaggcagagacgctcctcacttcccagacagggtggcggccgggcagaggctgcaatctcggcactttgggaggccaaggcaggcggctgggaggtggaggttgtagcgagccgagatcacgccactgcactccagcctgggcaccattgagcactgagtgaaccagactccgtctgcaatcccggcacctcgggaggccgaggctggcggatcactagcggttaggagctggagaccagcccggccaacacagcgaaaccccgtctccaaccaaaaaatacgaaaaccagtcaggcgtggcggcacgcgcctgcaatcgcaggcactcggcaggctgaggcaggagaatcaggcagggaggttgcagtgagccgagatggcagc

SEQ ID NO: 6345 - DNA, 1238 bp, Artificial sequence
  DNA replication origin
gatgattcttaacaagcatgctgccttcaagcatctgtttaacaaagcacatcttgcaccgcccttaatccatttaaccctgagtggacacagcacatgtttcagagagcaccgggttgggggtaaggtcatagatcaacagcatcccaaggcagaagaatttttcttagtacagaacaaaatggagtctcctatgtctacttctttctacacagacacagcaacaatctgatttctctatcttttcaccacatttcccccttttctattccacaaaactgccatcgtcatcatggcccattctcaatgagctgttgggtacacctcccagatggggtggcggccgggcagaggggctcctcacttcccagaaggggcggccgggcagaggggccccccacctccctcccggacggggcggctgcggggcagaggggctcctcacttctcagacggggcggctgggcagagacgctcctcacatcccagacggggcggccgggcagaggcgctccccacatctcagacgatgggcggccgggcagagatgctcctcaattcctagacgggatggcggccgggaagaggcgctcctcactttctagactgggcagccaggcagagaggctcctcacatcccagacgatgggcggccaggcagagactctcctcacttcccagacggggtggcggccgggcagaggctgcaatctcagcactttgggaggccaaggcaggcggctgggaggtggaggttgtagcgagccgagatcacgccactgcactccagcctgggcaccattgagcactgagtgaaccagactccgtctgcaatcccggcacctcaggaggccgaggctggcggatcactcgcggttaggagctggagaccagcccggccaacacagcgaaaccccgtctccaccaaaaaaatacgaaaaccaggcactcggcaggctgaggcaggagaatcaggcagggaggttgcagtgagccgagatggccccagtacagtccagcttcagctcggcatcagagggagaccgtggaaagagagggagagggagaccgtggggagcgggagcgggagcgggagcgggagaggtatttatttattttttttaaagaccgagtcccagtgaggatgtggagcaactggaacacttatacattgttggtgggaatgcaaaatggcacaaccactctggaaaactatttggcagtttctcctaaagtta

SEQ ID NO: 6346 - DNA, 1229 bp, Artificial sequence
  DNA replication origin
agcataatgagccctatatacccatcactcagcttcaacaattaccaactctttttccatctttttcatgtacatttcctccacccttcacccccaacattttacaagttctaactgtatttttctttttcttttttttttcccaaggcagaagaatttttcttagtacagaacaaaatgaaaagtctcccatgtctacctctttctacacagacacggcaaccatccgatttctcaatcttttccccacctttcccccctttctattccacaaaactgccattgtcgtcatggcccgttctcaatgagctgttgggtacacctcccagacggggtggtggccgggcagaggggctcctcacttcccagtaggggcggccgggcagaggcgcccctcacctcccggacggggcggctggccaggcgggggctgacccccacctccctcccggacgtggtggctgccgggcggagacgctcctcacttcccagatggggtggctgctgggcggaggggctcctcacttctcagacagggcggctgccgggcggaggggctcctcacttctcagacggggtggctgggcagagacgcttctcacttcctagatgggatggtggccgggcagagacgctcctcactttccagactgggcagccaggcagaggcgctcctcacatcccagacggggcgacggggcagaggcgctccccacatctcagacgatgggcggccgggcagagacgctcctcactttccagactgggcagccgggcagaggggctcctcacatcccagaggataggcggccaggcagagacgctcctcacttcccagacggggtggcggccgggcagaggctgcaatctcggcactttgggaggccaaggcaggcggctgggagatggaggttgtagcggagctgagatcacgccactgcactccagcctgggcaacattgagtactgagtgaacgagactccgtctgcaatcccggcacctcgggaggccgaggctggtggatcactcgcggttaggagctggagaccagcccggccaacacagcgaaaccccgtctccaaccaaaaaatacgaaaaccagtcaggcgtggcggcgcgcgcctgcaattgcaggcacttggcaggctgaggcaggagaatcaggcagggaggttgggtgagccgagatggcagcagtacagtccagcttcggctgggcatcagaggg

SEQ ID NO: 6347 - DNA, 1042 bp, Artificial sequence
  DNA replication origin
gcccggcttccccgggggaaaccccttggggcggatcacgcggtatcagccagtggcctccctggtggatagaaggatcgctctgcgccgggggcgggccagtaatcgtaggcggggcgcgggtccagagctccgattggccagagtcggagtaaacatccggcgggacggggcggggccggaagtggaagtggaagtagaaggcggtggctgaggcggttccggaggttctagtgtcggagttgggtgcaggcaggtgccatgggcccgcttgaggcacactgaggggacgcggggctgggccatggccggcgctcgggccgccgccgccgctgcctcggcggggtcctcggcctcttcaggcaaccagccgcctcaggagctggggcttggggagctgctggaggagttctcccggactcagtaccgggccaaggatggcagcgggaccggcggctctaaggtgagattggaggtgcgatgagctggggaaggctcctaacttgggaagttacagaggaaaggctgaggccaggggtcagaaaaaggtaggagtggtacctcgccgctgaggaagaggagagagagagaggagttctccagggtctgtatccggagtataagagtcggtcttgacaaccataaaaggaggaactggggtcagaatgagcccagcaaagaggtccttcttgtttgagaaggggtctggaggtgagagatcaagctgaggggccaggttcaaagatcagagaggaggacctaaggaaggtctattccctgcttcaggtgccgtaggatgagttgtgtcagggaaaaagccccaagaaaaagctaagaaaaatagggagacgattcctcggggtcagaggtcagaatggagccaggaggtgaacccagtgtgctgcccccttataaggtctcagcatgacttaggcccatccctttccttcccctatagagcaggaagacaacccacactccctttcagttcctttatctaaagcaggtctccgttcctctttttgctccctttgggatttcc

SEQ ID NO: 6348 - DNA, 1716 bp, Artificial sequence
  DNA replication origin
gcacaggaccagggcagttcccaggcgaatgagtggtgcaagagccacggccctacatgggctttaatggagggggtgtgaaagaaggggtctgcgagcaatctctgccttgtagtgggtcatcagtccaagcctgttctccacaataccacccccacccccaacctctgcccagccccattcagcctcaccttctgcaggtcccagcagtggcagccaagaaggaagaggaacagtgagtagggggcacaggcaggacactcaggcaggaggagagggaccaggagggtgggttgggggcctgaagaagatggggtctgggtcgagggttgggaggagttctgagagtcgttgaacacatctaagtgcctcctgtgcgctccgccaaccctcgaggaaacgtttgctcaccggtttggagatgttggttttggagtccacgttgtacctgggaaaagagtggaaccggtgtggggtggggctgggtgggggagagggtggaaaggggtcgggcaccgagtcttggtgaaaattttgggtggagggatgggcggccgtggacccgaattcagctttggtctccttttggggaggagtcagggtgggctgagtagtcagacggtcaagcctgggccgaggccaagtcaggggctgctgggggcagggttgtgtggaaggggtcgggcctgaggtggagctgcgataggagcagagttgtgggcggggccagagcgggggacggaactggaccgcatctcataaaagggcagggctcaggctagagggggccattcagaatgggagggaggcctgcgagaagaaccaggccggaggcgaggcgggggtggggccagccagaattccgggcggatccaggtcgggggcgggccaagccagaattccaggcggggcctcacacatcgaagcgcagattttgcttttcctcaaagaaatagtcgaggacgaatttgcgcacgaagtctgggttcagcgtgttatcaatcacctcggtccgtccgaactgggtaggggggtggagggtcagcgtgggacgtgcagacgggcaggggaattcccgggcgacgccctgggccgggagggggctctgggactcacctcccgccactcctggctggcccggctctgcgtgtaaagcaccaccactgcaggtgggggcggggagggaaggacgtcaggtcggctcccacccctggccccgactccacccgcccctgagtcgcgcccagaccccaagttccccctcccggtcctggagccgcctactggggtcggacttggagaaggtatcaaggtctagcaggttcctagagaaaagcaacagacagacagagtggatcatcctggagtccgcccgcctcgagtcggctctgagccgggcactgaggagaggcatggggcccgcatcgaacctctgtcccccatggctacccccagccggggtccgctctgtcagcactctggacagcaccggaaatcgctgtccaggaaccatggctctgcggactggacgcgaacgcacccacactgtctccaagggcccaggaaagagggctcgccccagaactttgtcctcctggggccgagctcctaccggatatctgcgacccaccccctgaacccgcaggctgagcccttttttcggggtggggctgcccaagaccccccgcttctcgatcccaccagctactcgccctg

SEQ ID NO: 6349 - DNA, 931 bp, Artificial sequence
  DNA replication origin
ttcctgaggatttgacttagtccgggggagcttccctgtggagaggggcttggaagtggaccttaaaggctgaatcagacttagaaaaagagtgaggagagagagagagaaacagagagagagagagaaaaaaaaaaaagaaaagaaaagacatatcaggcctgatactgactcgggcagagcactggaaattggacttttctacgagggtgatgggagccggggcaggctcctgaccaggggcaaccccagcctccacttctatcagtcagcggcatccttgggagggagaatttggaagcccccaccccactcccacaccccttcctattcagcttacgtgagggttcgctctactcggctgccctggcctccaatcacctctcccagggccaggaacgcttgtcccaggaaatcctatgcaggacaaggagtcagcaagaccagaagctcttgagtgctgagtcccagcctagccccagtgatgctcctgcacaggaccagggcagttcccaggcgaatgagtggtgcaagagccacggccctacatgggctttaatggagggggtgtgaaagaaggggtctgcgagcaatctctgccttgtagtgggtcatcagtccaagcctgttctccacaataccacccccacccccaacctctgcccagccccattcagcctcaccttctgcaggtcccagcagtggcagccaagaaggaagaggaacagtgagtagggggcacaggcaggacactcaggcaggaggagagggaccaggagggtgggttgggggcctgaagaagatggggtctgggtcgagggttgggaggagttctgagagtcgttgaacacatctaagtgcctcctgtgcgctccgccaaccctcgaggaaacgtttgctcaccggtttggagatgttggttttggagtcc

SEQ ID NO: 6350 - DNA, 1107 bp, Artificial sequence
  DNA replication origin
ggcggcagcagcggcggcgacggcgtctgcgcagggtaaacgtggcgccgcggcgctactgagctgcactttcgccacggatccccgcccgcccgctgaggctcgaaagaccgtgctccgggattcagaaaggaccctggacaccccacagggcttctctagctctcccatcttagagtggagtttctggagactgaagtcaccgtactcgggatctggggtcgtcgggcggtttgtggcgaatctgcaaccacggacggtgagcgcggggctgggcgtgaggagcccgcccttctcccctccccctctgcctcctccctatccgctccctgcctcctgctggcgccgcggctgcgggagggacctggccttggtctcggaggaaggcggtgaggcggggccagagtcacggggcggggctgggggcagggccgggagcaagagggatgcgggctggagcctaagggaccggtagttatgggtaggaccggggcggggctggagactagaccggtctgtggggcggggcttgtgggagggggcggggctaccgcacagcgggggcctgttagaatagcggggtaaaaagtggggctaaacagaagaagagtactcgcgagagaaagggcggagctttggatgagcctggaaagtggagctggactagaaataaagaacaaagttggaaaaagcgatgcgacgctgaagggagcaggcggggcttggtaaggcaggggcggagctgtggggaaagggcaggaccgattagggataacggggcgtgactgaaggaaagggaagaaacttgggaaaagtaaaggagaggtgctagagaaaaggtatgggtctgagagaaggggctggtttggggccggtgggtgtgaaagggcttgtctggtaaagcggtgggaaatctgtgggttggcagggatgtgctgcgggttgctgattggaacatggtgccaaaacagctgatttaatgtgagtgggtcacctcctagcaatgtgaacgtgggcaagttcagttctttaagttccttatttgtaaaacagagctcgaaaactctgttgttagttcttgagggtttcagagaacttgcatggcag

SEQ ID NO: 6351 - DNA, 1282 bp, Artificial sequence
  DNA replication origin
cggggagccgggaccaaagcgtggggcggcagggggccggggtggcgaggtctacggtctccggagttggggctcccccttcccggcccgactttccccgccgacctccccaagtggggtcggagccccggcgggcgcccccggcgatgagcccggactcgaggtggccggtgagtgcgggcctgggaccagggcgggagtggccggcagggaaggggtaggctacgttcgtgggacgcgcactgagccgcgtggcccgggaacctctctggcaactccagttgggagaactgacagtgcattgcttcccagcaggcatcctggggcaacagtgtatctttcggggctgcccgggctagtggcaggcggggagccttgtttcacttgttacacttccacaaaggggaaacgccgccgcatccggagagtgggctgcgggcactgccggggcccagccctatccctccggcccccgccccttacttcctccagccccctgagcttcaggggcagatgcagccgccattctccttgggccctccccacgggctttctggtctaagttctcgtctccctcgcctgtgcctctgctgccgggttccaaggggagattgctgattcgctgtgctactttgggaaccattcacccgggacccagcttggaaagaggagagcttgtttgtgcttcggttggtttatgtttaaagacacagccgcaggtaggaaatagaagagttgcagttggacgtgtagcgttactgatgtgaaaatcaggagccgttgacagtggagctggagcagcccacttgcctggttaaggcacaggtggagaggccaagaggggttattttgtcagggagctcatgatagccctgcctggctgggatggtgccaagcccctagctgaatggttgaactcaactaggccgagagaaattggggcagtctctgaccaagctgggcttcctgaggcctggtgccatctgctgtctacactcacccaggaatgttggggagcggggagggagggcccctgcggaccagcatggagctgagcatgcctagattgtcgcgttcgtgtttgtacccttagggcctggcacttggtagtcactcagttgatgtgtgagtgggtgaacagctcaaatgtaatacaagctgctgtcactgactaaatgacctcagttttcactttgtttcacagtacatctcctacccagtaccagggccaggctccccataaagacctcaaaagtaaatgaattctttctgtgatccagtg

SEQ ID NO: 6352 - DNA, 1181 bp, Artificial sequence
  DNA replication origin
gagcggtgcctcgcctcccaatcccgggtccctccgccgcaggctccacctccactgacatcagagccgcaggcgggcggagagagccgccgagccgagccgagccccagctccagcaagagcgcgggcgggtggcccaggcacgcagcggtgaggaccgcggccacagctcggcgccaaccaccgcgggcctcccagccagccccgcggcggggcagccgcaggtacagccgggccccccatccctgcacccctgggcgctgcgtgggggcggtgggagcccctagcctctgggtatcctttcccaaggagtggccactgggcactctcccgggcgggctggaccctgaggggcagggctgggcctttctccacctctgtcccaggcccagcaggtgccaggcgggcctatgggacactgagtgggtaatagagaagggggcctgtgtgagcgccttcagctgggcctgactggaagggcgtgggcatttggaggtatccatggggtgggggggcttgcggagtgtactgtcttaggacaggcgtgtgggtcagacatgggtggaggatctgggaatctgtgtgttttttgttccagaggggtgtccacgtgttttgtgtgctggtatttggctctcagggtcttaagtcagagttaggagggggtgtacaattgtgtactgaggatgtttggagttaggtgtgtaaggacttggggtttggtttggaatacaggagcttccaggggatggggtagaggagctggagggtgtagggtacgtctggtatatgagggtgtgtgtgtgtgtgtctgggtgtcatcttgtgtgggtgcgggtggatgtgtgttttggggtgtaagagggagctgggtgagggatgtttggatggacaggcaggtgttcgggtgcagggctgtctggggcactgtgtggtgtggacatgtgtgctgatgtctgggagtacatgtatgatcaggtgtcacgggatgtggatacaaggcgtactggatctgggaggcaggtgtttgagttcagggctgtggagggggcttggtgtggcatgtctgctacagggatgtgtgtggatctgtgagggttgtatttggtaggcctccatgtgggtttcagactctgcctctagagcttacactcgagtctcctttcctagaagattctgcc

SEQ ID NO: 6353 - DNA, 1466 bp, Artificial sequence
  DNA replication origin
ggatacctccaaatgcccacgcccttccagtcaggcccagctgaaggcgctcacacaggcccccttctctattacccactcagtgtcccataggcccgcctggcacctgctgggcctgggacagaggtggagaaaggcccagccctgcccctcagggtccagcccgcccgggagagtgcccagtggccactccttgggaaaggatacccagaggctaggggctcccaccgcccccacgcagcgcccaggggtgcagggatggggggcccggctgtacctgcggctgccccgccgcggggctggctgggaggcccgcggtggttggcgccgagctgtggccgcggtcctcaccgctgcgtgcctgggccacccgcccgcgctcttgctggagctggggctcggctcggctcggcggctctctccgcccgcctgcggctctgatgtcagtggaggtggagcctgcggcggagggacccgggattgggaggcgaggcaccgctccaaggctggggaaggggcacgggtggaggccatctccctgcttctggtcagagatctcctgctggacgcttcccgcccttggtcttaagcggggtccatttcacagaggggacaactgaggcccggagagatgattttcaaatcagcgggtggtcggaagcaaagcaggattcgaaccccgtctgtctgaagctagaggccggccaaactcaccctgtggcctggtggattttctttcagaccagttctgcgacctcccttagggctctgtctcccttctccgtgccctgaagggaaacaggccctggaactgcacgggagtctggtgggggatgggggagtgagggagtggggaaggaccgggcaagactaggcaatgaagagagtggaggtggtcgcagggtgtgggccccacttgacaggtgggaagactgaggccccggttcctctgcaagatggagctgaggcttcagccccagacacttgctcctcagagcgggtggtggtgcctagaggtattgggggcagagggaattggggaggaggaagttaaatcgggatcctgaaggaaacaggccaaaaaggaccgaggtgtcacgtgactggcggggctccagagtttgatggctggggtccaggttaggggagagagcctgcaactaggacggcaggcaagaggccaaaggtcggtttgctcaaggccttccttgggaagaaatttggtgccgagtggaaagagggggcggggggagcaactcgcaggaattggggatggggctgaactgggggcagccggaggaggcacgttgcttgggaccccactccacctccaagggcctccaagtgccactccctactcctgaattcttgcatgttccagctggtgatggggagagaacagtgcttatgcccagctcatttcctttttctctttctttctttcttttttctttctttctcttctt

SEQ ID NO: 6354 - DNA, 910 bp, Artificial sequence
  DNA replication origin
aaggatgggggtacagaaccggaagaaacgaagggctcgtccgcttcggcttgtcctaatttggtgcccaatctgaagctgggctgtaccattgcatacctgggggaggctgtggcaaaggtgacaagaaggccgaaggcacaaagggaagctgcacccattcctggaggagcttaaatagtgactcgagtgcaagaatttaaaaataccgagacagccctaggtggaaaacttccggaaggcccaagcgttcgtaagggctctctaccccgctcggagcatagatggtaccgtccggaagtccgggcggagaccgtagctgcgcttctcgcgaaagggcaggcatcgcggggctggccacttccgtacttccgctttccggcccagccagcgcccgcgatggtgagagagccgggcccccggccagggacccccggctgttcggcctcagggcagtgggtcggtgggagatgtggctttgccgcaggggcgcggggccgagggatgtccgggggttgtggggacacgatgagggtgggaaaaagagacggggcgggggcccgaggtgaggaaggggcgagtgggggtactccctggtatgaagtgggccttgtggcttcacggtcagccttcgaagcaggtaggggcttttcctgagccctgtaggaacccggaagtggggtctcctaggctctttggagcatttcgagggtacgtagtcggcctcttagcctctgaggcatgaagcaagtccacctgcctatccacagtggaacttcacgacatacgccctttgtcctcttctgccttcctgaccctacagttgcttaaggcaggcggccacacttccttatcccattcttggtacctccagccctgcttccaccccattggaggatctctcgtgttg

SEQ ID NO: 6355 - DNA, 1594 bp, Artificial sequence
  DNA replication origin
gggggccgagggggtgggtatccgaggcgccctgggcgtgggtgcctgggaccagcgtcttgaaggcgccgctgaggcggcgcgcaggggcggggctgcccgcctggcatctgccgcctgcgtgaccctcctcggactgggcggaggcagggccggcccatggcagcctcctgggtggacggaactcggagcggcgcgccgaggggaaactggtgcgtggctcgagcggctgcggcttccgcagccagttgcacaccgcgccgccctcctggcggtaccaggaggccgagccccggcgcccgggccccagctccctcgcgctcaggagcagtggcgcgtcggggccctgcatgcgcccctcgccgcgctcgccctcccagggcccctgatcccgcgcccctccgcgtcgccgcctcctctcccgggaagttcctgcctaggctcgagccttgtcctccgttccaagccccgccccgtttgctattgccttggaaaccattccctgggcaccatcagaccgctcggggctggttgggggctgcgatgggccccggggcagtcgagcgagggcttccttatgacctggggcctcacccagacccttgatgagcagggcactgaaggcggaagagagcactgagccccagttagttagtgttgcggttccttatccagtacttcctggtgccaccggccctagggtttgagtgattccacagtatttataggcgctaacaaatggcccctgacctcatggagcttactaaaagcccagtgtgaggggaataaaaagcaagtaacaaaggaagagaatagtttacaggtataataagggcaatgaacaagcagaggtgaaaccaggaagggggcgcattttagataaagtggcgcatttaagctgaaggtgtaaatgccaggagtcaggagtcaccagggaaaggggaggaactgcacttcagggaagggacagtcccagcaacagccctgagaagggtaagaacctctgtgcgaactacaagacagccagggtggctggagcctggtgaggccagatcagacctgctgggcctggcagatgggcctagggtaaggtccttagcgagggcagcatatgggggtaacaagaaggtgcagagcacaccctccccagaaactggaaatggaaaaacaatcatttgagtcaactgcgaaagaaatgtaatagttcacaacagttatgcctggcccccaggctaagactgtaagcaacctttttggaagcactggcaaaatattatcctcaaaagtcacaggggaggtaaggctccaagatgttaaacaatttgcctcaaatcacagagcagaggcagcactggaacccaggtctgactccaaagcctgtctcttaaacacctgttatcactcaggttgcctgccagtcacagaaggaccacacagggacagtttgagaggcaaactctagcagtgcccccgcaggcagagtcgaagagtgtcctggtaagagcccagctttgtcagtcactgggtagatgtgctcttaagagtgaaggtggatcccccaccttcctgtccagctgaccccaactccccttta

SEQ ID NO: 6356 - DNA, 1976 bp, Artificial sequence
  DNA replication origin
aggcgtgtgccactgcgcccggctaatttttgtatttttagtagagacagggtttcaccatattggccacgctggtcttgaactcctggcctcaggccaaggcccgccttggcctcccaaagtgctgaaattacaggcgtcagccacctcatctggtgcccaaataatttttatattttttggtagagactgggcttcactgtgttggccaggctggtctccaactcctggcctcaagtgatcctcctgacttggcctcccaaaatgctgggattacaggtgtaagccaccgcgtctggccaatactatgcatttttattagatactgttatctccattttacgggctatgaaacagaggcatagagaaattaagcagggtgcctgaggccccatagtggttaagcaaaagagcagggatttacatcctggcagtttggctccagaaactgcatacttaatgggatccagagaaactacttagaaatacatggtcagggaaggttgaaaggaagccatgaatgtacagagctgggaaatggcggttcaggcagaggggaatgcatgtgcaaaggccttgaggctggagagaggtcagaaggaactgaagggagaccagagtgagtggaacatggaaaatgatggggaaagccccagaggaggtaggcagtggccagactgtggaaggccctgcaggccttggaacggacttggatttcatactaagagtgtcatgagcaaaaaaggctaactgagggaatctttctaagcttggcttgctgctgtattacaaaaagatgaggggacaggatggaggtagaccagctaggaggctgtcatagtttgcctaggagagaaatcacaattactaaaatgaaggtggttacaacacagacgggagaaggtgctagagttgagaatcgttttggaggtggagatgacaagtggttttgctgatggaattagacctgtgggtgaagaaacagaaagatgagatttctggcgtgaggaactgagagatgggaaagactggagactggggaggacgacaggtttgggcaggaagatcaaagtctggtttgggacatgaatttgaaatgcttgttaagttttctgggtgtagatgacaggtaggggctagatctacgggatgtggagttcgaggctgggctggaaggggcacggagagggtgcagcacactgactggactcagccaaggacacagccaaaggagacagacctggggaaggggccagggggccactaatggctgaggaacctttaaaggccgctgaaaagcagcagccaaagagggagaaaggaaaactaggagcgtgcagtcagacagccaagaggaagggtgtgtggggcagcggtgtcgaaagatacagggtgcccaaccgagatcaagaccgaaaggcactgctgggtttggctccctggaactcaccaggcaccttgattagagtgggacatcgcagggaaccagagtggagggagcccagaagtttggtgctgaaggggtaaacggggaggtagttgaagatgggtgtggtggttgaggatttttgctattgttttttcttttgcttttgttttttaaggatataagaaaacagcgcagggagacaggctgagccgctcccagggccctttctaagcgcccctgcccctcctctgaccttgacagctctctccacgtagattttggcgtttctgagccggttcatgtgagacgccttggaggatcctcgccagaggaccgggaaacctgcagaaagatgcggaataggggcggggtacactgaggctgggcctagggtctcggcctaggatcttttctggccgcccatagccacgcctcttttcttcctcctgccttcatccagatgcccaccctcagccgctcttctcccgacccccagtccctccaccccagcgtcttgtcgtcctcgcagccgctgtaggccagagcg

SEQ ID NO: 6357 - DNA, 1246 bp, Artificial sequence
  DNA replication origin
ggcagggcagaggaagcaggggacaaacaggaggaagagatggtgccctgggtcaggtggccgccactgctaccatcaatggaagtggaaaactctttgccttctccttacacctgtcaccatgacacgacacccccatgctttctgcccaccgcccccaccttctttagtaaaggtgctggcaactaaggagcagagtctgatttgaagttgccgaggaaaccatcatgggcagctgtgaaaccatcaggcttgcccagcagggagctcaggttccccaaattggatgagcaaatcagtttctgcaggccttgctgtccaggcaaataagatgagggcagggccatgtggttgaggtgggtctgaaacaggactcccaagggcacaggccctgcccagccttggcacccaaggcagagctggtcagccctgggcccctgtgggctgctatggccacctcccttcaggcgctgctgcccccacagagacgggcaacctctgcaggtcgctgggattccagaggtgctcagagcctccagatgcctcacgcaggccctctctgctggttccccaggggcctcaaagcgctggcccagccaccaggacactcccctgagcctctcgaccttcccgtggatcctttggagcctgggttttggagtttgtccttcctaaaatgctgcccacctgaatgtggctgacccagaaccaccactgaccaagtgcggccacgtcccctgcaggccacccatcaagggcacaggcaacaggtgccccaaggggccgtggcccgtcctgcccagggctgaccctcggggtagggagagggcactaactcgggtcctctaccctgcctcaaggctctttcctcacctggggggaagggcttccaatccttgcacctcaggggccttcctgttttactgatgccaacaaatgaacattgatcatctcccatgtacagggacagagaagacagacaggctggccccgggtgggtgagggagactagtctgtcagagcaaagactccccatggaaataggggctaagaaggaaacaccaggaaaagtgaaggtggaagatggggtgaccctactgcagatggggtgctcagggagggtttctctgaggaggtgacattcacttgattggtgtattagtctgtttcattcagctgataaaaatatacctgagactgggaaggaaaagaggtttaattggacttacaattccacatgtctggg

SEQ ID NO: 6358 - DNA, 2860 bp, Artificial sequence
  DNA replication origin
taccccaggcttcaaactctctgggcctgttggcaattcccttccctgggtacaacagattcccacccggcccgcccttctgctcgccccacggggaagtggcccaggagtggaggcgtggacaggcatcccgatggctcagagtcggggtcagcctggacagcacggcctctgggggtcagacggggagcgaggggaaggtgccaggctccaggacagcccttgacaggcggtctgacggcctcgggtctcctcttttctggcctcggggacggggccaggcggcggtgagccgcggggggcggggctttaatggccatcggccccacccagcctgcgctgggaagcggagacagggacgcccctgctccagcagagcctgacccctgcgggctgccggggccgcctccctctaggcgctgctgcgcccacacggacaggcgccctctgcgggtcccgcggctcccggccccattcagcgcctccagatgcctcacccgagccctctccgctgggtccccggggcctcaaagcgccgaccaagccggggagtcactcccctgagccacccgatcttcccatggatcctttggatccctgggttttggagtttgtccttcctaagtgccgcctgcctggacgcgactgccccaggaccacagctgacccagtgcggctgcgtcccctgcgggccaccatcaagggcacaggcatcaggtcccccaagactcagtgacccgccctgcccggggctgaccctcagggtggggaaaggccactaactctggtcctctccccttcctcaaggctccttcctcacctggggtgaagggctgccagtcccagcacctcaggggccttcctgtttcatttataccaacaaataatcattcagtgtgctgggacagagaagacagacacgctggcccccgggtgggcgagagagactggtctgtaagtgcagaaaactcccaatagggacgggctaggaaggaaacaccaggaaaagtgagggtggaagatgggggtgaccctactgcagatgagatgctcagggagggcttctctaggagaaggtgccattaactagattgacaaaacggaagggcagggcctgtgaaagtcttctaagagagggactggcagtgcccagggggctgtcgtagggatggaaataggacagcaagatgggtgtggggagtgtgagcctggcagacaggacccaggctctatgtgatgggtgcaggggggggacccacggaggccctgagaaagccctgggcctcagaagacagggaaacaagaggacccacttagaggccctcacaacctttgcacagacagtgtaaaacggctcaggccagaatgtggtttaggtttcagaagggtgctgtgtcccccaccctcttcttgaggctaaagggctccaactccttaggcgattaccacatggttctggggccccacagacagccttctgatggtttttgtctgtggccaggcagggggcagggggtgactgccccttccttggccaaggggacagataaagggagcctctgggggcaggattgctggactaggaatcagacttggagcgtaatccaaatgccccactggccctgcctcttctctggagctcaacttcttcaagaaaactggggacaagagatggcaagaccagctctcaggacccttgcccctccaccctgtgacacttttagactgttctcaggggccacctttttcaggaagaattctcgggttacaggaaagtaaagggaggagctgtgttttgagtggcacttcgctcaggctctaggctaggtgttggtttggtggggcttgcttttccacctgccccagcccgcttcacaaaacctgagtcctggctagggccaagagtgagattcctgtttctagattttcatcattctgtgttgcacaaaacaaggtctggtggggggtggggggtgggtaaggagacagatattagcaagtatataataaagaaaattggcagggcatggtggctcatgcctgtaatcccagcactttgggaggcagaggcgggcagatcacccggttcaccatggccaacatagtgaaaccctttctctaccaaaaatacaaaaattagccaggtgtggtggtgcttgcctgtagtcccagctacttaggaggctgaggcaagagaatggcttgagcctgggagctggaggttgcagtgagctgataatgcacgactgcactccaacctgggggactgaatgagactccatctcaaaaaaaaaaaaaaaaagaaaaaaagaaaggccgggcacaatggctcacgcttgtaatcccagcactttgggaggccgaggcgggcggatcatgaggtcaggagatcgagaccatcttggctaacacggtgaaaccccgtctctactaaaaaaaaaaaaaaagataatttagccagagaaaacctagaagaggaatcaggatgggaggattaggaatggcagaggaaggtggggatgggggtgggacaaatagaaaggaggtgggggagggggccagggaaataaaatccaagagatcagcggggatcagaagccacagccttagtggggacctcaggagagcagcaacctgcatctatcttggaaaggtggagagagaactgcagtgacctcattggggaggaagggggaggtggcagggcagaggaagcaggggacaaacaggaggaagagatggtgccctgggtcaggtggccgccactgctaccatcaatggaagtggaaaactctttgccttctccttacacctgtcaccatgacacgacacccccatgctttctgcccaccgcccccac

SEQ ID NO: 6359 - DNA, 1413 bp, Artificial sequence
  DNA replication origin
ggtcagccccgggcagggcgggtcactgagtcttgggggacctgatgcctgtgcccttgatggtggcccgcaggggacgcagccgcactgggtcagctgtggtcctggggcagtcgcgtccaggcaggcggcacttaggaaggacaaactccaaaacccagggatccaaaggatccatgggaagatcgggtggctcaggggagtgactccccggcttggtcggcgctttgaggccccggggacccagcggagagggctcgggtgaggcatctggaggcgctgaatggggccgggagccgcgggacccgcagagggcgcctgtccgtgtgggcgcagcagcgcctagagggaggcggccccggcagcccgcaggggtcaggctctgctggagcaggggcgtccctgtctccgcttcccagcgcaggctgggtggggccgatggccattaaagccccgccccccgcggctcaccgccgcctggccccgtccccgaggccagaaaagaggagacccgaggccgtcagaccgcctgtcaagggctgtcctggagcctggcaccttcccctcgctccccgtctgacccccagaggccgtgctgtccaggctgaccccgactctgagccatcgggatgcctgtccacgcctccactcctgggccacttccccgtggggcgagcagaagggcgggccgggtgggaatctgttgtacccagggaagggaattgccaacaggcccagagagtttgaagcctggggtactgtcaccaacaggccagtagcctcgcagctgggccctgccctagagtcttcctgcagcagggcgcttctccggaggagctgtgaatgttttcccgggtggggctgaagccagagcccagaggtttgcccctggggcacggatcctccaggtcactcgcccccctacgggctgcagtgaagaaggctctgaggggaggatggccagcgcctcccctgcaaggataggggcccctgggaacccattcctgctctggggattgcctccctcccctacatcagagccatccaccgcagaagcttggccaagctgaccactctgtcagtgatctctgccagggaggctgaaagaacatccagccccacccgtggtcccttcccgcctcaggctatgtgacagtatgactctccacctatttcttcgtttccactggaaacactagtaaaacaattcctcagcctcgaccccagggagcggcccccactaaaccagctgacgtgggacccctgggtcaatgctggccaggagatgcggctgacatcaaagaccctgggcccctgggccccctacaaccctggtcacggtggccatgggattccaggcagcacacatctcagaatcagtatttcccccaccccacaaaaaatacatatatg

SEQ ID NO: 6360 - DNA, 1771 bp, Artificial sequence
  DNA replication origin
cagcgggcgcggggcagcgtggagcagggcgagcaggggcgcggcgcgggggtcggggccgctgaccgggcgaaggtcggcgccgctccacagcagcagcacagtgccctgctcccgcgctacgcgcgtccgcgccgcccagagccacggcagcgggcccacgcgcgccacgtgcctcccctcccacaggtccacgatcacgtcgcgcccgccgcccagcgctgcccgtagcagttcagccagcgctcccaccaggcgccgctgcgcctccgagtccgccgcgtgcaggaggagcactggccgcgctgggcccgggcctggtggcgggaagcaacagatgaaggctgggcggctgagggactgctcagccctcttctccccaccctctcgggataccgtagggtgctcgcctctccgcccccgcccccgccccttatttgctctgggggttggtaccgaaaacagccctagcctatagggtgcttatgggctaattagataaaggcaccccttctgaagagagggtcagggctccaggctgggcgagtacagcgcaggctggatttctgccccactagccttttgtacagagactcagtacagtgacaatatgctcagagggccctttgccttgccttaaccattcctgctcacttgggggcctgaggctccctgcctgggtaacagagattgggtgcagtgctgagagctcagacaggggagggtgagggggcagctagtctccgagctgggcaggtctgacttcccaggttaccccaggtgagcttacctgactgtgggcgccggcaggtgagggccagaacaacacccagtagggtgaggagggccagcagtgccaggatcaagagccccaggtgtctgtaagagactgagtcaagcaggatgaggccaagcccagttcctcagtgcccagcctccctcttacctccccctccccaagaactcaccatccggacacaagaggtgcttccaggcaaactggacatctgaccgccacacctgagggcacagagccccccacccctatgagccaggcatcttctcctcccggggagctgagtgaagcatggagctgggggagaggggagtccccactggctagggaattcttcccaggtgggtttgtgtctgctccagctgctagcctggcacagaacaggtcaatggtggcaaactcaagtgtgacaggggccaaactcaaaaagtaaactcaaagttgaccagggctgctgtgaggacctggagagcacaggccctgactgaaacaatcagatggcactgagctccaggccattgtcaccatgccagaatgtggacacacggcactaggtttttctgatttttcaacagaggccagaaatccagctttgtttatatatgtaaatggtggtaagcaatttcaatttaaaacactgtgctggccaaaccaaacatttttgcagaatggattttccaggggtgggtgccactaggggagcagatgccaaggctctgtatgtagagtgagggtaggtttccttaccaggacacagcaccctggcctcaggaagggaatgatgaggtctagtgacactgggcttgagccccgggcctgtagaaacaaagagcagaaaggctgtccccagggaggtgaatctggccctgtctggccttgagtctttgcccctgctgttcctccccaccacacccccaatcctacgaggcttaggccaagtgccacctctgacaagaaggcttccccagtcactcc

SEQ ID NO: 6361 - DNA, 1951 bp, Artificial sequence
  DNA replication origin
cggcggactcggaggcgcagcggcgcctggtgggagcgctggctgaactgctacgggcagcgctgggcggcgggcgcgacgtgatcgtggacctgtgggaggggaggcacgtggcgcgcgtgggcccgctgccgtggctctgggcggcgcggacgcgcgtagcgcgggagcagggcactgtgctgctgctgtggagcggcgccgaccttcgcccggtcagcggccccgacccccgcgccgcgcccctgctcgccctgctccacgctgccccgcgcccgctgctgctgctcgcttacttcagtcgcctctgcgccaagggcgacatccccccgccgctgcgcgccctgccgcgctaccgcctgctgcgcgacctgccgcgtctgctgcgggcgctggacgcgcggcctttcgcagaggccaccagctggggccgccttggggcgcggcagcgcaggcagagccgcctagagctgtgcagccggctcgaacgagaggccgcccgacttgcagacctaggttgagcagagctccaccgcagtcccgggtgtctgcggccgcaacgcaacggacactggctggaaccccggaatgagccttcgaccctgaaatccttggggtgcctcgaggacgactggccgaaaagccgcattccctgcctcacaggccggaagtcccagcccagtccccgcgcgcgtccctcttcctcctcatactttcccttgactgagagctcctctaacccctgttctgatgggggagggcggtcttcccacttcctctccagaactccagaaagagcagtgtgcttatgcttcagtccaggctggagaggttggggccggggtagggaggcaggagccatgtcagttctgaaggagggtgaggcggtgggggattgcagggggcggctgagagaaaacctccttgggggccagggattccctttcccactctgaggctctggccagagggagagaggactctggacctaggaaaagaggcttttggctccaggtggtcaggacagtgggggttgggggtggggtgggtgggtgctggcggtggggaccaagatccggaaagatgaataaagacaaacatgacaaactaagaaaacacagtgtgcttctctagtgtggctggggagcctgcctggtggggtatgtgtcagtgtgctggcccaaatcctctgtgtccataccgcatggcatccgtcacattcttacaagcaatgcctccaaaagcaaaggaggatggggcaatctccttgatcccccccagtgattcttacaagaggagaggaaaacagaggcttcgccagatggtgtgtccatcatcacacagccggcccacagcaacagcacagatgggacccctgtctgccaggctctggggtcctgggttccttctactccccataccgcatttgagccaggcagtggtgaaaagcccactttctggtgccttttgtccgtgcttttagagctcctgtcccacaaagggttaccgaggcccaaagagtgtctgaagggaccgagtgtgcctagtaaggggagacttagtgggcccaggactccagggctgtgtcctccttagggctccgggggtgagtaagagctcccttactcagccgtgatgcattcgctgtcttcttcaggggcccctcccagccaggtgtcagcagagggagaggagagccaaagaaggaggaggtgcggccaccaccctagtccaaggctgctggctcccaagcctggtgttggtgggagggacagagaggggcgggaacagccagcagcctgccgggagccaaaacgaaagcactccgtgctggaagtaggaggagagtcaggactcccaggacagagagtgcacaaactacccagcacagccccctccgccccctctggaggctgaagagggattccagcccctgccacccacagacacg

SEQ ID NO: 6362 - DNA, 1314 bp, Artificial sequence
  DNA replication origin
gtcttcttcaggggcccctcccagccaggtgtcagcagagggagaggagagccaaagaaggaggaggtgcggccaccaccctagtccaaggctgctggctcccaagcctggtgttggtgggagggacagagaggggcgggaacagccagcagcctgccgggagccaaaacgaaagcactccgtgctggaagtaggaggagagtcaggactcccaggacagagagtgcacaaactacccagcacagccccctccgccccctctggaggctgaagagggattccagcccctgccacccacagacacgggctgactggggtgtctgccccccttgggggggggcagcacagggcctcaggcctgggtgccacctggcacctagaagatgcctgtgccctggttcttgctgtccttggcactgggccgaagcccagtggtcctttctctggagaggcttgtggggcctcaggacgctacccactgctctccggtgagtctggaaccctggggagacgaggaaaggctcagggttcagtttttggctcagcaaagccttagcctggctcctgtcactgctgccactgccagaactgccctgtctggtctgtctggtgctgatggtagaagagaagaacggggaaggggcaagagctgggtctgtctttctctgggagggtctgggaatacggagccccagaaaaaggtaggtggaggtcttaggcagagaacagtgcctagatggtgggggcacaaattctgactctcctttctttccttcccagggcctctcctgccgcctctggggtaagtatccctacttttaaaaagaatttcccaggttggccgaagggagcagagctgtcccaggcccatgccctccatgcccacctcagcctaggacagccaagttctttggctctctgggtatgtcaggtgccaccaaattctgggcttggaacagcttcagctcccacccgctcctccacacacagacagtgacatactctgcctgcctggggacatcgtgcctgctccgggccccgtgctggcgcctacgcacctgcagacagagctggtgctgaggtgccagaaggagaccgactgtgacctctgtctgcgtgtggctgtccacttggccgtgcatggtgagcaagtcatcctgtgacagtgcatgtgtacacgtgagtgtgtctggggtgggcatgagggccaggggatctctcaagcagtgctaggcatcctcagtgttctcctggaggacaccagcagaaggacccccaggccagtgtggtctccccagcccctgcttcccagca

SEQ ID NO: 6363 - DNA, 1243 bp, Artificial sequence
  DNA replication origin
ttgtttactgctatactatagatgttcagtgctatttgttgaatgaataagtgctccccaagagttcctagccctacaccagcagagcagagatttggcggggaggggaatatacaccccttcccccagcagccccttacctgtctttgtatttggacaaattctcttcctcccaggcagtgtttccacctccaaagttgtcccggatggttctctccaggccctggaaacagaaaattagtaatagctaagtacagtgcctggcacatgctagcacttcactgttctactgactaggaaactgaggcacagaaaggcaacctgcctagggccatacaactagtaagagaccaagatgaaacttaaatccacgcagatttgcatcccagagttccccactctaaatcgctgtgttcccctctaacgaggctgccggtgcacccaccttgttaaagctgtcaaccagtccccggcaggtatgacacggatggggctgaggcgggggagaagactggggaggtggagagggctggagccagataggtcctgggaggttgaggaagaggctgaggccccagagcatagctgggactaggcccttcgggggccatggggccatctttacccaggctggggacctgcagatagagggcgtggagaggcttcactgaaggagtcaggccccacgcgagaaagaaaaaggtctgttctaaggtgccgtggcgctgggatctgcgttattacaagcaaaagaggccaaactgggtattgcaggggctgtggggatgggtggggaaaggcgcataagatgcaattccagaagagaaataagttatcctcgctagcatggggtggagaggaaagtggcctcgctccttgacaagggggcagaagtcagcctcttgtctgagggtctgataaagaatattaggggccggatccgcagaattagggagaagagatcagattccaagtactgaaggagaggaggccagaggggttgtcttgggggaggtgtccggaaccccgggcttggagggaggagcccggatccggatatgaagggaagggatcagattcagggcctcgcagaagggcaaaggcacggcccacgagccggcagagaaggatccagaccctcgtaggccacggagaaggaagaagcgaccgccccagcccgcgggcgccgtgggccgtctcctcaccgcgtcgctgccacagcctgcgtaaaacgcacaacccc

SEQ ID NO: 6364 - DNA, 900 bp, Artificial sequence
  DNA replication origin
atctcggctcgctacaacctccacctcccagccgcctgccttggcctcccaaagtgccgagattgcagcctctgcccggccaccaccccgtctgggaagtgaggagcgtctctgcctggcggcccatcgtctgggatatgaggagcctctctgccaggctgcccagtctggaaagtgaggagcgtctctgcccggccgccatcccatctaggaagtgaggagcgtctctgcccggccgcgaccccgtctgggaggtgaggagcgtctctgcccggccgccctgtctgagaagtgaggagcccctccgcccggcagccgccccgtctgggaagtgagaagtgtctccgccgggcagccagcccgtccgggagggaggtgagggggtcagccccccgcccggccagccgccccgtccgggaggtgaggggcgcctctgcccggctgcccctactgggaagtgaggagcccctctgcccggccaccaccccgtctgggaggtgtacccaacagctcattgagaacgggccaggatgacaatggcggttttgtggaatagaaaagggggaaaggtggggaaaacactgagaaatcggatggttgctgtgtctgtgtagaaagaagtagacacgggagacttttcattttgttctgtactaagaaaaattcttctgccttgggatcctgttgatctatgaccttatccccaaccctgtgctctctgaaacatgtgctgtgtccactcagggttaaatggattaagggcggtgcaagatgtgctttgttaaacagatgcttgaaggcagcatgctggttgagagtcatcaccactccttgatctcaagtacccagggacacaaacactgcggaaggccgcagggtcctctgcctaggaaaaccaga

SEQ ID NO: 6365 - DNA, 1080 bp, Artificial sequence
  DNA replication origin
aaagcacatcttgcaccgcccttaatccatttaaccctgagtggacacagcacatgtttcagagagcacagggttggggataaggtcatagatcaacaggatcccaaggcagaagaatttttcttagtacagaacaaaatgaaaagtctcccgtgtctacttctttctacacagacacagcaaccatccgatttctcagtgttttccccacctttcccccttttctattccacaaaaccgccattgtcatcctggcccgttctcaatgagctgttgggtacacctcccagacggggtggtggccgggcagaggggctcctcacttcccagtaggggcagccgggcagaggcgcccctcacctcccggacggggcggctggccgggcggggggctgaccccctcacctccctcccggacgggctggctgcccggcggagacacttctcacttcccagacggggcggctgccgggcggaggggctcctcacttctcagacagggcggccgggcagagacgctcctcacctcccagacggggtcgcggccgggcagagacgctcctcacttcctagatgggatggcggccgggcagagacgctcctcactttccagactgggcagcctggcagagaggctcctcatatcccagacgatgggccgccaggcagagacgctcctcacttcccagacggggtggtggccgggcagaggctgcaatctcggcactttgggaggccaaggcaggcggctgggaggtggaggttgtagcgagccgagatcacgccactgcactccagcctgggcaccattgagcactgagtgaacgagactccgtctgcaatcccggcacctcgggaggccgaggctggcggatcactcgcgtttaggagctggagaccggcccggccaacacagcgaaaccccgtctccaccaaaaaaatacgaaaaccagtcaggcgtggtggcgcgcgcctgcaatcgcaggcactcggcaggttgaggcaggagaatcaggcagggaggttgcagtgagccgagatggcagcagtacagtccagcttcagcttggcatcagaggg

SEQ ID NO: 6366 - DNA, 1278 bp, Artificial sequence
  DNA replication origin
ggctgcaatctcggcactttgggaggccaaggcaggcggctgggaggtggaggttgtagcgagccgagatcacgccactgcactccagcctgggcaccattgagcactgagtgaacgagactccgtctgcaatcccggcacctcgggaggccgaggctggcggatcactcgcgtttaggagctggagaccggcccggccaacacagcgaaaccccgtctccaccaaaaaaatacgaaaaccagtcaggcgtggtggcgcgcgcctgcaatcgcaggcactcggcaggttgaggcaggagaatcaggcagggaggttgcagtgagccgagatggcagcagtacagtccagcttcagcttggcatcagagggagaccgtgtaaagagagggagagggagaccatggggagagggagagggaggccatggggagagggagagggaaagggggagggggaggggagggggggagggagggaaggcaagggagagggagagggagagggagaaaatattatcttgtatatcaaggttgtatagatgacctcacctggtttggtgtcttcccacagcctgtcctgggggaacagagaggccctgcggtggctacgggcagtgtgaaggagaagggacacgagggggcagcgggcactgtgactgccaagccggctacgggggtgaggcctgtggccagtgtggccttggctactttgaggcagaacgcaacgccagccatctggtatgttcgggtaggtagccaaaaggtgtggcactgggcaggggcagatggggcacctgcctgcccatcctcatgctgcccccattccacccagcttgttttggcccctgtgcccgatgctcaggacctgaggaatcaaactgtttgcaatgcaagaagggctgggccctgcatcacctcaagtgtgtaggtaagtggggccctagctaggtctgggaagatggtcaggggcctgggcttggtcctttattctctcaacacaagcctgggctagactagcctagtctccaccttcatggagatctcaacctggctgggaaggcagaaaagtaaccagatacttacagtccagtacacaggtactgtgtagtatagtccctgtgtacagtgagagatgcctctgatctagttcagtggaagtggtgatggggaatcaggaaaggcttcttggaggaggcgttactttggccaagtcctaaaaattgaggaaggggctgggcgcggtggctcacgcctgtaatcccagcactttgggaggcca

SEQ ID NO: 6367 - DNA, 1576 bp, Artificial sequence
  DNA replication origin
cgccgcgctcttccgcgagcacctagtgcgagacagtgtgttccagcgctgcggcctccgcggcctggcctccccgccgcctggaggcgctctgcggccgcgccggggcagccatcccaaagccgagctcgacgacgctggctcctcgctcctccgcggccgctgcaggtcgctcagcgacgtgcgcgtgcgcgggccggtcccacagcacgtagtggaagcacccgacggggcagccgctgcggcttctggcagctccctcgacagcttctccaggggttcactcaagatcagttggaacccctggcgccacgggctgtcatcagtggacagtctgcccctagatgagttgcccagcacggtacagctactgcctgccccgaccccagcccctgattctaccgccgctcggcagggggacggccagggagaggtccagccgcgcggcaagcctggggaatcccgcagcgcctccagtgataccatcgagctttgaagagcggtcctgacgcagggccaggaccctgcccgatgcccacatggcatggcctactgggacagttgagcctttaaaaaatgggcatcctggccaggcgcggtggctcacgccaggaatcccagcactttgggaggccgaggtgggtggaacacgaggtcaggagttcgagatcagcctcctggtctcgaacatagcgaaaccctcgtctctactaaaaatacaaaaaaattagccaggtggcacacgcctgtagtcccagctactcgggaggctgaggcgggagaattgcttgaacagggaggcagaggttgcagtgagccgagaccacgccattgcactccagcctgggtgacaagagtgagactccgtctcaaaaaaaaaaaaaaaaaaaaaaaaaaaaaaggcatccccaggcctctctacctgacggcaacccccgggggacagccaggtttgaactcaccccacccccatgccgttttttgcttttaatatttctatttttttttcagccggcattttgcacagaggccgtgtcttatgcggaatacagggtgggtgtgcatggattcgggcatgaagaacagggagcaggtgccccagactccccaacgtggagtgatgagcctcgcttgtctagattgtcctctttgtgccaaagaaataaacccttaggacttggctcatgcttccctctggccatgccaggatcctgtactcataggaggaaggagagactggaggccctgcctcccagtcattctaagtcctgtgtattggacggagagcaggactccgaggaaaggttgcttgaggcttggaggctctggtcataatggcgaccacacttttattgaatatctgttgtgtactgtccaggtcttcacatttgtcacctcatttaattctcatgttaagcctgagtggaaagcattatgaagcccatttgaggaaagagaagagtgaagttcagaggcaaaagtcatctgtccagggtcctttgccaaatgacagctggcatggaaccctcctaaggctgattcctctatcctccttctcctaacagcacttcagggg

SEQ ID NO: 6368 - DNA, 1279 bp, Artificial sequence
  DNA replication origin
ccgtccagcaggcggcgacggcacaggcagagcgtgcccagagccacggccgcgccccaggcgcacgacaagccctgcgtcaggaggttgagcacagaccatgtggacagcaggtctgtcgcgagcaaccctacaccatgcaccagcgccactgctcccagcaggagtgggttttgcagcggtggcggcagccccgcgcccaggccgagcagagtcagggctgccagcgccgtaagcagcaaggggaagggcaggttgtagagcaccaggcccccgcgaacgcccagccgcgcctgcgagccgtaagggtcggtaagcatgtaggcggatcgcagcgccgaagccacgagcaccagcaccgcggccaccaatgccagccggggccctgctggggcggctgccagcgcagccagcgccaacaacgcgggcagcagaaagagtacccccaccccgtagacgtgcagctcccaggagaagctcaggacccgccgaagggggccccagcgtagcgggggtgcagtggcgttggctggggggctggaggctggggctgaagccatggagctggcggtgggctccggagggggaggctggcccagggctcgctgcgtggtgactcgaatgaggccccggcgtgacgtcgagggggcctggactgggggtgctgggggatggctttgggggcgccccggccactcctcggcttcatctgcaattataacaatattaaaatagccatttgaaaagtgcttttgattttgtatcaccctctagtgtggttggcaagtcatttaacttttccaaacaaatctgcaaaatggagataacagcacctgcctcattgcgttgtgaagaagatgaaatgtttagcccggtgcccaacacccagtaagtgctaaatggatgtcagctatcattttcattaatgctactatcagggaggtagtaccccagcagttcgacacatgggctgcatattagaatcttctggagaccaaggaataagaatttcttgggacgtggcttgggcattggaatttttttctttttttcttttgacaggttctcactctgtcatccaggctggtgtgcagtggtgcaatgtgggcttactgcagccttgacctccaggacaagtgatctcccacctcagcctccggaatagctgggactacaggtatgcaccaccacgcccaactaatttttatatattttttttgttctaaacatatccatgttacatattagaacattctagccccaaaagggcaaatgactt

SEQ ID NO: 6369 - DNA, 1244 bp, Artificial sequence
  DNA replication origin
gtctcccatgtctacttctttctacacagacacggcaaccatccgatttctcaatcttttccccacctttcccccctttctattccacaaaaccgccattgtcatcccggcctgttctcaatgagctgttgggtacacctcccagacggggtggtggccgggcagaggggctcctcacttcccagtaggggcggccgggcagaggcgcccctcacctcccggacggggcggctggccggacagggggctgaccccccccacctccctcccggaccgggaggctggcccggcagaggagctcctcacttcccagtaggggcggctgggcagaggcgcccctcacctcccggacggggcagctggccgggcggggggctgaccccctgacctccctcccggacggggcggctggcctggcggggcctgacccccacctccctcccggacggggtggctgccgggcggagacgctcctcacttcccagacagggtggctgccgggcggagggactcctcacttctcagatggggcggctgccgggcagaggggctcctcacttctcagacggggcggttgccgggcggagggtctcctcacttctcatacggggcagccgggcagagacgctcctcacctcccagacggggtcgcggccgggcagaggcgctcctcacatcccagacggggcggtggggcagaggcgctccccacatctcagacgatgggtggccgggcagagacgctcctcacttcctagatgggatggcggccgggcagagacgctcctcactttccagactgggcagcctggcagagaggctcctcacatcccagacgatgggcggccaggcagagacgctcctcacttcccagacggggtggcggccgggcagaggctgcaatctcggcactttgggaggccaaggcaggtggctgggaggtggaggttgtagcgagccgagatcacgctactgcactccagcctgggcaccattgagcactgagtgaaccagactccgtctgcaatcccggcacctcgggaggctgaggctagcggatcactcgcggttaggagctggagaccggcccggccaacacagcgaaaccccgtctccaccaaaaaagtacgaaaaccagtcaggcgtggcggcgcgcgcctgcaatcgcaggcactcggcaggctgaggcaggagaatcaggcagggaggttgcagtgagccgagatggcagcagtacagtccag

SEQ ID NO: 6370 - DNA, 1454 bp, Artificial sequence
  DNA replication origin
gtctctgcccggctgccccgtatgagaagtgaggagaccctccgcccggcaaccgccccgtctgagaagtgaggagcccctctgcccggcagccgccccatctgagaagtgaggagtccctccgcccggcagccaccctgtctgggaagtgaggagcgtctccgcccggcagccaccccgtccgggagggaggtgggggtcaggccccgccaggccagccgccccgtccgggagggaggtcagggggtcagccccccgcccggccagctgccccgtccgggaggtgaggggcgcctctgcccagccgcccctactgggaagtgaggagctcctctgccgggccagcctcccggtccgggagggaggtggggggggtcagccccctgtccggccagccgccccgtccgggaggtgaggggcgcctctgcccggccgcccctactgggaagtgaggagcccctctgcccggccaccaccccgtctgggaggtgtacccaacagctcattgagaacaggccgggatgacaatggcggttttgtggaatagaaaggggggaaaggtggggaaaagattgagaaatcggatggttgccgtgtctgtgtagaaagaagtagacatgggagacttttcattttgttctgtactaagataaattcttctgccttgggatcctgttgatcggtgaccttacccccaaccctgtgctctctgaaacatgtgctgtgtccactcagggttaaatggattaagggcggtgcaagatgtgctttgttaaacagatgcttgaaggcagcatgcttgttaagaatcatcaccactccctaatctcaagtacccagggacacaaacactgcggaaggccgcagggtcctctgcctaggaaaaccagagacctttgttcacttgtttatctgccgaccttccctccactattgtcctatgaccctgccaaatccccctctgcgagaaacacccaagaatgatcgataaaaaaaaaaaaagaaaaaaagaaaaaaaaaaaaagatggcttttatccaaaggacaggcaataacagatgctggtgagaatatggagaaaagagaacctttgtacactgttggtgggaatgtcaattagtacaagcactatggagaacagtttggagtttcctcaaaaaactaaaaatagaatcaccatatgatccaggaatgccactggtaggtatatacccaaaagaaaggaaatcagtataccaaggagatatctgcactcccatgtttattgcagcactattcacaatagtcaagatttggaagcaacctaagtgtccatcagcgggtgaatggataaaatgtggtccgtatacacaatggagtactattcagccataaaaaacaatgagatcctgttgtttgcaacaatacagatggaactggaggacattatgttaagtgaaataggccaggcacaac

SEQ ID NO: 6371 - DNA, 995 bp, Artificial sequence
  DNA replication origin
cccaacgctgccgcctggcacgggccgccgcatccacagctaccgaggtacgggcccggcgcttaggcccgacccagcagggacgatagcacggtctgaagcccctctaccgccccggggtccattttgcagacggggaactgaggccccttgaggcaggacacatccagggtgacgctgctcgtaagcgtcagagcattcttttttttttttttttttttctgagacggagtctcgctctgtcgcccaggctggagtgcagtggcgcgatctcgactcactgcagcctccgcctcccgggttcaagcgattctcctgcctcagcctcctgagtagctgggattacaggcgtgcgccaccgcgcccggctgatttttatatttttagtagagacggggtttcaccatgttggtcaggctggtctcgaactgctgacctcgtgatccgcccgcctcggcctcccaaagtgctgggcttatgggcatgagcctccgcgcccggcccagagcattctttataaggccgaatagtttgcatttgaaggtggctccccccagtcccccaccccacgtgtattttcccctcaaagaaaagctgcatccttaacaccccatctgttcagtcctcatgactccagtgggccagttctgcgtagtccctgccctcgtggagaacacattcctcctggggagactgacagatgcaaagacaggaacaagccagggtcatgttggcgccggaagagccgaccgtgtgtggcgtgggaaattgacttacctgcctgctgggagatggaggggttgcggttgtgtggtttcagttaaggagcacttcccggagaaggaagagagcaggatggagtaggaactagccaaccctaggtaagaggttctagacatgcgtgcgttgagacctggagtcttgggagaggatgcttaaaaggtgattttacccctaggaatatgggggcactgaaatttttttttttttttgag

SEQ ID NO: 6372 - DNA, 1083 bp, Artificial sequence
  DNA replication origin
gctcggagtcccgccccttgccgggtcgagcaatgggcgccttccgtttggcgcaggccccgcccctgtcgctctccggcctgcgggccgcagggctcgttccggagggcgggcgccacggaggccggagtggtcgcagttcgggcggaggccgggccaggcggggctgtagggctggggcaggcggcgggctgcccggcgggacagctgcggcagccggcggggggcgtcctgagttggcggtcgagggcgctgccagctcccgaggggccgctcgggccccttccggcccgggtctggttgggccgcaggagcagggcgggctgcggcgcccgggtctggccctggcctacgggctaagcgcccggccccggggccgcggatccggcagccatgtgtggatcttgaagcgccatgtggtcttctgaagcgcttgacagttctaaagggctttatattgcaaactgatcaaagcgcttcgtagccccggaagcgcttaggcatctccgaagtagcgctgggcaaagtgaaggcttcctgatctcagaagcacgttgtgggcttggaaaccgacggcagcctttagtcaattttggatcgctttgacttctccaacacggtttggcatctctgaaaccttgagaactgtgatgggcagtggaaagaagagggaaaggtcagtgaggctagcccctggctctgcccttatgtcttgccgtcctcctgggcccggggtggcgggaatctgaggtggggtcgccaggaagggtggtgttggaatccaggccccctgtaccttgcaggtgcccatggcgtccgagcggggcaaggtcaagcacaactggagcagcacgtcggaagggtgtccccgcaagcgcagctgcctccgggagccctgtgatgtggccccctccagccggccagctcagaggtctgcgtcgcgttctggagggcccagcagccccaagcgcctgaaagcccagaaggaggacgatgtggcttgctcgcggaggttatcctggggctcatcccgccgcagaaataactcctcctcctccttctccccacatttcttgggccctg

SEQ ID NO: 6373 - DNA, 978 bp, Artificial sequence
  DNA replication origin
catttatggatctcaggaaaagggcagacttggtcgggagagtagacccaccagagcttcagattccaaagccctccgggtcagggtaactgcggcaaccagagccccagccctctggtctcgcacgtcactggaggataggggctgggccacgggagggcggggcgcgccctctggaaggcgcggaactgctgtgcgagccgagcgcgttgctgcccggaggctcctacgccacggcccgtcgggcccggcgccggaagtgagctgttccgaggcgccgccgggagctgccacgtccgagacctggagcagccaccgccgcaatcatggtgagtgttggtactgaggaggcctagcagggtgaaggccacggtcgcggccttcacgggttcctcggccgtcctgagtcccaaatcccaagctggagccgttcagctcccctccaccgcttagagatttggggggctctggccccgtccttgcggaccattccgaggggagtccagaggtgaggccgaggaacctccctgactttgcggggcgcgccgctcctgcgtctcctgccagtctcccttccttcttttcggtcaacaattgaaaacaaaacgaggaacagcagaggagctactgtataccgagccctcagcattgttcgtaatctccgcctgctaacagccttgtgaagaaggtgctattcttctcaacactttacagatgaggacacttgaggttcggagacgtggagcctcttgcacagctgcttaagtggtagtagagccgagatttgaaccctcctaaccattcctttctgccgcctactgcagctcccagcagagatgattgaactgttgctcggggtagggcccccaggtaggatgggcacctcgggaaacgtaaagatggcctgaacgaccctccgaaggcaggggctcagggttttttaagtctctgtggcatctgcagtgtacattcactcca

SEQ ID NO: 6374 - DNA, 814 bp, Artificial sequence
  DNA replication origin
aaaaggaagggaggacgacgaccaggagagtggggtcaggattacaagtgggagtgcaggggcgaggtcagtgacatctggccgagaagaggtcctgcaactcgtggcacagaaggtgctggtgacgtgggcggagggcattctgggaacgtggaggggccaaagtctggctgctgtggacaagatacgtgggggtgtgaggaaggatggggacagaagaaccagctcctctcagccaaagagacaggtctgaaagggtccctcccagaacctggacagtggtgacctaaaagtggtgaggtccttgacagttttagttgcttttgctattcctcatttgccatatttcctaccttgaaatgtattaatttttgagtcatagatacgcacaataattttttaaggtaaggcgggataagaggggaggagacattgggggggtgggggacgggcactgtttgtaggatagaaagcccgagggggaggaggcagtggggggaggaggtaggagcccatgccggaggcggtgggaatggtcttggcctcagccaggagagaccccctcctcgggggctggaggggagaggggaagatggtgagatgcagctgaatttaccagaaggcagggagctggtggccattgggcctggggggactcacttatctcctggcagggaagatgtggctgaggtgggcaggtctgcactgttctccagagaaggcatcagagaacaactccatgcctgctggggagccaaggggcaggtcggactccagcctccagcaggagcctgcggacactacaccatgagcc

SEQ ID NO: 6375 - DNA, 1142 bp, Artificial sequence
  DNA replication origin
gggtctcccttagccccaggggatccccaaggcccaacactcccagtagccacctgggcagacaagcccatgcccacaggagcccccagaggcccagagtgcagcactgccccaagagctgtgtggcgctggaacactgctcccctctgttgcttcctgcgctgggggaatataggtggcagctccggctaccccagccctgagaatcggagccttgggagggtggctgggggcttccttttgctcagaagggccctctttcctggcctgtggatgagacactccctctagtggcagcttgaggaacactcctgcggccccagcaacttggaaaccagaaggtcttgatgccagatagggaaactgagattctgagaccactatcagtttgcctgaggtctttgattgagttggtggcgaggccatgcagcattgataagaagacgggcacacttgaccctgaggtatatggaattagagaaagcccggggtggggaggacgggggcaaggggagcgaggctgaggcaaggaggaggtgagagagaaagccaggagcaggggctgtgatgaaacctgggaggtgatgagtggaagggatgcaggtatatggggctttgggagagaacagaggtgggaagagcatcgggtttgggctgttgagcttacagggtctgggggcttcctggaggaggtgttccacaggccactagacggatgtaactaaagccacaggacgaggaggagaatggggctgaggcaggaacacagatttaaaaggaagggaggacgacgaccaggagagtggggtcaggattacaagtgggagtgcaggggcgaggtcagtgacatctggccgagaagaggtcctgcaactcgtggcacagaaggtgctggtgacgtgggcggagggcattctgggaacgtggaggggccaaagtctggctgctgtggacaagatacgtgggggtgtgaggaaggatggggacagaagaaccagctcctctcagccaaagagacaggtctgaaagggtccctcccagaacctggacagtggtgacctaaaagtggtgaggtccttgacagttttagttgcttttgctattcctcatttgccatatttcctaccttgaaatgtattaat

SEQ ID NO: 6376 - DNA, 942 bp, Artificial sequence
  DNA replication origin
ctgcactgctggcatggggtgctctggacccaacactgcctctaacttggactagggaggctttaggtcacaggccatggaaggtgggatgggctccagggttggtagggcctgtgcttgaggcaaggcagggaactgctctgcaaagggctagaggcagaagatccccagatgccttcaaggatctgggccaggacctcggggtgggagagggaagctacaggagactggagcaggtgggagggcagcagatcctgcagggccgccaatgcccaccacgagcaccccgtcatggcctgcaccgtgtcaccaggcacaggaacatgggagggtttagagggtagaagcatcattttagaaaacttaccctgcagtgcagagcacggcctggcagtggagggacctgtaggattgtcctgcttaagagttgtcacctgcccacagtggtgacacctcaagtggagctgccaggtgcgggtctgagaaagtttgggtagtggaggggtctgggctgggtggtggtttgcatgtcatggagggatgaggagcaggagggtctgggatcccatcagtctatacctgttggagaagagcattggacatcgagcgaggagggagagcaggcctgagacagagtcctgggtggcacatgtgggtggggagagaggagctgcagaagccaagagctgcccgagtgatggtgcaggctgagaacctacagaggaggccaaggggaggaggctagaggggcaggaggatggtcagtggggagtggtgccgggaagacaaggaaggaggcctgtggaggaggaaggtgtggtccatggtggaaatagttgctgagaggtctgcggggacagaacagaaatgtgaccataggaagcagccacagggaggcccctggtgactgcacacagtcaggccaccccaggactggaggca

SEQ ID NO: 6377 - DNA, 963 bp, Artificial sequence
  DNA replication origin
agaggggaggcatggtgagtcacagcaggcagtgagtcccagctggtggcattcagaaagggacagagatggtgagaagggaagtagtcagaaaaaaccatgaatcccatcctgggaaagggcctgcaaatccatttaatgagaggccaggagggttatgaacagacacatttgggaaccactggcaaaaggcatatgcaagtcctccatagaatgaaagcaaccagccttacctaaaggggcggggagctttcactcatttagcaaacgctgtctgggggcctactgtgtgccaggcagtggggataccacactgaacacaacagatctgttcactgccctgtggagcttgcattcgagcaggtggagagagaccataaacaaagacataaatgagtggatcgtcaaggagaaaaataaagcagatgaagggagatgaagagggttgttttgaatcaggtcagggaagactttcctaagaaggtggcctttcagcagagacctgagggagcctcatggctgtttggggcgagggtttcagactaaggaatggccagtgcaaaggccctgacatggggacatgctcagtgagttggagaaacagcaagggagaagtggggtggaggaaagtgaggaggcaggggtaggagatgaattcagagagctgacaagttgggggccaggatcacgcagggtctcgtgggccatcacagggaccctggcttttcctcgaagaatgacaggagcaacaggagccttgtgagcagaagagggacttgatttttgtctgactgtgtgtggaaaacagactgtggggggtgaggtgagaggaaggagagcaggaaggaggctactgcaatgagtgtggtgagagaggatggtggctgggaccagggtggagactggaggtggagaaagagggtcacattcaggatagcttcagaggtagagcagacaggattt

SEQ ID NO: 6378 - DNA, 750 bp, Artificial sequence
  DNA replication origin
gaaaaatcaaatgaaatgaaacaaaataaaatgggtgagggaggaaggggagagtggagtggggcgctttttattttttattttctcatgctgggggatgccggtacttacttggctatgaaaatcaccaccaatcctgcacggtttcccggcgggcagccccgtaatcgcggtgcggcagctggtgccgcggctgagcccagccagcgtgcccgggcccctctgcagactgtaccatcctgcccgagcgggtggggggcggggggcggaggcgccggcgccggttctaggagagcatctcgccggcaaaatgcaatctcgggggaggcagaggccgcccctgccgctgccggaggctgggggatgggggcgggaggagggagggagggagggacacagggagggccggttctggagggggcacgggggaggagagtggggggcggggggggtgtgtggaccgaaccaccacgctgttgtttgcggttttaattcctcccgtgggatcatgaggaaccgaagctggcagagtcccaggaatatgcccgctccccagaagcaggagggaatgtcaagggcacggagagggtagggctgggctgtgctggagggaagggggtcctgagagtggtggtggggagaacgggagcagagaggggaggattttgctcaaatggccccaagtcgtcccttgctttctgggggacttatttggtcaggggctctggcccccctctttgcagtcaaggc

SEQ ID NO: 6379 - DNA, 825 bp, Artificial sequence
  DNA replication origin
cgacttccccacctggcttctcctcagtgtgggggccccctttctcctggctctagttcctgcaggctcgggacaggttgagagctgcagagactcaccctaggctgggggcttctcccttccccaaacgtgatttgcagctgctaagagcacaggagccaggagagctaggagagcatctctgccaagtgctctccgcatctccagcctcaccttttcctagctcccctcctcctggcccccctggccacagccctaaccccaagcacgcacgggtcccccacctggtgacacaagagctcggaagtcccacattcagtgggtcctcagatccacagcgtgatttttcagcccagtgcctaagcctccttcggaaggtggacttgggcagttgcctcaggccctcaggacgagccagtatagcatgtttcgggacactgggactcacccagggcctggccacccctccttgccctgaggcctcaggaggacgggatactctggcctttggtgatgtcctagctgtagaagcactgcttcctagaacattagccttgggaaagggacatgaggcccagagagggtgagttggcctcaaggtcacacagcagggggcaggagtgaaaactgggctttcttataacgggttagagtggatggagaggactgctgtttggttcctacatctgagggatttgggctctgggacactgtctcttactagctgtgtgacctctggcaagtcgcttcccctctctgactcagtttccccaccttctagggctactctaatggctgaatgagttaatattcttaaagttctca

SEQ ID NO: 6380 - DNA, 941 bp, Artificial sequence
  DNA replication origin
ggcggcggggccgcggggcaggcgagcgcggggcagccgcggcagaggagccgcagccgcagcggggccgggccgggccgggcgcgcaccagcggcagcggcggcggcagcggcggcggcagcatctcgctctcggagccggcgcaggtgaggcaggggcggccgggcccgggctctgggcctcttcccctctcgctcggtctcttgtcactttccctgctggcttcccttccgcgggcgctcggccccggagacccccgccgggccagggcgggagcgtgagccggagcgtgtcttggtcccttcgccccgcggaggcaggcgccttgtcagcagtgaccttgagcgggcaccaggcggcgggcggggcgggccggggtgggcgtccgcggacccggcgcctgcgggtgagggaagggggcgcgccttgcgcctgctgcgcgaaaactttccgggctcggagcagccccggagctgggggggcgtccgggacgctagaaccccctatttcttcttcccagatggctccgacttccccacctggcttctcctcagtgtgggggccccctttctcctggctctagttcctgcaggctcgggacaggttgagagctgcagagactcaccctaggctgggggcttctcccttccccaaacgtgatttgcagctgctaagagcacaggagccaggagagctaggagagcatctctgccaagtgctctccgcatctccagcctcaccttttcctagctcccctcctcctggcccccctggccacagccctaaccccaagcacgcacgggtcccccacctggtgacacaagagctcggaagtcccacattcagtgggtcctcagatccacagcgtgatttttcagcccagtgcctaagcctccttcggaaggtggacttgggcagttgcctcaggccctcaggacga

SEQ ID NO: 6381 - DNA, 1893 bp, Artificial sequence
  DNA replication origin
tacagagccagtgcctgctgctgtttgccacctcacatacactgttgctttttcttattggtagattccagaggagaaagccataagccagaaccagcccacctccctaggtaatgcctggtccttctacatatttgagtttgaaatccctgccatcccccaagtccctacccaataatctataaatctcagagccttggcatacagtagatgctgaaaaagaactgtagcccccatttactgagtgcttatcctgggtgaggctgtggaacctatcaccttttaacagatgaaccaacgggctcagagttgaagctatgcccaaggtgagttttgtcactaggacttttgtggtgtcactcacttttgcactgagctacctctcatggtgcggcttttcatgcctattctttttgccttctcaatttgcttgctggtttcagaaggtttcataaaagatagtaattaaggccaagcctcagcattgtggctgggcagagactgagagaggagaaaggcatttcacaggaggaaaagaagagagaggaagacatggtacagtgctaagggtgtgctgggaggggcactggcaacccaggtggggaaggagtggaaagggcacttgaggccagagtgtgaaaggccctgcatggcatactggggctgtgagacttctgagagcactggggagctatgaagtgttttagagcaggactgggcatgatgaaggctagcgtggcagcagaatggaggcagagaggatggcgctgtgagagtccagaaaagaggtgtcagggacctgaagaagagcccttcaacagagagaagagcagattccaggccccgtcagggaggacatggtgctggggtgggctgagggacagtgcctggagctggccatctggaggcactgcagtgccattagctggcacgaggatggtgggaggagatatggattgggtgcatccctggggtgatgtcctctgggtgcccagggagaggacagggccgcggcaggagatgcaagtgctgcctgccaagctgagcgccaagcagcgagaagggagtgctctgggccaagaagggcctggagacacccctgtcacacctgctggatcgccttctccactggcctccctggccccctctctccttcctatgcctaagcctccaggcgtgaatgtcctctgccccatcccagggctgcagagagcaggccatgttgaattttggccctatgaatgggcatccctgccactcccaggaagcagatgttccagatactgagaccccagggtccccccaagctcttcaactcgtcagagcaaggcctgggaaggggaattactatggtcaggccctcccctccccatctcctcacttcctgcgagcagtgcatttggctttatataaagccaataaataaataaacaagccggcatgattaattgatggtatggagcagacccaggcactgggagtcaggtggcctggcttcctggtggagctcggcttttcaagacctggggcctgagccaaggaggggaagcctgctttggggaggtgctttcggtgcgtgtctggggttttcaactttctcctcaggcagggccactgtcctggactcctcctggccctaagcagggccagactggaggctggggggctaagcgtgtccttgcctgctgccctaacctttctcgcctctgagggcccttaggctaagctcccagggattggaccagcggtcccctcctccaaagcgggtctccctatctgcctactccacacccaattcactccacagccaattcgctccaccccgtgtggccagttcacaggctcgggtgtgctggggaggcttggggcaccctgacccctggggaagaatgg

SEQ ID NO: 6382 - DNA, 855 bp, Artificial sequence
  DNA replication origin
cagacaagcgcctaggcgcaagatggctttgtctggacctctcagaggctcaaaccccctcacaccggacaccagccctgataggtccctgtttgagctcctcgccaggcctttctggcctctgtgttctctgattcttctcatctttcctttggagctggaagcacattgtgtctctcccagtgcattccaataaccacagtgggctgttctgttgaatcaatgactcgggaaagaacgagagaaagaaaataggaaagagagagagagggagggaggaaggaaggaaggaaagaaaggaggggagaagaggggaggggagggaaaggaagggaagggaatgggacaggaggggaggggaggggagggggagacgagaggaagggaaaaagaagaaaagaaaggaggggaggggagaggggaggggagaggagaggagaggagaggagaggagaggagaggagaagagaggagagggaaaaagaaggaagggcagggcagggcaggctgggctctttcaccatccagcaaagtgagctcaaccagattaccacttccaggccatggtttcaagcacctgtctttaatgaggctgtattttctgaaccacagttgggccacttggatggaggaaagctgtcagggaggcagggtaatatggtgttccagctttttagctaggtacttcagtgctctgggcctctggtccctcatctgtaaaatggagagaatggcaccagcatgtcatacagatccctgagcaagtcatgcaaggaagggttggcctggagcctgcctgcagtccaggcctcacacttcagcaaatgtagctggcactacgatggctgggacccc

SEQ ID NO: 6383 - DNA, 1080 bp, Artificial sequence
  DNA replication origin
gcgccgggtggcggctgcagcagcgggggcgcggcgcccgcgcgccacccgcgcgtcaagcgcgacaaggcggtccacgagcgcggccactggaacaacaaggtggagttcgtgctgagcgtggccggggagatcattgggctgggcaacgtgtggcgcttcccctacctgtgctacaagaacggaggaggtgaggtgatagtgaggagaaggggagggggcgccaaccgcccggtgggggcggggagccaggggcgagcgcgagaccccctcccgcgcctgcgtggagcggaacccgagcggagaacctcgactccaggcacctcgcgtgtgagctcgccccggagcgcggcccacctgtgccagtgcgcacgcgcacgtgccaattcgcacctgagggttccacctgccagcgcggggacttgcccgcgttctgtccccagcatgagatgcagaccgaggccagggagcccttgctttgggtaggcgccctggtgtttcgggcacttggccccttggagcctcagctttcctaactgggaaaacggcctgtggggaagggactcctgatgatcaaagtggtctcagtttttgcgcgcttactgaagtgccgagcacctttgaccatatcatctcatctcatcctctcagtcactttcgtaggcaggggtctacccattttgcaggtgaggacactgagggtcagagaagtctcactcgaccaaaaataaagatgagattctgatgtcaaaggccctattttaaactgggactggactcacaacagggagaacttttaggcgaggcattgctctatggtttcctgcctagtctttcgtctgctcttaagcccatttctagggccaatatttggggcccctctggtggaagaattgacaacgaacagtttattttacgggtctgagagtcacccacgacaaacagcaatactggtttaatgttgatgctctgcatagagatgtagaaggggagagggaaaggacagtgatgagagagtcctttctggtgacagcctctcaaagtcagtttggcaaaagatgcagcagcgaatccgtaact

SEQ ID NO: 6384 - DNA, 983 bp, Artificial sequence
  DNA replication origin
ggtctgggctgggagagctcagagacatgaaggatgggcaatcagagaaggctccctggaggaggtggcctggagtattcaaagatggaataaaaacgttcttgaaaccctttgctcccttgctgaaaccctgtcctcccccagctgcctaaaatgcagccacacgagtgtgccctgaatatgccaagcccattcctccatctgccagccatgccctcctctcagagctttgcacggatgggatggctcccttcatcgttcgggtctctgcgcgcttgtcactgccagccttccctgaacacctttctgacagctgctgcccagtctgagtcactctccattctgccttccattttcgttttcttataacgctggtctctagaatagtaatacctggcctggggcgggggagatcaagggtctctgttaagtgattagccaaggatgcggcagttaacagggaacttggaattcagcagtggagatgcggttgccttgtggagtgaggggtgctattccactgttgggtggggtagggaactacggggtccctgttgtggaaagactttgctgagttggtcaggagttggacagggaaagcaggaaggagaaggaaaggggctcctggtaggggaccagggaataaggagcgcagcgggtgtgaggtgtgaggaaggaagagaggagggagcatggagtgccaaagctggagaggtgcgcaggcctcatagagcacgtgtgaggctgagtcccatcccaagggggatggggcaccagggcaggcggtggttgagatgggacttgataaaatcacccacagctcagaaggctggtttttaggatgtgttagaggctggagtcagggccaaagggaggtctatctgagggaggatctctgagtctacctgaggagtgagtgttgccagagaagaagacacagtgacctggactgcctgctctccctccctcagcatccacatcta

SEQ ID NO: 6385 - DNA, 2322 bp, Artificial sequence
  DNA replication origin
tggaaaccatcttcctggtggaataatgagctctccccatccttgcagagatgcagacatacgctggacagtcatgggtgtagggcaggggcagagaatgccagcgggggcagggaatgtcatggagataattcaagcatcagatggtcagcctatgaaattgacctgatagctagagtttgctttcatatgtaagcaaaacaaatccagagggatgaaaagagagaggaattcatttctggtcagcaacgtagaaaaaacagagagacaattgtgaatgaggttacccagaaaacacgaaggacaaaagggggatgggaatggctattattattcctttttataatgcttcataattctcaatccaacactggattcatgaagactattttggttttaagcaacataaactgaattcaaacttgtgtagcataggaaaaacaatttaatgatataaatagctgacactgccttcaggtatggctggatccagggacctgatatacatcaagactcactccactctctgtctctcagttctgctctcctctatgttggcttcattttaggtcgggtctgctcaagttctgcaaagatggctgccaacacctctatgcttaggagctttggtggagattgagtttctgtttgacaatagttttagcaaaagtcccagacagagttctcattggcccagcatatgtcacacgtcccctcattgaggtcagagtgatgtgctctgattatctgtgccctgggtcacatgtctgtctccaggaggagggagccccacccaaccatattgaatatgagtgaaggaggggaagtttcccaaatgaaaattgaggttctgtcacccaaagaagttgaaatgaatgtcaggcaagcaaaagtagccttcatttttgctacccttgtatctccactcaaagctatgccccacatctccatccagacagctcctactcatccttcagacctcagttcaaatggcgcttccttgaggaaaccttcccaaaccatcccacactagactggaatcccctgctggactagaatcccctgcatgtgtgctcctggcagagcttgtcattctgggtttgtgcggttatttgatgaaagcctgtctcccatactggactggcatcaccttgaaagctgtggcctgtcttgtccatcgctctgtccctggagcctaggacagtgcctggcacacaggtggaactcgggaaatatttatttgaaataccaacggaagtccacagcacatatgacctggtgatcagtggtgggaggtgaatgggtcaagaaagacaccaagattccctgctcatgagtgagagtgtggggaaacagaagaagtcagggtgaccttggtgagcactgccctgggggactcgaggatggatgaaagcagggaggaggccagattaggtggggtagaggacctgaggtccatcagcaaaggccatccctggggacaaagagaggaggggaagagtaggtctgggctggagagaaggaatcttttctctgagttcctggggaccccagagggaagggcagatgtggccccattcccagaagcctttataaaagagggtggggaggtcaggccttggcaaggacaagggaaggagtccctacgtgctggattgggattggctggaaaggggacttctctgggagaatccctcaaacctcaagaactgagagaagggtgtctggggctcctgccaccatccctgtttcccttttaagtaatctgtttccccatctgtccatccatacacacagccacttgtgtctccatgaccaaccgctggcagtggaagggtgtccttcccacccccactcttacacacactcccagctggtacccagagcctggtcaccccaggccaggcctgtgtttccaggtgtaacgggcagcagacgctgccctaggactagagcagggagggggcacgggcccaccccaacccacagcgacccacagagggcgaaaagaggacgaccgcagagagaaacggaaaggacaggccaacggaagcagtactgcaaggctggaaggagaaaagccaggaggggagtgcttgctgtgaaagacagggagacagagaccaagacggacaggcagacaggctggtgacccaggatgaggccggaaagagccatcaaaggaaggagaaggaaggagagagattggagcgggacggcggggcaggcgagggaaggagggggtggggagagggagggaggaagagaggggagaaagagggaggaagagaggggagaaggagggagaagagagcgggagaa

SEQ ID NO: 6386 - DNA, 1021 bp, Artificial sequence
  DNA replication origin
tgggcgggctccgggcgccgcgggccctgccctccccctccatccctccggactcgctcccccctcctctcccttccccgcgaccctccgcccgccctcggaagaccgagacagcggagaggttgcgggtgagctgcgctgagcccaggagccgaggagtcgggagcgcagtagcgctgagcccgagcccgagcggccccgcgtcccgagcgcatcggagcggccgagccgcccggatgcagcgcctgtcccgggcagcgcagccccggccgcaggtaggaaagggcggccggcgtcggggcgcggggcgcagagcctgggataacggcgcaggaacggccagagccccgagccgctgccgcgagccgggccgggtggggggcggacacctcgagattcaagcccccgcgccgcaccttccctgagccacatgaaggagcagaggcgccgctcggaccccgacgtgcgcccaggccatccgtcccctgggacactcgggaggcaggagggctggaacagaggcgagagttgcatgccccttccctcccgcggtgccccactggccccgcaagttggcactggattctgctggagccgtcgaagctccctattcattccccagggcatggaggggacgcggagtgaatgacacgagcagcgttggggggccgtgcgccactttcccaatcctggggtcagctgagccgagttagagctatgcccctcatttgttctctgcgggctacggcggggtcgggtgcgacttgaggatgggacgtctctgggacagcccgagctctcagaaacgttggcttaaaagcacaccggggcttgggctgagtgcaccggagctaagcctagtgcaccagagctcgcgccgcgctctcccagccccgactttctccaagagatgtggggtgcgggcggtcccttagagggctggaggacggtgcctccttgctgcttcgggaactgcgctccccttcttgcttttggtctctgcgtgtactccccggcgcga

SEQ ID NO: 6387 - DNA, 973 bp, Artificial sequence
  DNA replication origin
gacccagctgggtcagctgccctgcttcgtgttcccacaatctcccaagcttctctcagggagcatttaccatagtccattgtaattatttaagagtgtgtctcttccactggacacagggaaccccttgaggataaggactgattttgagttgcttattattgaaattatgatgcttgagacagagaaggggctaaagggtctgctgggtggatggatggatggatgagaccatggcaggtaggtgggtgggttggtggatggatggatgaatggatgggtaggtggatgaatgggtgagtggatggtgaatgggatggatggatggaggcatggtaggtaggtgggtgagttggtgaatcgatgggtgggtgggtagatggatggaaggatggaagcatggcaagtaggtgggtgagtgtttggtgaagggatgggtgggtgggtagatggatggaaggatggaagcatggcaagtaggtgggtgagtgtttggtgaatggatgggtgggtgggtggatgaacggatggatggaaagatggaagcatggcaggtaggtgggtgggttggtgaatggatgggtggatggatgaatggatgggtggatggataggtggatggatggatgggtagatggataaatggatggatgaacgggagcatggcaggtaggtgagtgggtgggtgggtggatggatggatgggtggttggacgaatgggagtataggcaggtaggtgggtgcgtgcatggacagatgggtaagcgaggaaacagagggaatgatacattggtggatgaataataagaaaacagataataaaataaatggcggaagaatggatgggtgagtaggtgaatggatggatagatgaatgatgagaaggccggatggatgcacagacagacagacagatggatggatacagtccttcctcaatcgttagagagagaaaagctccagtctttggat

SEQ ID NO: 6388 - DNA, 1337 bp, Artificial sequence
  DNA replication origin
gccgcaggtggagctgcctgccagtcctgccctggggcgtctgcactcctcagcccttgggtggtgatgggacctggtgccctggagcagggggcggcgctcgtaggggaggttcaggcatgaaaggctgcaggtcccgagccctgccccgcggggaggcagctaagggtcggtgagaaatcgagcgcagcagcggtgggtctgcactgctgggggacccagcgcaccctccgcagctgctggcccgggtgctaagcccctcactgcctggggccggcgggcctgtccgagtgcagggcccgccaagcccacgcccacccggaactctagctgacccacaagcgcagcgcgcagccccggttcccgcccgtgcctctctctcctgtcccgctgcacctccccgcaggttgagggagtcggctccggcctcagccatgccaggaaggggctcccacagtgcagcggcaggctgaagggctcctcaagcgctgccagaatgggtgccgaggctgaggaggcaccaagagcgagcgagggctacgagggctgcaagcacgctgtcacctctcaggaggactgaaagcctgtcatatattgtgtttagcagcagatagtgggcccttgataaatgttagcttccccccctttttcttttctgaagtgattccactttcataggttcaccattcacactagaggggcaggcttctcctgcttctagatcctaatggacccttttagtctctggggaggaatcccttatcctgtcagtttcaggccccagttccaggaactgtaccacagaggcttaattgcttcctaagaaatagacatagctattgttacgggattcttagggtgtcgcttcgccggctggaaacctctgtggccagtgtggcgcctttgcctgcattttgctctggcccatttggcttgctttgccccctgagcctggagggctgcacttggctcgcactactggcctgcatctcaagggtgagccaggtgtggaacggtgaggggtgtgtgagcgagtgtggggtctggccactgtgcacagccaggcatagccactgtggtggggcaggcaactccagatgctggcataggtgcagggtccctgtgaggctgcagctggaccaggcataccataagcagcttccatggctgacactggggaatgcagtggtggtggctggaagcttggagacaccaggaacctcagagccctaaaaagggggtcacagccctggctcagggagctcctaggtctaggctccccaaagggtcacagctcttctctccttctggtcacccacaatgtgatgagcaagagg

SEQ ID NO: 6389 - DNA, 781 bp, Artificial sequence
  DNA replication origin
gatttcatcctagtcaacacctggggacacagcagagtggacaccggtattgagtggatccggatgaatggaccaaacacactcctacaggacactgagcaaagccccaaaggaggcagggagcaggccagtgacgcctgcaggagagaactccaggcagaggggcagcatgggtgggtcagtggatgcctgcaagagcgcaccccgggcagaggggacaccctgggcgggtcagtggacacctgcaggagagcgccccgggtggaggggacaccctgggcgggtcagtgatgcctgcaggagagcacccctggcagaggggatgggcttcgccctgaggtggaagtgtgcctgctgcatctacacaatagcaatagcgtacaggcctctgtggccgtggtagagtgagagggggtggaggaaatcagaagagagcagggtgctgggcggggcagattgtctcggcttttgaatgagatgaaaagccctggaaggatgctgagatggggaggggcatggtctaacaggttttaggggctccctctggctgcggtgcagagaacagagggtaccagggcagatgtggaggcagggaagtcaggcaggaggctgttgcagaggtccaggagtgagatggtggggaggtgctggaacaggagtgagaggagtgaggtggtcacacatggttggatagtgattctacttgaaagtagagcaacgggattgggctgtagggtgttgctatggtttgaatgtttgtcccccacaaaactcacggtga

SEQ ID NO: 6390 - DNA, 873 bp, Artificial sequence
  DNA replication origin
aaaggaaggcatggcaatcaattggaagagtggatgggtggatgaaagaatgaatttgtctatgccctggtttgtgtcacaaaggatttgaggtgcttatagtacaatttaaaaataaaattttagcactctgtctgtacctggctctgttctaggcccttggaatacatcagtgagcaaaagataaagattattccccttgcaaagcttatattttagctgcatgaggtagacaatgaacaataaccataataaataagtagatcatgaaatatgttagaaggttaagggctaagaaacaagagaaaagtgcaaggaagtgagagtgggaaaggcaaggaggtggaggtgggatgcaagtctaaatggggaggtcagggaaggcctcgttgagaagctgagcaaagaattgaaggaggtgagggaggtgcctgcagagagcagggcttgaactgcccaggtggaggaaaggctcggagtagacacgtgctgctgtgtctgaggggccatagcaaaggagccagagtggctggaggagcagagagtgaagcggggagtaggagggggccagaggtcagggggtggccaggtcccataaggccttgtaggtgatggtgaggactctatgccaagtgatatgggagccatagaagggtgttgagcagaggagggctatgatctggggtatatttttaaaggatccctctggccactctgttgcaaatcagtaaatcataggaggtcagggcagaattagaaagaggcacacaaaatttgtccagctgagaagggatggtggctctgaccaggagagaaggtggtcagagtctggatatattctgaaggtagatccaatcttcatggtggcttggg

SEQ ID NO: 6391 - DNA, 1591 bp, Artificial sequence
  DNA replication origin
tccgccaccctccccaggccacccgcgtcgcgagggtacccaagcgcgctcttctcaagcgggcggctccggggttcccggccgccctgccgggatgcccggaacccagcctggccagcgcgcagcctcgcccagccgcggcggccccgctcccgcccaagcccgcgccccgctgcgactcaccggcgccggctccggggaaagtttggtggcgcgttggccgcggcggccaggctgctgggtgtcgcgggggcggcggcgggggcgccggggagctctcggggagcggggcgccggaggaggagccgctccgaggggcccacccgcgagcagcggggaaggcggggacccgggccccgcgggcctgcagcgcccccgcacccggttccacgcgcccagggccgcccccgcggagagagggggcgcgaggggcgcgcctctcgctcggacaccctctcccagctcgcgccccaggtttggagctgctcccgctgggtacccgggctcgggctctgcgaggcggactgctccttgggtttggaaggaggggtggcagaagggtcagaaccttggtgagacaactccacccccacccacgcacctgcgggcacacaaaacgacagacagagataaatcaagacaaagaggcacagatggaaatagagatgaaacgatgtttggcagagtcaatcacagatagattgaaaaagacaaatagtgatacctgcgcccctcattcctgctaggggcgccaaaatcgaaaaaggcaaagtcagacagaggtggaacaagattgacagtaggaaccctacccctagaggtttcggggaactaaagagaccccagggtctacaacctcacacctctcttctgtttctccctagcccgtcctgatgaatgagcccacatttcaaaataggatgtgttttaattagcaacctgtgccaccccgagcagcaaggggaggagtggggtgggggtgaggcccctctgcaggtccccgggaacctctgtccctggcaatgggagcttgaggattcttcctggctgccttcatttccagagctgggagagagaggtcgaggtttttctgccttctcagcgccgggaaaactccatttgaacctttgaacagttatggtttcagattttaccccagcagtttcgaagggaccacctaagctcacagggagaggagggtgtttgaggaggtgggacatggtgggttggggtgtgggggtgggggtcagaggggtattttagcctcctcccagtagcagcagtcccaccagccctggttgtggaccacacagagctgggtctgaggctcagcttcacaagctgtgtatggtaggtccatggtcctttttcttggcctcagggcccatgtcggtaacacaagggttcataaagacaggggccattgtgtcagatgcttttctaagtgctacagatgcttactcatttaatcctcacaacaataataggtcctagtaggtaggaactattattatccctattttacaggtgagaaaatgaaggcacagagagattgagtaacttgcacaaggtcacatgtaggagaactgag

SEQ ID NO: 6392 - DNA, 1252 bp, Artificial sequence
  DNA replication origin
tccgagcgagaggcgcgcccctcgcgccccctctctccgcgggggcggccctgggcgcgtggaaccgggtgcgggggcgctgcaggcccgcggggcccgggtccccgccttccccgctgctcgcgggtgggcccctcggagcggctcctcctccggcgccccgctccccgagagctccccggcgcccccgccgccgcccccgcgacacccagcagcctggccgccgcggccaacgcgccaccaaactttccccggagccggcgccggtgagtcgcagcggggcgcgggcttgggcgggagcggggccgccgcggctgggcgaggctgcgcgctggccaggctgggttccgggcatcccggcagggcggccgggaaccccggagccgcccgcttgagaagagcgcgcttgggtaccctcgcgacgcgggtggcctggggagggtggcggagggcggctcgctcggtggcaccgctcccctctccacactgtggcctcagcactcgacgcgcagacacctttagcttccccgggcttgggcagggtgcgcgccctgagcgtccgtctttgagctcgggcgagcagagggggagcctcgttttctttgagcctccccagggtctgagttcgctgctaaccgtagtgccagcccattggttgagtgcgttcactgtgccaggctttgggcatccattatctgttgcaatattgttatactcattttacagaggaggaaactgaggctcggggagggaagttgtgcccaggagcatcagctggttaaggggagagagtcagggttttgctcggagtcatcctgatccaaatcacttgaatacactgaggtaagccccaggctcagcgtcacctggagtcgggggtgggaactgtccggaccaccacccgcccttcccctgcagttcggctgcagctgggggtgtggagcaagaggcggatcacctcctcctcgttgtaccgagagaggaggatgctttgggaaaatgagtggatattatggccagggagtggattctggtgacagaaaagcatcggggctgctctttcagagatcagattctagaagttgctctcagtttttctcgaaggagcccaggaagccaggagcaggagctggagtacagcagctcctcaaggaagtcacgtctcctgctctgttaccccacccccagcccccagtcctccatgaagatcccacctcttccctcctgattccctgatccctctgaggtgtcc

SEQ ID NO: 6393 - DNA, 651 bp, Artificial sequence
  DNA replication origin
tgacgtcattgttattatagctaagatttgtggactgttcactgtgccaggtgctttacctataattatgtaatttcatccttacagcaatttatagatgcagggaccaaggcgcagaaaggaagagtgacttgccagggtcatacagctggcaaggggtgcccccggaagtcaaaccctctgtgcctgacttccaaactcattgttaagccttctattcaacctcttctgtagttcccaggcacctgtgcctggcacgtggagcaaaggagatgcagagaccaccgtctgcaccctcgaagggcacaaggacctgtggaaagggacagacaagggaaagtcaatgacggaatagggtgggagagctgaggagggggaagctggaggaggagtgtggggaggtctgaggagggcttttgtcttatcggggtggagtcaaggaaggagggattacagagaagggcacactcggtctgagagttgaaggacggatggaagtctctggaggtttgcagtggaatgggcttcagggagggcacagcaggtgcagtggcatggaggtgtgagatactggggtatattgaagtttggggtctgagggttgatggtgggcagggggcagcagtgggaggggaaggcgggaaaggtaga

SEQ ID NO: 6394 - DNA, 1162 bp, Artificial sequence
  DNA replication origin
gcctctccacccggcagccaccccatctgggaagtaaggagcgtctccgcccggcagccaccccgtccgggagggagctgggggggggtcagccccccgcccggccagccgccccatcccgggagggaggtgggggggtcagccccccgcctggccagccgtgccatccgggagggaggtgggggggtcagacccccgcctggccagccgtgccgtccgggagggaggtgggggggtcagccccccgcccggccagccgccccgtctgggaggtgaggggcgcctctgcccggccgcccctactgggaagtgaggagcccctctgcccggccagccgccctgtccgggagggaggttggggggtcagccccccgcccggccagccgccccgtccgggaggtgaggggcgcctctgcccggccgcccctactgggaagtgaggagcccctctgcccggccaccaccccgtctgggaggtatgcccaacagctcattgagaacgggccaggatgacaatggcggctttgtggaatagaaaggcgggaaaggtggggaaaagattgagaaatcggatggttgccgtgtctgtgtagaaagaagtagacatgggagacttttcattttgttctgcactaagaaaaattcctctgccttgggatcctgttgatctgtgaccttacccccaaccctgtgctctctgaaacatgtgctgtgcccactcagggttaaatggattaagggcggtgcaagatgtgctttgttaaacagatgcttgaaggcagcatgctcgttaagagtcatcaccaatccctcatctcaagtaatcagggacacaaacactgcggaaggccgcagggtcctctgcctaggaaaaccaaagacctttgttcacttgtttatctgctgaccttccctccactattgtcccatgaccctgccaaatccccctctgtgagaaacacccaagaattatcaataaaaaaataaattaaaaaaaaaaaaaaaaaaaacagaaccaaagacaaaaaccacatgattatctcaatagatgcaaaaaaggcctttgacaaaattcaacaacccttcatactaaaaactctcaataaattaggtactgatgggacatatctcaaaataataagagctatctatgacagaccca

SEQ ID NO: 6395 - DNA, 973 bp, Artificial sequence
  DNA replication origin
agggattcctcgcgctcccgcgctcccgtccgccggcccggtccgcgcgtgcgtgtgcgtgtgcgtgtttggcgggggcccgtgcgggggctcgggcgcgagcccgcctgtgcgtctgcgcgccctcggggtgcgccccgcgtgcccaggtcccgtccccgcccctgggtcccccgcagggccaggccggccccaggcgggcgcgcccagagccgccgggcggtgagtgcggttgacccggtcggcggggcgggacccgggctgggcgagggctggcctgagaggggccttggggtgggctgtcggagcagaaccgggatgccctgcgggagggaggaggtggcgggtccttgccgggccgctcgggaggcgccggtgggagcggaagcgcctaggctcccggaggacgtcctgggagtcggaggctcggggcgggcgaggaggcccgcgcctggcaccccgcggtccccgccggcctcagggagggctgtgatgtggactgcgggaaggggcaccgtactcttcctgtgcttcctgcccggtccccaaaacaggactgcacactctccctgcacccagtgcaggcctcgcggaagagcacagggctgttcgctttttgttttgcttgaagtctcctttgattcatcaccctgagacatttaactgtcttaggttatgaagacagtgcttgctggggctattcgtatttatgtacgttgctggcatgtgttcgtctgtttaagttagatgattaaaaaatcggtttcactttgatcgtcggtgctgtatgtttgctagttgtagtcccttctctgtgattaataagaaccagcagcctggcgcgggagggtaggggtgtggggaagtggaggcggttctgctgggttttatcaacagctggttgccctctctttgaaaggcactgtctcccagtttgtggagttttaatatcttgttctatacccaagcctac

SEQ ID NO: 6396 - DNA, 1089 bp, Artificial sequence
  DNA replication origin
gggacacagcgccgtgcaaatgtacaaacacaaacgcacatttcgtgcgcgcccaggtgcccgccgcgctccccacgcgcgcacagtaggtccctgctcccgggggacagcgcacgggacgccgacgttcacagtccaaccagacccgtcccgcggacctgctgcccttcccgccacacacaccccgccaagcgcccggagttcagccgaacctgcggcacccacgccgccctccgcttcccccggctcgcgagcagccggataagggcgcaccacccgcccgcgccggttcgccgtccacacccgctcacccccggaacgcggcgcaccttccgtcccccgcctcccgggccccgtcgccccctctcggcacccgcatgcccgagccgcgctccccgacggccgacggccacgcacctgaagggacaggtcacaccggctgcgggaggggctgctcggcgccactgcgctcagaacggccgcggcggtcccgggcgctccgacgccgctgggtttcctcccattacagcatgttgcactccagcgctgcacttcacactcgcacacgcgcacacgcacacgcgcacaactccaggcgctcggcggcgtccttcccccgcctcgcccggaggaggaagtcctagtaaatcaaaacaggctgggagggagggagatcggagtggaaagagtccccttcagccgctcacacaccagtgtttgctgtgtttggcaaactcctggcgtccacaacccggactgctctgaaatgtgcccggggaggggcagggaggaggaggtaaaacgtttctaattggcgcaggttcttatattacagcagcagggcagacatgtgaccacgaaaagaaaaggcctgtctttaattttttcctgtctttctctggggatttggtggtggggggccgggggatagaggcctgatacccgccccccgccatccccagcaacccttgccctgttgttttcttgtactgccacaattaagaaaacatttgcttaacatatccagcggctaacttcataaaataaatagagactggacttcctctggtttgctttaaaaggcttcat

SEQ ID NO: 6397 - DNA, 890 bp, Artificial sequence
  DNA replication origin
gcgaggcggtcgggggcgccgccgaggccgaggcggcgcccggaccggggggcggcggcggcggcggctgctggggctcgggccgctgcaggtcggtcatgtagccgttgggcaggttggcgatgaagctgctgtccgacagccggcgccgcaggaagttcatcatctggcttaaagggctgggggcgcgcggggctacggggtctggtggcgcggagggagagcgagggcggaaggcgagattgaggcgactgaggcggctgaggcggcggcttagccagcagagactcaggccccggcaccagaccccgcagacagcagcggcggtctgggccaggcaacccgcgcggcgcgaggctcgcggagagggagcgggcggggcaggggcggggccagagatagcccccgccccgcgccgcagaggcggccccgccccgctcacggagggcacctagccgcgcgtctggcgactctcggggcttgcaggagggggcgacccaggcctccagcaacctgagcgtgactatgcggggagggcgtgggagccaggccttctccccaggggaaggaaaaggaaccagaggccccaccatctttttggttggagagaaaaagagccgtgtcccagctgaaatggaggcgaaggaaaccgaccccactccttttggaaggataagaggtgtcagcctccctatgcggaggtgagaacgaaaggagtcatcccaatcacgcgcgcacacacgcacacaagcacgaacaccctgtagtgaggaggaaaagaaccacctcctttcccaacgctggggagaaagatgtcatctccccagcccccagaagagggggaagggaataatccgctgttactaacacacacacacacacacgcgcgc

SEQ ID NO: 6398 - DNA, 992 bp, Artificial sequence
  DNA replication origin
aacttcctgcggcgccggctgtcggacagcagcttcatcgccaacctgcccaacggctacatgaccgacctgcagcggcccgagccccagcagccgccgccgccgccgccccccggtccgggcgccgcctcggcctcggcggcgcccccgaccgcctcgccgggcccggagcggaggccgccgcccgcctcggcgcccgcgccgcagcccgcgccgacgccgtcggtgggcagcagcttcttcagctcgctgtcccaagccgtgaagcagacggccgcctcggctggcctggtggacgcgcccgctcccgcgcccgcagccgccaggaaggccaaggtgctgctggtggtcgacgagccgcacgccgactggtaggtgccgggcgccgccgccctcgggggtcggggtccgccggcagccgcaggccaggagaggacggtcccaggtcgccgaggaaacgtttcagaccaataaaaaggagggtccccgaggtcccgctgggaggaggtgcgggctgagcgcgcgcgcgtttgcggggtgagggagggcatccatcagcccggaaaggcgaacccaaagctaaaatacccctcaattgccccaggtcccccaggtcccatacaagaaggagctactttatgcaacaggaaaggcccttaggaaatagtttttttgggggtagaggaggggacacacttgttagcttagacacataaaatctgaagtgaaatagtcccaggaggccgaaggaacatttagggccagtaaaaaaggtttaacttcatgaagcacggagtgaatttggaatggaaattggtattttggagggagaaggtggtggtgggttttttttaaccaggacccatgaaggctgatatcaagtattgacatcaggttgatgaaatcacacatgtagtggcccaggtgtacacgggcttgttccccggagcatggctgaagtctctttatgaataataaaattgttgtatttt

SEQ ID NO: 6399 - DNA, 1230 bp, Artificial sequence
  DNA replication origin
aaatagtcccaggaggccgaaggaacatttagggccagtaaaaaaggtttaacttcatgaagcacggagtgaatttggaatggaaattggtattttggagggagaaggtggtggtgggttttttttaaccaggacccatgaaggctgatatcaagtattgacatcaggttgatgaaatcacacatgtagtggcccaggtgtacacgggcttgttccccggagcatggctgaagtctctttatgaataataaaattgttgtattttgtgcagcagggaggggacgtgtggaattttttttttttttttttgattgcttgtttttctgaaatgtgcgtggtggggggcggggcgtggaagtgaatggtagctttttctagctgaaagatgaagaccttggtaaaatatactggatcattaaaggggtacaaataaaaggagacctgccttaatgtagtagatgggaaacttcaataattttttttttcttctaaagagataggtagcatgtttccaacttagaatggtgaaggctgctgcttggtaaaagtacgaatgaggtccactgaagacaaattagttaaaagcggctctattttatagttaacctagggaatggtgggatggtgaaattgataggtgaagggcttggagaaatgaagaggccgagaatctgggggtgccttttctccaggaatgtgagcaagggttttgtttttttttttttctcataggggttgaggttggagactggacctgagtgttcttcccaggaggggtgcacagagagaccacagagctatttctctccatttcctcttttggctgcttcactgctttctctctctagcattctctctttgggagacccagagggagggagtgctggcgtgtgggtgtggtggaaatgagatgcagatgtggagatgccctcctgctggctgctaatgtcaccattctgaatagtcctttgggtgacttatgtggttggccttttcaagagagtagagtagaaaatccgaaaggacttttgccaggaaatgacaaaggcacatggaagagggtaatggggaaagtgtaatgcatatgatagtgccactggcagccctccttagaattactctgactcagttcatatcaacaagtgcttattacggaggaagggaaggtaaccaagctagtaaaggtgctcagtcagagcatccattatatgccaaatgctgtactctcag

SEQ ID NO: 6400 - DNA, 868 bp, Artificial sequence
  DNA replication origin
actgctggccagatactaatcccccacaaccaccccctgctgtggacctcgcggacctcggactcaccaagtgccgagtggcagatgtgctgctgagggtgcgccggggcgcagctgcatgcctcacccagccccgggggccgcagcaacgccagcagccgcagcaacagcacccagcttggcgcgggccgagggctcccaggcatgacactgcagatccgcgactgagcctgtgaggtctgggggactggacggccccagcagggctccttcccaaggccgttgtgcccctcgccccaggctttatgaggtggccctaagggccaatcccgccccgacgggctccgccttcctttggctctaggccacccgcggaggcaggacccgaggctcttccgacctgcatactcagtaagatgcagagggaagcctggaaggaggccctgacctctgtttccctgcctaagtcatgaagcgatctggaagcagaggggaagcactgggagaggggatggtgtcaagggcagaaagacggaaagagccacaaagacaaatgcatgaggacagaaaaactgagggctgtgattcaggcagaaagaacaagagtgaggagaggcacagacagaaagagtgagacaggcagagtcccagagaggcagacagaattacaacaggcaaaagagacagtgacagagaaggacggaccccttgctgagctgcacgctgggaatgagacgagctactcagggcttctttcagctgcaggaagtgctttcaatgccctatttatgaggctccaaagcaacagcaaacagtaatagaacaggacagagaaagttggggtgtgtgtgtcttggctctgttgcct

SEQ ID NO: 6401 - DNA, 1472 bp, Artificial sequence
  DNA replication origin
taatttttgtatttcttagtagagatggagtttcaccatgttggccaggctggtcttgaactcccggcctcaagtgatccacctgcctcggcctcccaaagtgctgggattacaggcgtgagctgccatacccggcctgaattgtacattttacttctatggtatttacattttagattatattaattattcctcaataaagctgtgattttaaaaagcaggctaggcgcagtggctggtgcctataatcccagcactttggaaagctgaggcaggaggatcacttgagcccaggagtttcagactagtctaggcaacatgtcaagacacagtctctactaaacaattaaaattaaaaaaaaaaattagccaggcatggtggtgtgcacctgtagtcccagctacttgggagcctggggtgggaggattccttgagcccgggaagtcgaggctgaagtgagccgtgattgcgccacagcactccagcctgggcgacacagcaacaccctgtctcatggaagaaagaaagaaaagaaaggaagaaagaaaaaaaaaaagcagattggaactctggaattaacaagaagtaggacgcacggagcacttccgcctgagtggagactgtggatccgggtcaacctgactacctaaatcacaggccaataaatggtctttcagtggtcagtccctgtaagatccgtggctctcagcttcttatcttaggggctgtggaggaaggacatgattatgttgatttaagcgctgaatattttcccttgtgatacccatcctcgcaaaactttgcttcaaccacaaacgaggaccttctgtaccagaggggcaataaccacaatgaagctaggaagaaatgcagagcaccccagcatacagtccataagcttcctgaagtggggggcctcaggcatcgctgcctccccaaagaggatcaggcccagaacagtatgctccagaaataagactggaaaaagggaaagaggggcctcaagtccaggagaccagcggctttctgaacgcgcacctgccaacccactttggacaggtcacgatggacagcgtggcaggaaaagaaaaggtcactgtctacccaacacatgagaaactgtttctcgtgcctcacgtccccactccgtccccacccatgttgtctgagtccctcggtgtcagaaacactgctaagaaatttaagaaattctgttaatgagtttaagaaatgtttttaatgattaaaagtcagtgacttgtgaataaccatgtaacttacaaacgcaaggaactctgaaagtgtgcagcaccaccgatcagaagagaaaaccaagggacccgaaatatgctttaattaaattttcttttaaaatgtcactggaaagaacatcttgggaagacggcctggccgatcgccgtgtgaagggcaagccactctggccgagagggagccccacacctcggtctcc

SEQ ID NO: 6402 - DNA, 1118 bp, Artificial sequence
  DNA replication origin
gctcgggaaccggctgctggctgggcggggagtgctcagggagggggcgcggagggctggggccgagggtctgggggctagggccgaggaaacgggaactgacggggtcccagacggatgagagctggggagaagggggtctcggctgaggggtccggggctgaggcagggtcatggtccggcaggacccggactgacgggtcgcgggcgggcggctcacgggtgaccgggtgaaggggtcttgggctgagggcacccgggctgagggtcgcgtctaccggagcgcgcactaggggcggagggcgcgggcacagagagccgcggccggtgccgactcgagtggacgcgagccggtgcgtcccggcttccaggacagcccccctcgggagagcgccgggtgggcgcggagccggggacacggggacctccgcgtccccggcggaggtgcgcaagcgtcgggagccgctccgggggaactttggagcagggtgtctggacccggggaagcgaagatccgcgtgcgtccgtcctgaggccgcgcggcacccctgctgaggaggaggtcccgttcgctgtccagagcccaggggcgaccgccgcttggggaccgggggaccgttcagcgaggggcgcgcttgtagctggccaggccctgtgccctgacgcgttgtgctggccctacgcccggcggaggggctggggacggggactgggtgcctccgtgcctccgcggatggagcgcgcagccaggacccccagccgcaccccggggggctggaaaggcgaagtcgctgctttgtgggctcctgcaagtgccaggcgctgaccactcctcctgggagcctaactgaggggggtagaggcagcagaggttaacagaaatctcaggtcccttggtggaaggtgggtgtgtagtcgtggtactttacgcctcggtgtttagggaggagcctaaggtaaggagtcagaaacggggagtaaccgagctgcggcttttatataaggtcagtggtaggtaaggaaggggccttaacctctgctggtgaccagaagcctgcatttctgcattctgcttaattccctttccttaggtgagttggctcactctcattgcattt

SEQ ID NO: 6403 - DNA, 1113 bp, Artificial sequence
  DNA replication origin
aaagaagaaagagagaaaaagaaaaagaaagaggaaggaaggaagaagaagagaaggaagggagggagggaggaaggaaggaaggaaggagaagggaaggaaggaaggagaagaagggaaggaaggaaggagaagaagggaaggaaggagggagaagaagggaaggaaggagaagaagggaaggaaggagggagaagaagggaaggaaggaaggagaagaagggaaggaaggaaggagaagaagggaaggaaggaaggagaagaagggaaggaaggaaggagaagaagggaaggaaggaaggagaagaagagaaggaaggagggagaagaagggaaggaaggaaggagaagggaaggaaggaagaagaagggaaggaaggagggagaagaagggaaggaaggaaggagaagaagggaaggaaggaaggagaagaagggaaggaaggaaggagaagaagggaaggaaggaaggagaagaagggaaggaaggaaggagaagaagagaaggaaggagggagaagaagggaaggaaggaaggagaagggaaggaaggaagaagaagggaaggaaggaaggagaagatgggaaggaaggaaggaaggtcggtcgtctaacaagggcatatttcagacagcttaggaagctccttcccttctccttgtcctgcttcactaagggtccaggcctggctgagaccaaatggctgtttgcaaaatgtcctgggggtagtctctgcagcaatgactgaggaggcttaggaggaaaggttagactagagggacagcaagcagggcagcactgtgcccccttgtgtcagccaagccagccgtcaaagcccttccagaatgatgcttcccaggacccagcttccaccctcttcagagagccttgtctctttgaagtgtggaaaatcaggtttggatgctaatttgtgttgatatggggaggggtgattctgacatacctgggtacatccgggagccaatggaatggaactgccaaaaaccagacctgtgagcaaccagaagcctcttaaagagtggtgagtgggcatggtggctcatgcttgtcatcccagcactttgggaggccagggcaggaggatcacttgag

SEQ ID NO: 6404 - DNA, 969 bp, Artificial sequence
  DNA replication origin
ctctcccctgcccaatccatcctgttaccatatcctgtgactcttgccaattttctccctttcttttgcaacattcttaccacaaagctctttgattttggtttatctaaaacctgaactccctagcctagcagtgaaggtccttgcagcagaggacccactgaatgctgcgacatgatctcactctaccaagagcaagcccacagtgcagttcaaaaagggccaggcaggatgcagtggctcaagcctgtaatcccagcactttgggaggccgaggcgggaggatcgcttgaggtcaggagtttgagaccagcctggccaacgtggtgaaaccccgtttctactaaaaatataacaatcagccgggcgtggtggcaggcgcctgtaatccgagctactcgggaggctgaggcaggagaatcacctgaacctgggaggcagagattgcagtgaggtaagtgagctgagatggtgccactgcattccagcctgggcgacagagccaggctccgtctcaaaaaataaaaagggccagaaaaacagggacaacacatgccatgccagactactgcagagcacagaggcaagtcacccaagcaggtctgggaaggcaagaagtctcctggaagaggtgatatttgagctgagacctaaaggctgaccaggaattactgcagctaacagaggggagggaacatagaggcaacagcatgcgtgaaggaatggaggcaagaacattggcagaagtccaaaattcaacatccatcatcacatctagcaccatgaatctctccagcagtatttgccacacttccttgccatcctcctttgcctcctgcttagtctgtgtggtggaactcctgtgattcatatttgggaaagtatatattggactccccacagggctcctttaaaataaccaggtcaggagaaacttacacttcctattgcactccagttttgctcatc

SEQ ID NO: 6405 - DNA, 937 bp, Artificial sequence
  DNA replication origin
gtggcagagctggcgcacagaacacccgccagccggccgtgcgcaggcgcactccgccaagtcccgacgggagctctgcggctgcgcactcggctggctttgcggccgcactgcttgacggcagcggtgtccgccccacggccggcgttgccggggtaacggcgagcgcgtggggccaagaaaggtaagggccctgggcgaggaaagcgcggccctttccgagtttggtgttttgcagcgaaaggaaatctcgctcttccgaaagtcctccagggcgagagaggaaagggcctaggtactgtgctggggtcgcacagccggccgagacagtgccgggacggggagccaggcttccgagtgcgcccggtcactgactcctccgcgctttcctcgtgcgcctgcagcccttggttcttggaaacgccggcgccttgttcagggctggtggggctggggcgcaaggtgcagctgacaatgcccgagaggagccgcagcctctggtggagttcggtcgggtgtgggggtagtcaaggaaagaagcaaaggggtaagacagggagttaggaattggcggggcccctaacgctgttggggtgcgcagtttattttatttgcagctgtcgtctggtgagcgctttccacgtggtaggccccgaacgaaacgccttctgcaaaattatgcatttaatcctgacaacaactttcaaaggctggtcatctgtttatatggcttattctcaggttctaacttgaaagctccccagaggcaggattgtttaccttgtgcctttcatccttgcctccctaagcccaggaggtgcgcagatggagcttgaagcgtgttttggttgggagaaggtgagatttgctgggtaggaggttttttaaccaggtttgtttggcacctagtccaggaaggttggaaaattaaatggag

SEQ ID NO: 6406 - DNA, 1678 bp, Artificial sequence
  DNA replication origin
gggccgcccgagagtcttaatcgcgggcgcttgggccgccatcttagatggcgggagtaagaggaaaacgattgtgaggcgggaacggctttctgctgccttttttgggccccgaaaagggtcagctggccgggctttggggcgcgtgccctgaggcgcggagcgcgtttgctacgatgcgggggctgctcggggctccgtcccctgggctggggacgcgccgaatgtgaccgcctcccgctccctcacccgccgcggggaggaggagcgggcgagaagctgccgccgaacgacaggacgttggggcggcctggctccctcaggtaggtggcaggaccgggtcgtggatgccgggggagccgggcggcggggctgagggatcggcttccagggcgaccgggcctgggtggcgctgatggagcggccccgcggctgccgggcagagggcttgggccaggccgttgtcaccctggggtagcgttgggcgggggccccggagtccggtgtcatggccggcgagccgagttcccacatcccactcaaatttccttgtgtttggcggaaacgtgccaacgccacccttatgccatgcgcattcctcatatttggcagtgggaaaatccgcccagagctgccccatatctgttgtcacttggatgggccaattccttttctcttgggccgccgaatgtgggacccgggcttgcaccctttctcagggtacttcagtcaagtgacacccttttagagacgacgtgaggaatcgggtaagagaggaggaaactggccagtgccctaccacaaaggcacaggggcctcttcttgggtatcaggactagccttgggtatcaggactctgggttattaatgaaaggtttgggatacttatagaggattggcctcaggacgctttggaatgaagagccagggctgtcttttgtgtgacgcgagagccgccgggacgcttcagctctgcagctgctgaggctctgcgagcgagtcgatgcccaagagagaggggtttggacgtcgtgagaggcgaggcggccgtgttcattcattgttctcgttctagggctctgggtgtgcccctggtattcattctgtggtgggaagaaggaatggaacttagtgtatccttgagatgtgaacgggttctagggggtcacttaatctaagtggaaaatgaattcaaggcacgttcattgagcgtttctgcttgcctggtcctctgtgggctgagtggagagactctgccctccctgcgctcctaaggcgtgaaaacaatgcagtgtgataagaattggcttatcaagtgttatggggatttagaacagttagttttgcttggggaggagttgaggaagcttctacactcgaggagacttctgagtcgagttttgaaacacctgtgagtaagtgctcatcgggtgaggaggagctcagggaacagctggtacaaaggcttagagccatgtgggagttgggatgagtttggggagcagcaaattgcctggggtgcaggaaggaaatggtgagagatgagagtaaaataaaagttgctagaattgtgagggggctgtctttgttgtagatagtgaactagttgaatttggattattgtacatgggttgccgagtcttcattcttgctgataattttctccctttgttgatgt

SEQ ID NO: 6407 - DNA, 1061 bp, Artificial sequence
  DNA replication origin
gggcggggcagggcgggccggggccggggccggggcggggcggggggggcggggggggcgggggggcgcggcctggcgaggcacaggcaaggcgcactgcaggtcctgatccctgcctctcagggaggcagctaaggccctgcgagaaatcgagtgcagcgccagtaggctggcattgctggggtacccggcgcaccctccacagctgctgtcccgggtgctaagcccctcactgcccgggactggcggggcctctccaagtgcggggcctaccaagcccaagcccacccggaactgtagccggccctcaagtgctgcgtgcagccccggttcccgcccgtgcctttctctccatacctcccggaaggctgagggagccggctccggcctcggccatcccaggaagggactcccacagtgcagcagcgggctgaagggctcctcaagtgcggccagagtgggcgccgaggctgaggaggcaccaagagcaagcgagggctgcgagggctgccaacacgctgtcacctctcaacaggagccacccttagttaaacaagttaaaaaggctccaccttctggagcaggaggtgagtggaggggtaataaaatgaggctgggacagggtgcaggggctcacacctgtaatcccaacactttgggaggccaaggcaaaaggattgattctggccaagagttcaagaccatcctgggcaacatagcaagaccctgcctctacaaaaaattcaaaaaacattagcctggagtggtggtgtgtacctgcagtcccagctgagatgggaagctgaggcgagaggagttggttatgaaagggacttagaggttactccataggagtgggtgtccccaagtcagcccctctaattcctggtggttcaggagataatcatagctagcaccaataatactgaatcacataatcagaaacaagttccattttcaacgtgtctgggcccttctgattaagaataacatggtgtttatgactctggaaccagacagcatggatttggatcctgactgtgacttaccagctgtttgac

SEQ ID NO: 6408 - DNA, 1166 bp, Artificial sequence
  DNA replication origin
gactggagtcgcggaggggcaggacggcccctaggggagaacggccggagctccagtggggaccacgaggcaggagtgggcctgtggggaggggggcagcttaatgcagggagaagagagaagaggcagggggctgcatggtcatgggggatgggctggcgcttcgagaggggaagaaggcccccggcttcagagcgggaaggagagaagggggccggcggcgggctgcacctgaagtccttgtcgctggacgtcatcttctccaggaggctggagatgtggaaggcggcggtgctcatggtggctgcgcgccgcggagccggccggcgggagggaatatggcggcgcgggcgccccctccctcgccagctgcgcgggctgcgctcaccagacagaaatagcagctcccgccccgccccgtgctcacgccttggccgtggcggccgcgggaggcgggcgggcctgggcctggcttggtggtcttggccccggccccagcccttgccctgctgacagcgcagcgccggattgcacacacccccagagacggggagctcactaccctgccaccacctccttgttattcccgtaggtgccagctctgtcttgcggcatggacgtaatatcatagagtctcaggttcgaatcccacttctgcctcttctgctgtgtagccttggccaagttactttacctccgctttctcatctgtaggcattcaagaaacaggagctatcaaccaaagctggtcaggccaaccaaaagacccctcacccacgatgcttgcccgcccctgagccagacaggatctggggaatgaactgagtcacacaaggccccctgcctcgcatccccaaccctcaggacggcagggtcagtttcttcatttttttagcaatgcaactgaggccgagaagcaaagggatttgctgagggtcacacagccaatgaatctgggatggagtcaggattgactgcagatcccttaatatcctgcgcagcaatccttccataaacagccaggaggctgctggatgggaaagggagtagtgtgtgcttcagagccagacaagcctggcttcaaatctctgctaggctccttcctggctgtgtgaccttgggataatgaaacaacctctctgggctatgtttttctcactcataag

SEQ ID NO: 6409 - DNA, 910 bp, Artificial sequence
  DNA replication origin
cgggccaatcccttttcctccctgggcctcagtttccccagggaatgcaggtggaaactcattggaccagatgtttccaccgttcttttcagctctattcctgtggttctgtgatgctgtgagagggggaaagaaggaaaaagggagtggggaaggagagtggcacacaaaacctagaaggtcccaccccaaccatcacctacctgtgactggaaagccagactcagcccagccccctcctttaggctgggtctgaacaatcgcaggaggggagggagacggggagggaggggtccgggtgatgttgagaaggaggcatcactgagggtgccagtgagaaagtcagctgggggttgcggtcccgggaagggtccgggttcaatgcggaggagaggcaggtgctggggtccccagggagaggcgtagggcttcactgtgggctcgctgaaggtggtgggggcgggggggagggggcgctggggcatcagctgcgggggaagaagggggccggacacacacgagggaggagaggccgaggcagggtgcagaggggtggagccggggctctgatcgggggtgagaggtagggctgaagcctgcacggtgggagacgaagcagggactggagtcgcggaggggcaggacggcccctaggggagaacggccggagctccagtggggaccacgaggcaggagtgggcctgtggggaggggggcagcttaatgcagggagaagagagaagaggcagggggctgcatggtcatgggggatgggctggcgcttcgagaggggaagaaggcccccggcttcagagcgggaaggagagaagggggccggcggcgggctgcacctgaagtccttgtcgctggacgtcatcttctccaggaggctggagatgtggaaggcggc

SEQ ID NO: 6410 - DNA, 1197 bp, Artificial sequence
  DNA replication origin
actaccacccatgggtggactgagattacacgtggggtgcacagtagggagcctgggacccagcgaacattcactaagcacctaccgtgtactcagcacaggtgttggggcactaagaggaagtgcatagtcccagtggcccaggagctcagggtctcccagggctgaaaagtgatctagcagaaacatgaggggaggcatgatgggagctgaaaggaggtacctaatcctgcctggggtcaagagttataggagctgtcagatgaagggaggaggtcaagggagagcaaagaatccccctagtgaaggtctagagaggggacagggcgtggcagattttggatgtgcacagaatcataacagtgtccgtttatgaagcaccgacctagtgcctgccatgaacctgagcatttcacatgtactatcttatttaatccttaccccaaccctcagagatgggttctgttatccccattttatagaaacagaagcacagggagactcatgggggttaagttacttgtccatggtcacacggccagtgagtgacggcagctgggatctgaagccaagaccttggatcccaggctctattaatgtgggggggctcttgaggggtactgaggaatgggctgcaggagaagagtaggagtcagaccaccagagcaggtctgtctcctcacctgtcagggggctggaatcagaggacctcactaagatcttggcctctgtattagactggcctggatttggactaagtctcccacttcctcgctgtgactgaacctacgcccttcatgtctctgagactcagtttccctatctgtaaaatggggacaaagtgaaaaaatgttcattgagtctccaaggtcttctttcagctggaggggccagaactggccatgagaccacgggccaatcccttttcctccctgggcctcagtttccccagggaatgcaggtggaaactcattggaccagatgtttccaccgttcttttcagctctattcctgtggttctgtgatgctgtgagagggggaaagaaggaaaaagggagtggggaaggagagtggcacacaaaacctagaaggtcccaccccaaccatcacctacctgtgactggaaagccagactcagcccagccccctcctttaggctgggtctgaacaatcgcaggaggggagggagacggggag

SEQ ID NO: 6411 - DNA, 1560 bp, Artificial sequence
  DNA replication origin
cccagcagcctcgtaaaggagaactcaattgtcacaattttacaggctctgagagatgatgcggtcagtaaaacctcccatgacttgaacacctgctctggccagaaaaatgtcaggtgctggcctagtgttgggaacatggggttagatcagtcttggttgttctagggaggagttcacagacatgtataaaactgtgaatggagtaagcacaacagtaaggataagagcagggctgataggagctcagaggagcccccagtccagctgggagtgaggagccttctaaaagagagtgctgctagagctgagccttcgaggaggggcaggacttagctgagtttgggcaggtataaagaggatgctggaggggagactgtccccagtccagaaggcagagacaggggaagacttggggtcccagagtctgccaggggtcgtggggcaggctgtaatgtggagaggtgggtatgcagagctgaggtgcagggctggccaggagccatggggcaggggtgagtatttgtgtgttctaccctgatctttctctctgcagtggagagtaggtgggaggggattgaacaggcaggggactggttaagaggctgctatagggaaagcaattcgggttgtattcaggagggggactccacaggacttggagtgggcaggggaggcagggactggaggctgacccctagggttctgcctttagtaactggcgggggcagacagaggtgctgtgatggggtgcactccgggagccagcagcaggtgtgtggggaggaaggtgatggattcaagctggggcatgttgaacttgaggctcctgggaggcactcactcaaccacacactccatgagggcagctcccaggatcagtctgtcttgttcaccctggcttccagcacagtccctgtcacttagcaggtgaacaggcaaacaaatgaaacctaggagagggggttgggtaggacatagaaataagggagggtaaggtcagcgtgtttctgtaaagtgagaaagaaaaggtctcaagatgtttacaggacagaaaatgcacgggcctcgtttgaaggtgtggatagaagctgctgaggcaggcaggagctgtgctgtgtgcgcagaaaccattgtctggtgttgcctcttgtcttgagcccagagctcagcatctccaaaggcactagggagccatggaaggagttaagcagaggagtgaccaggtgagaagtagactttatactgctctggtctcagcgaggaggatggacagaaggggatggtattgaggcaaggcctagacttccaagaaatagggacagccttactagatcctctatgctttcccctatcaggtctttctccctaggctgggagccaggctttgcactgctgagaagtccctttctctctccgctttctctcatgtaacaaaagtaattaaaataattcctcctcacagttgcagggcacctcttttgcaagggccattgagttgccataatcctgggaaggaggccgggagagaatggggagaggggcggagcctggcccagg

SEQ ID NO: 6412 - DNA, 1031 bp, Artificial sequence
  DNA replication origin
gagaagtccctttctctctccgctttctctcatgtaacaaaagtaattaaaataattcctcctcacagttgcagggcacctcttttgcaagggccattgagttgccataatcctgggaaggaggccgggagagaatggggagaggggcggagcctggcccaggttgcccgcggagtgcgatcggcctgatgccccctcgtgctccccaggctgggtgtcccgctgggcgccttccacgccagcctcctgcactgtctgctgccacagctgagcagcccgcgcctggcggtgcgcaagcgggcggtcggagcgcttggccacctggcggccgcctgcagcaccgacctcttcgtcgagctcgctgaccacctactggaccggctgcccggcccgcgggtgcccaccagcccgactgccatccgcaccctgatccaatgtttgggcagcgtcggccgccaggccggccaccgcctcggtaagggggcagggggcggggcctgggctggcatggtgggcggagcttagggtgagccaatgactcggtaaaggggcggagcttgggccgcagtgcagccagggcctaagggtgggccgtctgccttggtagggaggatggggcggggcctgggctgatgtggtgggtggggcctggggcgggcggctgaagcccctgaaacgcagaggttggggccggatagggcttgagaggcgcagggcgggccctgagctcgacaaacccccaggcctgagcccctgctgagtgcagacggttcagagaagggggttggttcaatcacttatgagacgtggaggctggctggtaattacaattttaagtcatgccactaaactgttagactatgttctcttctcccagtttgacaaagatatcttagtaacagcccatgagccaagtttgaatttttaagaaacaatttaatgtgcatacaataaaccgcactatttaaagtgtgcaattcagtgtgttttgacctttgtgtatatccgtgaaacctttccatcacccccaa

SEQ ID NO: 6413 - DNA, 877 bp, Artificial sequence
  DNA replication origin
ggaaagtgaggagcgtctctgcccggccgccatcccatctaggaagtgaggagcgcctcttcccggctgccatcccatctaggaagtgaggagcgtctctgcccggccgcccatcgtctgagatgtggggagcgcctctgccccgccgccccatctgggatgtgaggagcgcctctacccggccgcgaccccgtctgggaggtgaggagaccctccgcctggcaaccgccccgtctgagaagtgaggagcccctccgcccggcagccgccctgtctgagaagtgaggagcccctccgcccggcagccaccccatctgggaagtgaagagcgtctccgcccggcagccaccccgtctgggagggaggtgggggggtcagccccccgcccggccagccgccccgcccgggaggtgaggggcgcctctgcccagccgcccctactgggaagtgaggagcccctctgcccggccaccaccccgtctgggaggtgtacccaacagctcattgagaacgggccatgatgacaatggcggttttgtggaatagaaagcagggaaaggtggggaaaagattgagaaatcggatggttgccgtgtctgtgtagaaagaagtagacatgggagacttttcattttgttctgtactaagaaaaattctcatcctgttgatctgagaccttacccccaaccctgtgctctctgaaacatgtgctgtgtccactcagggttaaatggattaagggcggtgcaagatgtgctttgttaaacagatgcttgaaggcagcatgcttgttaagaatcatcaccactccctaatctcaagtacccagggacacaaacactgcggaaggctgcagggtcctctgcctaggaaaacc

SEQ ID NO: 6414 - DNA, 1117 bp, Artificial sequence
  DNA replication origin
agaatttttcttagtacagaacaaaatgaaaagtctcccatgtctacttctttctacacagacacggcaaccatccgatttctcaatcttttccccacctttccctgctttctattccacaaaaccgccattgtcatcatggcccgttctcaatgagctgttgggtacacctcccagacggggtggtggccgggcagaggggctcctcacttcccagtaggggcggctgggcagaggcgcccctcacctcccgggcggggcggctggccgggcggggggctgacccccccacctccctcccagacggggtggctgccgggcggagacgctcttcacttcccagatggggtggctgccgggcggaggggctcctcacttctcagacagggcggctgccgggcggaggggctcctcacttctcagacggggcggttgccaggcggagggtctcctcacctcccagacggggtcgcggccgggtagaggcgctcctcacatcccagatggggcggcggggcagaggcgctccccacatctcagacgatgggcggccgggcagagacgctcctcacttcctagatgggatggcagccgggaagaggcgctcctcacttcctagatgggatggcggccgggcagagacgctcctcactttccagactgggcagccaggcagaggggctcctcacgtcccagacgatgggcggccaggcagagacgctcctcacttcccagacggggtggcggccgggcagaggctgcaatctcggcactttgggaggccaaggcaggtggctgggaggtggaggttgtagcgagccgagatcacgccactgcactccagcctgggcaccactgagcactgagtgaacgagactccgtctgcaatcccggcacctcgggaggccgaggctggcggatcactcgcggtgaggagctggagaccagcccggccaacacagcgaaaccccgtctccaccaaaaaaatacgaaaaccagtcaggcgtggcagcgcgcgcctgcaatcgcaggcactgggcaggctgaggcaggagaatcaggcagggaggttgcagtgagccgagatggcagcagtacagtccagctgtggctcggc

SEQ ID NO: 6415 - DNA, 1097 bp, Artificial sequence
  DNA replication origin
ggcactgggcaggctgaggcaggagaatcaggcagggaggttgcagtgagccgagatggcagcagtacagtccagctgtggctcggcatcagagggagactgtggaaagagagggagagggagaccgtggggagagggagagggagagggagaggggattcagtctttaagagggtattgggctgaaatgtgcaagcactgcccaagcccagagtggttctcacaggatccccaccatccctgtcccccaggaaccaaacgccaacagtgtggcctggaacacccagtgtgaggacatgcatgctctgcttctcgggaggaggctacctcaacatcaaagccagcaccttccctatgcaccggcagaagctgcagggctttgtggtcggctacaatggctccaagatcttctgcctccatgtcttctccatttctgccgtggaggtgccgcaggtaactgggagtgcctgtccactcttagcactggcaaggctgacaagaccagggaagctgggccctttgctggtgctttggggagagagtagcaaggagagaagaatggcagctgtgatgtcgtgggaggcagcctgggcctggaacctgcagccctgtctccactccttgcaacctgtgtgactaggggcaaacagctcaacctccctgagcctcagtttcttccttgtcccctttctgtagggatgggaagggtatgcagtgtcgtcagcagagtgtgttttgtggagagccaagcatgaggccaagtggagagagaagcaaagccgggagtccagcagggtgtgtgcatgagcacgtgtgtgatggtggtgatgtgtgtgtgagagacaggggagagagagaatgagtgggtggggggtgtgggctgaggtctgtgagccaataagggagcatgggactctgcatgagtcccctgaactaggaggagcccacaacagaaatggggccctgaagtgtggagccacagaatgggggagggcagaaccacagacaggtggctgagattgacctcccgaatgtggggtggtctcccctctgccttctgcaccccacacagatggtgcttactgtaagattgccat

SEQ ID NO: 6416 - DNA, 732 bp, Artificial sequence
  DNA replication origin
tctctggagctcgacttcttcaagaaaactggaaacaaagggatggcaagaccaactctcaggacccttgcccttccatcccatgatgcttttagacagttcccaggggccacctttttcaggaagaattatcaggatataggaaagtaaagggaggaaacgtgttttgagtggcacttagatcaggctctagactgggtgttggtttggtggggtttgctttttctcccgccccacaccccttcacaaaacctgggtcctggctaggctgggagtgagattcctgtgtctagattttcatcattccgtgttgcacaggaagtctagggaaaaggagacagatattagcaagtgtataaaagaaaatttagccagagaaaacctagaagaggaatgaagatggggggattatgaatggcaaaggacgagctgggggagagggagttgggcgtggggctgggacaaacagaaaggaggtgggggaggggccagggaaataaagtccaagaggtcagcaggcaccagaagccatagccttagttggggcatcaggagagcagcaagctgcatctaccttggaaagatggagagaagactgcagtgagcggagtggggaggaagggggaagtggcagggcagaggaagcagggtacagacaggagaaaagagatggtgccctgggccaggtggctgccaccgctaccatcgccagaagtggaaaactctttgcct

SEQ ID NO: 6417 - DNA, 1216 bp, Artificial sequence
  DNA replication origin
ccatggagacggaagcggggccacaaggtggtgagcggcggggggcggggcttccaacggccatcagccccgcccagcctgggcaaagagagcccggcctgggaggcggagccagggacccccgggctgagcctgatttctgagggcggccggggccacctccctccagacgctgctgcccccacgcggacgggcgccctctgcgggtcccgtggctcccggccctgctcagcgcctccagagccctcacccgggccctctccgctgggtccacagggtcctcaaagcgctggcccagacgcggggtcactctcctgagcctcccgaccttcccatgggtcctttggagccctgggttttggagtttgtctttcctaagtgccgctcgcccggacgcggctgctgcaggaccacagccgaccgagtgcggccgcgtcccctgcaggccacccgtcaagggcacaggggagaggcgccccaagccacagagtcgcagagctgccaggagctgacccttcgggtggggagaggacactaactcgggtcctctccacttcctcaaggttccttctcacctgcagtgaacggctcccagcacctctggggccttcctgtttcattgatgtcagcaactgatcattgatcatctctggtgtgcagggacagagaagacagacccgctggcccccccgggtgggcgagggagtctagtctatctgaagaaaactcccatagagataggggctaggaaggagacaccaggaaaagtgaaggtggaagatgggggtgaccctactgcggatggggtgctcagggagggtttctttgagggggtgacattcactagattgaccaagggacggtcagggcctgtgaaagtattttaagagagggaatggcagtgtccagtggactgtttcagggatggaaatagggcagcagggtgaggggtgtgagccaggcaggcagggcccagacaccatgtgatgggtacaggggtgggacccatggaggctctgagaaaggcctgggcctcagaagacagggaaacaggaagacccacttcgaggcctcacaaccttctagggcacagacggtgaaaatggctcaggccagaatttggtttaggtttcagaagggtgctgggtgcctcatgctcttcttgaggctaaagggctccagctccttggaccctttccatgcagacattgttctg

SEQ ID NO: 6418 - DNA, 1376 bp, Artificial sequence
  DNA replication origin
ggggggtgcacagtgggagagggtggagagtctctgtggaggttgtgggtggggtacaggggggtacacagtgggagagggtgggggtccctgtggaggttgtgggtggggtgaaggggtgggggggtgcacaatgggagagggtggagggtccctgtggaggttgtcaggggggtacaggggtgggggttgcacagcaggagagggtggggagtccctgtggaggttgtgggggggtgcaggggcaggggaggatgcacagtgggaggggattgagggggtcctcatggaggttctgggtagggtgcaagggcagggggctgcacagatggacggggtggggagtccccatggaggtcctgggtgggatgcaggggcaggggggcatgtgtagctggaggaggtgagggtccccttggaggtcctgggtggggtggggggggtgcacagctggaggggatagaaggtccctgtggaggtcctggggggggtgcaggggtggggggtacacagcggaaaggaatgagggggtccccgtggaggtcctgggtgggtgccaggggcagccagtgggggatgcacagccggaggaaatgggtggtccctgtggaggcgcgatgcacagagcaggaggagggagccgccctgagaggagaaaggcagcctgctaagcaagagctacaggaagcacttggacaggccatcgggccagaagcacctcgcaagggtgtccgggagctttggtgatgaagggcaagaaagaagcagctaagaggggggcctcatcacagagatgctgtcaaagattcaccaagcccacctaaaagtatcttttattacgggaactgcaattcaccttagcagcgcaagagggcatgattgcactaccaaacccagaaaagcacccacgcattcaaaaaactggaagagaaggaagagaaagggaaaggcagtcagccgatccgctgctgcactgttagcaggtgagagtcgggtgattttattgcagctgacagtgctcaatgatagcacaaggccagttaggaaaagcgggcaccgtgggcattagcagaagtcactattaccaaggcagcccttgtgatggctcattttagcagtcagcttgactaggctaagggatgtccagggagcagggagaacgtgatttctcgtgtttctgtgggggggttctggaagagatgagcacttgacccagtggactgactgagggccacccgcgccagtgtgagcaagcctgcttcaatctgctgaggcccagatacaaccaacaggaggaaggaggggaaatttgttctatgcttgacctgggacatccaccttctcctgcccttgcgtatgagaactccaggttcttg

SEQ ID NO: 6419 - DNA, 711 bp, Artificial sequence
  DNA replication origin
gggccgtgaggggcagaggggagagatggcaacagaagtgccccgggtttggtgtgcggctggcgacccccgggcgtgccctgtgtggtgtgcaggtgtttcagggagcctgggacccctacccaggctgtctacacaattgtgctgatgccgctgggtttggccttgctgctggtggggggcggcggggcagggggctgcccatggtggtgcactgtgtgccccacgtgggccgagggcagcggcgggtggccgtgggcatgggccccgtaggctgggtggcccccatgggggccgtggtggtactggtgtgcgtgctggatgtgctggggtgggtggtggtggtggtgatggtggtacgggggagggttctgcatgtggcagtactgggtgtgatgcccgtgcatggcggcctgcggcagcccctctgggggccccaggtggtggccagccacagagtgctgcaagtgaggcaggaccaccggtgggtgggggggtggcagggctggggctgagggcaggtgggcctggggagggggcttccctctcttgctcccgaataaggagcccaggagggaagatgagttgggcatagtctggtgtgggcgagatggacactctcgtgttgatgtagctctccggcgcatgtgaggactgctaatgatggacccctaaaaaggaaattcatagaaatcaaaattaaaagatctt

SEQ ID NO: 6420 - DNA, 1327 bp, Artificial sequence
  DNA replication origin
gtgcatggcggcctgcggcagcccctctgggggccccaggtggtggccagccacagagtgctgcaagtgaggcaggaccaccggtgggtgggggggtggcagggctggggctgagggcaggtgggcctggggagggggcttccctctcttgctcccgaataaggagcccaggagggaagatgagttgggcatagtctggtgtgggcgagatggacactctcgtgttgatgtagctctccggcgcatgtgaggactgctaatgatggacccctaaaaaggaaattcatagaaatcaaaattaaaagatcttcaagcacttaggtcagaatgatttttttttttcaaatgtaaaaattcacccactgactgctaagctttagttcaactcactggccagagggtggggctcagtgaggctggactgggccccgcctcctctcactacagtgcagggcagctgggggttactggccttgaccaaagtggggagtgagggcaggggaggggcccatctctctgaccaccacggcagaagtaggacttctggtctcattctgacaagcactttggccctggcagcagcctgagatttcaaattggaacccctaggttggggtgtctgtgcgctgtgtgtggcgagtgcagaggggctgatgtgcctggaggaggagccctgctcctgctgaaaacagggccctcagctctcctgggactgctcaactgggctgagggcatgtgctccgcccatgtgggtcctgaggtctcgggggaggtggtgacagggacaggtggggctcagaaaccttgtcctctgggagaatgggctgcctaggcatttcactacagctgcctactacaaaccaaacaaggaaaaagaaggtaacagaaaaagatctgcaagctgaggtagagatgtgaacagtaatacagagatggccggaggatgagtgaaatatcatgaaatccacactgaatctctttctctcaagacactcctcctcccacaagctaagcaattccatggtgtcctgccgcagacacacagcaatcaaactccaagaagaaagcgatgaggatgggcgggcgtggaagtcaagggttcagcaaaaacatccaacagcaagtgtggagggtgagtgggagccgggtggcccgggcgggggtgccggaagctggggatggtcaaccatgctcagggaccacaggtgatggggttaagcagaaaccaaaacacaaaatccagaaccacccccactgttgagtccaaaacaagcggtgagaggcatggatatttctaggcacagaggagaagctgacatgcacaggg

SEQ ID NO: 6421 - DNA, 1390 bp, Artificial sequence
  DNA replication origin
acggcagtgagtgggggagccgggctaggctccccgacccctgctgcctggtcccttccccacacaggtgcatgctctaactccacccaggctgtctggtcccttccccacataggtgcatgctctaactccacccaggctgtctggtccctccaggccaccgctgcagtgaccaggtccaggcccagccgggtcccgccttctgccgctgctctttttttgcccccatccaccctctgatgtggatgtgccacatccagggacttccaggacaaggctcctcggccctggaggtgctcagagcacagagggaagaggggaaggtgctgtgggaagcgggcacgtgggctcttcaggattaggtgagcaccatgtgtctgctgggccaggcacctcttggtgaacactggctgggagtaggccgtgggcccctgcgggtgcagctgagaggcctagtctgtgcagggggcaagggacagagactgaggtatcaggcaattttctgggaagaggtgacagtgaggacaaaggtgctgaggtgggtggggagacctgagaggctattccagggttgagcacagggaccctgggggaaggcgaagggggtagtggggcggtgggcagactgcactgtacagcaggccatggagaggggtctggctttctcccgagtgggctgagaagccccagtgtgaggtcaagagggtggtgatggggtcctaagtccacaagagcgatgccatgctggggagatcgtgggccagggcccagctggcagctgagtgaggggctcctgtgggcacctggccatgctgcagcagaggtgggagggggccgggttgaggacacagtctgagggcagaggtgtcaatatttgctgatggatctgggtgggggtggccgaggtgggggcggtggaggtaggagcaagaaggacaaggagcagtgagtccaggatggcgtcagcttttagcctgaacctagtgcgggcgatggattccacccggcaggcctcaagggccataccgcagaagtgaggatgctcagtgagggggcctaggccggtgatgaagagctcgctgctgacctgaggggaactagggagaagctgcagctggacagccagggccggctccagggtggggctgggagtctccgcaaagctccctgcaggagtgacaggccctcaacagcctccctgacagcagacggccagggcactgggcatttactggtgggaatcccctgccattgggaccttgctaccctcccctactcctagcccgtgtaatgaagcccttccttccccaatcagtccttggtggccctgctgggtggtgaattctccatccacctgtgccctgcctcacagagttccacaaggtctgcc

SEQ ID NO: 6422 - DNA, 1681 bp, Artificial sequence
  DNA replication origin
gacgagatgacggcctcgtacagtgatgtcaccctgtacatcgatgaggaggagctgtcgccccctctgcccctctcgcaggcaggggaccggccgtccagcaccgagtcggacctgcggctacgggctgggggcgcagccccagactactgggccctggcccacaaagaggacaaggctgacacggacacgagctgccggagcacgccgtcgctggagcggcaggagcagcggctgcgggtggagcatctgccgctgctcaccatcgagccacccagcgacagctctgtggaccttagtgaccgctcggagcgggggtcactcaagaggcagagtgcttacgagcgcagccttggcgggcagcagggcagtcccaagcatggtccccacagcggcgcccccaagagcctcccccgggaggagcctgagttgcggccccggccccccaggcccctggacagccacttggccatcaatggctcagccaaccggcagagcaagtctgagtcggactactcagacggtgacaatgacagcatcaacagcacgtccaactccaacgataccatcaactgcagctccgagtcatcgtcccgtgacagcctgcgggagcagacgctcagcaagcagacctaccacaaggaggcccgcaacagctgggactcgcctgcctttagcaacgatgtcatccgcaagaggcactaccgcatcggcctgaacctcttcaacaagtgagtaccatgggtgacccctcagggtgggcagctgtggcttgctgggccttggcgggtgggcgtggctgcatccttccaagcacggagcttgaggtccaccgtggcctatgagcataggaagctgccacacaaggtcggtggctaggacggtgccagcctgtgcgctgaggcctagcccctcctgggactgctggtggggatggcaacacacacaggctgagcaggggcagaatgggagctttctgtgccgaagcaacttgagtcccgggcccttccgtcccatcccccccaagtccgccatagcaagtggggtatgttgggccatgccctgcgcaactttggatgtcaggcctaggggtgatgtgggacacaaaggcctttgagcaggggtatgaccggttgtgtcagtggggggcaggggcagacaggcgagacccagggctgtgtcttgtgggggatgcaggccagacctgaggccatgtctgggggtaggagtgctcaggggcagttgctggccagacccagaaccgtgtcctggatggaaggaactcagacagatgcaggccagacccagggctgtgtctgggggtcttggggagatgcatgagttgggttcatggagtagctgctccccaagggggtcctggaaaggtgccgttgaccatcctgagagcagatccaaggagcgatgggtatttaaagcagactattcttagcacagccaaaaatagcaagaggaaggggaggagggctgagcacttggcctggggaacgtgcaggctcctgtccaacctgagatttctcgttatttccactccctgggctactgggatttggcctcatcagatgctggcctggcaccaactcccctgggctggtggttcctgacacacatccggggagccaggggcagacgacagttttcccaggaggtcaaactagggtga

SEQ ID NO: 6423 - DNA, 1165 bp, Artificial sequence
  DNA replication origin
ccgagcggtcactaaggtccacagagctgtcgctgggtggctcgatggtgagcagcggcagatgctccacccgcagccgctgctcctgccgctccagcgacggcgtgctccggcagctcgtgtccgtgtcagccttgtcctctttgtgggccagggcccagtagtctggggctgcgcccccagcccgtagccgcaggtccgactcggtgctggacggccggtcccctgcctgcgagaggggcagagggggcgacagctcctcctcatcgatgtacagggtgacatcactgtacgaggccgtcatctcgtccagtttgcggtggtccatgccgtgcagggctgtctggggttcggtgtcccgggcccgcgccgcatccagggccggtgcctcctcagtgtgcaggctgcggcagttgagggcatcgtcgatggactcggccagtgatttcacttgcctagagaaggcgtcctccagctcggtgatggcgtccgcaaagtcactggagggggccggagacttgagggtggtgggctcgctgaggtcaccacactcaggggacaccagggctcccagctgggagccgtcgttagtcactgagacctgcttcccctcgaagtaggagctgtgcactttctcaggcccctcaaaggagaactgcatcctcatgttggacagcacaatccggcgtgacatgcggttctctgacatggagctgcgcaagcgctcgaagttcttgttcatctggtactggcgaaacgccgtctggatggtgcgggccgcatggcgggttaccaggcgccccccatactttcgttctagcatctccacctgcgggtgggagaggagaatgagaacagcactgcatgtaggcacagtgcgacatttaccaaactccttcccacttcctagccacgtggctgtgcgacctgggaaggtcccaaagttggtcaaagcaactgctgagggatgctggtgggcttatgcaaaatatgagtcccaaggtcaaactggacagagaagcaccaagttaaaatgagtgcaaccatgtttttcctctctcagacctcttttttttttttttgagacagaatctcgctctgtcacctaggctggagtgcaatggcacaatctcggttcactgcaacctccgcctcctgggttcag

SEQ ID NO: 6424 - DNA, 1180 bp, Artificial sequence
  DNA replication origin
ctgccccgcccacttcagggccacattcctccggcccggcctcgcgctgcgccaagcgggcggcggcggaggggcgggcttggctggcctggggctcggacttggggccggagccgcgggagccggcggacgctggaccaggagccccgacgtgatcgcgtggcgggtggtcgggtctccgggtggccgggtgtcggccccgggatccggcggctcgctggcgggagtcggcggcctctgctgggcctgggtcccggctcccggcccggcccgctcccactgcggccgccatgtggtgcctgcactgcaactcggagaggacccagtcccttctggagctagagcttgacagcgggtgagggcgcggcgcggggcgagcggccttcccgggtgctgagcggtgggctggcgcaggctgtggggatgcctgtgcgggagtgcgggtgaccgtcgggaccgggcgcccggcgtgcgagagaaagctgcctgcggggcggggtgcgtccgccagactgtgggtttgggtgagagaagagcaaacaggacccgagtttgtgcgtgggagagagagacgcgcccttgggacaggagcgctgtgtgtgccctgggagggtctcaggatgggagtgtgtgtgtgtgatcgagggcctgttggagtgcaagttggtgtgggggtgagtttgagtttgggggcttgagagggaaacagtgggactcggtgtgggtgtgaggtgaggggcaggagggagagcggagagttggtgggagggtgcccagcgggtctgtgcctgtttccaactgcaggcagggccggagctgccaggaaggcctcttgcaggcctgtctattccagacattgggcctatgtctggattgatgtgtctgtcctgtctgcaagaccccaagtgtgtgtgagggtggatgaccctgaacaaacaggcgtcccaggtgtgtcagcagcttctgtcgggtactctgcccctggcagggccacttgggggtgcactggggtgtgtggctgctgtttgtggcagagtgtggatgtgaggggctttgtgtggtgatgcgtgtgcacctggtgtggtcagggatggagtctggtgtgtcagaggggccaacccttttctacttaggggcctgtgggcggctgtctgagcttccaagggcccgtgtttatgga

SEQ ID NO: 6425 - DNA, 852 bp, Artificial sequence
  DNA replication origin
gggagcgggccgggccgggagccgggacccaggcccagcagaggccgccgactcccgccagcgagccgccggatcccggggccgacacccggccacccggagacccgaccacccgccacgcgatcacgtcggggctcctggtccagcgtccgccggctcccgcggctccggccccaagtccgagccccaggccagccaagcccgcccctccgccgccgcccgcttggcgcagcgcgaggccgggccggaggaatgtggccctgaagtgggcggggcagggcgggggcggggccggagggcgagctgggggcggggccggagggcgagctgggggcggggctgcgcgcgggggcgagactgcacggagcgtgtggggaagagagcacaggaggcgtggccacacggcgccgcggaagaagcacagggggcggggggtcaggggcggggcgtcaggggcggggctacgcgcaggggcggggccgagccgaggcgcggggtgcagagcgcaagggcggagtcccagacactgcatccaggtcccagcgcgcgaagcctctgttctggaaggaggactttgcgcagcccctccaacactggcgcctcccgggagccatgtcttcctctccagcgtgtaaccacaacaaatgcacagcgccaaacccccaaccagagcctactccgctgatgcctactcaacatctgcctatcccgattttgccttcagtttataaaacctggcctttgcctgcctggaccgaaccgtgtggttctggggctctgatgcgccccagagaagggaatgggccctatcctgaggttggtaccacccttttggcggctttttgggggaag

SEQ ID NO: 6426 - DNA, 2038 bp, Artificial sequence
  DNA replication origin
ccgccccctagcacagccgcgcacgcacacacaccttccgaggggggaaactgaggccaggcgcggcgaggccacccgccaaggtcacggcgcacgggcggtggggcgggcaggagggcggcgcgcggggaggccgccccgccggtggcgctggtatcgggctcgggctccggctccggctcccgagcgcccgcccccgcccccccgcgcccggccaccggacgctctggggccgcgccggccgcggggacggcgcgctctcggcggctgcgggcggacccgcgaggtaggaggcgggccggcgggggacgcgcccggcgaccggtgcggtgcggggccccgggcgggggtcgctggggctgcagccgggaatgccctccgcggggcggcctgggcggcagctccgcccccggggccgcggttgcaccgacacgcagttggctctcgggaacctggggcgcgcggggatcgcggcgggcttcgcggagcgggtctcggaaggaggttgcgaggccgcagttgctaagcccgcaccggccgcagggttgtggggttggggatcagcggccgccaagctcacgggaatgggggccggggcgcgccagcgccagtctttctgagctgggctctgcggtgtcgctctctgggactggagcggtgaggacgcagaagccccaacctccgcggctatgcagacggcttatcccgaagccttgcgaacgctaaaggcgcgatattgggggtcggggaggggcggggtgctccatctcttcatcagtgcagttggttgcctccccgaagcgggggtacgtgaatccagaccccgagggtcgccatgcaaagcattccccaccccccgactccgcactaccctgcttctcttccccacccccaccccgcctccaccaccgctgctgcctccgggcggagaaatcccgccaccgcgtccagggtcccgagcctgcgagcgggaggttgaggcatctcaggaattcgctgggagccacacggacgcgccttgggagggagggagaagctttggcagggctggagggctgggtccaacctggccctgtccctgcctcccaaccccgtgtgaccttgggcagcccctcctgccattaccacgtggggaagagactggttctcagtcttggggtggagggagctctcccggtagacctccaggagagttggcttagggagcagtcttggggaccagaacagccttggcgacctctggaccctgacccatagggggcaggtggcagcagggggatgaggtgtaatgggggctgttgttggaaacctgtcccacctgccagcctgaggatgagacactcctgggccagggtcttagagtgtgggacccccgcccccaccgcaacctcccgctacaaaaccacctgcccttgggctctaagcaggcagggtgggttggcagaggtgagtcaagcttctccccacccctaatagtcctggggaacttcccctcccatgtttctgccaggcagttgtcactttaaattgccaagctctcaactgtcacagctgatctgttcctggagcaaagggagcagaaaggtgacagtgggtgtcccctccccctggccttgtccaggagatgaggctcacaaggacagcagtcggctctgcctggtcagctttgtgagtgttgctctgagcatgcccagtgatctgtggtggtgagggacctgtcctagactgggagcaggggtctggttgtgcactttgatgagccaccgtttcattttgtggtcaggctccaccaggcagtggacacattggcctgtgcagccccctctgaacaattctgaattaaggtgacacaggaatagctttctcgtcaccctcccctgcccccagtatgatgcccacctcctcattacagttggcaagatggccaggctgctgaagccatgtgcaattagagcccagaaaccagatttaaggggaaagaagagaaattgccttagcggtgccatctcctcccaccccccaccccccacaggaaaag

SEQ ID NO: 6427 - DNA, 1127 bp, Artificial sequence
  DNA replication origin
cccaggttcccgagagccaactgcgtgtcggtgcaaccgcggccccgggggcggagctgccgcccaggccgccccgcggagggcattcccggctgcagccccagcgacccccgcccggggccccgcaccgcaccggtcgccgggcgcgtcccccgccggcccgcctcctacctcgcgggtccgcccgcagccgccgagagcgcgccgtccccgcggccggcgcggccccagagcgtccggtggccgggcgcgggggggcgggggcgggcgctcgggagccggagccggagcccgagcccgataccagcgccaccggcggggcggcctccccgcgcgccgccctcctgcccgccccaccgcccgtgcgccgtgaccttggcgggtggcctcgccgcgcctggcctcagtttcccccctcggaaggtgtgtgtgcgtgcgcggctgtgctagggggcggggaggacggtgccgccccggccgccgacgtcacccgagcctggacgagtggagggcgctcaggtcggtgcagccgctgcagcggatgggtcaggagagcggggtacgcggggtccaggcgcggaaccgggggcactgcgacccccggcatttccctcagactaccccagacccccaataaacagcgaacaaacgcacctcaggccaagtcccccggctcctccgagggaaagctgcagccccggccgaaacgccccacccccgccgccgtccccagttcgcagatgggaacactgaggcccacagcagggaagccactggcccagaggcgcacagctgcaccacgctcctccgcgtcccctccaggacacaccctcctgactgtttggggacggggtggggacctgggcctgccggtgccgcccccatccctcagccgacctcgatttagatgctgggacgggccctggtggcctggcgactgttacagagaatggggtgggcacaatcggaagggagcccaaagacggggaagaagtggcgcagatagcagaggctgggcctggaagggatatgggcgggagcgcgcccgcgggggtgcacctaaggagaaagcgaggacgcgcgagtgccctccctggtgggtcgcagagcagacctgccccggaagc

SEQ ID NO: 6428 - DNA, 1448 bp, Artificial sequence
  DNA replication origin
gctgcaccacgctcctccgcgtcccctccaggacacaccctcctgactgtttggggacggggtggggacctgggcctgccggtgccgcccccatccctcagccgacctcgatttagatgctgggacgggccctggtggcctggcgactgttacagagaatggggtgggcacaatcggaagggagcccaaagacggggaagaagtggcgcagatagcagaggctgggcctggaagggatatgggcgggagcgcgcccgcgggggtgcacctaaggagaaagcgaggacgcgcgagtgccctccctggtgggtcgcagagcagacctgccccggaagccctgaacgccgggccgggagcggcggcctctctcccgcagccggaaccccgccggtctggagcgagggcgtcaggtggcgggctgcgattgggacgaggcgccccctggtgcccggaggcggcgagaccggagaccggagggacggggccgccagggcccagccagagaagctgagcgagtgatgtcatgagtcaggagacccggctctgtgggtcctgccacgaggggctgtgtgaccttgggcaagacgtttccccctctggacttctgggaggaaaggacagaaggagggaccctgatttttacctctgacatctcatgaccctggacatctgggtcaggtgagaatgggcaaatggatccagaaaggcacagacggatcagaagtgagatgtagacactgttcagcactggaggaggattattcatttacttgaggcagaaactagtatcccaattttacagacaaggacaccgaggcagagaggtaaagtcatctgcccacattcacacagcagctaaggggtgagctgggatttgaacacccacctgcgaagctgtagcgtctaagcagtgtgcctgactgccccactccccactcttgcagaatttattgagcatctaagttgtccctagaatacccaaggcactggtgacagagacgaataaggaacggcccagctcctggtgggtcttcctgcctcgtggcaagagttaagcccatggcttcttatcagtgctcacagccaactgtacagtggatcccctgggaatgggcttgtgggctgaaatgtgagtcccatccccactgcatattctacccttccatattattggaggtttaaaaaatatttttaagggctaggtgtggtggctcatgcctgtaatcccagtgctttgggaggctgaggtggaaggatcacttgaagccaagagttttgaggccagcctgggcaacacagcgagactccatctcaaaaataaattaaccaggcatggtagtgctccagctactcgggaggctgaggcaagaggattgcttaagcccaggagttcaaggttattgcgagctatcattgcaccactgcactccagcctgggcaacagagca

SEQ ID NO: 6429 - DNA, 1459 bp, Artificial sequence
  DNA replication origin
caaatgtgtccttccctttgcctgggcggcagtgacttcatccccagcgggctgtgtgagtcactggactgaggttggagggcgagccagttctctgcagagcccggctttggccttgtggctggggagatggaatggctgagggggtgaaggcttccacgcagacctgccctcgcttcccccactctttctggggctccttgtgtcctacagggcaactagcactgagcacctaacacgtgcccggcagtgccaggggctttttaggtgacagctggtatttactgagtgcactctctgtttcagaaaccattatgaactctcacttcaagaactggccatgctgtcctgcagacagtgatgttgagaggttaagtcttatacccagggtcacacagttgtggtatcactcattcctcatcacagcctggagggcagagattttttattcctgttttgcaaagggacaaactgaggctctgcaagaggaagtagcttgtgtagggacaaaggagtcaaagatgagtaaggagtgccctgttctcaaggatgagcccccgaggatggcaaagacagatagagtgtgacatgtccccgatgagtggatggatgggtggatggacaaatggatggacagatgggtggatgggtgggtggatggacagatggggtagatggatggatagatgggtggatggatggacggatgggtggatggatgatggacggatgggtggatggatgatggacagatgggtggatggatggatgggtgggtggatgggtggatggatggatgaattaaggctcatttgcaatgaattcaaatttacaatgatatgcagacaacgtatgatatgtggatgggtgaatggatggacagatggatggatgggtggatggatggacagatgggtggatgagtggatgggtgggtggataaatgggtggatggatggatggatggatggatggatggatggatggatggatggagtgatggatgggtgtatgtgcgggtgagggaacagatggatggatgggtggatgaggggataaatgaatggatgataggaaggaagatgatagatggatatgtgaatggattaatgaatccatggatgattcattggagaggaaggtgtgtggatgtgtgaatatatgaatcagtgggtagagataaagcgggtaagcagaggctacttccacccacaaaagacattgtgaaaacttcccctactaggaggacaggccagataaacatttgaatggaggccttagtctgtgtggcacaaggaaccgaggccagtatgaaaagtgacagggaagtaatgtccaagggagagtttccttaggtcagtggggttccatgatggaatggggaagcttaaagaaaaaacaaggaatggggagccttgaaaggtagtgagcttcacatcattgggggtgttcaagaaga

SEQ ID NO: 6430 - DNA, 842 bp, Artificial sequence
  DNA replication origin
ggggctgtgtgcagggtgggatggggttaagggaactggacacctgggctggcagaaggggggaaccctaaccagccctgggccagagggttgggggagagaacagtttcatgaaccagaaagagagagacctgggtgcaaacagccacccatcaggactgtggctgccgaggggcacaggaagcgaggacagagctgaggcaacgagtaccctgacctatcattctctcctccacctcctgacctcctgccagggccgctgctggccaccccgtcaggaaccaggaggcagtgggagcctgggagctgcagtcccgggcccagagcagactggggcatgtggagaataactgggcaatatgtgcagaattcctggcccagggtggacaggcctggagatctgggagggctcaggggtgttgtgatggagtgggggccacttgggggtgtcaggaagctcaatgcagagagaagatggcaaagggccttgcccaccccaccctggtctcctgtgggtgacggtcagcatgggagagtgggtggaataggagaggctgcacggacccccagtgagtaaggagaggtctcatactgtcacctgcagttccccaggcgggagtcgagtatagtgtgcccattttgtggatgagagatgtggaacagtggcttgccccttaagccagaggcagaaattagagggtctcaaggccctaagaccacaggcagacacatctcaacaggcgaggagagggcacacattcagcaaggcctagaggccagacagaggctcactgaccctcactaagcttccagagtagggggcaccccttccagtcctcatt

SEQ ID NO: 6431 - DNA, 962 bp, Artificial sequence
  DNA replication origin
aaaaaggacggcagggagaacaaggcctcagtcttggctggacaaggctgcagacaacttggacccaacaaggcagttgacagagggagggtctccattcagagccagtcctagctatactgtcttggaggggtggggcaccgaggcagctggtgggaggaactgctgagtgttccaggccactgaggatttctggggcggggggtgggggtgcaggtacacaggtggggagaagtggagagggcaggcaggggccactgcctgctgtggggttcagcactgggccacagcaggcctgcaagggcacattgcatccacctgacagtttcccgtcttcacatgcagacttcagcgaccgtactgtctggttggagagagagtattgcacacagctcaattccttggacccatgtaccacagcatgtagggtgtgaccgtacctctgttgcatagctcaatgagttaatacctgtgaagtgttaacactcctgccactcagaaactgctcaaaaaatatttgctattattaggaaagtgagagagaggagaagaaagaaaggaaaggagggaaacaggaaaggaagaaggaagaaaggagtccgctgagggagggtgcaaggtagacagagaaaggggttgacatttgagcagggttttgaagggcgattaggagtttgcgtctggataaggaggcagggaatggaatggtgttccgtgtgtggggtctccgtgagccataccttcagcctctgtgaagtgggagcatgattccatgtacctcataaggttaatgcaagggtcggatgaagtgtgtgggaagaacacagcctgaggtgggctccctgcagtaggtgaagatattgctagtttgtcatgatgtggccagagtgagatcagagctggggagttgaatctctatggctgtggcagggcagccctgggcctgggaacagtgggctctg

SEQ ID NO: 6432 - DNA, 1163 bp, Artificial sequence
  DNA replication origin
gctgccccgggtttgctctcgcagcatccggagaaggggcgggcgcgccggagcctcccccaccccccgcgcccaaggagcaacgtagtgcggccgcgccggaccaatcgccgaggcgctggtcgccatggcaacagcagcatcaggcgcggccgctcggctgcgccctcgcggcaaagtcacacacccggcggggcgcggggcgccggccccttcctggcccgcgctggaaacctggaagtctgttgctaaaatgcacgcgccgcgcggagcctacgatgacactactttccaaggcggcttttctgccttcggcactgagacacgcgagccgcggagctctcggggctctggccctggagtgaggccggccgactccaaggctgtctctgccactgaagggcgatgagaccttggcaagccgcgtctctcctgggagtcttgattatgctactgtgaaagggatcataacagctataccacggggttccaggagggcgcaccacgccagtagctgcacggtggatggcagagcagtcctcgtttgtgccagtcctgtcccaaagggggctgcacgtggctagggagaatttctggtctagctatggtgcctcttcctctcccgaggaccttccatgtgccgggcaagtatctgccctcatgatgtttacagtctaaggggaagccaggaagtaagtgtgcagatataggattgcacgtggtgataaggatcaggatgaaaagagagcaggaagaggggaggcagggaccccaagagaggcgggaaggaggcttctgccatcagacggggtggtcgggaaggccctctgtgaggcacgtgtggctgagactcggatgacgcaagaagcaggggaggagctggcgtcaaggctctgaggcggaaggcagcctggtgtatttgactggcccagaggaggccagcgtggtgcagtgtgcgacagggaggtggaggggagaagcgcacatccatcctcggctcccacacccgcctttcccacacagatttctctcttcctgtctgatgttcatctgatcctctctgcttcctcatctgtaaaccaggaatcccagacctatctcagaggcatgtagataatattcttccgtgcacggtaatcctcaagacaaccccaatgaggcct

SEQ ID NO: 6433 - DNA, 1643 bp, Artificial sequence
  DNA replication origin
atcccacctgcctcctttcccacaggtgactgctgtccatcttacattcatcctgccctggctctgttctggtttgctttgttatataatgcatacgatttttaaaaagttttgctaatgatttgcaaaattttaattaaggcatagctcatgtgtaacaaagggcacacatcttagctgcaaactcatgagtttttacggtcatatgtgcctatggagatgaacatatcaactacattcatttggtgttttcagtcttgttaattttagccactctgatgggcatatcgtggtgtctcattgtggtgttcttttgcattttcctaatgattaaggatgtagagcgtcttgtcatgggtctcccagccattagactttcctcttttgtgaagtatctgtacagcgccccccaccccaccttatccaagggggatgtgtttcaacccctagtagatgcctgaaatctctgttagtgccacaccctatatacatgatgttttgtcctatacatacataagatgggtggatggaggggtggatgggtggatggaggggtggatgggtggatggagggatggataggtggatggagggattgatgagtggatggatggagagctagatgggtggatggaggaatggttgaccggatggagagatagatgggtgggaggagtgatggatgggcagatggggggatgggggatggatgggtggatggaaagatggatgagtagatgaaaggaggaatagatgaatggatggcgggatggatgggtgggtggagtgatggataagtggattgagggatggatggctggatggatgggggatgggggatgaatggggggatcgatgagtggatgaagggatagttggatggatgggtggaggcatggatggatggttggatggaaggatggatgggtgggtagagtgatggatgagtggattgagggatggatgggaggtggaggggagatggatgggtggatgaagggatagttggatggataggtggctggatgggtggaggagtggatggatgtttggatggatggatgagtggatggaggggtgaagagatggatggatggagggatgtatgggtggagggcaggaaggagggagaaagggatagaaggatgaagcatggatcagtagagggagggaaggatggatgggtggatgggtgggtggatggatagagggagggagggaaggaaggaggaataggtagatgggcaggtagatggagggagagaaggaaggatgaggtggtccggaagcatctcagatgggactaacaggaacgtttcagatttgtggcagctgtttcctggtactggagcctgggcacaggtgggcgtttacagtcctgtctggtgcttctgagctgggctgagtgactgaactagtctgttgtatcccaggtggaggtgagcttatggcacagaatggttccttgtggtttagggggtccaattttgagaacatgaacacgtcggcttgctgctgtagccttcctgttcaggatggggtgggagatgtgcgctgggcagttcgctgtagcagtaccaagtcagcacaggaaagcattttctgctcagaactgtagaaaacggacagcacgggccaggcgc

SEQ ID NO: 6434 - DNA, 1198 bp, Artificial sequence
  DNA replication origin
tatttgggaaactcattgtttaatgaatcatagaaagatgtctgtgatagaaacatacagtgatttattcgttcattcaagatgcatttgttgagcaactgctatgtgccatgctgggggttctgtagtgacaaagctgtgctctctcttggagctgatgttgcagtgaggagagataaatggagtaaacaagtcagcacaaaggcaggagggaaggctggtcagtgtatggggaccacacaaggctggccggaccacgtggccgggtggcagggatggttggtttagatgcgatggtgagagagagcctcccgggagagctggcgatggcgtggccggctgatggcagggataagcccctgcaggaatctgaggggcgaaggagccctgggtgcagaggctctggggtggggacaagtgaggagcctcagggaggccagggcagaggctggggcaggagacagacccagatgatgccaaatcctcttgactgggctgcgaatgggaactggcgtggagtacgaagggaacccactggcacgttggcagtgggtggtgacattgccagagtgctctggcgggttgtgtcatggggagagttagaatggcagcagggggtctgggggtggccagagggaagccgtcccagggacctggcagagaagacggggcttgggtcagggaggtggccgtggagggggagaagtaggcagattggcgatgggtgttggagcggaagctgttaggacctgccgacatggctggatgttgtgggagggaaacaagccaggaggaatctggtgggaaggtttgagcggaggtggggaaggtcagggtcaagagcttggtctgggtgtgttcagccagagacgcttgttagacatcaggtgacaaggataggtgggtggtgagggcacaagttgggtggtcccacgatgcagtagtagaaattgtcagggccagcaactcccaacagccctgcccaggtctacgaagctcagatgctgtcctggctaatatgctagagatgggaaatgaccagtccaggtgtggctaaccaggaggcgggaggtgccgggagctggggatcaggttgtgactggccctgacctgaggctgcttcggggcccaccttctccctcctactcacccacccaggacctcaggtacacggaatgcagccatcataactcttggt

SEQ ID NO: 6435 - DNA, 1345 bp, Artificial sequence
  DNA replication origin
ccagctggcagggctgctatgggcagtgggtgccagtgtgcttggggagggccctctaagccatgcagcacacccagcagccagtgccgggtgttcctctctgagttggtctgacctccccactccgctgagatgaacacttgctgagctcccagaaagttgctgttcacgtcttcattcatgcaggacacacttgggacatgtggtcgcaggggagggttgggatgggggcccctcttctggctttgccccagcttttgctggaagcacctgtggtggtttagctgtcctttgctctgcataccacttgcatgaagagcgtcacacccgtggagaaccaaggggcctgagcccgccccctccgtgggaaccgcaggagcacagcttgccaagggcagaagacagggcctgcccagagggtgtcctgggaccggtagggcaggagggtccttgcaagtcacttgtagctgcctgtggagtgctggccctgcgaggacaaggtgcggggtgggatcctctgcttcctggatggcctcagcgctcaggtgagaagtccttagcacgtgtctggtggtgttgggggacagcctctggggacacttccgggggcaggcatgtttgtggatgagattcacggatgggctgcagggcccatgaacagcccgaggctgaatgggacctggtggggtagcctgggaaaacccaaagacaggactggagggagggtcccggctttgggatttgcttgtactttctccccctcggcatgtgaaatgcacctctctgagcctcagatttttcatctctgctatggggacagtgacaactggatctccctcttagggttgccctgagtggggagtgtgcctggcggcgtggttgaggtgcagggagcggaccagtgtgcatggggcagagtgagggggagggcatgagagaggagggtggaggcaaacagggcaggggcgaggggtgaggcagagccagcagggccatgtgggcccactggggactttggctttgatctaagggagacagaagtccctggagggtgttgagcagaggaggaagtgatgggacttaggtctgggcaggatctctggcccctggggcaggcatgggtaccagggtgagggaggcttcaggagatgctgcagagctgggtgctgggatcctgggcagaggctgctgggatgggcaggagcacgtgggctggggctgaaggcacacggccccaccctctcttttcccccaacaatcgccagttcagatgggaaggagagagaggagtggaaccaaaggagtggctccagatgggaggggccgtgcccatcttggctgcctg

SEQ ID NO: 6436 - DNA, 989 bp, Artificial sequence
  DNA replication origin
ctcttgctctctgtgaatggagaaggaggagcgggacgtgtgtatagctcctaactggtgtcactgggaggaagcagagaccccgcccactgcctgtctgggccccactcctggccctccggagtctctgagactcccttcactcttcagtcctgccacagcagctgtgggtctcccggagctggtctcacaggggcccgggccctttctcccacaccaggaccaaaagagaagctggggctgcccaaggaaagtcctcagcagcttggggaggcggcaccagggcaggtcccaagtccctgctttcatgggaagcagtgacacgttggtcagcacatgcctcacaacaccaccctggggaatggcttcctttttcccttcagcgtcacccctggtgaccacgcaggggacaggaggatgctgagagggagcacgtcgtccttccgtggggcatccccctgggttgcatccaggcagccgccttggccgggaagccgggatgggaaggctgggattttgtttcagaagtccctggttctgtgtccacctggcttccccttagtggagacacagccaaggcctgtgagggagagcattgcctttagggaaagcagagtggcagcacagtcctcagcccacggtctaggtcaagcacagcttccaaacttgaatgtgtacaccaggagtctgggaatcttgctacaatgcagatgctgagccagtgggtctggggtgggctggagtctgcatctctagccagctcctaggacacccgctgctgctgggcccggaccccagggtgagcagtgaggctgtggggagtcttggtgtgagcaggagctgtgggtgggttcccttcaagatggagcagccggacccatttttgtgcatctgattcactccctagtcttttgggaaggagaatgctggagtctcctcccctcacaggagactcacagggacgggggcatcacatggcctgctcacat

SEQ ID NO: 6437 - DNA, 1716 bp, Artificial sequence
  DNA replication origin
ccgacccgggccccggccccggcccgcagccgctcggcgccatcccggagctcggcggccgccgcgacaagtaagcggggcccggggcggcgggcgtgtcggggacgtgggaacttcttggggtccgcggcttccctcggggcttggcggggaggtgggcgggtgcgggagggcgcgtggccggcccgggagcgcccacacccgccgccagacccccaggggctccctgggattctctggcggggtcgccgcccagatccggagctcgatctcgggtggggactgggttccctggaaaagggctccagggagctgctcagcgctcccgccggcctggctctgcgctgcggcgcggactcagggttggcgacccccggggctcggacgagccgggcggaggtctgtccggggagcggacctaggtctcggagcagcagggcgagaacttccgacccagagatcccgagaccggtagggaggggtcgcgggccgcgcggatcccgccctggagcgggcctgggtcgcttgcgggttgcggtgtccctggaatggactctgcgctgtgtccagtccgggacgcgcagagccctcttctgtggacgcctctgtctcttacttcaaggctggggttaattcccgactgcctcgccctgggattacccggggctatttcggacccaggattaagtgagggatggggagaggtacagggcggggctgtccagcagccctggaccccagcgtccctaccggctcgcagcccgccagccgggttcccgtttgcctcccatgagtgtcggtgtcgaaacccggagcagcctcaccgtgtggaccttcgggcgcccatctggggcaggacaagggggctgggaggcttcggtgtctctggggcggggtttctgctgctctgtgccctctgcctgcccctctgcctctctgtcttcgggatcacccggggcccactatggcttggcctggggaagactagaaatcactgtgtggttgggggagtggccgtggtcagggcttcaggacagtcttcctgctgggcggcccttccagggtggaaatgggggaggagttagctgtggccccagaaggtggggtggttcctgattcccaggagtcccagtactgtcatggaaacccgagtttcccaccccaggggggctgcagcgactgtggccatgggacaggccctgtctgctgccctgcctggagggtgtgctggctctgggcggtgcgggtggggctggggggctctttggaggaggagcattgtgaggatggggtcgggctgtgggtgaacacatacatggctctgtgcgtggcaggcgtgggtgtcaggctcttgctctctgtgaatggagaaggaggagcgggacgtgtgtatagctcctaactggtgtcactgggaggaagcagagaccccgcccactgcctgtctgggccccactcctggccctccggagtctctgagactcccttcactcttcagtcctgccacagcagctgtgggtctcccggagctggtctcacaggggcccgggccctttctcccacaccaggaccaaaagagaagctggggctgcccaaggaaagtcctcagcagcttggggaggcggcaccagggcaggtcccaagtccctgctttcatgggaagcagtgacacgttggtcagcacatgcctcacaacaccaccctggggaatggctt

SEQ ID NO: 6438 - DNA, 908 bp, Artificial sequence
  DNA replication origin
gcccccgcgcctcctgctccccgcgccgccgcgctccgccgcccgctgccccgcggacgcgccggggcggcagggcgcggagctgcggccgcagcgggcaggcgaggagttttgcaaagtgccggccgcggcgcgggaagagggcggggagggcgccgcctgctgggaccgcccctgggtcccgcgcccccgcaccaggcgtcgggggacagctccatccttctccggccgcctcgggcgccttaaatcggaagcgattccgtgaaatacatctcgaatccatcagcggacgattttaggaaaagtgtaaataaaaaatcaacacactcacgagaacattggcatttcttattgatctgagtctaccaaaacactgggtatgggcagggtgcggaggctcacgcctctaatcccagcactttgggaggccgaggcaggaggatcgcttgagcccaggagtttgaaaccagcctgggcaaaagagcgagaccctggctctacaaaaataccaataaaataataaaataaaacactgggaatgttttgtacttgtagaagcaagacgtttccccggccgtcccttcccagttgcaaccagaaggtggccctgaagcctccatggttctatttgctgagctgccaaggctcaggggcccaacccaccactcacacttgcggtggggaactgataatctgtggagggaagccccgcctctgctcggcgttgagatctgcagcaatttgttttaccccttggagcctacctttcctcagccaaaatattttccatttgttgattattttcttaatctttgtaattttcataccccaagtttctttggggctaaactcacttttctatctccttgacttgagctggcttatttctacagttccattttctagca

SEQ ID NO: 6439 - DNA, 1618 bp, Artificial sequence
  DNA replication origin
gtctgggactggccacttgctgactctgacatggggacaagctcccttttttttccaggcttcagtctccccatgttcaagagggtgtgatgaggacaggcagccttgtagggtggattccagctcccatgggcttgggtctggcaaccccggagtgggcacttcctgggagccggtgcttccctgtcacctgcaaggctaagactccctgtgcaagtcaccctttgagtctggaggcgacaaaacctgctgtctcttccattcatctccagttgagaatgaatcagtggggcaagtctggctgagatccaaatgcatctcatttttagaggcagcatgtgctttatggaacctagcagtttaacctaattgtttgcatatttagtgctgcggctctgcagtttgggcgagccagttgcagacagaggcatcctgtgacaatacagctgtgctctcctggaaagagcctctggtcaggggatggggtggcatggacaaaggtgtgtagggttcaagggcagagcctcgggggctggaacagagggtgtgggagaagcatggtctggctttgtgatcagatcagaaaatgcaccagattccaggcagtttggtgcaggttgagggtggggcatctacagctagacggtctaggtcaaatcccagcttggccactgcgaggctatgactgagcaatcattgagtctcgctatgtcccgattttcttgcctgtataatggggatgatagcgttgtgaggatttagtgagttagcacgtcagaagcccctagggtggtgctcagctcatagccagtgctcagcagaaattagctgctgctgctgctgctgttccagggtgaaggggtagaagcttatgccacactcagtggagttttttaaacagtgctatagaccaaggctgtgtttgcagaggttacctggcacctggaggagctcgagagagcagtcgctacagggtaactggccagagactgaggccaggccctcagctgggatcactgggtgtggcagaatctaaaggcaggtttgggagagacgggagggagggaggcacatcagagctccatgagcatccagaagtgaggctggaggggaggaagggcttgggatgaccaggctgctactggtcctttgctgagaggggcacacagaggtaggtaggcctgcagggaggtgaggagcctgggccggggagctagagatgtcacagctctcccaggtgaggcaggaggcacacctgggtgggtgcggcaggagcactgtgaggaaggctggacagggtgggggcctcagcccagaagtggcctctgaagccctgggagtgggtgggagtgcacgggcactccaggagtgcaggcaggagaggggccaggaagccttgggcactctctgagggtggacagggaggaaggggagaggagggccagcgttggggggtcccaggctagagagtgggacacagcctctgtcagtccctggaggtggatggtggtaagccctgagcggaggcaccgtgagtttgacagtgatgcctggtcacctacagctctgcatgggccacatccctgggagctgcaggggcttcaatcgcatccctgct

SEQ ID NO: 6440 - DNA, 1715 bp, Artificial sequence
  DNA replication origin
tccgccgctgcggccaagctcaacatccccaaagtgctgctgcccttcacgcgggccacgcgcgttaacttcacgctggaggcctcggagggctgctaccgctggtgaggcgcgcggccgggccgggcgggcgccgtgggccgggctgggccttcgcgctgagaggctgggcgggcgccgggaggccggcagagccggcaggtgcgcggcgcgctctcgctgggcgctaggctgcagcactcggagcggcgggtgcgcgtgggtcgccaccactgctcatgtcatggcgccgtccgggcctccgcgccgctgaggcgcgagcagagcgggcgcagcctggcggccgtgacccgcgtgttctgggttgtgcgggaggaggggtggcctggggagcggcgtctgggaccgcagggcccaagccggccgggcccgagccggcctgacccgggagggggcgccggggcagctgggccgcacttcccttgagtctgggaccccagctcgggtttgtctgtgaccgccctcgccctggcgtgggaagtgagtctgtgaaacgaagcgcagcgcctagcgtcgcggggaggaacggagaccctggaggaaaggagttttggagggaagcccaggggccgctttacagaggcgaagtgagacgaggcaggccggcgcttcccctcaggctgcctcggcgcgggtcctgatgctcagggcatttccatcaccctccctctcgggttgggagttctccaaggggtcggatgcggagtgtgaccctgtggaaccacagggacccatgaaaccagagaccgacactgacagggcggtgcagtccagcccttccattttgcagaccaggggaaatggagctcctgcccctggcaaggctgcgtgggcacgactgagcgcccttagcttcccagcccagccgtcctaggggtgaaaagatgggcttccgcccttcccacccccaggatgctcagtagttgctccctttatttctgtttcaagactgggtcaaggttgaggcagaacggggtgtgaccacgtgacagccatgtgtgtaagcctggacatgtgtgtgtcaagcctgtttgagtattagtctgtgcgtgtatgtaagtgtgatgcccgaagctcagaccagccagctttctctgttgcttgcactatttgccctatttctttctttctttttttttttttttttttttttttgagacggagttttgctttgtcgtccatgctgacgtgcagtggtgcgatttcggctcactgcaacctccacctcccgggttcaagcgattctcccgcctcgtagctgggattacaggtgcaggccacctggctaattttgtttgtttgtttgtttgtttttagagtgcactccagcccttgttgcccaggctggagtgcaatggcgcgatctctgtccactgcaacttccgcctccccggttcaagcgattctcctgcctcagcctcccgagtagctgggattacaggcgcccgccacaacacccagctagttttttgcattttagtagagacggggtttcactatgttggccaggctggtctcaaactctggattcactgtgttggccaggctggtcttgaactcctcaagaccaaggagaactcctcaagcgatccacctgcctcagcttcccaaaatgctgagattacaggcgtgagccaccatgcctggcttgtctg

SEQ ID NO: 6441 - DNA, 1741 bp, Artificial sequence
  DNA replication origin
cgaggcctccagcgtgaagttaacgcgcgtggcccgcgtgaagggcagcagcactttggggatgttgagcttggccgcagcggcggaggggcccgccgccaacagcaccgacagcgtcagcagcagcagcccccggccccgcgccgccatcctcgccgcgcgtcacctcccgcgaccctgcgcccggccgcccgcgccgccccgttgccctccgctcccgcccgcgcgcgcgccaggccagcaggtgatgagcgcgggggcggggcgagggccgtcggcggccgccgcttcctgggcctgagcgcgggaactctgggggccgagctcgcggcgaccccacccccagcccggccctcgcgcagggacgcggggctgggggatgggcgcgcgcccgggcccccggagctgagggagaaggcttggggcgcgcccgcggggacccctggaccctagaagtcccaagggggagcccccggggcgccccgcagcacgcatcccgccctggtatttgcccctggcggtggagccaagccgccggctttggaccttgcgctctggcccggacccacggtcagcaaggaagggacacatgccccaggacatttgggatgcagaaaaccggcgcctgccttgtcccagcccatgcttcccagaagagggaccccgggctcgcaaagggaagccacctgctgaagcgctgaaggcccggggcccgctccccctcgaccccctcacaccctttccagagaggccttaagattcccatttctccaggaaaaaaccggttgaatggcccccagatcactcagccagagagccccaagctcttgtcctccgcactgcaccccctgcggaagccattagaggttacctataggtcatttagggcgccaacgctgccagagcacaaccccctccacggcccccacacccacaaaagaaagtttagcaccgcggaatccacctgcacaccaatggaaggccttagattccgcgctgtgctctgtggcttttagctgtctgtcgtgaattgcatgaaggcatgcgtcagcaggcacctgactgcttggtgccgctaaaatatgaatctagccttgcagagaaggcccagcctagcgggaggtcaggaaagggtggggtgagggtgcactggccggctgtctgaggagtgcaggaagtggatgctgactgtaaccaggaagacacacaacgatgccactgggtgaccaggaaggagaggataaatgtcagtaaggctaggaaggctttttggaggcggcggcccctgggttgggcatagacaccgcactgggcttcagcgaggcccgcataggctgagcctgcccctcagggatcatggggcttttggatggtgatgcggggtgtttggggtcaccctcgaagcctgagggccctagaccagggaatgtgtgtgttgggggaaatctctggagataaccagaactaagggggtgagggtcggccctgtgtggaaccaggtgctctgggaggggaattccaacgggctccctttgaagaaacaaaaaacagacttgcgcggaaaaggcagcctcagagggtatttgtgaggaagtctgtgggtgtcttctgggttgcacaagattgatttgttttccaacaggtaatccagacagatggttgaaacttaggctcaaaagggttccaagtgaaagtgattcctctccctccccatcacccaatacccttccctacaggcaat

SEQ ID NO: 6442 - DNA, 988 bp, Artificial sequence
  DNA replication origin
gggctccgcgggggcggctgtgtgccagggcggggcacaagggaagcgcacagacgtttgaagaggggcccccgtgtgcctgccatgattgcatgatggcatctgagcctcacaacctaatcctgagaaaggtgccataatcaccccaactttatcttgagggaactgaggttcgggcctggattaaacccaaactcggccacccgccagcatagtggctttgggcaggttgcttcagccttctggtccttcatgtctgcatctgaaaatgaagtactgggccgggtgcggtggctcacgcctgtaatcccagcactttgggaggccgaggcgggtgaatcacctgaggtcaggagttcgagaccatcctgaccaacatggtgaaaccccgtctctactaaaaatacaaaaaattagctgggcgtgatgaagggcgcctgtaatcccagctactcgggaggctggggcaggagaatcgcttgaaccggggaggggaggttgcggtgaggccgcgccattgcaatccagcctgggcgacaagagtgagactccatctcaaaaaaaaaaaaaaggaagaaaatgaagttctggttgcacttcattctctggatttcatgggcaagtccagggaatcaagagacaataatgttgattattattcagagaccatctgtcatgtgctaagttgaagtccaaatgctttttgcttgtcgaactcttctgacagtcctaggaggcaaactattgtcatccccattttatagataaagaaattgaggcacagaatggtgaagtaactcactcaaaggtcagggatgtgggcagatgtaaaccacagaaggaataagtactattttataaagtgacagagtgcatgcagtggccctgtggcatttgtgagagaccgacttcccctcagggaacttgctctgtagtttgggaagccacacagatgatcctctggttgggagaatgaggatctgggcag

SEQ ID NO: 6443 - DNA, 1516 bp, Artificial sequence
  DNA replication origin
cttcccatcacaccctggcagtcgtcacccagagacagaaatccgccccagtggctgcctccgtgggggcgtccgcgtagccagggggctgggcagcgcagacgtcagacccgcgcacatcgcccgaccgctccgggtccgggcccaggcccgcggccggcgcgcgtccctcgggccaccgagcaggggcgcggggctggcctggcgcgccgggagggcctggaaacacccgtcccgagcgtccctcacccctcaccagcaaatctgggcccttacctggcgcgcccgcccggccgtccccgccctcgccctagcgcgcccgcccaccgggacccctgggagcccacccccgccctcgccccgcggcactcacatcccggggccggccctcccaaagctggccgcagctccgcgaccgggcggggcggggcggggcgcgggtggggccagcccaggacacgcccccgggcttagccgcgtcctctgggggcagagctctggccgatttggcccgccccgccagtgttgcgacacagagagcctgcccgcaggaaggccacccccaacgcccatcaagcccgaagtcccgcctccgcaggcaaatacccggtggaatcccgcctggttcggaagctccgccccctggcgggagggccaagcgggtttcaccccggcctcgcggaaggggcgcgaccaccgtatgtcctgttcctgcgcttcccaagctgggtagaaacggcgagaggctgggggttagaaacgacaggttcccggcgggctgtgccggggcttcgctgtgtgaccttgggctggcgtctgggctctctgggcccttgtttccgcgagttaaacgtaggggcgggggagtttctctggccctgccgcctgtgacctaaggagccccgtgacctctccgacccgagcccacccccggcccagtctgcgagcagctccgggacaagcactcccggcgaagacatgtaggctctcagagcctgcgtttccctctgtagagcaggcctagttactgtcttcagggtgcacgcgtctccgtccccgacccgcaccctcaccgccggggtaagctgagccaggcccaagcgacagctggggttgtccgtggggctgcaacccaggaggaggccccaacaatagagccccagaggacggagacaatgggcctctctgtcggcccagccgtccccgccatccaaacagaagcagctgacggaggactgccgggctgggatccctgggctccgcgggggcggctgtgtgccagggcggggcacaagggaagcgcacagacgtttgaagaggggcccccgtgtgcctgccatgattgcatgatggcatctgagcctcacaacctaatcctgagaaaggtgccataatcaccccaactttatcttgagggaactgaggttcgggcctggattaaacccaaactcggccacccgccagcatagtggctttgggcaggttgcttcagccttctggtccttcatgtctgcat

SEQ ID NO: 6444 - DNA, 1687 bp, Artificial sequence
  DNA replication origin
tgttttcattgcatttacttttttaccatgacctatttatggcaagtgaaactgccttttcccattttgatgacataatgtttccttttaaaacaagtttaagtgaatttcccacctaaatcaggccccttgattacaaaccacagttaaaacgatatgctcttcgaagcatcattttgctcaaggggatgagccctaaaggtagggcgcctggagctctgagttccaaacccaactccgcctcttgtaactgtgttacttcagccactaatgggagctgtgtccttccctggaaagaggtcacaagcaggcagccagtgtgcccagttcggtctacaggtgggcttttacaatcttataatgagtgccatattaagaaatcagggccgggtgtggtggctcacgcctgtaattccagctacttgggaggctgaggcagaaaaattgtttgaacctgaaaggcggaggttacagtgagctcctgagcctctgctgcgattgtggtgcctaccccgagggctgctgtgaggactggactggaattgggtgcacatgtttcctaatcattctaggacacaatttcccccatctgtaatcaagagaggtgcggtggaggtgctctacctcctgactctctgaaccttaggaaatggactcctccaagcttcaccttccctgtgcccatcagtaatcagctacctttccactaggcctcttgggcagaggcaggacttaggcccacaggatggggagccagggagagtctgagtcagggacatcatatcgtgattaggagtctgtgttggaaaaatcattttgggcggaagcatgggtggaaggccatccgagggctgaaactgaagatgggagagagcctgaggcttatgttggggatgaggacggagaggacaggtgggttggaggaagcagatgagagtccaagggggaccttccataccttttaggaaattgatcactttgccccattttccggcatcaaagggatgcagcttctccaggcccatgaaggtgatgttgtagcgcggcgagtacacgattggccagcgtgtctctggcacatgctggtacagctgggttgtgtgtagcctaccgtgtggaaaaagacagacgcacagctggggcagcctcggcagaaagcagctccctcccgagcccgcctggactgacccaccagccattgcccagcaccactagcccctcagccgcagacaagggcccctcaacaacagctgcttaaactggctgcctttcccggaacccaattccaatccagtcctcacagcagccctgggggtaggcaccacaatcgcaccagaggctcagagagcagaccaggtgtgcccaaggtcacagtgcaggtctgtggagaagcaggcgtgcactcaggtgtgtctggctgcaaggcctccgcgcatcacctctgcaccgtaataaatgcccccacagctgtgtggcacaaggcttcggctgcaaaatgtgtggctgttgtgaggactcagagaatgcaactgaggagctgagcacagtaagcactcagaaacccaagtcgggacccaacctgagccagggcggggggcggggatcccctgaccccgctgcgctgctaacccttcccatcacaccctggcagtcgtcacccagagacagaaatccgccccagtggctg

SEQ ID NO: 6445 - DNA, 1417 bp, Artificial sequence
  DNA replication origin
caatgagtcactgacagagctgggacgggagccctggcctctggctccctcgcactgcattgcctctttgtccattgggaatcggaccttcctggcaaaagggatgcactgccctcatctccagctgctgaggctgggggggtctacggtacctgaaaggtatctgcactaagatcaggacagagtgtgccctgtgacctccaagtgcaccaggtaaatatccatggcactggctgcccagctgaacccaaaccccaagccatctcctggctgaaaacgcatccctgctccccacccacgcgaggcagagccactcactttgtaaatatttactaagtgcctgctaggtgccccaggtgggcactggagggcccattctcatgccaggacacttgcagacacttatttgcagtgtgatgagtgtggtgatgaagaggagaactgggtgggggttattagagaggctttctgggggtgatggcatttgcaggaggtgaagagtgaataggagttatccagatgcagaggtcaagggaaaaaggtatctgtgggcagagaagtgagtccatgatctagagaaggtgggtgcagctggaacagggcaggctgagcttatcacacagggcctggtctcctagcacaggctcacacattgtcgtcagggcagtagggaaccatagatggtgctgtcccaagctgcactagctgcagcaaggagaaccaattaggggaacaggaatagagaagtagcagccctagagaggaagcatgagataagaagggtctggggtggtaagaggagcaggtattagcaggcagcatgcagggacaaggggtagagggcccaggtgtcgggtctggggcctgtgagggtaatggcacttggaggtgaacctgaagcagggtacagaggcggcactaggttctgctctctatgggccaagtcagcccctggggcagccaggtgagacagctgaggtttaagtgagactggagctcagaacaggggtgggagagtgggaggtgaagggctgggttgggactgcaggcttcccatgctgaagggcaaggcccagagagagaacccctggggacgatcaagggcttccctgggacagggtgagatgtggaaagacctaaggtgcagtgctcaggaggccaggtggagagagggtggctggaaggagcaggtggagggaggcaccaagctgcagacattccatgagaggaaagtgggaagtgtggccattgcgttcaccaaccaggaggaggagttttaggatgggagaaacacgagcatgttcaatgacagacagcaggcagcaggcagggagagggtggccagggatgggtgtgatggcagaggggtgacgaacctcagagggccaagaggtgctgtagccaggccactcagggc

SEQ ID NO: 6446 - DNA, 1610 bp, Artificial sequence
  DNA replication origin
actctgagatccctacccttgccgttggtctctgtcgctgactcgaggcacctaacatccattcacacccaacacaggccagcgacttctggggctcagccacagacatggtttgtcactgttgagcttctgttcctagagaatcctagaggcttgattggcccaggctgctgtgtgtgctggaggcaaagaatccctacctcctaggggtgaaaggaaatgaaaatggaaagttcttgtagcgcaaggcctgacatgggtagctgctcaataaatgctagtgtgttatttcatcttctgagtcctgtggagttggtaatgattcccatttcacagatgaggaaactgaggcttggcaggggtgagaaatttgccccaggccacacctcccagcagatctcaacagtggtagagccaggcttgaatccagctctgccagatcccaaagtaaaagttctcagctgcctcacacttggcaggggggtggggtgggggtggggggttactctggacagagaagggtctaggatcccagggtgataaggtcactgggctggggtctgggacagcctgggaatgggtgggcaggcacagctgggctgtgatggtggctctgctgcacagtgggagggggccctggcagggcagtgggtggatggggtgtcttccaggcctggggtgcttttggagcgcttatggggatgggctgccccgagatgaggctgggctggggtggggtatccaggcagggggaaaggcagagccttggccgggcagagtgaccagagcatccccagtatcagtggcacagcctggatggggggcagggtggccccttgaggttcagacagggtgtcagggaaaaggacatggggtagcaggcaggggtcccgattggccctgtgctgggtgggaggagactgataaaggctgatgctgaccaggtggtactaagggccaggccctatccagactctagctgggaactgcatatggaacttcatggcactctgaggtgagaactgtttccatgcctacttcacagatgtagaagcagaggcaggaaaggggttagttatttgctgagcaccgcagcccctaagtggaggagtgaggactggagcccaggccccagctccagaacctgtgagctgtttcttccttaaagatgctcgtggaagaggttgtcctgggaataagagcctcagtacctggaaggcactcaggacactgggtggctttctgctgctcccagtaactgtcagggtgagggggaggaatgtcctgtaggtcaggcggaagaactgaggccagatgaagtgtttggacctgtttgcaggatctgtgcattttgctgtatgtaaattacaccacaagttacatcaatcccagtggagcaggtcagcttcatgaagtggctgagaggtggcacagcagccctgacgccccagtggctgctggcagccctggataagagcagggacaggctgaggacgactggccatcagactcatgatctggggagaccttgggaggcatgaccttgcaccatgcctggccagtgagccagctgaggcttggggagagggatttcatcttgggagacacag

SEQ ID NO: 6447 - DNA, 873 bp, Artificial sequence
  DNA replication origin
gggcaaggaccatgtctgaatcaggcctcagcccccatgcccaagccagagcctggcacaaagtgggaaaaattgaataaataaatggataaagggagggatggaggaagggaaggatgagaagagatgggtggctggaggaagggaagaatggatggatacagggagagagggctggatagagagagggatagaaggatggatgggtgcaggaatggaaggagggagagaagaataggtagatgaagggagagagggagaaatggatggatgatgggttgaaagaaggaaggatggctcaatggaaggagggcaggagggatggagggaaaagggtatggatggttggatggacggatggatggatggatggagaaagagatgaatagaggaaggaaggggaggacagagggagatatagaaggatggatggatgcggaaacagagagacggagagataggtggagggatgggataagagggatttccttaccccactgtgtggtgaggcccttggggaggcaatgaggtcttcatctgacccaggggtcctccttggagcacagaggtggctgcacagcaggagctgcgtggagtgaggagtagctggagcaggggtgagctggaagtgtcattgggagtggagagagtagcctaagtgatggtggtgaccagcctagggaggggctggggtccagggaggagtggccagggcatcaaggatgaaaagacgggggtcatggggactggagctgtgcttgggggttctaacagagagaggggaagggaacatgtgggatttagggaaatgtccagatatcggtggaaaaagccagaggataaggcaaaaccttggggacaggagagtgaagc

SEQ ID NO: 6448 - DNA, 1354 bp, Artificial sequence
  DNA replication origin
aaccccgatctgggccacaaaagcattttgtttgccaggatactttaaaactcacgacagttcaagaatctgtatttcttgctttctgtattgaaaagccagcgggtctggtttggcctgcattcccacagctggagccacgtcgtggccccttagccagggcctggcctgccgctccctgcccttccctgtactcctccatgctgagcggagggccaaatactgctggccctcctggactcgttctccctctctcggagaccctgtgagcaatggagcttgtaagcctttagctgaggctgggggagtggaggacatcatcttcccatttttacagctgagaaaactgaggcagaaaggttaaggaagtggctgaatcaggacttgaacccaggactctcaggctacaagcagacaccaaatgaaaacctgactgtggaagttgggactggatgctcagagagaaatgtactgactcatccacaggccctcacctgcatcccaaactgctctctagtttgcatcccagactgtggccaggaagggccttctggaggcatgcacctgcctacattattcccctgcccagaagccttcctgggcccccaccaccttcaggatggagtctgaatgcgtcagcctggccttcaaggtccctgtgagcaagctcagctgctctgcctccccatttactaacatctgcccctccagccagaccacatcattcacacctctgcctttgcagatactcttctctctgtcttgatgccttgcactcactctttctcctggtaaactcctactcaccctacagagcccggtttaggcattgctctctgccctgggctttctccattggatgtattcctactacccttctctcatgagactgagctctgcaagggcaaggaccatgtctgaatcaggcctcagcccccatgcccaagccagagcctggcacaaagtgggaaaaattgaataaataaatggataaagggagggatggaggaagggaaggatgagaagagatgggtggctggaggaagggaagaatggatggatacagggagagagggctggatagagagagggatagaaggatggatgggtgcaggaatggaaggagggagagaagaataggtagatgaagggagagagggagaaatggatggatgatgggttgaaagaaggaaggatggctcaatggaaggagggcaggagggatggagggaaaagggtatggatggttggatggacggatggatggatggatggagaaagagatgaatagaggaaggaaggggaggacagagggagatatagaaggatggatggatgcggaaacagagagacg

SEQ ID NO: 6449 - DNA, 1426 bp, Artificial sequence
  DNA replication origin
ggcgcgtccgagggtccgccgagccgtcggtgcgtccgagcgcccccgagtcctgagctgcgaggcgcggaccgacggggatgagtccgggcgggaggggccgcgtgcactcaccgcggggcactgcgctcggcgtccgtccgtccgtccgcccggccgtcggcgcgtcgagagcccgggcggcccctggctgtgtgcgcgcggggcggggcggaggcgcgagaggcgggaccagccggcccccggccccctcccctgactccgcctccgcctccggggcggggtctcggccgcccgccggagagggggccgggccggcgccgctcgctcagagcccagactcgctgacccggctcctagaggccgcccggcgcgctcgctgcggagcccgcaccctccctgcgcccggcctaacctctgagtgccagacctggcactgctgcccacagggcagggccaggggttggggtccggccacctcagccagcctgagcctcagtgatcacccctggaagatgggcccagcagccttgggcacattgtgagggcctgaggggcccggctacaaaactgcccagaggccaggccctgcctcccacccgccttgcttcctaccctgggggcctgcctgcagccccactgctgctgcatgtgcctgggcagacggtactgagcccccagctttggaacaggttcagtttgtccttttcctcagcccagctctgatgcctgtgaccactgtgtgacccccggggtgtctcttcccccagcccacaccgatccctttctgggtctctttcggggtctccatctctgatctaatgtcatctctctgtctcccttggtttgtccctcttggtctctgcatctccctctgactttatctcttggtctctgtgtctctctgagtctctcccatccctgtccagagacgtatggcctggtggtcaccacctcacatctgagcagcagccatgggcccaaagtgtgcctgcccccacccccaggggtctccctgcagcccaggacaggggtgaggcagccaagagcaaaggcacagggcagggcagctgcctgcccagggccgcacagcagagaggaggtggagccaggaagggcccattggcttagatggggccacccacagagaagccaggagcggatggaggggccaaagcctgagctggcagcctgtgcctggcctgccccaacttgtgtctaaccccaggcaggtgccttccctctgggcccgtttccccattggagctctgtgcttgctgttccctcagggcctttgccattgctgttccctctgcctgggatgctcttccccagatccaccgtggctgactcatccctgcattaagatgcagctgaaatcccaccacccccagagaagccctccctgagaccccagcagaggtag

SEQ ID NO: 6450 - DNA, 1101 bp, Artificial sequence
  DNA replication origin
tctcagctgccacccaattcatcagggctccctctgggagggcccggaccagcatctcaggggcatcagggtagacacaagcacccaaaccatcctgtttgacttccctttttctctttttggcctgtcaggggacgcctgctggctcaggcctgcttgggactggcccaagtgatcactgcaaagctgatatgggcaactccttgtggcagcaaaaaagggagggagggcacccctatttcggagactggagcaggggaagggagagaggatgcacggaggtgaggagtcaggcccagcctgaggctgagccacccccatgctccccacagccacccaggtcccatggtaagcagcctctgtcaggaggaaccacctccctcctccaaaatcggctccccaccccctaggacaggggaggactgcccatggagtgccaggggggctgggactgtgaagtcgtgggggtctgtgactcgtatgtgagactcacagtgtgtggcactcccagtgtttgtgattccaggtatttgaggagcacacgcatgtgagagacacatgtgtgatacatatgatggagatatgcatgtgatagctacccctgtgtggcggacgtgtgtgcgtgtcagagggcagtaagggcacatgtgtttatcagagacacaactgtctgctagaggcatgcctcggaggggtgccaatgtgcaaggcatgtgtgtgtggagcattgtgtgctaaggggacgtgagatgagtgtgagagattctggcctgggggagctggcggggtgagcatggggctgggagagggaggatgtggtgacaggcagggtgggcgcgccaatgcagagcgtgcagaaacttctgcttgtgtgagtgcgtgtgtggcggtgagtgtgacttgggggtgatggagggggtagtgttagaccagggactctagtcttctttccccgagggggttgacccggccctctggactggaggggcggcaaggtcctgcggtcggggtgggggtgggcagtgggaccagaggggatgactggtgggagccggcccaggggggagaagtgaaacccagagcggaggaagctgcggacct

SEQ ID NO: 6451 - DNA, 1049 bp, Artificial sequence
  DNA replication origin
ctatgtgagggagtttcatagactccctgcagtccactcacagacccctggctgaagtcctgtggcccaaggataaagaaaaaactcctaacggagacattcaaagcccttcaccaactaaccccacctagctttcctaacccatccccctctgttgtcctccacaaacccaactcctgctaaactggaaaactctctctagttcccaaccccttatctttctctcatcattagctcaacctgcgatgccctctctcctgaaactctcctagaaccctgaacacccaaatcccaccccatgctttaaagccaagccctgagggtgggataagtaggtagatggatgaatgggtaggtaggtgggtgggtgggtgggtgggtgggtggatgggtggatggatggatggatggatggacgagtgaatggatgggtggctaaaaaagtaggtaggtgggtggatgggtgggtaagtgaacagatgggtgggtgggcgggtggatggatgggtgtgtgggtatatggatgggtgggtgagtggagaggggtagattaattaatccgtatggcccgagcacagggctggcagagaggatgggatgaattatgaatgtgagtatcccagaagggccttcagaaacagaaaaggcttccctgaagtcacctggctagtcactggctaagtgacctaaacaaccaaggtacgtgtccacctttcatacagaggcactttcactcctgcgtccgccttttagtctcacaaagggctgagatcctagacttgggtggcggggtggggggagtggtgccagcaaaagacaggcagagagagacacagagactgacagagacaaggaaagagatccattagtgagacagaaagagaccaagacagagatggagagaagcacagaccgaaagccaagcagacagccagagacagacagcgatggagacaggcaggcggggccggcctacggcagaaccaggctcccttggccaccacagcatctggaaggaggcagcagccaggggagcgggcagcccagtc

SEQ ID NO: 6452 - DNA, 1342 bp, Artificial sequence
  DNA replication origin
caggcgctcctggacttctgtcttctgtccgctgcatcctatccatcagcaaatcctgtgggtcctaccttcaaaatagatcccctgtgccaccatctcctgcctctcttcgctcactgccctgggctctctcacctgctccctgctggctcccgtgtctcagcgcagtgggcagctgggtgggtcccttgcactggagagtcccaggctccagcgcttacaggcacgcccagaggccctcacagcaggctggaagcccgttgctctgcagttaccacccgtgtgctgatgtggctcagccctgggggccctctctgtccttcacctttctgctgctggtccggcctcagccccttggccctgccactccctgcctgacgccctcctcagagaagccctcctcttccgccggactgacacgggctcccctgacactgccacgtcctccttccgtctccttgattcccttcatttatttcatcatggggctcatgcctgcctggcgttcagttctctacagatttgctcttgggtttattatctgcccctccacccctgagggtgtcagtgctgtgaggacgctgggaacctgtcttgctggctgataaacccctggttcctagaggggctgggtgcagaggaggcgttcctttagaaatggggcaggcttggggaccactgctgtggtaacgagtcctgctgtccctctgtcactgccctatggggctgcgctttaggctgggagtcggagaaggagctcttgcctgtgactttggggagcacgctgtctataagagtcaggtacggccactgggtcacaagtggggctacaggcactggggacttgggccagggtggaggagggaggaggcatgaggactggtgagaaggtggcatttgagtggcttgtgcaagatgagaggggagaagagcccttgggggagttcaggcctaagggcctgtgggagggtcgggttgggatggctcctgcagggccttgagtgccaggctcagctgggaatccagacctttcctttctggccatgggaaactggggcgggctgtggggccgtggcatgtcggggccagctgctctcaggccagactgggttccctgggaaaggggaggagtggtgggcagggaggtggcggggctgttccagtggagatcagagctgagactggagtggggacagggcctagagatggaaggaaggggtagagaccgtggggagggagtggagacagattgcggggagaatggacatgactgggggagttggtggggtgttagggacagcaaggcatcaggatgcatttgccagtgctactggggaggggg

SEQ ID NO: 6453 - DNA, 1039 bp, Artificial sequence
  DNA replication origin
gtgcaagatgagaggggagaagagcccttgggggagttcaggcctaagggcctgtgggagggtcgggttgggatggctcctgcagggccttgagtgccaggctcagctgggaatccagacctttcctttctggccatgggaaactggggcgggctgtggggccgtggcatgtcggggccagctgctctcaggccagactgggttccctgggaaaggggaggagtggtgggcagggaggtggcggggctgttccagtggagatcagagctgagactggagtggggacagggcctagagatggaaggaaggggtagagaccgtggggagggagtggagacagattgcggggagaatggacatgactgggggagttggtggggtgttagggacagcaaggcatcaggatgcatttgccagtgctactggggagggggacaggagcgtcccctggggctaagcctgcagtcccgagggtctcagaggtgtgttcctgagtcctagggtctgcgggctggggctgtagggggcgtcttgttcttgcctagcatttccccactgactgtattttctggccagcagctgtggtgcgtggctggggactgagtcaaggatctggggggagggattggtcgggtgtgtgcgtgggactgtgcgtgtgagaccgcccagggtgtgtactggcacgtgggcatgctgtgggtgagacagcgtgtgtaactgcatagaggattatggggcatattgcctgacgtgccctggtgagtgtgaccgagtgggtgtggggctgtgcatgtgtgtgtgtgggcacgagggctcactcagaggacctgcctcagaatgcaggtgaggatggaggatggagtggcccagcaaacacgtgtggggctgtcagcgactccaggtcaacacctgtggcgcccagcgactagacactcacctgtgtgtgatctgacccatgtgtggcggagcctgtgtgtgtgtgtgaggcagtgcttagtgtgctcctggggatgagcgcatgcgtgtgaggtggctgagg

SEQ ID NO: 6454 - DNA, 1399 bp, Artificial sequence
  DNA replication origin
gggtgctccaggcgggggaaacagcacgtgcaaaggccccttagccagagggaattgaacttgattgaaaggaagctctgactggtgtgagaagaggctggggaggggccggccggagggagccatatagggcagaaggtggcatgatctgatttgtgtttgaggcgctccccccaggtgcggggctgtcccctctcacactgacggagctctgggcctttccaatgtctgtgggtctgtgaggcccccagattccctaggctgtggcagcacagggttatccacccagattaacctgtttgctagaggactcctgaagcctctcctctccagtgttggcccacgggggtttcaaacctgcgtggggtcttaggagcatcaccccaggtccccatggaagctagaccaggcttctggatctgcaagcccccagctcttgtgacagaatcaccccctgcaggagttcaaggctcctaaagtaagcaggaaggggtcagcctcgtgggggctgtggcccctgcttagcagcagcgccctttgaggacggctcttaggtaggctcagcggaccattccccttctcgccacagctcatggggtcttcaaatggggtgtctgactgtgctgggctatggaggacctgctgggagcaggcatggatgggcaagaagaggcctgggccgcctaccagcctctgcacagccttgggccggtccctatctgaagcctgggtgccctggtcctggctgcctgctctgatgtgcccgatggagtgtattgaactctgtggcaggtggcttggaggatatagggtcaggagtgcaggctccagggccttccaggcccactgctcactggttgtgtgacctgagcctccagcaccaccctcgagccccagttgcctcactggtgaaacagcgtacatagtagtaagcactcggtgctgctggaaggactgatgggaagctgcctgaccagctcggagaggggcctccatggagtgagggtacagctggtgtggccccaccacctccactggcccagcatggccagcgcccctgctcaaatggcccacccacctcgcctctgtccacgagttcacttctttctacaacacatgcttgtgagattaggatttgctgcagacacttagaaatgggaagatgtcacataaaattcagctttctggctgacatttgttgaaaaattggcagaggtggccatgctaggctcctaggccacaggccagccaccggggcagctgagaagagaccgcccttcgcatttcctgccaggacacgtgggggcctaccgggctgaggcaggaaccctcctcagggcccccagctctgaagatgtgcaccttctggacccttgaccactaccgcagccctaccagg

SEQ ID NO: 6455 - DNA, 957 bp, Artificial sequence
  DNA replication origin
gaaggccctgagtctcactccagagagaggcactttatcctgtggggcagtggcttttctgtgggatctgtggagccccaaggctccccaagatgactcagggatgtggaaggccagggcattgtgaggacgaccaggtaagatgatgtgatgagggttgagtaggagttagtttagatatggaagttagggagaccctctctgaggaggagagacccccagaaagagaaggagcctgtcccatagagagtgggggcagcagatggcacagggagaggtggaagattccaggcaggcagcatggcaaatgccaaggccttggggcaggactgagtctgaggagctcctgagtagagagagtgagtgggagagtgagttagagaaaggaggtcaggaggggaagtgggcaggaccccaccgtgtaggactttgtaaggaaagtggagaccacggggggtcataggcgcaggagtgatccaatctgatttgtatttgtggacagtcattctatagccctgtgggtgatgggctggagggtgacagaagtggaagcaaggagggcaggagggggtggtggaggaggaggtggctggtggactgagatgcctttggaggtggccctgtgagtgatagactggagggaggcgggggatgagggattggcctgggagcgtcctgaggatggtagggcctttgttgacacaggaagacccagggagggggtggcttgggaaaatccggagctgagcaaattccagctggggaagtgccagggagacatctggggtggtttcttggccagctgtgggcatgtgcatgtgacatggggggcgggggcaagaggaaggtggcattggaagcttagagatgagatcagccaggccagcgtgtgttggagaagagaagaagccccagggttgagactccaaaagtctggtgctcaggaagttaaaaaac

SEQ ID NO: 6456 - DNA, 1262 bp, Artificial sequence
  DNA replication origin
acacacatctccgagtctagtgggacccaggcctgcatctgcatggttaagccaagaaatgaaacccatgcaacccagtggaggttgtgccggctctgccacctgcaccggctcccttgctgtggaccttgggcagagcttccctcctctgagcctcactcactttccactctgggaggatgaggtgggcgactgggggctaagttaccccctctgtttcaggacagcccagaggcactgctgtgtctcctacttgcaggagaagagctgcatggccggcgtcctgggagccaaggagggtgagacctgtggggctgaggacaacgacagctgcggcatctccctgtacaaggcaagcctgacctgtggccttcaaggcagggtggggtggggcggggcgggaggctggcctgggcctgaaggtcctcgtggcccaagaagttaggctgtccttggggctcctcctgggagtgaccctcacgcctggggtggaaggactcttaatctgcgcagaaaacatcatcagttattatactgaccaattaattcacagaatatttgtagagcaccactgtgtgccctgggcatcagggatgtagcagtgagtaacacagatggcaattcccgccctcccagggatttctttctggccaggaagacagaggaagatcacgatgaatattttagcacctggcgtggttgcaggcgattgtgctaaggagaaaaacttaaggagaggtgggataagtagtgtcagggctggggagggactgcagtatcagctgacagtggccagggacagcctcactgaggaggggacatttgtgcaatgcccggggtgggggatgtctgtgaaatgctttcaggcagagtgcagcacatgcaaaggccctggggtcagagcctgcttggcatgtctaggctgtgtggctggagtgcatcgagtgacagggggcaggtggagctgagcccagagagatgtcagggctcctggccatcatcggaaggactgtggtttgactgtgggtgaggtggaccccatggggagtttgagggtctcttctggcagttgtggggaccggttattgagggtgtttctctcacatgggaggtgggattgggatggggtaaaaccccaccaggcaacagtggtgcagagaacagtgtgaactaacacacaggcgaggacgttgggaaatggggtgtgtggtccagtggtctggcagcagtagagacaggccaccgggagtcctcaggctgga

SEQ ID NO: 6457 - DNA, 1239 bp, Artificial sequence
  DNA replication origin
gcccggcaggctgttcggcagctcggcctctgtgcccagtgacagggcctctcggcccgccatctctgcctctgaaactaggacaggggttagagctcaagacagagccagcttggtcagagtaggtggctgagacaaccagctttgggaaactagtgcaggtcctcatcaagacctctgtgtgcccagcagacagcaaggatggatgaagcaggatggatggatgggtgggtgggtggatgggtggatagatggatggatagatgggtgggtgggcaggtaaatagatagacggatgggtatagatggatgggtagatggatgggtggatggatgggtgagtgagtggatgggtgggtggatgggtagatggatgggtgggtggatgggtaggtgaatgaatgggtgggggggtggggggggtggatgaatggatggatggatggatggatggatggatggatggttagatggatgggtgggtggatgggtgggtagatgggtgggtgaatgaatgggtgggtggatgggtggatggatggatggatggatggatggatggatggatggatgggtggatgggttgtaactggatgggtggatgaatgaaggaggatggatgggtagatggaaggatgggtggatagatggatacatgggtagacggatgaatgagtatttggctgaatggatggatgggtgggtggatggatagatggatgggtagatgaatggatgagtagatggatagatggatgggtgagtgggtggatgggtggatgagtgaatggaaggatgggtaggtggatggatacgtgaatggatggatgaatgggtgtggggctgaatggatggatgaatgggtagatgaaagagtggatgagtggatgggtagatggatgggtggacagacagatgaacagacggatggatggactggtaggtaggtagatggatggatggatggatggatagatggatggatggatggatggatggatggatggattgatgaatggatgggcaaatgaatgaacagacctcaagcagtaagaatgaacccatcagagccaggtccaagtcttcatcactgagtcctctacaataggacagggtcagatccacaaagaagctctcactaaagtgttacaatggattcagacccctgacctcagtgacatcaaggaggatcatccttagcagcagaaagggctccaaatctgggctctattggatcag

SEQ ID NO: 6458 - DNA, 2178 bp, Artificial sequence
  DNA replication origin
cacaggcactaatggcactaatgggggaagccagggcggagcgtcgaggggaccatcacgcgccccaggggcagtgggcagacgcagcagggcaggcggccggcgcggatgggtcttgggcgcgcctgggagaccctcaggcctcgcgcgtccccggcgccgcagcggcccctggcggcgggcgacctccggctgaggccctggccttgggcgcgggcgggcccttcctgcttagctggacgcgccgggcggccggggcgccgggaagaggaaaaggcgctcaaggcccggccgggagcggctcggggacggccgcgggcgggcaagggcggaaggcggcggccgggcggctgccagcgggaggaaccggccccttggccggccgagcctcgccaactgctggagggaaccgtccccacaggggcctggcgtcccggccccagccccggccaggggctgcgggttgagcccgtcggagagcctggcgggctggagagcgaccacccgggatcagggacactcctgctgcagcgccgtcctggggctacctgggcaaggagttggcatcccatcgcccagctgtgctcacgagcaggtcccccttcctgtatcgcccggccctaagggggaacctgaggcagacgggatgtctccagttgtcgccacgcctagggctgccatgtgtcactccccgccaagcccacatcctgccccagtgggcatgggagcagggaggtgggccaggcactggtttgatcaaagcggagctgtgtgcagagggagtgccagggctaggggcacagaggacgatgggggaactgtctaaagccacttgaggtgagaacacactcctgcttcccggtgccctgggtcctgatgcccctgaccttccactcctaacctggtacactgccctttcatcatctgctttacaatctagtgaagcaaattgcaagctgggggctgggagcaggacggccagagcagggccaagtagaggctactggcccctcaagaagcacagactcctccacagaagggggccccccagaaagcaggccctgggtctaacaaagggaggcggatgctgcctctgctggagcctcctgcctctgtttccatggcaaccccacttccaggacaaagcaaaggctcagcattcccaggacacgtgagcgggcagggagagagcctgggccttacggaacagaaggggaaactgaggcccagaagggcagcaacttgctctcagtccccaggacatggcccggtttcccccatcacaacacccatcatgccagggtctgtctcccaggggcccccagattatactcctgcaactaaatatattaagcaatagccacaagtgaacgtgccttgaagacactcatacaagagtgaggaggcggatgccaggcgttgggaagggtattgtagatatggcagtcagcacaggccactctgacgaggtgacatctgaggagagacctgagtgacgggagggagggagctttatgaacactgaagccagcatgtgccaggcagagggaccggcaagtgcaaaggccccgaggtgggaatgggctcactgagctgtggacacggcagagaaaggggagggagaggaggttcagggggcggcagtgccaggactctgtgggtctcacaggccacggcaaggaatgtgactgtatcctggtgtgatggaaaccatggggctgggagctgagaacagtcattagtcataatggcttagccagctgtgaggagcaaggtagtgacaatggagggtgagggtgtggagaagagaggaggcagaggcctccgaggaggcgattgcagtgacgtcggtgagagacgcaggtagtggaagcaggccggggcagtagaggtaggggaagaggcaggaagtggcgagtgctggagtgggtgggcggagggctgtgcaagactcaccgctggctaggagatgaggggacgggcaggggccaggctgtccaggtttccgactgagcaactgggtgaccaaagacaccatctcctgcgtatcccctgatccaactggccttgcgcctcctcccatctccaattccttccgctgcaacccctggattcagattgctgccagcaaacccactaaaaccacctcttcccttacctcctgcccctggagcccca

SEQ ID NO: 6459 - DNA, 935 bp, Artificial sequence
  DNA replication origin
gcttccatctgatggcctctcggttctgagtcaagtatgaattttgtacctactttgtgtaggttctggcctttaggaggttggggcattttaatgcctgttctggaggcaggtggaggccatgatctgattgggcctacactgtcatatgccctgggcaaaggaaaagtctctgccctccaggagtcaattaatacagtcaattaacaaaacaaataggcaaataaatggcctgcactaagctctagggaacaaacccaagcaggaagtggggtgggagagatggcaggggttggagtgatggcgaggcgatggtcaatgacagactcactggaaaggtgactcttgggcaaacatttgcaagaggaggagtgagccaagtaggcgtctgagacaggggccttccaggcggtaggcacatcccaggcagaggcccccaggcaggcatgggcctggtgcgcttgaatactgtgcaaggccggggagtagcagactgggtgcagggcgatcagagaggccacatggccagaaggtgtgcagcaccttgaagccacagtatggagtttggtgtgggtaaggactttgggcggggaccctgtcaggaggttctgaacagtggagggtggtggtctgacctaggtttacatggcgtgctcctggctgctgtggggagaatgtagatgagatagagggtggtgactcagtttccccacaggctgtcttctcttccccagtgccacagagctccaggtttcccggttctctccagagtcctcctgttctggccccctttggcccttctccacagccattgttctggttcagggctcatcttcccttactggcgactctcttgctcctgcctcctctggtttttaactccctcatgatcgcaaagttgctgcagtggttccaggcgtctctggcaggatttc

SEQ ID NO: 6460 - DNA, 1047 bp, Artificial sequence
  DNA replication origin
tgacgcccataatcatttgtctgcaatgggacaaggggtgaccatgtgacatcaggggaagtctgctggaggcttctgggaaaacatgtcctccctgataacagagaagcacatccaaagaaagcccctttgtaacctgcactcccacttcctgctttggctttacaatgtctggtgctttcacagccattttggggccatgaagcaccatcccaaaggggaaagtcaacacaccggggcagccgcatgggaggacggcaaagtctgggtccctgatgtcttcgtctgccccctcatctccaggctactttaagataaaaatgaatgtccttggtggacggattattgtagccaaaagcatcctaagtgattctctttcaagggtgagtcagtttgcaggtgggcaagatgcaaaagaacattccaggccaagagagcagtgcgctgaggacacaggggtggggggcgagtgctgcgacctaggaatggagagtggtagatgcgtgaggctgctggcagagctggaggtgggtgagggcggctcagtgccaagtggcagagttcagactttcccttgcaggctggtggtggggtgaggaacactggagggctttaaaggatgatgctgagttacagggtgaactgtgggtcaggacaggttggcaggaggagactggaggcagggaggccaaggaggaggccgggggggctgattatgtaaggccagagtgggaaggaggtgagggaattgggagggagggagaggggaggagcagacaggtgttggtgactgcgctactgaggtgatgaggggaggaggagctgagggtggagaaggaactaaggacagggccctggggatgtggacacctgatggagactcggggagcagagggagtggtcagagaaaggcaggagatgaatgcagagagggtttccagaaggagggctgggtacctgcgtggaataccgctgagccctgggtgctgtcttcacagtgcatccagagccgccctcaccagcaccacctcccacctgagtcaacac

SEQ ID NO: 6461 - DNA, 1292 bp, Artificial sequence
  DNA replication origin
ctctctctcatgcccagccagctttggcctggacaaagctctcccttcgtgggtttggagcagctccccagtgctctcccatctcactcccatgggccggccctacactctcggtcacaggcccctctcctcccccagcccaatacagccctgcagagatggggggacgaacactgcagtcacctcaggtggctctcggtgtcccaggctacccagggaggcagacagcgccctgccacaggggcctgagggttctggtgaaaactccagagtgaaggtgcatgtgaatgatttgcacttggaattgcgtaaactcgtgggtgaaacgcatggatcggagcagcggggtgtgcacctgagggagctcagccagtgtgcagctgtgtgtgaccccagcctctaaggatgcggccatgaggcagtgcatcagtgagtgtgcatgctcatgagtgtgactgtgcagtgtgggcacagggggctggtggggcaacaggggagcccagggtgcggcacagtgaggaagcaggagtatgggaggctgtgagcctccgagcatgtgtgagaacacgggactgtgttacgagtgtgtgtgtgagtgtgagtatatgagagttgtgtgggtgtgaggatgtgagggttgtgagagaatgtgggatgagagttgtgtgtgagagtgtatgtgagagtgcacgtgtgagagtgtgagtctgtgtgtgtgagagctgtgtgggtgtatgcacctgtgtatgagggttgtgagaatgtgggtgtgagagtggtgagtgtgggtgtgggtatgtgagtgtgtgtgagagagtgtgtgagaattgtgtgggtgtgagggttgtgagatagactggatgtgagttgtgtgtgtggggtgtgagtgtgtgagtgtgtgtgtgagagttgtgtgggtgtgagggttgtgtgtgtgagagagagttgtggggtgtgtgtgtgtgtgagagcgtgtgagttgtgtgggtgtgagggctgtgagatagactctggatgtgagtgtgggtctgagtgtgtgagtgtgtgtgtgacagtgtgtgagagttgtgtggtgtgagggttgtgagatgaactctggatgagttgtgtgtggggggtgtgagtgtgtgtgtgagacagtgtgagaattgtgttggtgtgagggttgtgagatggactctggatgtgagttgtgagtgtgggtgtgggtgtaagtgtgtgtgagttgtgtggatgtgagtgtgtgcctgtgtgtgagggttatgagagagaatgtgggtatgagttgcgag

SEQ ID NO: 6462 - DNA, 1302 bp, Artificial sequence
  DNA replication origin
tctccaaggtgggacgtgtcccttcctcccacccatagcctgggctacttcccctccccttggacacatgactttatttggccaatagaaggtgggggaagtgatggctgtgcctcaagacaccttggggcttctgcttcactcttgaagcacagcctcagatgccatgcacagaagctgtgattggggcacatggaggagacaaaggggaccttggtgtgagaggctggtctaccactggggtgggcgcacgacagggaactgagaggaccactgagtgaggaggctggcctaccattggggtgggggcacatggaggaaactgaggagacacccaagttatggggctggtctaccatgaaagtgggagaaggtggaggaaaccgagagaacccccatatggggaggctgctctacctttagggggacacgtggaggaaacagaacccgcatgtaaggaggctggtctaccataggggcgggggcaggtggaagggactgaggggactctcgtattagagggctggtctactgtgggggttatgtggagggaactgaggggacccccatgtgaggagactggtctaccattaaggtggggtcacatagagggaaccgagggaatgtccatgaaaacaggctggtctaccactggggtgggggcacttggagagaactgaggaaacccctgtgtgagaaggctagtctaccattggggtagggggacttggagttgaactgaaaggacccctgtatgaggaggctggcctaccatcatagtgggagcacatggagaaaactgaggaagcccccatgttaggaggttggtctaccattggggcaaaaatcacgtggcgatgattgagaagacccatgcgtgagaaggctagtcaacaattggggtagggggacttagagtagaactgaaagaattcttgggtgaggaggctggtctaccattggcatgaaacgtgggatgaaaagggcaatgtggagttaactgaggataaccatgtgaggaggctggtctaccactgacatgggggcacgtggagagggacggaggggattcttgtgtgaggaggctggtctaccattggggaggtcacatggagggagctgaggggacctctggatgaggcaagtagtctaccattgtagtggggccacgtggaggaaactgagggtatacccatgtgagaaggctggtctaccattagggtggggggccatgtggaaataattgagaaggcccgaatgtgagtaggtcattctaccattggggtgagagcacatggaggg

SEQ ID NO: 6463 - DNA, 1232 bp, Artificial sequence
  DNA replication origin
gcatgaaacgtgggatgaaaagggcaatgtggagttaactgaggataaccatgtgaggaggctggtctaccactgacatgggggcacgtggagagggacggaggggattcttgtgtgaggaggctggtctaccattggggaggtcacatggagggagctgaggggacctctggatgaggcaagtagtctaccattgtagtggggccacgtggaggaaactgagggtatacccatgtgagaaggctggtctaccattagggtggggggccatgtggaaataattgagaaggcccgaatgtgagtaggtcattctaccattggggtgagagcacatggagggaactgaggggatcccagtgtgaggaggctggtctaccgttgaggggtccccatggacgggaactgaggggaaacccatgtgaagaggcttgtctaccattcggggggcacatggagggaaatgaggggacccccatatgaggaggctggtctatcattgagaaggccacatagaggggaactgagggaacccatatgtgagaaagctggtctactgtgggggggatgtggaggaaattgagggggcccacatgtaaggtagtttgtctgtcattggggtgggagcactttaagggtactgaaaggacccccatgtgaggaggctcatctatcgttggttgggtacatatggagagaactgaagggacacccaagtgaggaggctggtctaccataaaggtgagggtacgtggaggaaactgagagagccctcatgtaaggaggctcatctaccattgggctaagggcaatatggagataactgagaaggccagtgtgtgaggaggctggtctacccttgggatgaggagggttttctaccactgaggggccatgagaagggaactgaaagaatccccttgtgagaaggctggtttaccattaagaagggaatgtggacagaagtgaggggacctcatgtgaggaggctggtccaccattagggagggccatgtggagggaactgatgggaccccagtgtgaggaggctgccctaccattgaggaggccgtgtctagataactgagtaaactactgtgtgagaaggctgatctaccactggggggccaagttgaggcaactgagggggcccccatgttaggatgctggtctacaactccggtagaggcatgtggagaaaactgagtgaaaacttgtatgaggaggctgttcta

SEQ ID NO: 6464 - DNA, 2098 bp, Artificial sequence
  DNA replication origin
taagaagggaatgtggacagaagtgaggggacctcatgtgaggaggctggtccaccattagggagggccatgtggagggaactgatgggaccccagtgtgaggaggctgccctaccattgaggaggccgtgtctagataactgagtaaactactgtgtgagaaggctgatctaccactggggggccaagttgaggcaactgagggggcccccatgttaggatgctggtctacaactccggtagaggcatgtggagaaaactgagtgaaaacttgtatgaggaggctgttctaccattgaagtaaaggcacatggaggaaacttagggagaaataaaggcacatgtgagaaaactggcctaccttttggggggtcaccgaaagcaaacttaggggaccctcatatgaggaggcgggtctaccactggaagggtctccatagagggaactgaagaaaccaccgtgtgatgcagctggtccacaatttgctggggtggggggcggggtggggaggcacacatggaaagaactgaggaaatggccatgtaagaaggcttgcataccattgaggtgggggcatgtggatggaactgagaagacccctgtgtgaggtggttggcctttcattggggtggcagcacatggaggaaaacagaggaaaccactggtggggaggcagatctactattgggaactgtggagaccttcatgtgagaaggctggtgtaccattggtggcgccatgtggaaagaaataaggggattcccgtgtgaggagactggtctatcattgggggccaagtgaaaagaactgaggggacccccacttgaggaggctggtctacaattagggtggggggacaaggaaaaaattgagggatctgcaattagggtggggggacaaggaaaaaattgagggaccttcatgtgaggaactggtctactattatgggggcatgtggagagaactgagtgaacctctgtgtaagaagggtggtctactattgagggcgccacatagaagggaactgaggaaacacccattgtagaaggaatgtataccctttgggtggaggcacatatagagaactgaggggacccctgtatgaggaggctggtctaccattggggttggggcatgtggagggaactgaagggatgcctgtgtgaggaggcttgtctgtcattgaggaggccatgtgaagggaactgaggagaccccgtgtgaggaggctgatctaccactgggatgggggcacatagagggaactgaggggtccctcgtgtgaggaggctggtttaccattgagtaagttatgtggtgagaacaaggggacccccatgtgaggaggctgttctaacattaaaaaggtagggaactgagaggatccagtgtgaggagactggtctaccattgggtgggcacttgagaggaggctgagtcaaaacaactgtgaggaggctggtctaccaccagggtgggagcacatggagggaactgaggaaactcttgtgagagaaagctgctttatcattggggcagaggcacataaagagaaactggggaatccctgtgtgaagaggctggtctttcattgagggggcatgtggagagaactgagaaaatccctatgtaaggaggctggtctaccattgtagatggggcacatggacagaagcactgtgtgagaaggctggtttaccattggaggggggcatgtggaggcaactgagaggaacaccatgtaaaaaggctggcctaccactgtggtgggggcgcgtagagggaactgaggagtcccccatgtaaggtggctggtttaccattgagcaggccacgtggagggaaatgagtggtcccttatgtgaggaggctgttctatgactggggtggggccacctggagaggagatgagtggacttttgtgtaagaaggctggtgtacattgaggggggttcacctagagggaactgaggaaacacccctgcaagggaggaggctggtctaccattggaggggactgtgtggaggaaactgagtgggcccccttgtgagacatctggtctaccattatgataggggcatgtggagtaaactgag

SEQ ID NO: 6465 - DNA, 1302 bp, Artificial sequence
  DNA replication origin
atgtggaggcaactgagaggaacaccatgtaaaaaggctggcctaccactgtggtgggggcgcgtagagggaactgaggagtcccccatgtaaggtggctggtttaccattgagcaggccacgtggagggaaatgagtggtcccttatgtgaggaggctgttctatgactggggtggggccacctggagaggagatgagtggacttttgtgtaagaaggctggtgtacattgaggggggttcacctagagggaactgaggaaacacccctgcaagggaggaggctggtctaccattggaggggactgtgtggaggaaactgagtgggcccccttgtgagacatctggtctaccattatgataggggcatgtggagtaaactgaggggtcccccatgtgaggaggctggtctactcttggggtggtgtgtgccttggaatggaaatgaaaaaaaccccatgtaaggaggctggtctaccatggggagtacacgtggagggaactgagaggacccctaagtgaggaagctggtgtatcattgagggtccacatggagggtactgaagagacccccatgtgaggaggctcttttattatcgggatgtgggcacatggagaaaactgagaaaaggctggtctaccactgagggggccctgtagagggtactaaggggcccttcatgtgatgaggctggtctactattgagggggccaaatggaaagaactgaggggaccatcgtgggaggagactggtataccattgaggtgtaagcatgtggaggaaattgaaagaacccccagttgaggaggctgtcctacctttagggagtctcatggagggtactgttggaacccccatgttgggaggctggccaaccattgggtctggggcacttggagggaactgaggggaccctggtttgaggaggcacctgtgtgatgggggctttgggaggaagctgaggtacccctgtgtgagtaggcttgtctaccactgggggaatcacgtggagagaactgaggtgacccttttgtgaggaagctggtttactgttggggtgaaagcacatggagaaaactgagggtacccccttgtgaggaggctggtctaccatttaaaaggccacatggagagaactgaggggacatctgtgtatggaggctggtctaccattgagggggcaatgtggaaggaattgaggggacccttatgtgaggtggctggtctaccattgagttggggacatgtgaaggaaagagaggggatcccccccgtgaggaggctgttctatcattggggga

SEQ ID NO: 6466 - DNA, 1431 bp, Artificial sequence
  DNA replication origin
aggggatgcttctgtgaggagagtggtcttttgttgagggggtcacatggagggaaaccgagggaacccccgtatgaggaggctggtctaccattgagggggccacattaagaaaactgagggtacctgatttgagggggcttgtctactatttggttgggaggtaaccgaggggactcctgtgtgatgaggttggtttaccactgtggtgtggggcatgtgtagggaagttagggaccaccatatggggaagctggtctaccactgagagggccacatggaggagaactgaggggaaacccatgtgaggaggctggtctaccgttgcaggggccacatggagggaagtcaggggacccccatttgaagagacccatcttttattgagggggccacatggagggaagtcaggggaccgccatttgaagagacccatcttttattgagggggccacatggaggggaagagaggggacccatgtgtgaggagactggtctatcactgggggggcacatggagaaaaccgaggggacccctatatgaggagtctggtctaccattaagtgtccacatggacgggaactaatgggacccttgtgtgaggaggctagtctaccattagtggtggcatgtaaagggaacttggacccccatgtgaggcagctggtctaccattcatggggggctgcggagggaactgtgtggaggctggtccacctttgagcgggccatgtgtaggaatctgtggagaccccaatgtgaggaggctagtctaccattggggttgggggacaaaaagggaactgagggtaccagtgtgaggaggctggtctgccattgatggggctatgtggagggaactgatgggcaccctgtttgaggaggctggtctatcatttgggtggggaaacatttagggaactgagggggtcccaatctgaggagactggtctactattgaggggcccaaggtggagggaactgaagggacctccgtgtgagaaggcttgtctactggtggaggcacatggaagaaagtgaggggacccttgtgtgagtaggctggtttaccattgagtggtcatgtggaggcaactgaggtgacccttgtgtgtggaggctgtttttccactggggtgggcacatggagagaactgaggtggtgggggccagtgagtcatctggtctgcctttggggtggaggcttgggaaggaaactgaagggattcttgtgtgaggaggctggtctaccattgatgggaccacgtggagggaactgagtgggtccctatgtgagaaggctggtccaccactggaggtggaggggcacgtgtaggaatctgtggggaccctaatgtgaggaggctagtctaccactggggttgggacacacaaagggaactgagggtactcctgtgtgaagaggctgg

SEQ ID NO: 6467 - DNA, 1241 bp, Artificial sequence
  DNA replication origin
cagggatttgtgcccgttttgtggctgctgtaccccacacatgtagagattatgaatgaatgaaggggtgccctgtgcccgcattgtgctcaagtgcttaaccttgagggaaggcggggaggaagggaggggtgagcccacggtgggtggccagagtactacagggagatgagaactgatctcgggtccagacactgcctctgcctatgggcggcaggagcctcagtttccctgtctgtcctatgagggtcttgttttctgcctaaaggttcaaaatggggtgtcctccatgaggctgtcttgggagctccagcgggcaggggagctgggcacagccctttcctgaccagcaccagagctggacagcggatgaaaggaatcgcctccagaatgagcccactgtcttcaccattcctatggaggtggtgcgaatgcaggagctgagactggcttgggcaggaagtctccaagcctcagggtgggggcgggggccagaggggcttggggacacacaagtggacatggcacggggggtccttgagagggatgtcagatagctccagtgaagtgagacggatgatgggagggtgtcagaggggcactgttggcttccagggcaggggtggccactgctggggttgatagaagaaggactgattcccaggggcagacgtgttcccactggtgagaaggctgcatgggtgtctgcagggcagggcagggcagcccagggggagaagagccaggcaaaggtgtaggggtgtttggggcagcaaggaggacgatgaggctgggagctggggaccctgggtagtggtggaagctggcaggagggcttgtcgggggcctggctgctcccgagtggatgtggccttccatagactctgtggtcatggcgggcatggtggctgctgctcccagggtactcagaatggggccacctggagtgatgaggagaacaagggaccctgggtatccctgctgcaggggtgctggaaggtcagccagccaccaatccagctaagatagtccccgcagaggatggctggccagccccagcttgcacacctcccagcacgaggcagttgcttcttcacagcggctcaggatggggatagctgctctccacagggcaagttgagtttgtcttcctgtgaccctgccccttcccaggccaggactctgtccttggggacagagatgtaaaacagccctacagggactggggaccatgatgaatt

SEQ ID NO: 6468 - DNA, 1565 bp, Artificial sequence
  DNA replication origin
tatgaatcacagagcttccctcgcagggtgagcgtgaggcccttgcaaatggcgccaggcctggccccatgggattgctgggcgcgctcccctgctttcctggggagctgggttttgagtgtgggctgccaggcgggcgggcaggcgggcaggcctggcccgttacagggattaatgggtggctggctttggaatgatcaccccccatacatgggaggtagggtggtgggcagccagggagccaggagtgattccacacctgcacataattaccaaaggatctgcctcctgggaattatttttatcttaatattttatgtggttccaaaaattgggagagggttgagcagggcctgggacacaagcagcaggggttgctgggggcactaggaggtcactgcccctcatggccacctgtccaggcacctggcactggagtttgcctgccatcgggagaggatgcccagctgctctggggcctgcagatcatctgggaaaggtgagagtccattggaggcaacggaagccctgtgctgctgtggctgggagagcgtgagtgtgcacacgtgtgtgcacgtgtgtgtgtgcagtgtagtggctgcacactgcagtggctgagcggaactggatgtgtgagtgaatttagatgggacatatctgagcaggtgggtgtgcatctgagtgtgctcagtgtgtgtgtcagggcagcgtgtgcctgcgcatctgagtgtgtcttggaggagggcgggggttgatctttagtgggggccgactgtgggtgcgcatgcaccacagcatgatggtatgtgtctgtgctgtggggttgtcggtgcatttggtttgggtgtgtggcagtgctggactgtgagtgtgtggctcaactgggcagctactggaagaggtggggagactgtgtgtggggtgggatgtgtacacggtgtgtgcttagcaccacggggaggtgctgagtcagtggcagtgagggagagagctgtgagtgcgcaggggtgaaggtgtgagggctatttgtgtatgactgggtgggtatgagtatctatatttggtctgagcccagatagggtgtgtgtgtgtgtgtgtgtgtgtgtgtgtgagagagagagagagagagagaaagagagaaagagaaagagagagatgaacatgtgtgtgggatgagtgggtgggtgtatttgcagctgtgcagttttatggttcctacttgggttgagggacccgtggctgagtgcctgtcctattgcctggctggggctgaccaccagtgggtgtgggattgcccaacaagtgaggtgcctgtaagtgtttagcaagggtgcgatctgggctcacggtgacctatacctcctaggctcaagtgatccttctacctcagcctcccaaatagctggtaacacagacatgcaccaccacgactggctaatttttgtatttttgtagtgttggggttttgccatgttgcccaggctgtccggaactcctagactgaagcgatccacccgtcttggcctcccaaaatgttgggattacaggcgtgagccactgcgctt

SEQ ID NO: 6469 - DNA, 736 bp, Artificial sequence
  DNA replication origin
aaggcctccttgagaggtgatatttgagaaaagacttgaggaggtgagagggtaagtgtctgcagggagagcattccaggcagagggaacagtaagtgcaagggacctggggcagggacatacccagtgtgtgtgaggagccacagggagaccgctgcagggggacagagagagcgaaggggaaggagacaggggtgagggaggggcctgtgagccaccgtgaaggcttctgtgtctactctgggtgagatgggagccatggtgagattataagtgagggaggcagagtttaactgacatttgaaaagcctgcaggggcccaagttagtaggctggtgtgttcctacagggaagagacgctgatggataagaccctggggtaaggggactgtcgtgccactgcaggggagagatgctggtggataggactctggggtaagggaattgttttgctactgcagggaagagatactggtgggtagaaacctggggtaaggggaccgttgtgccactgcaaggaagagatgctggtggataggaccctggggcaaggggacaattgtgcaatgtcagggaagagatgctggtgaataggactctggggcaggggactgttgtgtcactgtagggaagagaggctggtggcttggatcatgagctcgggggtataagttatttggtgacagactctggacagatgttgtaggtagaactgacatgttggatgtggggtgtg

SEQ ID NO: 6470 - DNA, 1040 bp, Artificial sequence
  DNA replication origin
tcccctccctacccctaataaattcccatcacaatctctgttttgtttactggatattcttgattactcatggtctactgaaatgttttcatgtctgtgtttttaatttgcatgctcacttgatcacttgtcttcctcctgagaggatgagctccctgagggcagggaggctgtctgctggttcactaaatgactgctgaataaatggattgtggcacttcaaagatgtggctccgggtgagtacctattacatggcaggtgccccccaaatatgcatcaaatgcatcagtaaacttgggcagtgtccctactatgtgccaaggcagtatggtgggtgctgccacaaacagcagctcatgtgacctttccacacagccctgtggggcaagaatcatcacatccgtttcacatatttgaaaattgaggctcacagaggttgggacctggaggaaggttctcagctagcaggtgttggaggtgggacagcctggctttgcactggcatctcagcgctaaacccgagtctaacacacactagaatgctgggaatgtctgaggaagaagcagcatgagaagattaagtggagacgttttggcatcatttgtcaggaggaccctctgagcacctagctggccaccaggaaatttctacaccagctgagagtggataggttggcatactggggccaaaaattcataggtgcaatagactagcccctaagggtctggcctaggttctcatccaagcttccttcacttattagttgtgcgatcttaggcaagtttccttccctctgcacttcagtttctccatggctaaattagggtattgataactagtccccacctcattggctgctgtgaaaatcaaatgtgctagaacatggaaagtgcttagaaggtgccaggcacatagtgagtgccccataaatgtggtggtggtgttgtaattatcattatcgttatcggatctgattgttgcaataggctagtgcggagtcacctgaactatccgagcaaaataagaataccgcagatg

SEQ ID NO: 6471 - DNA, 813 bp, Artificial sequence
  DNA replication origin
cagcccatcccggggacccttcggacccgggcatagggacagcaggtctagcaggaacatcaagccaggaccacagccaatctcggggagctcagtccccggagcccgagacgaactctctcaggaggcgcggcacagccgttcctagagactgggcagtccccaggtggctggcggggccggtccgtgcaaacagggaacaggtacccaggaggaaggacattcgctggcaaaaacataaaccgccgctcggagccttggcaccacccaatttccaggggcccttagactcccagagccccttcccgggccaaggggacagcacgtcccacccccaacaaacacacacaaaggtgggacgagaggcggtctgagacacagagggagacaagcgctagagagaggcgggacaccccgccccctggaactgggcagcagaggcggccgggcgcgcgagcagccctccggcttcacctagcgtttctgtggaggtggggctcgggggcgctctggctggaaggtgggagggggcagctcgggacgcgtcctggagctgcttgtgcaaagccggtcaccctttgtacttaagacaacgcgtgtgaggctcggagcggtgtgggggcggggggatctgggcatggatagaggttctggcgctgaagggcccgcttggtaggtctcacacaccctgcccctccagcccccagcagtgaacccattaccatcccttttgaggaggggtggaccgcaggggctgcggcgaggggatgtgcgtggcagaccctttgtgttttgtcactactacccccctac

SEQ ID NO: 6472 - DNA, 1118 bp, Artificial sequence
  DNA replication origin
tccggggaggcgggcgggggagggggcgggggagggacgggggaaaggagggaggggcgggggctggaggcagcagcgcccccgcactccccgcgtctcgcacacttgcaccggtcgctcgcgcgcagcccggcgtcgccccacgccgcgctcgctcctccctccctcctcccgctccgtggctcccgtgctcctggcgaggctcaggcgcggagcgcgcggacgggcgcaccgacagacggccccggggacgcctcggctcgcgcctcccgggcgggctatgttgattgccccgccggggccggcccgcgggatcagcacagcccggcccgcggccccggcggccaatcgggactatgaaccggaaagcgcggcgctgcctgggccacctctttctcagcctgggcatggtctacctccggatcgggtaagggctgcctgcgccctttccgcgcgtgtttcgacaaagttggcacggcccggggagggaggtgtgccgcctgcgagcctctgccggccaacttccacagcttctctgagaggccgggtgggtgcggtgtgggagcggtggacgcacaaaggccccccgcaggacaccccaggagatataggcagggggactggccatcctgaggacgtctgagtctggaatcccccaggaccagagacagccggtagggacgctccagcctgagggactctgggggagggctagctgctgcaaaggttcagcccatcccggggacccttcggacccgggcatagggacagcaggtctagcaggaacatcaagccaggaccacagccaatctcggggagctcagtccccggagcccgagacgaactctctcaggaggcgcggcacagccgttcctagagactgggcagtccccaggtggctggcggggccggtccgtgcaaacagggaacaggtacccaggaggaaggacattcgctggcaaaaacataaaccgccgctcggagccttggcaccacccaatttccaggggcccttagactcccagagccccttcccgggccaaggggacagcacgtcccacccccaacaaacacacacaaaggtgggacgagaggcggtctgagacacagagggagac

SEQ ID NO: 6473 - DNA, 1484 bp, Artificial sequence
  DNA replication origin
gcctcctctgggatcctgctgttagccgacagactgagtcgggctgaggcccagttgccccgcgcggaacagcagtggggcgcctgagccgcgggagcgtgaggggcgcagctggccgctcagagcgcgctcgcggcgtcaccaggcggacgcggcgggtggtgcacctcggcctcgctcccgggaacagaatgctttgagtgccctggccgacccgagggggctaacacccttctttggtgtacacctcatccagtgagctagggggagtctaaccgtccctggaaattgggtggtgccaagactccgagcggcagtttatgtttttgccagcgaatgtccatcctccgggtacctgttccctgtttgcacggaccggtcccgcctgccacctgggggttgcccagtctctaggagcggctgcgcctgcgcctccggagagtgttcctctcgggctccagggactgagctccctgggagtggctgtggtcctggcttggtgttcctgctggacctgctgtccctatgcccaggtctggcaaatctgaactcaggtttcagctgaagacactgaggctcaaggaggtgaaggtgtttgcccagagtcaccagctagcgagtggcacaaccatatgggaaacaaagtatgcccaactgtagtaacctcctgcacccagtcctgactatccttcaagattgcctttctaaattacacacacacacacacacacacacacccgaaagccaccattcaggtattcattcatattccatattctgtgccaaccacgatagtgggcaccgtggacacaaggaagaagaaaggcaacagtctttcttcttggggccaggaaggagacagatgataagtgaacaagaacagagttgcagatagtagaccattaagcagggtgatgggagagggaatactgggtgttggagggttaattttagatctgaggaggtggcatttgaggtgaggcctgaaggacacagcatcaggggtccagcactgcaggaaggggaccagcaggtgcaaaagctcagaggtgggcatgagccccagggaggagatggtgggctgcaatagagagagagagaaggcctgagcttgaagggagatggggatacacagatccacaaagctgtgtgggcacgtcaaggagcttggatttcagtggtgtgttcagctggggacattggagggatgaagaagggggtgactgatctgatttgtgtgttcaaaagctccccgtggctgtcctaagggaacacactgtgggaatggggacaggtgagtaaagtgcgccatcaagcagaccagagaggagatgacagtaggggtccaggtgagacattggtagtttgggttagggtggtgctcttagaacatgaccacaaaattatttgacactcctcccatgaagaagtgggttctctgtgctctgcctgcgtgaatctgggtgggcttgtgatggcttcca

SEQ ID NO: 6474 - DNA, 1140 bp, Artificial sequence
  DNA replication origin
ctttcctgatccactcagtacacaccgcgtagcccctcacagatacctgcctggtgctcggctacatagatgactcagaccaagcctccacctcccaggagttcccagtctgcttgaccacacagacacaggcagatagttctgctactctgaggctcgtgctgggatgggaacgcacaggcgcctgtgggagctcagaggaggaccccagtgcggagggttcaaccagaggagaggccttcccagtaggaggaattgctggggcaaagacttcaccgaggtgggagaaggcctggcctgctggaggagtgtccagggctttggcttggcagaggtggtgctggaggcagatctgatttctccagctgtaaaattaggaactgaatttgatcctttcaaagacctttccatttctaagccaccacagatcccttaatcctccagtcttttgtggagaaatacttgtgactcgaatagaaaatctgtggctgaatttggtgttacttagacaggctcttgatatattttatgggtccatgcatggaggtgtggcagggatggagatggaggtgatggtggaggtggtagaggtggcgaaggtggcagtagcagaaacaggtggtggaggtggtgttggaggtgaaggaggcagaggtggtagtagaaactagtggtggtggagaggtcgaggtggtggtggtggaggtcgaaagggtaattgacgtagttgtggaagttgtggtgcagctggaggacatagtatattcggtggaagaactggaagtggtagaattgatagatgatgtagacatggtggaactgaaagaggcgaaggagatggtggacatggaacaggtgatggagtggattgagttgatggaggtggtatagatgacagagccaagggaggtgatggaggtggtagagatggtggagttgagggaggtggtggagttgagcgaggtggtggaggtgatagaggcagtcgagtgatggaggtgggacaagtgatggagtggattaagttgatggaggtagtataggtgatggagtcaagggaggtggtggaaaggattgagttgatggaggtagtgtaggtaatggagtcaagggaggtgacggaggtcatggagcaggtat

SEQ ID NO: 6475 - DNA, 896 bp, Artificial sequence
  DNA replication origin
aagtggtgtgtaggagactctgaatggaaataaagttaatcgtactttttctccttttctttatttttgtcctctagatttgccaaaaccacctgtcgctcccaagccaaagactaccagtccactgacgccagtgaccgcacccaaattcccttcctcagccaggctcgagagtcttcacagtccaaactccatgttcacgggtctgaagcccccccattgcccccaagcccaggctgactgccccaaacgagtggagagccagtgtgtacctgaatgacagcttgaacaaatgcagcaacggacggctgctctgtgtagacagggggcttgatgaggggccccggtccgtcccaaagtgctctgagtcagagaccgacgaggattacatcgtcctcagggctccgctgagggaggacgaacccaaggacgggggcagtgtggggaatgcagccctggtgtctcccgaggcctctgcagaagaggaagaggagcgtgaggagggaggcgaggcatgtggcctggagaggacaggagctggtaaggactcggcggctattgctgccccagctgcagtattgctgagcagggagggtgaagaaggcacagacctcactcctgaggaccaaggagagggctgcggatgagccagggacagaagagcaggtgtccagaagtgaggaggaagagaagctggtgcagccacacagggagtgcagcctggacaatggcaggccttgggctggagaggtggtcttccagagcgacctcctcctgcctcacatccatggagaggaccacaagccccccgacaaccctggggaggcagaggaggatgatgaggaaggctgtgccaggacagacccagcggggcacatgagggttcggatcctgac

SEQ ID NO: 6476 - DNA, 1385 bp, Artificial sequence
  DNA replication origin
cgcgcggcgagacgtcctggaaactatacggtccgggacattgcagtacctcattgatgcgcctgcgcactgcaaagctttcggggaaatgtagtttctactgcctggagagctgtcgaggagcgcgcgacctgctgggaaatgtagtttccggctgaggttggcctggccgcggttgcgagggcgccgaggcaggcgcgcggcgggcaggcctgggagggggcgggtccgcgcgggcttcggaggagcccgccctgccagaggagagggaggtcacggcgtaaaggtgcagctgccgccaccgccgcttctgcaaggtctcagggacgggctgcagccatgtcctattgccggcaggaaggtagggagggcgggctgccacggagaccggcctacgagggcctgcgggagacacgcgggccccggcgccccgcgaccacgccgggcgcgggccacctgaggcgcggcccaggtgcccaccctgggacactcggaggcgggccggctggggggtcgctactcctgttttgcggatgagaaaaccgaagctctggggggaacggggctggtccaaggtcacagtgaagcccgaaccctgacctcagaggggcctgtgcgtaggaagtcgtaaactaggtccggttggggcacgggaagtgccgagcacgttgcgtgtggctcgaaactgggaatgtatggtggttaattatcactaccgctcctgccataccccacgtgtttacattttgcacgcgcctttaaaaggcgcgtcccgaaaagttgccactcggggtagcgtgtgctgtgctggagtgctaggagttccactaacgggaatgtttttgagccccctgctacctgtcaggcactgttcaaggaaacttgcctggcttgtctcacagatctcgctgcgacctttgtaagtcaggctctgttgttggtcacattttactgaagagtaaagttagacacaggagacatggctaaagccactcagccagcaaatcgtggagctggggtttgagcctgggcattgtgaccccagaagagccttatccaatctagtgcccagtggattgcagggagaaccctgcctacctcccaccccaaagttgagctccgaccacctactgcttccttgatgttactctacccaagagctcagaagtacccgagccacaggtcggagggcctccccacacactgccacaaactggctccttggccctgagctcccacctaacccctccaggccctggtatccagtgttgtaaaatgagatgttgggcttcattgatacggcaaatactcatgaagcaccttctctgcgccagagaagggggatggatggttataaaactacagagagagttggaagtccccca

SEQ ID NO: 6477 - DNA, 1118 bp, Artificial sequence
  DNA replication origin
atgctccctgctcttggaaatgtagcgtttagttaactgcttgaggtgagaccttgggcacatgacttattctctcagagcctcagtttcatcatctgtaaagtggaggtaagtattcctacctcactgagtgaatttgagaattaaataatacttgtaaaacacttaggacagtatcaaataaatggtgagtgataaatgtgacctgtttttgttgttacggactctgagagagggcccgattcagatcagagggtcagggaaagccctctgaagaaatggggttcaagcaaagctcaaaagaatatgtaggaagctggccaggcatgactgcaggcaatcgttgtaggcagagcaaacccacgcgcagatacacaggcgagaggacacttgacctggactggggacagcagccagcagggtcagggcactggcagcagggtcggtgtccggggggtgtggcagggctctggcaggtgactgtgtggagaacacagagtgggtgatagaagcagggccagtgaggctcctgcgggcagacagtggtaagagactcgggaatatgtggcctggactggatggggtggtaggggaggagcgagccatgtctttcccatagatgtgagtgggtgggtgggtgtgccatgtgctgagatggagaaggcgccagtgtcagcactagacaggctgagatgtcaagtggaaatgtcaaggaggtggtggaggtggtgggagctgcagggctgtgaggcccgggagagggccagagctgcagctttaaattggagggtcacggcatgtggaggccaaggaagcagatgggatgtccggggagagagtatggactgaagcagctaaagaattgcagcatctaatggacaggaagaggggcagcgacagcgatggagcctgagaaggagggtgcagtgtccccaagccatgtggagaggttctgagattaaacagatcacacacatagcgcagagcatgctgcccagcagacatcctccaacctgctcaggggtggtgggcagggtcctgctcattccaggtgagaccgtgggctgagggctccaggtgctggcaggctctgagctgaggaaggcccgtacgttcca

SEQ ID NO: 6478 - DNA, 1028 bp, Artificial sequence
  DNA replication origin
aaggtaacttgcagcacaatgcctggcatgcagcagaggctaaataaagagcacttgccttccatctctcctttcagccatttaatgtcattaattctaatcccagctgcaggcactggcttttgactttagctgacagttattgaacacttgcacacacctagcaaggtgcttggcatggtggggatagagacttggataaagcttatttcctacaattgaggagtatctgatctctagatggaacaaggacttccaaacagagaaactcaaggctatgcctggaacagtgaaagagatcagcgtggctctgtggagctggggaaggctttatgtaggggaaaggattagagccaggtctaggagaaaaagttgaagactctagccaagttgtggaggggacggcgaggtgcccagctcacctgcgtgtgtggagtatgtaggtgttggggggtgggggtgaagggagggtgggctttggtttccctttgatggatggtgggctgcctgagaggatagtgatgggatgggtgagttgctttgtgtgcagctactgcagaaatctagaggtgcaaggatggtgacgaggttagagaggggtcgcctccctcacccaggcctggggcacgaaacgagacagctgtgtgcctttcacctcttgttgggtgctggaggtgaaagaaagggaagatgactctcaggtttgaggcctgagtgaggagagagaggcagcactattgattaaaatagggaggctgttagtcgggggggaggaagccaatgttgaagggaaaatgacacaaagcagtatgtgaaaagaggtgaagaggtcatataatcatttcagtaggtggatgaagggtgggttttggggtcagaggaagggcaaagatgtggagcctgtgacagagaaggttgggctcaaacacccagagaggtggcgagagcagcccagtgagcccagtggggtgcatcccgccggcttccacaggcttccagcagtctctccagctccactccacttgcct

SEQ ID NO: 6479 - DNA, 1062 bp, Artificial sequence
  DNA replication origin
ttattctagtgaattcacaaacaataagacagtgaagcagccttgttgctgatatggagtaagtttgagtggtctggacagaagatcaaaccagccgcagcattcccttaagccaaagcctaatccagagcaaggccgtaactcatccattcttgtttgtttgtttgtttgtttgttggtttgttttgagacacagtctcgctctgttgcccaggctggagtgcagtgacacaatctcagctcacctcaacctccatctcccggttcaagtgattctcctgcctcagcctcccaagtagctgggactataggcacgtgccaccacgcccagctaatttttgtatttttattagagatgggatttctctatgttggccaggctggtcttaaactcctgacttcaagtgatccacctgcctcggcctcccaaagtgctgggattacaggtgtgagccaccacacccggcccttactcatcaattctatgaaggctcaagagaggagagaaagctgcaaaacaaaagttggaagctaacagaggttgatttagagatttaaggaaagaagccatttctgtaacatgaaagtgcaaggaaaagcagcaagtgctgatgtagaaactgcatcgagttgtccagatctactagctaagagcattgatgaaggtggcaacactaacaacaggttttcaatatagctgaaacagccttcactggaagaatatgccatctaggacttacatagctggagaggagaagttaacgcctgactacaaagcttcaaaggacaggctgactctcttgtataggggctagtgcagctgatgactttaagttgaagccaatgctcattggccatttccaaaacagtagggccctgaagaatgatgctaaatctactctgcctgtgctctagaaatggaacaacagagcctgggtggcagcacatctgtttacagcatggcttattgaacactttaagcccattgttgacctactgctcaggaaaaaaatattcctttcaaatatgactgcccattaacaatagacttggtcacctgag

SEQ ID NO: 6480 - DNA, 796 bp, Artificial sequence
  DNA replication origin
gggctgacatcatggtgttgctaggaaggttgagtgcttagggcagggcctggcacagcgtgagccctccgtaaatgaccgtcattcttatgattactatcattgttatagtcttctaagcgctggaaacgctcaacaagccagcacaggctctccaggaagccggcattcctaggcctaaactgggaaagggaggttcagggcagcgaagccacgtgcccgatcacacagcgggatgcgctccacggcctccaccccaagggcagcccccacccgcatcccctgcccatctgcgggcgtcagtgcctccaggagctggcagcggcccaggcggcggcgggccagggagggagcaggcggagagcgcacgcggggctgcacgtggggcgcgcgccaggagggcctgcacgtgttcgcccacgcagggccaggagggtcgggccaggctgcggcggggacggggtgcccagagcctgcgcgcttcccgggtgttctcacggctctgcgcgggcgacggccggagcgctggcgttgggggcatggaggtgctgcggatgccaggtgagaggtattgttgtcggctaccaacgccagccctcccaaaatccagacttcctgagtcagagcccccagggaaaaatcagagtggcagacacgagctgtgaacccatcctttctttcttccacccctaccctcactttcaccctcagcaacccctgttgaccctctttaaaactgattgcaacgccagccacctcttcacagcccggcagtccccaggtatccctccagcca

SEQ ID NO: 6481 - DNA, 1444 bp, Artificial sequence
  DNA replication origin
gcctgggcagcaccatggacacaataatgcactcggtgtgcacagcccctgccctcaaaggccccccatgttggctgttccagaaacacaggagctggggaggtggcatcaaagcagagacctaaaagatactgaggaattagccgaatggaaaagacagggtgatttcctgatagaggaactgcatatgcaagggcccagggtccagggatcagggggctcctggggaaagaccagccattctgatggctggagcgtagagcctcagcacccatgcagagcttgagggggattaaatagtaagcgaataaagaaagaaaatgcacagagtgttaggaagtggtgagagctacagagaatcataaagagacgggcgtagggatgggggtgggtaggaatgggggtgagtaaggatgggacagggagagggatgaggtgggtgtaaggatggcacagagggtgaggctgccatttcaaatagcagggagcctgcactcacacgaggacatttgtgcagaggtcaaagaagtgagggagtgagccccgtgggcatttgggggaagagcattccccgcaggggaagcaagagcaaaggccatgggccatgcactccacacctgaggggagctggggggcgggggagggccagtgtggcggagtgagccagcaggacagaggcggaaggagaggcgtgggaatgtcgggagtcagaccactcagtctactgtggggacctgggcttccatcccaaatgaaaggcagccacggggctgctcgccaaggcagggacgagggtagatgtgggtttaacaggatccctctggggcctaagaggagaggctgaacgggtaagggaggaaggagcaagggaggaggcgagagagatgatgctggctgcaccaggtggtagcagtggccatggtaaagagtgactggcttctgaatatattttgaaagcagagccaccagaaaccggagcaagagaggggaggggaggagatgggagggaagagaggagggaaggtgatgcggggaggggaggagaggggagaggagggggtaggggacaatggtgactccagggcacgcatacttctctgtcctctcgcactgcctgacagacataattaacacagacctttctcccgttgagaccagattggttcttggaatcctcctcaacccagacctacaaggtgtcactcccactaatcaggattggatgtccaatgaggccaggaggcaaaatgggttcacacaggaatacgcgccatcatttgtgggcatctaccatgtgcttggcactaactagttgcttttccaattctctcatttcaaggagagacaaactctgggattggcagcagcatccttaacagatgacaccagggctctagcagtccacacagaactccccagctaagacgtttagagctaggattca

SEQ ID NO: 6482 - DNA, 725 bp, Artificial sequence
  DNA replication origin
actccatagaagggttgggttttgggctggggagagggtccagtgagaagttgattgtgactgaggacaggagggtgacatgtcccccaaactggtgcttgtcgacgccagcaggcagaccacttccggagggccctgaggatggtcccactgtccttccccagccatggccctccaagggatggaaaatcatggatgcagagagacaggtggaggaactgaggcacatgtgtagtatctaccccccttacaacttcctccggaatggtccagttgttctcttctgccctaaaacttcctcagagtttattcttcaccagacagagcccttggccctcacccgccagccttgggtgggctgctgtgtggagaccccagcagtctcggagctgggtaggaggaggaggggctgcagagcctggaccccgtgggcggcacacctctggctgaatccgtggggtggggaaatttcttaccctctctcacctgccgagcgatctcaggcaagtcttaaggcacatctggctttgactgcccattggtggaacaaggtggtctctgaggcatttccagctgcacgttctcacttttgagagccccaaatgtctgtggcaaagaaccatggatatatgtcccatatctcagagatgatgagagagagtgacagagaggaacccagacagagagtggataccccacagagacagcaggcagagacaagatgg

SEQ ID NO: 6483 - DNA, 619 bp, Artificial sequence
  DNA replication origin
agctggagagacggcaggtctattcaagagcctgggaatcgggtcggacagcttgggtgttgacatcggtgctgccgccacttgggctgtgtgacctcaggcaggttgcctgctctgtctgagccccggcgttctcttctgtccagtgaggaccccttgcatgggggtgtgggattccatgggacatggagggggcagtgccctgcagaggggctggcattgaggtcaggaaacagagtttaggggcagggtggggagtatgtcacatgactccaggatgaacgccgacagcaagggaagcgggactggtaagtgtcagggtgtggaggtgtggaggtgtgggggcaggtggcaaagggagagagccagagagacagggggagagagagagagagagagaaggcaggagagcctagagagacaacaagtgaggcagccagggagggggacattctcgctgtgggtggggcacactgaaccttcctgaaagaaaggctcttgagctgagcctggaggactccatagaagggttgggttttgggctggggagagggtccagtgagaagttgattgtgactgaggacaggagggtgacatgtcccccaaactggtgcttgtc

SEQ ID NO: 6484 - DNA, 1079 bp, Artificial sequence
  DNA replication origin
aataataatgataatcaataaaaataataaataaataagaaattcagaatctccaaccccaccccagacctgctgagtcaaattcgtatgttaacaacatcctgtcgtgagtatatgcacttttcagttgaagcagggctggaaggtcaccttggctaacctcatgccatccatggggagactgaggcagagggaggtggaggtccctctgggttacacagccactaaggatccactcagggcttggaaccaggtctctgcaggggagatggggaggggagggggctcttgtgggtggagccgaatgcacagtcttaaagactggcccctttctccatagctaaacaaatggttagttttgcagtttgtggaatgggggtgggagcgtgggggaaaattgtaggcagctccagctccgttcattcagcagaatttgttggacatctgccatggggctggccactgctgtaggccctggggacacatgaagtgggcagtctagtgtgaaaacagacataaacaggtcaatatgtaaatgatcaaggtccactcacccattatccaagttagaatgagaataaaatgaggcgatggctcagggctggtgcagggcaggcaggaggcagccggggctgtctgagacatggtggtctgggaaggtctctggggatgagacactggagctgaggcctagggagaaggagccagacctgggaagggctgaggggaagagcctggggcagggagcaagacaggggcaaaggccctgaggcagagagaggggagcctggagttggagggaaagccagggggccagagaggctgggagtgagggaggcagaggaggagagtggcggagggtcaggtagggggtatctcagaggctgccaggagtgtggcttagtggcagtgtggtgggggccatgaggtggttcaaagcaggaaggaagcctgagtgggtctgggggttttccttgggatttttactgaggtctacacttcctacagtgaaacgcgacagcacacactggagtgacctgccccaggtaaggatggagccccttcccatcccgcaggtt

SEQ ID NO: 6485 - DNA, 1127 bp, Artificial sequence
  DNA replication origin
aggtggccagaagcagatgtcacgtgggccactgggaccctagaggcactgctgatccccaggtgcttcctggaggaaggggccacccggggcccgcagagaagggtgggaagggtgacaggaaggcaaggaagggcatgtgcccagtggtcctcgtctgtcttggctggagccagtatgaggagcacccactggaaggtcaggttggagtccgatggcaggggcctccagggagagccagtgtcacttcgggatgctccttagcatcctggggctgtacagggagagtggctgcagagcccttccaggcagggatcctggcctgagtgggggcagctcttggtcggacctgtgtggtatttcttcttcttcttcttttttgtttttttgagactcattcttgtcacccaggctggagtgcagtggcgtgatctcggctcactgcaacctccgcctcccgggttcaagggattctcctgcctcagcctcctgagtagctgggattataggcacccggcaccacgccaggctaatttttgtacttttagtagagacggagtttcgccatgttggccaggctggtctcgaactcctgacctcaggtgatctgccccctcggcctcccaaagtgctgggattacaggcatgagccaccgcgcctggccggtatttcttctttcattctccgtgtaaatggtggaaggatcggctctctcctccccgcctcccaggtgcagagagagagagagagagagagggacaggagaaggctggggttcggggttctcacagcgtttccctctcatgctgccagggcggggcagtggaaaatggtccctgagggcccgttcattcaaataaggacaagaataatggcacactccccatctccatttaaaaatagtcacattagctgacactggcttggcacttcctagatgccgggtgcgttccgagttctctacgctgttaaccttggatcttcataacagccggaggagacaagcgctactattttcctttccattttatagatgaggacactgaggcagagaaattgagtcacttgcccagggtcacacagccatggcaaggccaggattctggagctctgtacctggcttcac

SEQ ID NO: 6486 - DNA, 906 bp, Artificial sequence
  DNA replication origin
ggatgggtgatgctgagagctgcctgctcagacaacagacacgcgaggtcaggaagaagccgcttataaattaccgcttccttcgcgccgccgccaacgccgagccccgaggaccgcaagcccagaggacaagctgcgccaagagggagtgcggagcgttcacccagcgggtcagagagcgagcgggcaggcagcccccggccggcggaacccggcacagccgagcagagcgcgggcggcgccgcagccaccccaggtaccggagggaccgggagctgggcgcgcagccggcgctgcccgccgtctgcagcccctccccatccccgcgtcgccgcagtcccggcctcctcccctccgcgtgcgcccatccggcgcccctttcaccaccgcggaagggaccgagagtcgcctgctcagtcccgctggcggggctgttattgtttccccggcaaaagggctccggctcttggtgcgggcggcaggagagtgtgtgtgtgtgtgtgtgtgtgtgtgtgtgtgtgtgtgtgtgtgtggcatatctgtgtgcctgtctccgtcaggatgcctacatgtgcctccgtatccctgtgtctgtgtttctgagggtgactgtttcaccgtgtccccagcagcgtgcacatgtgtgttccggtgcatgtctgttattctctgcgtgctgggctgtgtgtgtgtgcctctctgtgtgtgatacctgagtgtgctgtctttggatgtgtgctcttgtgtgtccccgtttgtgtctgcatgaatctgtgtgtggggggctgcgtcttccaggccctggctaggtgcacgtgcgtgtccctgagtgtggttgtgtctccaggtccctggttgtgggcactcgtgtgtcctcggctgtacccaagagggtgtccctggtgc

SEQ ID NO: 6487 - DNA, 961 bp, Artificial sequence
  DNA replication origin
gatacatcacggtcactgttactcccagcggagtgacctcagggcgtctcttgtcatctctgggccttattgatctcaccctggggaggatgaaggctttatataccccaaggccaggggtggactggatagtagtgatagcggtagtaagaggagatagtctcaagtcataatgtagttgctgtgcatggagtgtgtgccacatcttgttctaagcacctcctgtgcaccccccctcatttaaccctcacaacactcccacagggaaggtacagttaccccattttacagatgaggacactgaagactagtggggttgagtgacttgccttaggtcacctgtttggggaagtgactttcagcttctgggttgaggcttatattctggtccctgtaggggccagggtgcctggggcagctggcagggagccagggggctttttatactgcggctccaacagccagtggggaaggttcagaggggactgagcctgagcagtaggagggactaaagcagttctgtgtggcccgtgtcccaaggagaaggggagagggaagatggggccagagggtcggcaggggcatgtgctgggacctggtgggcaatggtgaggagcctgtgttttcttctaggggtgagcaaagggttgggcgggggcatgaggacctgattctgctttttaatctgccttcagctgctgcattgagaatagatcaggggcgggcagagtagcagcagggagacctgtgaggaggctgccacagatgccagtgcaagggctgaggggcctgtagctcgtggttgccatggcgatagagagctgtgggtggatgccaggaatgtacaggcgggtcttgctggaatgggcttcttcaggggcagggctgctggctgtgtgttcttcaaggcaggtggacctgtgactgcagcccccacaggtggagaggtgggtgcacctta

SEQ ID NO: 6488 - DNA, 845 bp, Artificial sequence
  DNA replication origin
agataatgtgtagtaccacagtgctctcaatcacacttgcacatgaatccatgcacagtctgtacatatgtgaagacaccttttcccacagggtgcccaggtgagtgcatacgtacacattacacatgagcatgatgccatcagcatgccttcctcccattgcacacacaccagagtgaacagccccgggtgccccatgcaggcctgcagggcaggcagccatacctccagttccctcagcagctctgactgaccacatgactccaggtcttcgagagcttctccaaacatgcgccagaagccctcctctcgggcagggccaggggctgggctgtaacgtaggaaccagagagcgtcaactcctggcaggcgggtgggcgggctggggcctgaggagtcttcggggccccagggcccagcgttgggctcgaggggccatagggtgggtgggcgggcaggcaggcgggcgtcctcggtggcagttctggggccccggggcagtggttggtgacacggaataggggaaagacgcagttaggggcgaccaggactgtcggtggccagttagaacaggggcagatgagacggggtggagagcggtgacacaggatgcctaggaagagagacagaggacaaacagacgaacagacagagaggagatccatggtgtagtcccagaggacggcccctggccccacccagacacacggcaccgtgggacagtgacagggacagagctggggccagcaaggacacagatggatggagaggatgaaataactgtgctggggaaggggtcgagaccacccataactcccatcacaggttgtatgagcctgttatca

SEQ ID NO: 6489 - DNA, 1475 bp, Artificial sequence
  DNA replication origin
gtttctaagctgagacctacagagacgccctggcattgttcatgcagtcaaagagtctgtgcttcatctagcttatgtcctggggttctgtgcaaattctcttggaatctgccgtttagaaaaaaaaaaagtttggaaagcactgttccctgtctccagatgaaaaaactgatgcctagtgagggaagagtcgtttgccaaagtcccagggcaagttagaagcaggctctctctctgcctgagagccctgggggaagccccaggcatgccaccttcaaagaccccctgtccagacccaggctgcaggggtggggcatgttggaccctgtcctggagccagccttgacaatagccatgtcccctttaagcagagagccgcccgctgcagtgggtggactcggtgcccagccagtgggagctgtgagcttccctcccacagcccctccctggggaggggagggagggccaagcagcgtggctcccgagggagttggtgggcagcaggggagacaatagcgaacatgctgtgtgggctcagccgggagacccctggagaggcgggtacgtaatggggggtctgtgggcagagtgatggggctgaacacatagatccctctggagctgctgcccagagagaggggactggatggctgagacctgggactgccactccctggagacccagggcttggggagggtggggcaggacacttgctggggctgtctgtctgaccctggccactgtcctgtagcaggatggctgagcctcccccagggctgtccagcacaggcaggcagaacaggcgggtctggaggttccgagggcagtgctcagccttgtagggggaaggctggtcctatctgggtgtgagcgaagccttttgcccaatctcaggatctgcacagctgcctggtgggagtgagtgtccgacccagaggggtgagagcccaaggcccatgggcaaggtggtggtgaggagttcctgtgctggcacagctgggcaggagactggttctcggcaggaggagaaactctggtttgggggtctgactggtgagcccctggggctctgggaatgtgtgggatgggggatcacagctgccacattcctgggtgtgctgaggctgggacccaggggaggggcagacacgattgttccatctgtctctccagcctcagcctgggctcaccctattcctccaaagagggagcttggggcctggaccagaacatactgcattcactgccctggggttgcctcactggtttcttcccacgctcttgacatatctttgcaccacagctccaagggcaaggactgtggtcccagtggacagaggaggaaaccaaggctcagggagggcagtggccgagctgggattgacaccccgatgacttttactgcagagcccccagccctgcttctgagggcccagtggactttgattcccacctcccttcccatggcaaggag

SEQ ID NO: 6490 - DNA, 1014 bp, Artificial sequence
  DNA replication origin
ctgcttggcacagagtggtgctgagtgcatgtctgtcactgctgttcctgttgacagcaagatgattcttgctcctcagcctgaagcatagagatcgtgaatccaccacctccctcctccccgtgctgtagatggagacatggcagcaaaggtgaagcctggggtcacacagcctggggggtttaactccagctcctccccacccccactccaatcttggtcccaccctaagccccttcctagcactctgaggggctgagcatgtgtccagggatggcacccggcacaggctggggctcagcacagagagtcttgcccagagccaggcagccttcacctatgtccccctgtcccaactccccacgtacagcccctcgctccctcccacccctcctcccccacacacagcgcccctgccaggcaaccccagcccatctggacagccccacggcctcaacaggaaggagagaaaaggctgctggggacatggccctgggaaggggtgggggcgggggcgatgaaggagacacacaggaaagtccagagagacccagggagagacagtgacagtgcaagaggaacagagaagagcaagacagagacagacagagtgggagagagaaggcagagcagaggcgggggcagagaaccgggtgagggagggcagacagcaggagagacagacacagagagacccagaggccagacagagagacagcaggagagagaggagagagagacagagagacagtggaagagagaggaagggacccagagagagcggagagacagagacagagagatggaggagacagagaaggaagcagagcggtggagagactgggaagggaactggagtgatctgggacagagacacggagggagagagagatgcagcagagaaacccaaaaggctccgcgagagagacggggagggagagcaggggtgactgaggacaggcagggagcctgggaagtccctctgggcccctcgccctccacccagactcaccg

SEQ ID NO: 6491 - DNA, 1130 bp, Artificial sequence
  DNA replication origin
tggtcccggaaagccagcagtggggcccacggggcgcgggagtgtgggacccggggcagggcgcccgccgggggctggagcgaagggtctgagccctcgagggggcatccaccggcccggccggcgggtcgggctcctggagggagccctggcttggcgaggcggccacgtgcctcacctgctccctccagccagcccgccgggtgtcgggaggtggccgcgctcacggtgggggtcctttggcccccgaggctgcggtccgtcgcacccaactttcctttgaacgcccggcgccacccccatgccgaccccggagtccgcggttactcaaagttgcgaggaggccagggagggggctgactcgccgcactgccccctgcccgggcctgcccctgcacagcagcgctgcggctcaacccctgcgcggggccgcccgggctgctccccgcgtacctgttgtctgaccgcgagggggcgggaggaggaaggaggacccgcgcctgggtcctgccactgctgaggaaaagtttggatttggtgctaatgaagaattttcagaactgggagtcgggggcagggtgaggtcacagtggtggctgctcacccgctgctcactttggggggcataatggctgacttcgaggccccgcagactgtgcacatcgcccctgcctttgaccttcacaatcacccccttaggagggcgctatttttctttcgctttgcagataaggacactgagcctcaaagaggtaaagccccttgcccaaggtcacacagccagcaggtggtagagctgcccgggaacctaaatctatgtgacccgcaagcttttagtagtttccaggcctcccaccttcttccagtctgccccccaggttgggcctctctcagtctagtgggaaagtttccatttccagcccaggcccagagctcctgtgtgggacttggggtagggtggaggaagacggagagagctggtccctgcccctcctgtcctgtcccagggccaagtagggtctgtcttctcggccccactgagatcctgggttgtgaggggttgcaggcagagcccgtggagggtcttgcttagacagccattaagccttagccagtgcctcagaccctgg

SEQ ID NO: 6492 - DNA, 872 bp, Artificial sequence
  DNA replication origin
gcggggaccctccccggcgccccaggcgtgtgcgccccgggccagctcagctctgggtccgccctccgcaccccgcgccgcgcgcgcgctcaccggccgggcagcggccgcgtcttaccttcgtccggcagccgctgcaggcagagcgcgaggttcctccgccagccccgcatccccgcggccgccctgcggcccggcccggcctcgccagcccggccccggccccgcccccgccgggcagggcggcgcagcgcagcgctggggagggccgcgggcccagggagccgcgggcatggacggccgccgagggtgggggtgccggggcggccgccaggcgctccgctccggctcccgagcccgcggctgagcagctacgcttttcgagcgcgcgctttcccgggcgccgggggcgggatggcggtgggggcgggcgcggagaggacggctggaggggagcccgaaggcgccccagccgtctcgcaccctcgctgacatccagcggcctcacacaccgtcctcagtctcccccacacacagggctctccaactcatacctaaatgactctaatcaccacgaattagtgaatgaatgaatatgtgaataagtgagtgaatgaatgaatcagcgcataagtgagtgaatacacaggtatatggatgagtgcataagtgagtgaatgggcgaatgaatgaatggaggaatgtacgagtgagtggatcaaggcctgaataaatgtgtcaataagtgaatgggagagtgaatgaatgaatgaattagtgcctttatcaatgagtaaattaataagtgagtaaatgggtgaaggaaaatgtaaataagttactgaaaaaaatcaatcaattgagtgagtgcc

SEQ ID NO: 6493 - DNA, 957 bp, Artificial sequence
  DNA replication origin
cccagctcattctgtcttctgtgaggctagaggcccccagcagacttgtcccaggtcacgtccttggaaactcggttcccccgatgcagaacttcctctgcggccagttaagtcagctgaggccctcccacactcaaggaaggaagctacctccaagaggtagcgcgaggataggtgacccagtaacccccaggatgcccagatgggactgaactgggcctcctatacccttcctgggtgagggaggctcagtctatggtgtaggtgggaaagacagcaagaagagaacagtgaagaggcagagagaaaggccaaaggcagggaagaagagacaaagggagaaatgagaggaggagcaaggagagagaggaagaaaaaagtgaggggggaggggagggggtaagaaagaagatggaggagggagaaggagagaggaaaagtaggaggaataaacaaggagggagggggaggggaacaagtaaggaaggaggggagggaggaggggaacaagtaaggagggaggggcaggaagaagcaagtgtggagtgaggagggagttaagagggtgatggggaagaaatcactgaggggggatctgaggaagatgagaatggtgcaggctgggagacttaatgacagagtgctcacccctagggacccttcagtgatgccctgaaagccagagccctgtggcctcctgggggcagacatccccactgagcccagccacagtgccatttggtgcatttcgggcttctttcctgagccacaggccttagaaatccttgccagcatcaaggggcccaagacagtagtccctctggggtgctaagtttccccatgtccctgagggtgcctgtgagggacagagataacccctgctctgggcccacggctctgggctgtctcgtcctaacccctgcgctgggcccacgacactgggctgtcttgtctggg

SEQ ID NO: 6494 - DNA, 989 bp, Artificial sequence
  DNA replication origin
acttttctcctctgtaaaatgggcataatgaaacttctcttgggttgaagtgaggattcggtgaattttagttctcttctctcttcacttccctgtccttaaagagttcatggtgtggtcagagagaagggcctgggatcagctgatagtgatgcagggcagctgagctgaaagtaggggatcgaattaagcttacccctaagaggagaggaagtgacatttggactgggcctgaaaggtcaggcagcattttccaggtgcagcagtagggtggccctcctaggtacagggaaactgcctgagcaagcacctggagggatggaagaggaaggcaggtgggcacggtgagaaatgtttgtggtcacagcacaggacatgtatgtgaaagctctctgactgatggtgggccaaagagtctggacttcaccctgcaggtagagaggagccatagtctgggggagggggtgacatggtcagccctgtgtggtagaaagctatgtggtagctggagttgtggatgagtcagaggagcaagcctggaggtgggaaacctggaaggcaggagccgggatgccacaagaggagatgagacctgaattcatgaatgctcctgacccatgggggctgcatgggctcaaatgcatgctggaaggcttctaggaggaggtgggctttgatctgcaccctcatcagaggcaagggcattccagacaggggtggggatggaaaatgggggccgaatctgatgaagctggagcaaccagtgtgccgggtgggagtgcatttgggcgagaggggtaggcaggggcctcaaggtcttgatccatcagtcttcggctctccaagaaagggctgagctctgggggaggggagtcagaggctgggcaggaccagcttggagtttttattatcactgggtgggatttttatcactgggtgggattcaaggtctgtggaggaagcggccaccctcttccggccagccattt

SEQ ID NO: 6495 - DNA, 1131 bp, Artificial sequence
  DNA replication origin
cgtgcctcggcgccggaggtcgccgggcctcctacctgctctgttcatcttcagcgcgcggggcccgggccgccgtcggcgtttcagtccgtccgcgggtcccagtgcgactccgcacaccgcctccctccgcggccgccccgcggggcccgcaccccctggcgcccgcccggccccggcgcgcctcggactccgcgcggcgcgcagggcagtgggggcgcgagccgcgagcctccggggcggggccgccgggcgggggcgcggggcgggggaggaggagggggcgcgagcgcgggggcggcggctggggcagcgccgggcgtcgcgtccgctcccggctccgggcgcgctgcgctctggccgccgtgcctccgcctgcgcctctgcctgcgccgcagccgcgcctccaccccctcctagacatttcctccgctcccgaagaggaaggatttttttttcccctgctcggtcagagattcagggaggcgagggccggggcgtccctgcgcacatttaaaggggccgtggccatgggcaccgcgggaggcgctgggggttcgaaggacgagaactcagcgagttgggtttctggggtgttcctggctccttcgcccagcggaccatctatccctttatttttaactctgggtattcgttcagtgccgcgccagcctctgcgctgagcacggaacaagacagccccagattcttgccctcatggagcgtagacgggaggaagtcgctggagacaccatttcaaagcgagggagggaaaccagggcaatagggctgagcgatggctctcagatggcgccgcacattcttgggaccctccccagcctcactgaatcagaaaccccgtgttttatcaaaccctccaggtttgagaaccaccggagtagagactgggtgatcaaggaaggcctccctgaggaggtgacattggaagggagacccagttaatgagaagcctttccttatccactcagcacacaccgcgtagcccctcacaggtacctgcctggcgacatagatgactcagacctgccaggtggaggagtctccacctcccaggagttcccagtctgcttgtccacacagacacagacagatagttctgctaccccgagg

SEQ ID NO: 6496 - DNA, 1081 bp, Artificial sequence
  DNA replication origin
cgggtcccgtgtctgcggcgggcggcccccggcgcggagggcagggcgcggggagcccgggctcccggtgtcggcggatggcgggagcccgggggccgcgggctcgcggggcagcgggcgagagacgagacgccgaggtgggagcggggtggcggggacgggcccgggggcgccgccggggtcgcggagaagggggggtttgttattgtttttgtcagtgaaaggtcagagttcgtgaccccggtgccgccgccgccgccgcccgcgcgctggtaggaggagggcgaatgttcttcttcctcttcccagcgccagcctcgccgccgcggcggggggcgggcgagaacgcgattggctgaggcgcgcgcgcgcaccggaacgccgcagccggcgctcggtccatccggcccgtgggctgtggggccccgggcggcggcggctacgtagctgccgccggccttggccgcggccgggcgggcggatatgtggcttaaatggcgcaggcgtcggggcctagaggctgaagggctggtcgtcctaaaaactcgtggacgtcgcgcacggttacccggacgcaggcccgcccctctggggaaccgcgagctcctcgcagctgggtggggaccgtcctcgcagtggcggcctccaccctgccttctcgcttagccaaggcttctggaaggctcgcaaagtgtctgttgttggaagaagccgggccctgactggcgcgacggattctcccagccgctcagcagagcgtctgtaggtcggaagtgggggttgtattgggtgggtattgagctcttcggcccttcctcggtactgatagtttttaatttaggttttaaaggtctaaagatgcgcccgttctggccatctcaggtgaaatgttgaaacgccccagaacctataatttttggtttcttagtaaacatacgatccagatcttgtgtaattccatgcccctcctcctcgaaatttggaagtagtacatggtaatagggatgtgtaaagcagcttttagcagcattgcttaaatttatttgaagaaattggcctgtcttgctcttaaactcttggg

SEQ ID NO: 6497 - DNA, 1478 bp, Artificial sequence
  DNA replication origin
cgccgccattttgttctcgacggagatggctccggctgggcgggctcccttcctccttatcctcctcctcctcccgcctgcagtcccttcttccttctctgccgggattttcacccctccgcttctagtccgcctttggcggccgtcgcagcccaaccgccgttttttctgaaggggagggtaaaagaaaaggaggaaggcgggtgcgaggcgcgacctcgtgagcgacggatgggctggctaattggcgcccagataggagggccggggcctgtggcaccgcccccctaagctttgctgattggctgaggcggaagagggtggtccttatggggcgcgggagccctggcggggcgggagtagaggccggggcgaagagtggggccgggtcggcgggggcggggccgggggcggggcgcgaggggcgcggccgggtggagaggccggcgcctggtcttgggtcagcaggtgggctgcttccctccgcctggaacgcgtctcgaatgagtactgaggaacaatagtaataaaggtgatgaagcatttcgagtccacgatgcgctctcgtgggaagaggttttcggaaccaggacacttttcagggctcctgctcgttatttcgcagcggccttggcgaatcccctaatgaggctcaattttatcgactgtaaatggggggcatgcgcattcttgccaggccggacctcccttctgagcattgtttgtggggctctactcagaaaatggaggcaacgctactttgcgagcttcagagtcacttgaaaatggtgttattgttaaaaatgggattacagccaccaggagaggcaagcgttaagggtatttggggtttgagagagcacaattcgggagtgattctcttctcattcgttcgctgaatacatgttgacttagttttttaggcactggggacacatctggagaaccagctgtacaagacccctgccctcactagagttgggggctggggggtgaatagacaaataattccagagagtcataagttctgtgaaagaaaagaagccaaatgacctgctgaagaagacctgaggcgttaatttagatggaatggtcagggtggcctctctgagtaagtgatgtttgaacagaggaacccaagggaggaatggcattccagacaggacatcccgtgtaacggccctggaggaagagcatttgatgtgatcgagaactggctgcttgtggctggagagttggttggaactagtaattgtccattatcccactttgtttccaagccaaaggctgtgaaatatagcaacggtagtgaggaacaaatcttcaatgtaataagaaagtcgaggaaaatacagccttcatatgaattactgatgaatacatgacttgggaggagggcctcagaaactcactttacttccagattcaaatccttcgtcagcctcttatatacattttcagttcatcaagtatttcct

SEQ ID NO: 6498 - DNA, 1478 bp, Artificial sequence
  DNA replication origin
acggggcggcctggccgggcagaggggctcctcacttcccagtaggggcggcccgggcagaggcgccccctcacctcctggacggggcggctggccgggcggggggctgaccccctgacctcccctcccggaccgggcggctggcccgggccagaggggctcctcacttcgcattaggggcggcaggcagaggtgcccctcacctcccagtacggggcggctggccgggcggggggctgacccgccgcactccctcccggatggggcggctggccgggcggctgagccccctacctccctcccagacggggcggctggcctggcgggggctgacccccaactccctcccggacggggcggctgccgggcggagacgctcctcacttcccagacggggcggctgccgggcggaggggctcctcacttctcagacggggcggctgccgggcggaggggctcctcacttctcagacagggcggctgccgggcggagggtctcctcccttctcagacggggtggctgggcagagatgctcctcacctcccagacggggtcgcggccgggcagaggcgctcctcacatcccagatggggcggcggggcaaaggcgctccccacatctcagacgatgggcggccgggcagagacgctcctcactttccaggctgggcagccaggcagaggggctcctcacatcccagatgatgggcggccaggcagagacgctcctcacttcccagacggggtggtggccgggcagaggctgcactctggacactttgggaggccaaggcaggcggctgggaggtggaggctatagcgagccgagatcatgccactgcactccagcctgggcaccattgagcactgagtgaaccagacaccgtctgcaatcccggcacctctggaggccgaggctggcggatcactcgcggttaggagctggagaccagcccggccaacacagcgaaaccccgtctccaccaaaaaaatacgaaaaccagtcaggcgtggcagcgcgcgcctgcaatcgcaggcgctgggcaggctgaggcaggagaatcaggcagggaggttgcagtgagccgagatggcagcagtacagtccagcttcggctcggcatcagagggagaccgtggaaagagggagagggagaccgtggggagagggagacggagaggcagagggagagagagagggacttaactttcatcttgtgtttcagcaagaaccattttaagatctctgttgcatttctgtcctagtagtttaaagtatgggaacgtctcacctggctatgtcctagtttatttgtaaaaagttctgtgacactgggatactctgcagtggggtgggaactgatcagaggcctgctacgccctggaaggtaaattcagcctttgagctcccaggtctgtgtgctgtgagggtctccaaggcctctattcctcccctagaggcagcagttttcaaggct

SEQ ID NO: 6499 - DNA, 1057 bp, Artificial sequence
  DNA replication origin
cgtctgggagggaggtagggggctcagccgcccggccagccgccccatccgggagggagtgcggcgggtcagccccccgcccggccagccgccccgtactgggaggtgaggggcacctctgcctgccgcccctaatgcgaagtgaggagcccctctggcccgggccagccgcccggtccgggaggggaggtcagggggtcagccccccgcccggccagccgccccgtccaggaggtgagggggcgcctctgcccgggccgcccctactgggaagtgaggagcccctctgcccggccaggccgccccgtccgggagggaggtggggggtcagccccccgcccggccagccgccccatccgggagggaggtggggggggtcagccccctgcccggccagccgccccgtccaggaggtgaggggcgcctctgcccggccgcccctactgggaagtgaggagcccctctgcccggccaccaccccatctgggaggtgtgcccaacagctcattgagaacgggccatgatgacaatggcagttttgtggaatagaaaggggggaaaggtggggaaaagattgagaaatcggatggttgccgtgtctgtgtggaaagaggtagacatgggagacttttcattttgttctgtactaagaaaaattcttctgccttgggatcctgttgatctgtgaccttacccccaaccctgtgctctctgaaacatgtgctgtgtccactcagggttaaatggattaagggcggtacaagatgtgctttgttaaacagatgcttgaaagcagcatgctcgttaagagtcatcaccactccctaatctcaagtacccagggacacaaacactctgcctaggaaaaccagagacctttgttcacttgtttatctgctgaccttccctccactattgtcctatgaccctgccaaatccccctctgcgagaaacacccaagaatgatcaattgaaaaaaaaaaaaaaagaaagttaataatggcaggaaccttgagttgagcaactgctgtatatgccagacactttgctaggcacc

SEQ ID NO: 6500 - DNA, 1481 bp, Artificial sequence
  DNA replication origin
cactttggtcaagagccaaagatctactggtctcagctttcccacctgtacaaggcggtgcagagccattggctggctttgacgcgctattagttcgaattcgggacgtaagaaccgcacaaaattaccgagccccactttctctccgctccccaccatcccctccctcgttcggaaagcgcctgcgcagaagccgccggcccgccctccactattcgaatccgtatccgcccttttcgcgccctcgaagactcggcgctcgacaggcgtctaccagcttgtcttccggtttcgtcgccgccgcaggcgcacctgccgagttccgagcgaccgatggagatggcggctgcggctgagtgacggacggtggaggcccagagcccgggcctgaagggggggacaaacctgggtgcccgcaggagcccggcagggtacatacagagggtcaggcccagtctggggggcggggacacgactcctccagaacggagacgggcgggccgtgtgtggttgtggtgggtgtgacgtgagaggtgggagatggggctttcaggccgtgcgtttcgcttgtgtgtgcctttgatgattgggctctgtgtggttgtgcggttacgcggggcgtatacacttgggtttggttgtgcagctgtgggtggagtgggtgggtgcttgtctcccgagcggttgtgtttgattctctggttgtgtaaagctgaagcgtttgtattctgagttcgtgtggagatgttcggagtgttttgtgtggtgtctgtgcgatgtgtgacgttgtcatgtctgcttcacgggattgagtcgttcgtgttgtgtgtggtcatgcgatgtgtgtataatcatgttagttatgtgggttgtggttgcgatcgtgaggccgggttgagtgcggctgtgggatgtgtcgtcgatgcggcatgtggcggggtgacattcatgctggatgtacggctgcagaacatgtagctatatttattttttttatttttattttttttactttttacgtgatttagagtgcgaggggcttgcttatgtgttcagttatggttgtggggtccaattcggtggttgtgttagatttctttatggtgtatgcttagttatatgattttggagttcattcatttcttcgttcattcatggagctttattgtgctgcttcattgtgtgtgccaggtactgtgctaaaccctggggagacggcgaagtggaaaacatatagagtctgtgccctcccagattttacagtcttacttggtcacttcacgtatgtacctgcggttataaattgagatgagtgctgtgaaggagaagtccattctgatgctctgagtaagaggcatttcttttgaggaagtgaggtttgggtttgggctgaggcgtgaagggtggttgtgtggcatggatgtggtgggctttgtgttatttgtggtcgttaggggtgagtgcatgggaagaaagggagc

SEQ ID NO: 6501 - DNA, 1142 bp, Artificial sequence
  DNA replication origin
caccccgcccggccagccgccccgtccgggagggaggtgggggggtcagccccccgcccggccagccgccccgtcctggagagaggtgggggggtcagccccccacccggccagccaccccgtccgggaggtgaggggcgcctctgcccggccgcccctactgggaagtgaggagcccctctgcccggccagccgccccgtccaggagggaggtgggggggtcagccccccgcccggccagccgccccatctgggagggaggtggggggtcagccccccgcccgggcagggaggtgggggggtcagccccccgcccggccagccgccccgtccgggagggaggtgggggggtcagccccccgcctggccagtcgccctgtccgggagggaggtgggggggtcagccccctgcccggccagccgccccgtccgggaggtgaggggcgcctctgcccggccgcccctactgggaagtgaggagcccctctgcccggccaccaccccgtctgggaggtgtacccaacagctcattgagaatgggccatgatgacaatggcggttttgtggaatagaaaggggggaaagttggggaaaagattgagaaatcggatggttgccgtgtctgtgtagaaagaggtagacatgggagacttttcattttgttctgtactaagataaattcttctgccttgggatcctgttgatcggtgaccttacccccaaccctgtgctctctgaaacatgtgctgtgtccactcagggttaaatggattaagggcggtgcaagttgtgctttgttaaacagatgcttgaaggcagcatgctcgttaagagtcatcaccactccctaatctcaagtacccagggacacaaacactgcggaaggccgcagggtcctctgcctaggaaaaccagagacttttgttcacttgtttatctgccgaccttccctccactattgtcctatgaccctgccaaatccccctctgcgagaaacacccaagaatgatcaataaaaaaaataaaaattaaaaaaaaaaaaaacaaaaaaaaaacaaattggccttttgcagttcagctcaatcccccaggaagaattcaggctcaaccaataatcctcaaaggtggacatttacagggcc

SEQ ID NO: 6502 - DNA, 1305 bp, Artificial sequence
  DNA replication origin
tccctgcccgggcggggggctgaccccccacctccctcccagatggggcggctggccgggcggggggctgacccccccacctccctcctggacggggcggctggccgggcagaggggctcctcacttcccagtaggggcggccgggcagaggcgcccctcacctcccggacggggtggctggccgggtggggggctgacccccccacctctctccaggacggggcggctggccgggcggggggctgacccccccacctccctcccggacggggcggctggccgggcggggtgctgaccccccaacctctctccaggacggggcggctggccgggcggcgggctgagccccccacctccctcctggacggggtggctggcccggcagaggggctcctcacttcccagtaggggcggctgggcagaggcgcccctcacctccggacggggcggctggccgtagtggggctgacccccccacctccctcccggacggggcggctgccgggcggagacgctcctcacttcccagacggggtggctgccgggcagaggggctcctcacttctcagacggggtggttgctgggtggaggggctcctcacttctcagacggggcggttgctgggcggagggtctcctcacttctcagacggggcggctgggcagagacgctcctcacctcccagacggggtcgcagccgggcagaggcgctcctcacatcccagacggggcggcggggcagaggcgctccccacatctcagacgatgggcggccgggcagagacgctcctcacttcccagatgggatggctgccgggaagaggcgctcctcacttcctagatgggatggcggccgggcagagacgctcctcactttccagactgggcagccaggcagaggggctcctcacgtcccagacgatgggcggccaggcagagacgctcctcacttcctagacggggtggcggccgggcagaggctgcaatctcggcacttcgggaggccaaggcaggcggctgggagatggaggttgtagcgagctgagatcacaccattgcactccagcctgggcaccattgagcactgagtgaaccagactctgtctgcaatcccggcacctcgggaggccgaggctggcggatcactagcggttaggagctggagaccagccctgccaacacagcgaaaccccgtctccaccaaaaaagtacgaaaaccagtcaggcgtggtggcgtgcgcctgcaaccgcaggcactcggcaggctgaggcaggagaatcaggcagggaggttgcagtgagc

SEQ ID NO: 6503 - DNA, 1170 bp, Artificial sequence
  DNA replication origin
ctgttttttgtttttttttttttttaatagtgatggggtctcactatgctgcccaggctggtctcaaactcctgggctcaagctatctgtcgacctcggcctcccaaagtactgggattatagtgtcagccaccactctcagccagttccacagctttaacaaagacacttcgtagatgttcatagcagacaactgaactgtatctccgcaagttatcctgctcgtgtttctaaactgcagttagaatacaacataatagccatcttaattcacattcacacctgcctcaaactgcaggacaggtgcacacatgaactatatgatttaaattccacattgcccttcaccaaaagaaaacatcaacttagtaaactcttcaggaaatgatgttcttatcttattcccatctcttctctctgaaagagctggatctgctgtcagtaggaagcatagcaatggcatggcaagtgactacacaaagatgggatttcattatctaaaacgccctcttcacatgtgttgagtcacatctattaggtcctctgacaaaaacaagtcttaacaacagcgttagcaccacggaaaccagaagttcatgaatcacggagggatgctctgtcagccaattcctaactgccaaaccttcacccaggacatagggtggaagtgcactctctcaacagcgtctataattatgtagaaaaaggtccggcataatgactatttggacattccttacgcctgctctcttctgcttccaaacgtagaccaatctttaacctatcccaggctcacgaactctgatttgactctttacccacaaggaacttggtctggaggaaaagcccgggtggtataggtgacctcaaaagacatccaagtcaaatgaagcacagaaaggagatggaagaagactctgatgaggcgcagagaggatgccaattctttggctgtagaggggacaaagcacagtatttgggagtccaggaccaagtcggaggagaaaagcagggaagagaatgggttctaaggcagtggatgaggctcataacaaacaagaagcgtcttttaaatgtggagaaccctgatgggagcatcggaaaggaggggaggggtttcgagggagaagtggacccggataagaggggggaggtttgccttgggggagg

SEQ ID NO: 6504 - DNA, 1263 bp, Artificial sequence
  DNA replication origin
cagaagaatttttcttagtacagaacaaaatgaaaagtctcccatgtctacctctttctacacagacatggcaaccatccgatttctcaatcctttccccgcctttcccccctttctattccacaaaaccaccattgtcatcatggcccgttctcaatgagctgttgggtacacctcccagacggggtggtggctgggcagaggggctcctcacttcccagtaggggcggccgggcagaggcgcccctcacctcccggaccgggtggctggccgggcggggggctgaccccctcacctccctcccggacggggcggctggccgggcaggaagctcacacccccacctccctcccggacgggcaggctggcatgggcagggggctgatccccccacctccctcccggacggggcggctggcctggcagggggctgacccccacctccctcccggatggggtggctgctgggcagagatgctcctcacttcccagacggggtggctgccgggcggaggggctcctcacttctcatatggggcggttgccaggcggagggtctcctcacttctcagacggggcggctgggcagagacgctcctcacctcccagacggggtcgcggccaggtagaggcgcttctcacatcccagacggggcggcggggcagaggcgctccccacatctcagacgatgggcggccgagcagagaagctcctcacttcctagatgggatggcagccgggaagaggcgctcctcacttcctagatgggatggcggccgggcagagacgctcctcactttccagactgggtagccaggcagaggggctcctcacgtcccagacgatgggcggccaggcagagacgctcctcacttcccagacggggtggcggccgggcagaggctgtaatcttggcactttgggaggccaaggcaggtggctgggaggtggaggttgtagcgagccgagatcacgccactgcactccagcctgggcaccattgagcactgagtgaaccagactccgtctgcaatcccggcacctcgggaggccgaggctggcggatcactcgcagttaggagctggagaccagcccggccaacacagcgaaaccccgtctccaccaaaaaaatacgaaaaccagtcaggcgtggtggcgcgcgcctgcaatcgcaggcactcggcaggctgaggcaggagaatcaggcagggaggctgcagtgagctgagatggcagcagtacctgcaaatatgttaagcc

SEQ ID NO: 6505 - DNA, 1617 bp, Artificial sequence
  DNA replication origin
gtctgggatgtgagaagcgcctctacctggccgcgaccccgtctgggaggtgaggagcgtctctgcccagccgccccgtctgagaagtgaggagaccctccgcctggcaaccgccccatatgagaagtgaggagcccctccgcccggcagccaccccgtctgggaagtgaggagcatctctgcccagcagccaccccatccgggagggaggtgggggtcagccccctgccaggccagccgccccgtccgggagggaggtggggggatcagccccctgcccatgccagcctgcccgtccgggagggaggtgggggtgtgagcttcctgcccggccagccgccccgtccgggagggaggtgagggggtcagccccccgcccggccagccacccggtccgggaggtgaggggcgcctctgcccggccgcccctactgggaagtgaggagcccctctgcccagccaccaccccgtctgggaggtgtacccaacagctcattgagaacgggccatgatgacaatggtggttttgtggaatagaaaggggggaaaggcggggaaaggattgagaaatcggatggttgccatgtctgtgtagaaagaggtagacatgggagacttttcattttgttctgtactaagaaaaattcttctgccttgtgatcctgttgatcggtgaccctacccccaaccctgtgctctctgaaacatgtgctgtgtccactcagggttaaatggattaagggtggtgcaagatgtgctttgttaaacagatgcttgaaggcagcatgctcgttaagagtcatcaccactccctaatctcaagtacccagggacacaaacactctgcctaggaaaaccagagacctttgttcacttgtttatctgctgaccctccctccactattgtcctatgaccctgccaaatccccctctgtgagaaacacccaagaatgatcaataaaaaacaaacaaacaaacaaacaaaaaaaaacaaaacatatttgcaaataaacacaaagcttggagagaccacacaatatctcatgtgataatggaatttaaactcagttatcttgacagacctaaaatgtaattcctgattaggttaaaatataagtcgtatgctctccagcagtgcagtgtggctttttaacacacacacacacacacacacacacacacacacacacacacacacacgcacaccaaaaacaaaacccaactcctaatactcggatatccatttattcagaaaaatatgcagtacttacacagagctgaactatatgctactcttaaagaatgacagtcataaatcatagtagtagagacagattgagatagccagctagtaggaggtggtgtggaaactatgtcactgaaggagagttggggagtctaggaatatttaacctgaagcagtctttcttaacctagtttcagtgaggtaattaagcactaaggtagtacggtatgtgctaagttaagttctcttctatgcatctatcactgtgctagctattctgtccttaggagaatttagaaaacagtcactccaatcagcttgcacaggatttaattctcccatggtatctcaaaaatataaaccaaaagcca

SEQ ID NO: 6506 - DNA, 2070 bp, Artificial sequence
  DNA replication origin
cggcgccgcctccccggccgcccgccgccgccgccgccgccgccgccgccgagaggtgaggtgcccggccggtcccgcctcctcctctgaggactccccgccctcttccttcctttctttctccttccctctgctgcctgccctacccgccgctgccgccgccgcctcctcacgcccccttcccgaaataccctggcagcccccgcggccgcgccgttccagcccgcggcagcggcggcatccaaactccacaatattaccaccaccgcccgccgcgattggcggccgcgcgggggagaggccagagtaagccgagcgcccattggccacgccgccgcgctcgctggtgacccccccgcctaccgcgacgggaggggcatgcggaggaagccgcaagggtgggcgcggggccgcggctcgggcggggcgggggagtcggcaggggtgcgggccgggggagggcggccaggtgtcccggctcccaggcgctgccgcctcaggcgtggtaggcggagtccggggcggaggtggcgtggggaggtggggaacggcccgggactcgcacgtggaggtggagcgcggacgcctccctcagccagggcaagactaaggagctgggtgagggaccggaagggctggaaggggtgggcacctgggggctgcggcgagtggcgatgggcgagccggacttgcacgtggagaaagcgtgagaatgtgcccctgggtttggggagggtggggagccaaggagtgggatgagaggtggtcacggaatggggggcgctgctgtcctccccgggggctgcaggccgagaccgggtgaggggcgggggtgatgctggcactctggacggaagggcgtcgtcttcgcagccgaacaggttgtggacgcccaatcgtttttctgcccgtagtcccaatccgaagctaagctgtgtggttttcccttgaaagctccccagccaggcttgctgcctccacccctttcgcatctgaagcattttgcctcccactcgagagaaatcaattttcttaaacaaacaaaaaaaaagatgtgcaggatttctaataaatagcatccttggatggaggagaagaggaatgactccctcatcctgccacacacacccccacgccaccccgcagctctgaaacggcttttctttcttagccagccgcacgctgttgccattccaggctcgtgtgggagaagattgttgtgcgcctgggtctgtccgcccgggcggctccagcctctggtttataaaaggtgcagatggttaaaacacaaacgtgtgacgtcagggtcggtttttaaaagtctcttctacccactacatcagttgtgtctcttgggatggactttagagaatcgattcgagcctaatggcagtctagagaaatggagatcttcgtcaggactatcagattattgtaatgctgcacttataacaaaaaacttagatttagccacgcaaaaaaaaaaaaaaaaaagaaaatagagtgcaagataaaaaaacacacctgattaactgatagtacgacccttccaatattctttgagatatccatgctatggttccattgaaacaatttcttacctaaaattatgtccctcgtcatgatattttctacttaaaatggaggaattctcataactgtgatctaaccgtcataatgaggctaaaaaggaaatcaaactgctcttgctttgcattctcttcagtagctcctttaccctttatttcaactccagcagataaaatagagatactatttgtcacccaacccctccttatcagttcagtgagggtgaatgagttaatgtcgtgaaagcacttgagttctccaaaacaaagatgttgtgataatattactacagtactttgtgattacaagttagctttgtaaataattaccaatgtgccatatccagtcgtgttctatcttggcctaggagtgttaggatttaccctcatttataagtaagcctgttaagcactatggatgttgagccaggaattaatatagccctcctcttcccaccaaataatctctcctctaggttaa

SEQ ID NO: 6507 - DNA, 867 bp, Artificial sequence
  DNA replication origin
ctcatctgggagcgaagcaagaggaagggatgtgggcagtttgaggacagaaaagaaagctcgcaatggttgcattgaggagtggtggggcatgccctggcagtgtagcaggctctccaggcagggcccccttaagacttgtggtcatcatgaattaagtgtgagaccagctggcattttttgtgagaccagttatgcatttttctccaacaggaatctgctactcaggtggaggtatggagtgggtggatggttgggcttaatctgaattgagattgaatcaggtgagcatatgagagaaagagagaggggtgagggggtggggagattgctgggcagggaatggaacgatgaggggaaaaggagggttaggactgaagggggctaatggataaggaaacagtggcttctggattgaaggtctctgtgaagatgcaggcttattgggttggagtgggctgtctgagtagagttagcagaaagttttctgaattgtgcttttattagtggtgacaaggtcaggagaatgacaatggtgaggatagctggggggcattggaaggaaactgaaatggaggtgaagaagtgaaagaacagaggagccaagtgttgcgtgagtcattgccaagaagggtttcagagccagggtgaagagaaaaatagggagtcaggtgccagaaacttgcatgattcaggggatcacttaagggttgttagaggacaggaccagaaatgagttggagtggtctagttcagaagcatgaacttcagagtagctggggattttgaagagagaatgttggaaaatgtcttggaagtagcaatgggaagcaaggagaccatctgtgagagaacaaaagaggtgcc

SEQ ID NO: 6508 - DNA, 1501 bp, Artificial sequence
  DNA replication origin
ttttgcacatgagttcagaggaagaggaagtgtagccggcggacgcgcggcggcggcggcgggggcgcgtcggggctggagccggagcgcgccgggcgctgggcgcagcgagcgagagcgcggcggccgcgggctccggcgagggacagacgcaccgatcgccggagggacagacacacgaccacgcggcgccaccgcccacgcctccacccaccggcgcccaagtcctccccgcgccgcctcctctgtatggcacaaactttcctcccgggacggaacacgctgcctcagggagcccgcgaccgcgccttctcctccgccggtcccatacggtaggcggcggggggggcgcgacagggcttggggtgtcgaccggcacaggcccctccgtttggccccatggaccgggtctctggcgggtagtgggaaccgcgcgtggcgcctccctgcaggttgctctttgccggggctccggagctgccagagcagcaccccctggcccgcgtcggatggggacctgggctgatccttgggacgcctggatcttgggccaacttttttttgcggggaacgggtgtaggggagtcattcctggagcgatgtagggagaggcacttcggagcagcctgttgggggtcgtaggctctgcaggctcagaagcgcctaggaaggacgcagaggtgggggagcttggaggctacaggtgggtccaggacacactgccgctggggtcctcggaaaagaacaggagggagctggtcgcggagtccaggtttccggggtgcgcgcggcctgggtggggcagggtggaggcggtgcctgactgcccctctgcgtgtgccctgggaggtgggtttgctctggggacagaggtgctggacgtgtaggagcagacatgccgcgcgctccgaggaagcgccggaaccaccagaagcacagggacgcgggtgccgagagtccccagcactgaaaacggggatctcctcttctgtaagggattttcttcccttgtcttaacccacttctctagactcaagggacgccaggatggatatgggtctgggcgaggaggaggtggttgtgtatttcgggaagccccgttgtcaggcacgcgcaccccagtcctaggccagggctggtgcccttcacctccggtgtcgctgcctttggcagcaagaaccgcgtggaggccaaggttgtagaaccaggcacgctccctgctgtctgtctgtgactctgtgcttgccctcagctgccctgtgtggttatgggtgatccctagggacgctgggtggtgtcagtgagtttcttcgggggcttaaaacaaacaaacaagaagtacttttttaaaaaaaaagtctggctcaatctctgtcagtggtcaccccagtttccagcaactcatgtgctggaacccttgtagtcggtacagctgtttcaggagctgggcgctcaactagactaggcatcttccaacccctgccatcgtgtgtcatctcag

SEQ ID NO: 6509 - DNA, 1099 bp, Artificial sequence
  DNA replication origin
tccgtcccgggaggaaagtttgtgccatacagaggaggcggcgcggggaggacttgggcgccggtgggtggaggcgtgggcggtggcgccgcgtggtcgtgtgtctgtccctccggcgatcggtgcgtctgtccctcgccggagcccgcggccgccgcgctctcgctcgctgcgcccagcgcccggcgcgctccggctccagccccgacgcgcccccgccgccgccgccgcgcgtccgccggctacacttcctcttcctctgaactcatgtgcaaaatatgctacgctgcatcttcagggaaagcctcgcggcccctgacagcagccgctggagcggtgggcccgcccagctctccccgcgccccctcggagttccgcccggtcacctccacgcggccgagctgcaagcgaccctggcagcctcagaacccaggggtcaggggctcatcgatcctccctcccagcccctcctaatcaaggttgtgtgctgtcaggaagagcgcctgggagacaaggatccttcaagatttgagccaggatgctgaaagggcgactgccatcaaggtgctgatggctgggggtggggttggggccgacttgagagaggaccatttctcgaccccattccacaggtgggagcatccctaaacatctcaggtgctgctgaaattctctcttgcgagttagtgcttcagggaagggtaatgccactgtctccgttgccatcccttggtctacctacttaagatgtccagaggtttgagaagatctggagaatcaccttgcgtggcaacttgaggcacccagggagaaaattatataaagagtgaagcactagtaaaccaggctgcattagtaaagtgaagatgtgaggcaaggagccattagaaaatattttcttcgtaaaactaaaccaagcagaattacagtgtaggggttaagagggggaactttaaagtcaaataatcagggttggattcctggctttagtacttactggctgtgtgactttgggtaagtgacttaactgctctgcgcctatttgtcacatggcacttcttcgtgggttattatatgtaaagtgtttagcaaccactct

SEQ ID NO: 6510 - DNA, 1402 bp, Artificial sequence
  DNA replication origin
ttgtctcacagtggaggcaaggaattgcaacttttttctattattgtacaccttgaaggtgaggttaattaaatcctgttgtggggtttgagggccagaatttaatttttggtgttatatttaatgttgggagcagattgggtaataaaatgtatattgagaataagacagccttttgaccttttagggtctagggctgtaaagcgtttcagggttgctgccaaacgagtcatgaactgggctggatttttatatttgatgaagaagagcctaaacgctatctgatctgggataaagaaaaaggagcattaaccttgactatgcctttagctccagccacctttttaagagtaaattgctgggcaggtgggggagggctagccacggaatgaaactgtaagctggaccaggtgtgacgaggggaggtgatgaaaggattatagggtggaggagcagaggctgaggaagaattgggacctagctcagcctggcgagaagcagcctggggaggaggggagaggtcagatgggtctgtagaaagggaagattagaaagactcagcaacacttggggttgggactgaggggacaggtgggagggaaagaaggaagatttgggatgagttgcactgggaacagagactagagagggactcatgtgtaaaagaatgcctggaagtcaggcacctcagaccatttgcccattttatgacaagaattatttagatcgtgtaggatggaaaaattgaaagtgccattttccggctatttggaactactgtcgagtttgtattgaggtcaagcagcattgcagaagaaaataagatgcttagattttaggtcaggtgagagttgaagaggttttaagttcttaagaacacaggctaagggagaagaaggaggaatggaaggtggaagcttgcccatagtgaaggaggcaagcccagagaaaagagtagagacacggagaaggggtggagggttgttgccctccagaaaagcagagaaggggtcggggtgcagagatatgaggtcagggcatggaaataagggatcagggtgcagagatataagaggttggggtgcggaaataagggatcagggtgcagagatataagagttcgggggcggaaataagggattggggcacagagataagagggtggggtgtggaaataagggattggggtgcagagatacgaggttggggtacttgaccctcccccagaaaagcgggacttgccactaagggtgatggagaaggggttgggggtttcttgccccccagaaaggcggagaaggggtagagacacggagagaagggattggggtacttgcctcttccccagaaaagcaggacttgccactaagggtgaaggaccaaggcaggcatccccacatgg

SEQ ID NO: 6511 - DNA, 1257 bp, Artificial sequence
  DNA replication origin
ccaaaactatcacaagacagaaaaaataaacattttgaaacacaacgagaaaaaagaaagaaaagagctgagactgaataaaacactaagcattgtccttcgatgtaaaaaactatttctgttagtgtgtaggcccaggttggaaagagatgtacaaaaacacgaattcagaggatcggaagaattaaaacgcccccaagaataacatgaaagtatttgatgttgcttcaggggcaagggcgagtatgtatatgtacgtaaatccatttcctcagaggctccttggcagtctgttacaacaccacgctaatgaaagccaggtctttaagttcaccccgcctctggactattagtttctcctttgcgccctgcggggactgcattcctggaaatgaaagcacacgagttggggaagggctggggtgccagagagggtaggaagctggagcccacggagcctgggatggagaggtgggtgggcccaggcctggggcgtggggtggcggtggaaggtctggggtctcacccttcggagttttgagtcttgtctggctccagggagggagatccaggggagatatttacgaacggaagccacacgatcagcttggacttttaggccagtcactccgccttaagtgggtgcgtgagaaccagaagagggactggctgtagcgctgcaagtgagatcctgtcccaaaagatgagcctgacttaggctgggccccgcaggccggcagggccagccggcatccctggtaggggaatcgggaaggtctcaatgataaatctgtgtgtggagactcagagggcacgaaataggctctgctgatgtcctctgcccctcatagcctgccagccaccccagccttcacccctgcctcagcatccttccaactagttgaatcaatcaggagcccaagggaaaggaattggtcccagtgtatgaaatgagtctgacctactggggaagtcagagaggagtgtcccgaactgggtgggaaggaaacgagttccgtgcgcggggctggggcaggagtgaggcgcagcggccgagatcctgagccccgggacccttgttccgggccccgaggcctacttggtagttgcccctcggggttccgggtgggtgactgacagttgcagcagctctggggaggcgaaggataggcaatgacttggggctcccgtccactcggctttgaggtccccgcggcccgatgacccggcctcggtgacagcagccgcgacggcggc

SEQ ID NO: 6512 - DNA, 1207 bp, Artificial sequence
  DNA replication origin
gcgagagctcgaaacaaacatcacatctaaattaaaaaaaaaaaaaagcggaagaagcggccgaggcggcggcgggaggagaggaggaggggccgcgcgcggcggcccgaggcggcggcggggacgcggggacgcgaggacgcggctttgtgcaggcgggtcgcggggcgcccatggcggagtgcggccgggggggcgccgccggcggggccctgcccacctccccgggcccggccctcggcgccaagggcgccctgaaagccggagtgggggaaggcggtggcgggggaggtcgcctcggccacgggcgggcgcgctatgacagcggcggggtttccaacggagactgcagcctcggcgtgtccggggacgaagcccgggctagccctaccaggggaccccgcggcgttgcgctcgccccgacccccagcgcggtcgtctgtaccctcccccgggagagcaagccgggcggcctgccccgccggagcagcatcatcaaggtaggtgggagaagggcgctcatcgcccaccctcagccgtccttggattctattttctccctgggggagtggtggtggaaggaggaagcccactgctaacaggaaccactggagcatgggtgcttggggtggttgagcggggattggatgcaaatggcatgtggaaagaatggagaggtgatccctaatgtgcagggggagctgtgctcagacatcctcagttgaacttggggctgtcacctcttccaggattggtctggcattagggccttgtacctgccggggtagggcatactcttatgtgtagcctagtctggttaacagactccctgtaagatttctattgtatcttaaacacagatagggattatgtgaaatgtgagaacattttcttaaaaatcccaggcggcgaacagagggtgaacagagattatttaatagggttcttctgatccgtatacagttagttggctcttacaaatgtttacacttcgagggtgcaaaatctcctaatatccggtcactcagtcacaaagaaaaatagagtagatttctgaacataaatgcagatttccgctttcttaggctcaaaagctcagagattacagttccacacgatttaatctttttccttgctgcagtaggcaggcctcgagtactgtggaagttcttttgggcagtttgcttggttttgcttgcacagtgtt

SEQ ID NO: 6513 - DNA, 1077 bp, Artificial sequence
  DNA replication origin
atgtgaggagcgtctctgcccggccgccccgtctgagaagtgaggagaccctctgcctggcaaccgccccgtctgagaagtgaggagcccctccggccggcagccgccctgtctgagaagtgaggagcccctccgcccagcagccaccccgtctgggaagtgaggagcgtctccgcccggccagccgccccgtccaagagggaggtggggggggtcagccccccgcccggccagccgccccatccggcaggtgaggggtgcctctgcccggccacccctactgggaagtgaggagcccctctgcccggccagccactcagtccaggagggaggtgagggggtcagcccccccacccggccagctgccccgtccgggagggaggtggggtggtcagccccctacctggccagccgccccgtcccggaggtgaggggcacctctgcccggccgcccctactgggaagtgaggagcccctctgcccggccagctgccccatccaggagggaggttgggggggtcagccccccgtccggccagccgccctgtctgggaggtgagggtcgcctctgcctggccgtgcctactgggaagtgaggagcccctctgcccggccaccaccccgtctgggaggtgtacccaacagctcattgagaacgggccatgatgacaatggcggttttgtggaatagaaaggggggaaaggtggggaaaagattgagaaatcggatggttgccgtgtctgtgtagaaagaggtagacatgggagacttttcattttgttctgtactaagaaaaattcttctgccttgggatcctgttgatcggtgaccttacccccaaccctgtgctctctgaaacatgtgctgtatccactcagggttgaatggattaagggcggtgcaagatgtgctttgttagacagatgcttgaaggcagcatgctggttaagagtcatcaccactccctaatctcaagtaatcagggacacaaacactgcggaaggccacagggtcctctgcctaggaaaaccagagacctttgttcacttgtttatctgctgaccttccctccacta

SEQ ID NO: 6514 - DNA, 1260 bp, Artificial sequence
  DNA replication origin
tcaatgagctgttgggtacacctcccagacggggtggtggccgggcagaggggctcctcacttcccagtaggcacggccaggcagaggcgaccctcacctcccagacagggcggctggccggacggggggctgacccccccaacctccctcctggatggggcagctggccgggcagaggggctcctcacttcccagtaggggcggccgggcagaggtgcccctcacctccgggacggggcggctggccaggtagggggctgaccaccccacctccctcccggacggggcagctggccgggtgggggggctgaccccctcacctccctcctggactgagtggctggccgggcagaggggctcctcacttcccagtaggggtggccgggcagaggcacccctcacctgccggatggggcggctggccgggcggggggctgaccccccccacctccctcttggacggggcggctggccgggcggagacgctcctcacttcccagacggggtggctgctgggcggaggggctcctcacttctcagacagggcggctgccggccggaggggctcctcacttctcagacggggcggttgccaggcagagggtctcctcacttctcagacggggcggccgggcagagacgctcctcacatcccggacggggcggcagggcagaggtgctccccacatctcagacgatgggcggccgggcagagacgctcctcacttcccagatgtgatggcggccgggaagaggcgctcctcacttcctagatgggatggcagccgggcagagacgctcctcactttccagactgggcagccaggcagaggggatcctcacatcccagacgatgggcggccaggcggagacgcccctcgcttcccagacggggtggcggccgggcagaggctgcaatctcggcactttgggaggccaaggcaggctgctgggaggtggaggttgtagccagccaagatcacgccactgcactccagcctgggcaccattgagcactgagtgaacgagactccgtctgcaatcccggcacctcgggaggccgaggctggcggatcactcacggttaggagctggagaccagcccggccaacacagcgaaacctcgtctccaccaaaaaaatacgaaaaccagtcaagcgtggtggcgcgcgcctgcaatcgcaggcactcggcaagctgaggcaagagaatcaggcagggaggttgcagtgagccgagatggcagcagtaccgtccag

SEQ ID NO: 6515 - DNA, 890 bp, Artificial sequence
  DNA replication origin
gtccgggagggaggttggggggtcagccccccgcccggccagccgccctgtccgggagggaggtgggggggtcagccctccgcccggccagccgccccgtctgggaggtgaggggcgcctctgcccggccgcccctactgggaagtgaggagtccctctgcccggccagccgccccgtccgggagggaggtgggggggtcggccccccgcccggccagccgccccgtccgggagggaggtgggggggtcggccccccgcctggccagcagccccgtccgggaggttggtgggggtgtcggccccccgcccggccagccgccccgtccgggagggaggtggggggggtcggccccccgcccggccagccgccccgtccgggaggtgaggggcgcctctgcccggccgcccctactgggaagtgaggagcccctctgcccggccaccaccccgtctgggaggtgtgcccaacagctcattgagaacgggccaggatgacaatggctgctttgtggaatagaaaggcgggaagggtggggaagggattgagaaatcggatggttgccgtgtctgtgtagaaagaagtagacatgggagacttttcattttgttctgcactaagaaaaattcctctgccttgggatcctgttgatctgtgaccttacccccaaccctgtgctctctgaaacatgtgctgtgtccactcagggttaaatggattaagggcggtgcaagatgtgctttgttaaacagatgcttgaaggcagcatgctcgttaagagtcatcaccaatccctaatctcaagtaatcagggacacaaacactgcggaaggccgcagggtcctctgcctaggaaaaccagagacctttgttcacttgtttatctgctga

SEQ ID NO: 6516 - DNA, 1060 bp, Artificial sequence
  DNA replication origin
cccaacctccctcccggacggggcggctggccgggcagaggggctcctcacttcccagtaggggcggctgggcagaggcgcccctcacctcccagacggggcggctggccgggcggagggctgacccccccacctccctcccggacggggcggctggccaggcggggggctgacccccccacctccctcccggacggcacggctggccaggcggggggctgaccccccacctccctcccggacggggcggctggccaggcggggggctgacccccccacctccctcccggacggcacggctggccaggcggggggctgacccccccacctccctcccggacggcacggctggccaggcggggggctgacccccccacctccctcccggacggcacggctggccaggcggggggctgacccccccacctccctcccggatggggcggctggccgggctgggggctgacccccccccacctccctcccggacggggtggctgccgggcggagatgctcctcacttcccagatggggtggctgccgggcggagaggctcctcacttctcagacggggcagctgtcgggcggaggggctcctcacttctcagacggggtggttgccaggcggagggtctcctcacttctcagacggggcggccgggcagagacgctcctcacctcccagacggggtctcggccgggcagaggcgctcctcacatcccagatggggcggcggggcagaggcgctccccacatctcagacgatgggcggccgggcagagacgctcctcacttcctagatgtgatggcggctgggaagaggcgctcctcacttcctagatgggatggcggccgggcggagacgctcctcactttccagactgggcagccaggcagaggggctcctcacatcccagacgatgggcggccaggcagagacactcctcacttcccagacggggtggcggccgggcagaggctgcaatctcggcactttgggaggccaaggcaggcgtctgctccttgccctcgggcccgcggggcccgtccgctcctcca

SEQ ID NO: 6517 - DNA, 1479 bp, Artificial sequence
  DNA replication origin
agctgtggagggtgtgccaggtcccccagcagtgctggcccaccagtgggccagcactcgatttctcaccaggccttagctgcctccccaccgggcagggctcgggacctacagcctgccatgcctgagtctcccagatgccccccgccctgcagtgggctcctgcgcagcctgagcctcccctaagagcgccgccccctgctccacagcaccaggccccattgaccgtccaagggctgaggagtgcccaggaatggtgtgggactggcaggcagctccacctgcggcccctgtgcaggatccactgggtgaagccagctgggctcctgagtctggtggggacttggagaacctttatgtctagcaaggggattgtaaatacaccaatcagcactctgtatctagctcaaggtttgtaaacacaccaatccgcaccctgtgtctagctcagggtttgtggatgcaccaatccgcactctgtatctagctaatctggtggggacttggagaatgtttacctctagctaagggattgtggatgcaccaccaatcagcactctgtatctagctcaaggtttataaatgcaccaatcagcactctgtgtttagttgatttggtggagacttggagaatctttatgtctagctaagggattgtgaatataccagttggcactctgtgtctagctcaaggtttgtaaatgcaccaatcagcactctgtgtctagctcagggtttgtaaatacaccaatcagcactctgtatctagctaatctagaggggatgtggagaacttttgtgtctagctcagggattgtaaacgtaccaatcatcaccctgtcaaaacggaccaaccagctctctgtaaaacagaccaattggctctctgtaaaatggaccaatcagcaggaagtgggtggggccagataagagaataaaaacaggctgcccaagccagcagtagcaacctgtttgggtccccttccacgctgtggaaggtttgttctttcactctttgcaataaatcttgctcttgctcactctggttccacacagcctttatgagctgtaacattcaccacgaaggtctgcagcttcactcctgaagctagcgagatcatgaacccactgggaggaacaaacaactccagacgcgccaccttaagagatgtaacactcaccgagaaggtctgcagcttcactcttgagccagcgagaccatgaacccaccagaaggaagaaattccgaacacgccgcctttaagaactgtaacactcaccacgagggtccgcagcttctttcttgaagtcagtgagaccaagaacccaccaattccggacacactaggacggcagaaaacttgctccactggctgcccctgagcaggctagcacctgggcctcattaaactccctgactacttgtgtcaaggcattatcgagtcaggaacagttcttgagtttatagtatggaaacct

SEQ ID NO: 6518 - DNA, 847 bp, Artificial sequence
  DNA replication origin
gggtgattttgtattaaaatgaggaggaggaagaagaggcacccacagcggcagcggcggcggcggcggcagcagcagcaggagcagcggcggagagggctgcagcccgggcggacgcgcggagccgagcggggcacggcggcggcagcgacagcggccgggatgagtcaactaataatttaatgggggcagagacggcagcgaggggtagagctagcgagggagagagcgagagaagcagccccgtccggggactcgcgctcacactcacgcacacacacaaacacacacacacctctccctgtgccacccagcaacacccggcctcgtcacaacaacaacagccgcggccgccctctatcctgcccgggggcccagccgaaagccagggcgactctagaggacgctgcccgcccccctctttcatttcgggaaactcctgatcagttttgtcggggtttctgggtttcttttcccccaaagtcctagtgccattgtggtgctcgttgtttacctcggactctggacgagtgagagcttggcgactttttggggggagggggcggggagtttgtcgctgcctaggcggtggaggtggctgggggtgccttctgatcttcctcctcctccccctccccccgaacctcttctctcctcacttgctgggaccccagacgctcacagccccgcgtcaatgggcagggagagggtccttgcggctgttgtcagcgagggcagaatcaaaagtggcattttagtgcctttccggggcttttctcgcgaccccctgccccccaccctcgctgtcccccgctagatgccctcgttgggggtgcgaggctgtggg

SEQ ID NO: 6519 - DNA, 665 bp, Artificial sequence
  DNA replication origin
acttgtctttcggctttttaactcgccgcccccgccccctcccccaatcccggccctccagcccgggttttaatccccatcccttttccgcccgctccgtgcaccctgcccccccacgccgccttcctcctcggctccgcacccccttcctcctctcctcccccctcctcctcctccgccgccgccgccgccgccgccactttctcgctcgctcccgttccccggacgcggcggatgagccggccccgctggggaaggctccgggcggcggcgggcggccgggaggaggctgcgtgctcggggctggggctgcgagcggggtgattttgtattaaaatgaggaggaggaagaagaggcacccacagcggcagcggcggcggcggcggcagcagcagcaggagcagcggcggagagggctgcagcccgggcggacgcgcggagccgagcggggcacggcggcggcagcgacagcggccgggatgagtcaactaataatttaatgggggcagagacggcagcgaggggtagagctagcgagggagagagcgagagaagcagccccgtccggggactcgcgctcacactcacgcacacacacaaacacacacacacctctccctgtgccacccagcaacacccggcctcgtcacaacaacaacagccg

SEQ ID NO: 6520 - DNA, 1284 bp, Artificial sequence
  DNA replication origin
tccggggaacgggagcgagcgagaaagtggcggcggcggcggcggcggcggaggaggaggaggggggaggagaggaggaagggggtgcggagccgaggaggaaggcggcgtgggggggcagggtgcacggagcgggcggaaaagggatggggattaaaacccgggctggagggccgggattgggggagggggcgggggcggcgagttaaaaagccgaaagacaagtaactagtgaatgagtgagggaatggggggagcgcacgatttccggccccgggcgcgcaagaatttgtaatgagcttgattagagtgaggcggcccgacatttattacacacaatacccagaataacagggcgctgtgcgagggctagcgccggccgccgccagacgcgccagggagggcgcagaggggaggaggagagggggcttccctggcagcgtccgccggagcggggaggggagcgcgcggcgcgcgggcggcaggggcaggtgtgtgagtgggagggaggaggggcaggacgggcaggacgggcacggggggcggggggaaggaaaatgacggggaggagggggcgagggccaggggagaaaactaaccaaccacccacacgccacaaaagccacaaaaaggagtacgcctggagcgtcgcagagggacaggcgaggtggggggacagggagacgcaccggccccgtgggagaagggcgcgggtacgcaggtgacaggcgctgaggaatgaggtagggagccatcaggaagtggctggaggggtacagacggaaggcagttctctccggggaagcgcggagggtgcagaaacgtgtacagcaataaaggccaggagcctcgaaacgctcggaatgtttatcctctaaggagggtggtccttaaactatgaggagccaacattagaaagaactgagtaagagcgttctgtactagtcagacgttggttcaaatcgccctcacttctgagccatagaatactttggaagaagaaatacgtggccgagttaaacaaaatttgggtcacttgaaagagacctgacttgttattataaaggaaaagatgccatcattcttcaaataatttacgctaggcaaaagaggaaagtttgggttggtaaatacatctgttgtagcaataaacacttctgctgtaatctagggtaggttacccagttagataaatggtcattaccacataagtatgatcctattatttagacaatctattaaatatagttcatgtaaaaataaagaatattacaatgtaaccca

SEQ ID NO: 6521 - DNA, 1805 bp, Artificial sequence
  DNA replication origin
ccgcgccgcacaagctccgaagcggcggctacgcggggtccgccgagcccccgggcgcagcgtgcccggtccgaagcgccacgtctggatgcgcgtcccgggtggctgcgggctcccgcgggggacgccccggccgctccggtgcgcctccagactgcaggcgccgcgaccgacgagacgagagcagctcccgccggccccttccccctcccgcccccgccgccgccccctcccccttctcccccccccgcccgttaacatctcctccctccccctccttctcttccttcccttggccccgcgcgctcgctcgctcgctcctcgcctcgctctcccctttaaacgcccacttcgtatggggaaagaggacaacttgaagtcaagttgcaattaacttccgcggcagccgcagctccggcggcggcggcggcggcaggagaggcagaagccgccgcctcggaagtccgacgccggcgcgcccgcccggggagccgttcttggtttcaggcccgcactcgacagccaccgccgcccccaacgtccatgcctgagtgagttctgctcttttgcctcccttttccccttgctactcttgctgttttatctctgtccctctttttccggaatcaatccaaacttctccgtagcacccactcctcgtcccctattggggcggctgggctcccctctcgtgggcgcagggcttcaacggtcttccgagccccttttctcacgcagacggaccttggaggggtgggctggtagagtaggggagagcggtcgggatgggggatttgaagatgccattcgttttctgtctgggtgtggacacaccaccacacctgcccaatagaccctggctgaacaaactccttcaggtcaccggtatggccccttttagaaaaggaaaggggagtggaaaagaccgaaggaagcaaatggggaaaaggggagcctctcggtgcgttctggagccgggcgggcagtaaggtgcctggaggagtgggctgcgggagtggtaatgttcccccaccggatcgcgagtctgctcagcatcctttcccggtccatctccgcctccctccgctccctgcctgcgcggctgattgtaagcatcggcgaagaggggcctgggaagtttgtggcaacttctgcatcccgggagctactcgggcgccggggcgctcaagttggagcccggagtttgaaagccgcggcactcctcatttcgagccctcgctggctgtagcgaggccggtcctggagaggctgctggcgtgaatgtgggtttggagttgggcaagaggcagaagaaagggccgtcctcttagcaggggccgggacatcacaggtgcagcctcgcagtccacaccgtgtttccctcctgctgtccagacccgagcgcggtggccttttcctattgctccagtgctaaggctcccgggccggcagaaccggggtttgggaaaccacgacgagaaggacgaagcaggcaggtggcaggtccggggagtgccacgtgcttactggggaaacgcagtttcctcttgggatgacctcagaagaccaacaggggaaaggggcatagggatctccttgaaagttttggccttggcctccactgaggtgttgcaaatttcactaacaaatgtcaaccacagggtcctctctcaaagtgtcctggttggcaactttgacctctgcgcccttccttggcgaactttctcagtggcattccggacttacaagcaaatgttctaagacttggactccacatggttataaaagagacagggaaaacagaa

SEQ ID NO: 6522 - DNA, 1327 bp, Artificial sequence
  DNA replication origin
gggggggggagaagggggagggggcggcggcgggggcgggagggggaaggggccggcgggagctgctctcgtctcgtcggtcgcggcgcctgcagtctggaggcgcaccggagcggccggggcgtcccccgcgggagcccgcagccacccgggacgcgcatccagacgtggcgcttcggaccgggcacgctgcgcccgggggctcggcggaccccgcgtagccgccgcttcggagcttgtgcggcgcgggctggccagcggggcggccagggcccggcccgcctccccagcgcccgcccggcttctccccctggcggtgggagcctcggcggccgctggcgacactaggcgcactgaagcccgagccgagccgagcccgagccgccgccgccgccgccgctgctgcgcaccgctcccgggctccctcccagcgcgccggccggggtgtggggggcggcgggccggaggggcgagggcgggccagggggcgcacacgggggttggcgcggaagacaggaccctcagcctcgaggggtaagtgtgggcgcttgggggtgcgcttggggtgcgcggcgcggttctcgtcgcccgccaaccctgccccctcacctctccgggggcccccaacacgcgcactcctcctcttgtcgcctgcggcttcctcttgttgcttgttgtttggctgggttttggggggtgagtagagggggttactgtagtgtgtgtgcaggcggaggaggaagtcaggtgagaggccgcgaagcacccccaccccaacccagcctgcgtggggtgtatgcttccccactaggggcatttgggccattttttttttctccgtcaatgttcggtcgagacgatgtttcctagagggcctccttcacttacagtctggtctgtccatctcccttcatcccaccctcgtccgtcttagccccttgtccaggagccctgcaccccaagtgaggagcacgtggcggaaggaggaggaggccctctcttgaagacccccacgctgtgacccagcccattagtttaaatatttatcctcacatcaccagctgtacttttcaacccactggaacaagacgcctaggcaaggtccaatttccccaaaaagctgggggcaaagcgggagagatgagggttttattgacattgggagagaaggggccaaggaaccttcccaagtggagactgaaactcaaaaaatctctacaaaaagactagggtgactggaggctcaggactgcaggcttaggagaaactggagctccatcaactttatttctctccccctgcctctcctccccccagctctgaggaa

SEQ ID NO: 6523 - DNA, 1672 bp, Artificial sequence
  DNA replication origin
acagggcttgaatttgaatttagggcagggatcttgccatgcctagcacagttcctgacacataataggtgttggaggggagacagtgaatgataaatgccaggctccttttgccatgaaactggggctttcttttgggttgtcatttttaagccactatgtggcttgcttcttgcagtgatttcatatattaggtaacagatcaggaccacgaggaaacaatttttacacacacggccctacagtgcaaattgttatgaaccacagtcatagcttacaactaatacatttcatcctgaacttcgagccaattcacgggtggcgtttatctccgttttacatcggcagcaacagcctgaattttctgggacacgatgcgccacccaaacaacagggactccctcatctttttctccccagctccgcccaagactgagccacatagccacctgcagttgcgatcggctcgccgcgtgggggactccacccgcgtgagctcggtttccgaaaagcgaagctggggtgggacacaaggattgaggggaggacagggacggacctgcggcagaagcagggtgcagctgggcgaggaaccccacgttggtagcttctcttctgggatggccgccccgcgccgcccactccggaatcctgtcccctccccggcgcgcccccgcccagctagcctagagcctctgccggatcttctcgaatttcaacacaaagggaatcctcggccgcaggaagtgcatcacgagaaagggggcctgggggcggggagagggggatgccgcttctctctcttctccccctccctcccggagcccaaggcagacgtgacgaaacccgcggggtcccccccgaagccccaacagccgagataattgaaacaagaaacccccttagtaagggggcggggggtgggccctccctccctcctcccgccacgcccgagttcctggagatcagagctgcctcgccgcggctctgacacctgtttgctttttccctcctttccttccgggtgcactagcacctgggcttacgtttgtttttctaccctggggctctcaacttcccttccacactccacctcccttgcagagttttctataaagttcgggctctgggtgtccccttgcactccccacagggctgtgccgcaggcttgggcgactttccccgcagaacgttggccgagagggagtccccgcggggggggccaggggggaggactgggagagaccactttcgttttctgagacgccttcagttcctggccgtccgccaggctttcttcttggaggtgtcagtcttcgggagtgggggctggggaaaggggggcaggctaggggatttgtgtttgaagctatttttggaaggcagccttactgtttttacttacgtggtattttgcaaattaataaaaatagcaaacttttctagaaatgctttattcacattttaccggagaatgggaaaccatccattgtccgttcaaaaggctatttttttaaagtttgggatggcttggggaggccaatggcaatttggggagaagggctgaagcacccctttttggagctcggggccagtttcccggactaaaagaccctggtgactggggatgggcctcacaactaactcgggctgccctgcccctgtcgcgtgg

SEQ ID NO: 6524 - DNA, 1044 bp, Artificial sequence
  DNA replication origin
ctctgctcccttggacaccactggggggcctccccctcctaagttctaggttgaggccggatacctgccccgacctgtctcctccctttctccaataccacacccacgggactccagtctccccgggagtgggacggagagggaacaaaggggtctttgttcactggctcccggggcgtgggagttgcgctcgctctcctttcccggcgtcccgtggagaccgggaggctcagcgcctctcccagctctcagcgccgccctcccagaccccagagacgtcggtcagggcgcggcgccccgggccactgcgggctctttccgggcgggcgacgtggggggcgaggcaccgcgcggcggcgcctggcgggcactgttgcccgcggagggacggtgggggggtttcagcagctggcgggggtggagggggcgggagagggagcctgcgccgggctgagcctggaggtgcggggcgggctcggggagcgctcttggggctcctcctgccacagccggggcggctggaactctctccctttctccctccatccttccacttcccctgctcggccccgccgtcaggccgggtcccccttccctgccgtcatcaggttccccttctcccttcttggcactttcctttcgaaccatccttctggacaaactttgatggagaatttcacaccacgctggaaaaatgccggttatgaaaggattactggcgccgcaaaacaccttcctggacaccatcgccacccgttttgacggaacacgtaagtcttacacttgaacgagtggtatggcattttctgagactgatttttctcgtacacattacttttgctcccaccttcccttttgcaccagcggagtgaattttcttctgttcttgccaaggtatcttttgtgcggagaaatttgttccctcatggtttggtgtagtattaacactttgtattggtgtaatagttggctctcttgagttcttgggtttgttaaggactgaaacgcagcctgaggaaagaccgacgcccgtattcactgtgg

SEQ ID NO: 6525 - DNA, 1158 bp, Artificial sequence
  DNA replication origin
aatggccaggaagaagccaattgttgaaaccattctaaaacgactgtgttgcttgggaaaccagagaagttggtgaacatttgatgcgccgaaagccacatcactcaaattttctcgccctccaaatctagcaaagaaaaagagagaggaagcagggatagaggggaagagggggagggaggggagagagggagaaaggagagaggaaaggcaagagagagagacacacagagagggagagagagggagagggcaaaggagaggagagggagagagaggagagagaagggggggcagagagaaacagaggagagagaagaggggagagagagagacagaggagagagaagaggggagagagagagagattgagagagagagagagaagaatgagagatgggcagggatctgtccaagcaggacttgagcgccaagccccgcccctgtttcccaggtaacctgataaacagactccatcttttcctctgtgaactcggctaggtgttaagaggcaggcaggaagcaatggacagggagtccgagtgaggttgtgctctttcctgagagaggggttccgcaagggattggaggcgtctttgtagccaggtacagctttccccttagagatgagcgctcttggagaaatgagaatggggagaaatcgtccatgaacatggagattggacatccccacgaaggaaaggatgatttaggagacaagagggtcatcatgggaacaaaatttcccatggagttggggatcagagtaggattaggaaaagaagattcccgatgcggggagagccctgtggttagtaataagtgtgagggaaggatggcaccaccagaaacaaaatttccattgagcaaggggcttgaaatgggattagaaagacagaatatttctaggactgtcatgcagaggggtagtttaggagtcgacagtgtctcagcttcacagggaacaaaaccttctctgttgccaggaagaatggggttagaaaatgagagtcttcttgcaggatatacccatgaacggataatacagcctcctttgggcagggtgtgtggaagttcacaggctgcagggagcaggagagctcctttggctagtggccctgaaggggtagaggaattagtgggaaagcctgctttcgt

SEQ ID NO: 6526 - DNA, 1295 bp, Artificial sequence
  DNA replication origin
ccgcccctgtcgggctccgtctccgcctctcgccgctcccccttcctctttcctttctcctcctccgccgccgccgccgccgccggcgctggagttccgactaattcttcctcctcctcctccctctgcctcctcccctaaggccagccgccggctccttcacgaaccaaaacacaaacactcaagtcccaccgccggagccacttccgctgcccggtgccggccccgccgccacgtcgctgcacgcagcgaactgcgccacttcgtcacttcccatcatcgccagtccgcctgctccttccgcttcctcgccccttcccgaatccctccccgcctaggtttgttcgcggggcggggcgaggcaggatgtcacgtgaccctgcgagtggctcagatccgaactggccgcctttctccccttcccccaccccaggtacgcgcggccacgccctctccagcgccattgttatttaggctggggggtctctgggctcctggcggccggggtcgggggaaattcctttactattctttgggggaagatcaaaataacttgtgtttttttgtttgttttttgtgcccagcccttgtgggagcggcgaggttccctaaccccaatcctggcatctcggctaaggggctttattagagggaacttgtctagcacgagagaacctcctcccacaaaatggccctggggttgggtaggtcggtaaaggctgctaaatcgcatttaccccaaggaggaagaaaggaccctccctatcccaaaagccgcctttaggcgcctgacaataagaagtcgcttctgttaagagtttacgtggttttggtagggggcggggaaggccaaatcctaaaatagtgtctgccttttattcagaatttcccttcgctctttactgtactaaacgctttacaggaattatcccattgaattcttacactcgagtctttcattctgaaactaacttgttaatcgtctgttccctacattcgaattttagctccccttggtggtcctcaccgctgtaaatctatgtctagcccagtgcctggcagccaagtcttcagttctagttgtagatgttttataggtaaagaatttgagacacaagagattgagtaacttgtccgagatcacggctgtgtggtgcagaagctggattctgatctgcggcgggttggctccagaacgtgagttgttgaacacaattctggtgaaagacaacccaagatgttcgttaccctccacgggggacctactgaagatgtgctgctttagttgaatccca

SEQ ID NO: 6527 - DNA, 864 bp, Artificial sequence
  DNA replication origin
gcggcggcgcctgacactcggcgcctcctgccgtgctccggggcggcatgtccgaggctggcggggccgggccgggcggctgcggggcaggagccggggcaggggccgggcccggggcgctgcccccgcagcctgcggcgcttccgcccgcgcccccgcagggctccccctgcgccgctgccgccgggggctcgggcgcctgcggtccggcgacggcagtggctgcagcgggcacggccgaaggaccgggaggcggtggctcggcccgaatcgccgtgaagaaagcgcaactacgctccgctccgcgggccaagaaactggagaaactcggagtgtactccgcctgcaaggtacgcgctcgccgctctcggaccgcggatgggtgctaggggcccagcccgcgggacccccctccccctcccgcttccacctccgcctcccgcctcctgcctctcgcctcccgcctggggccgctgcaccgcggaagtgctcttgtcgcccgcgcccaattagcttcttcttggataagagtcctgctgggtttgaagaagggggatcactaagacggagagcccttcattccttccgcttgaaaggagtagcttcggcatccgagctcccgggctaccttggggttttgttgctctgtaggagctcgctggagtcactttcccgggagtggagcggtgctctccatgtggcgggtgacccaggggcaaggaaaaatcttttgggggactgagtggtcccttctgcaatcgatcccttcctgtgtcccactgggaggaactgggtgcaaggagtgggggtggagaagactcccggactcctggcgctttgggaaagcgaaggggaggaaagcgc

SEQ ID NO: 6528 - DNA, 1180 bp, Artificial sequence
  DNA replication origin
gggcccagcccgcgggacccccctccccctcccgcttccacctccgcctcccgcctcctgcctctcgcctcccgcctggggccgctgcaccgcggaagtgctcttgtcgcccgcgcccaattagcttcttcttggataagagtcctgctgggtttgaagaagggggatcactaagacggagagcccttcattccttccgcttgaaaggagtagcttcggcatccgagctcccgggctaccttggggttttgttgctctgtaggagctcgctggagtcactttcccgggagtggagcggtgctctccatgtggcgggtgacccaggggcaaggaaaaatcttttgggggactgagtggtcccttctgcaatcgatcccttcctgtgtcccactgggaggaactgggtgcaaggagtgggggtggagaagactcccggactcctggcgctttgggaaagcgaaggggaggaaagcgcggggtgggaaggtgggcagagtccgaggcgagggtcttgtggtgcctggcgccctcggctgggggcggaggcactgccgcgcgcggtgacagccctgtcattattgtattattacttgtttagttaaaacgctgtcccagctgctcgaggtgtaaacaggatttggcaaagtgacagcccagcgcggcgggcgctactgctcagtttgaggacacccatttcttgctacccactctccatgccagtttaggcaccctgtcacctccagctgcagatccagatgtggaggctgtgttcccgaggtgggaggattgcccgaggccgcggggcaggctggccctgcgctgtcagcagcggctttgttttgacagggtgacagctgaggggggcggggacttggccttgtcagctcctgcggcctgtggctgaggcagggaagagacacactcacacacactcacacctccctgtattcttcctgcctgctgtaaagagggtcaagttcccagattccagattcccgattgtcacaaccaagctgcagtgaccacttctgaattttgacataactataatttattctactagaacatctaggttatactcttcttggtacttgcaggagcttctcagtcacaatggaatgtctatgcttgctctttttccacaccatatgctcaggtttatgttaagcacctctgtatc

SEQ ID NO: 6529 - DNA, 1047 bp, Artificial sequence
  DNA replication origin
ctcctatgtgtacttctttctacacagacagagtaacaatctgatctctctttcttttccccacatttcccccttttctatttgacaaaactgccatcctcatcatggccccttctcaatgagctgttgggtacacctcccagacggggtggcggctgggcagagggtctcctcacttcccagaccgggcggctgccaggaaggggcgcccccccaccccccagacggggcggctgccaggcgagggcgccccccacctcccagatggggcggctgccgggcgggggcgccccccacctctcagaccgggtggctgtggggtggaggggctcctcacttctcagacggggcggccgggcggaggcgctcctcagttcccagatggggtcgtggccgggcagaggcgctcctcacctcccagacggggtggcggccgggtagagacactccttacctcccagacagggtggccgggcagaggtgctccacacatcccagatggggtggccgggcagaggcgctccccacatcccagatgatgggcggccaggcagagacgctcctcatttcctagaggggatgacagccaggaagagacgctcctcacttcccagactgggctgccgggcagaggggctcctcacatcccagacgatgggcggccaggcagagacgctcctcacttcctagacggggtggcggcctggcagaggctgcaatctcagcactttgggaggccaaggcaggtggctgggaggtggaggttgtagcgagccgagatcatgccactgcactccagcctgggcaacattgagcactgtgtgagcgagactccgtctgcaatcccggcacctccggaggccgaggcgggcagatcactcgaggtcaggagctggagaccagcccggccaacacggcgaaaccccgtctccaccaaaaaataaaaaaccagtcaggcgtggcggcgcgcacctgcaatcccaggcactaggcaggctgaggcaggagaatcaggcagggaggttgcagtgagccgagttcgcggca

SEQ ID NO: 6530 - DNA, 2327 bp, Artificial sequence
  DNA replication origin
ctttacaatcattgtaggtatctcaaaatattacattgctgacttcaaaattatattttcatacccactgctaaatcttatttaatgtgctaataaagaagtatatatgttagtatatgacaagctgttaaaatatttttataactgtatttaaatagaattgattttcttttataatactatacattttattatatgcacttacttttatttttaaaaggaaatttcagaccgcaaatgacaatgataacattgaaggaagaatgagagagagagggaaagaaagaggaaggaaggaaggaaggaagggaataagggagggagggaggaagggaagaactcctgaatcaaaggtcaaagcactgactctggggtgacaatgactctggggtgacaatgtctctggggtgacaatgactctggggtgacaatgtctctggggtgacgatgactctggggtgacattgactctgaggtgacaatgactctggagtgacaatgactctgaggtgacaatgactctggggtgacaatggggtgacaatgactctggggtgacaatgactctggggtgacaatgactctgagctgacaatgactcgggtgacaatgactctggggtgacaatgaatgactctggggtgacaatgactctggggtgacaatgactgactctggggtgacaatgactctggggtgacaatgactctggggtgacaatgaacaactctggggtgacaatgactctggggtgacaatgactgactctggggtgacaatgactcctctggggtgacagtgactctggggtgacaatgactctggggtgacaatgactctgaggtgacaaagactctggggtgacaatgactctggggtgacaatgactctggggtgacaatgactgactctggggtgacaatgactctggggtgacaatgactctggggtgacaatgactgaggtgacagtgactctggggtgacagtgactctggggtgacaatgtctctgggatgacaatgactctggggtgacaatgtctctggggtgacaatgactctggggtgaccatgtctctggggtgacagtgactctggggtgacagtgactctggggtgacagtgtctctggggtgacagtgactctggggtgacagtgactctggggtgacagtgtctctggggtgacaatgactctggggtgacaatgtctctggggtgacaatgtctctggggtgacaatgactctggggtgacaatgacttgggtgacagtgactctggggtgacagtgactctggggtgacagtgactctggggtgacaatgactctggggtgacagtgtctctggggtgacaatgactctggcgtgacaatgtctctggggtgacaatgtctgtggggtgacaatgtctgtggggtgacaatgactctggggtgacaatgtctctggggtgacaatgactctggggtgacaatgactggggtgacagtgagtctggggtgacaatgactctggggtgacaatgactggggtgacagtgagtttggggtgacagtgtctctggggtgacaatgtctggggtgacaatgactctggggtgacagtgagtctggggtgacagtgtctctggggtgacaatgtctctggggtgacaatgactctggggtgacaatgactctggggtgacagtgtctctggggtgacaatgactctggggtgacaatgtctctggggtgacaatgactctggggtgacaatgactctggggtgacaatgactgaggtgacaatgactctggggtgacaatgactctggggtgacaatgactctgaggtgacaatgactctggggtgacaatgactctggggtgacagtgactctggggtgacagtgagtctggggtgacagtctggggtgacagtgtctctggggtgacagtgactctggggtgacagtgtctctggggtgacaatgactctggggtgacagtgtctctggggtgacaatgactctggggtgacaatgactctggggtgacagtgactctggggtgacaatgaacttcttagcaccagaccctggtagctccaaacaatgaaaagtgagtccctcaaaaaagtccctaataatttatgtattgcttatattttattgatttattgatatttattcacttgtcataatcattagctatcttgaagagttggagctgtcgggtatgggtttgaattgaggcagaaaataatagcattacctgtagccattacaacattagatgttaattccagaatttcagaaactagaggtgagattaagaaagag

SEQ ID NO: 6531 - DNA, 870 bp, Artificial sequence
  DNA replication origin
ctgggaggtgaggagcgtctctgcccggccaccccgtctgagaagtgagtagaccctccacctggcagccgccccgtctgagaagtgaggagcccctccgcccggcagccaccccgtctgggaagtgaggagtgtctccgcccagcagccaccccgtccgggagggaggtgggggtcagcccccgcctggccagccgccccgtccgggagggaggtgggggatcagccccccgcccggccagccaccccgtccgggagggaggtggggggtcagccccccgcccggccagccaccccgtccgggagggaggtgggggggtcagccccccgcccggccagctgccccatctgggaggtgggggggcgcctctgcccggccgcccctactgggaagagaggagcccctctgcccagccaccaccccgtctgggaggtgttcccaacagctcattgagaacgggccatgatgacaatggcggttttgtggaatagaaaagggggaaaggtggggaaaagattgagaaatcggatggttgctgtgtctgtgtagaaagaagtagacgtgggagacttttcattttgttctgtgctaagaaaaattcttctgccttgggatcctgttgatctatgaccttacccccaaccctgtgctctctgaaacatgtgctgtgtccactcagggttaaatggattaagggcggtgcaagatgtgctttgttaaacagatgcttgaaggcagcatgctcgttaagagtcatcaccactccctaatctcaagtacccagggacacaaacactgcagaaggccgcagagtcctctgcctaggaaaaccagagacctttgttcacttgtttatctgctgaccttcc

SEQ ID NO: 6532 - DNA, 1110 bp, Artificial sequence
  DNA replication origin
agacggggtggtggctgggcagaggggctcctctcttcccagtaggggcggccgggcagaggcgcccccccacctcccagatggggcagctggccgggcggggggctgacccccccacctccctcccggacggggtggctggccgggcggggggctgaccccccacctccctcccggacggggtggctggccgggcggggggctgatcccccacctccctcccggacggggcggctggccaggcgggggctgacccccacctccctcccggacggggtggctgctgggcggagacactcctcacttcccagacggggtggctgccgggcggaggggctcctcacttctcagacggggcggctgccaggtggagggtctactcacttctcagacggggtggccgggcagagacgctcctcacctcccagacggggtcgcggctgggcagaggcactcctcacatcccagacggggcggtggggcagaggctctccccacatctcagatgatgggtggccggacagagacgctcctcacttcctagatgtgatggcggccgggaagaggcgctcctcacttcctagatgggatggcggccgggcagagacgctcctcactttccagactgggcagccaggcagaggggctcctcacatcccagacgatgggcggccgggcagagacgctcctcacttcccagatggggtggcagccgggcagaggctgcaatcttggcactttgggaggccaaggcaggcagctgggaggtggaggttgtagcgagcgagatcaggccactgcactccagcctgggcaccattgagcactgatgaaggagactccgtctgcaatcccggcacctcgggaggccgaggctggcggatcactcgcggttaggagctggagaccagcccagccaacacagcgaaaccccgtctccaccaaaaaaatatgaaaaccagtcaggcgtggccgcgcttgcctgcaatcgcaggcactcagcaggctgaggcaggagaatcaggcagggaggttgcagtgagccgagatggcagcagtacagtccagcttcggctcggcatgagagggagactgtggaaagagagggag

SEQ ID NO: 6533 - DNA, 886 bp, Artificial sequence
  DNA replication origin
gccgcccggcgccctggccctggcatccgggaggagcagccgccggggctggctgtcccgggagacgcacggctgcccgcctgcagcttcaacggcggtggtcgccgcgagccgtgagcggcggccaaggagaacggtctccgttgcgcagcgcgtgctgtccctccggcacgggctggaggtggcagtcagcgcgcctctgcctccgccgcgctcgcggcgctccgcacgagtcccgagccggcgtcagcccaggtgcaccaggctggggagaggtgcgagcccgcgcgaagggaggggcccgcggcctgagggtgccgggagagagcgagactgatgaccacgaaaaaagaaacctggagactagaggcgaggaactagctttaatggagtgagtgggtcgtgggtgttaagtggaaacacgaggaggcgaaatgcatctagaaactacagatatcggaaatgagcttgagtgagctgctttttgagtgaggctcgaaaagggggctgtcattttgtgcttacctcctttatcctcctggtttgggtgcagtaccagacaacaacttcccccacactctcaactctcatatttaactataaataacgctaacctcaacaatcttggacagcagacgcaacgaaatctggtgaagctactgcaagaatacaggggagtcccacatccacaaatcccacatgcccatccctctggaaggacccatatcctactgagatttctctcctcttacctgtctgtctcctctctctctcacaagcacacgcactcacacactacggtaccctagggatgaaatcacacgcacgcacacactacagtaccctagggatgaaataccttttgttgctctgttctaggacttaa

SEQ ID NO: 6534 - DNA, 1173 bp, Artificial sequence
  DNA replication origin
gagagagctgcccaggcgcgagggggagggagactggggaggccccagggacgggatgtcccctgcggaccgtctagtcaccgaaagccggacccacgcaccacgcacccgaccacgcctgtccccgccgcgctcgcgcccgcccggactcaccctcagcgccgccgctgccgccgcccccggccgttccagctccggctcctgaggctgctgcccgcggctgtcgctgtggctgcccctgagtcctggaaagtgaagccaccacctccgggagccgccgccgcccggccgtccgcgcgcgcacccgcgagtgcgcgtgcctgcgcgcccgcccgggagagaccgcgagagcgcgagccccacgtcggccatgcggcgccgcgcgcctccctcctccccccgcccctcctcctccggcgcgcggccgcgagggggcgggggcgggagcgcgcccgggcgggctgccccgccggtcgggagagggggtggggaggcggcgaggaaaagtaaagtgacagctgggtcccgcgcgcagactgggctctgacgggggtgagcgaggggcgtcccacggggaaggaacgacaaggacggggagaagtgggggaaaccgaggctgacggggtggcttgaggggaggggacgcgaggaccttgccgggcacgcgcattaaagggaaacgccggctgggggttaggggttaccccaagacggtgcaggcagtgggacgaggaggccttttacccccatccaccgcagcccttgacttcacgctcgcctcgaagctttcgcaaagtagatacggggactgaccctgttgacacactaacccaaactcgcagacgcgtggggctcgcatgtacccaagacaggaaaacttcacgttggcctggaaacttcttccaggctaagcctgagtcttcaccagacactgcagcacgaaggcccttctgccttttggctcgccctggcccagaatgcgcaccagccggtagagaggagcttcgggccgtttagccctggggtattgaagagaggggtgggggtacagggtgcaccactgtcagagtgagtgggaagctgccttcatgcccagttgaaggatatgggaacagtagcagtgctgtaggtggcatgagggaacattaggttccgttgtactcctcatcccaa

SEQ ID NO: 6535 - DNA, 1301 bp, Artificial sequence
  DNA replication origin
tccaaattgccgtagtaaaggcaaatatttagattcacaaagtccagactgaattatcacatatctagaaacatactttttaaagaaatcagggattaaaaactaagaagagcgtaaaatcctttagaaccgcgagatactttgagggtaaaccctagcacttcctttcgtacttttaaataaaaatattttagtagactctcaagaatacacaatacaaaacgatgaatcttgaaaacatgcaaatgggtctaacagccaccgagcacaggatgatgtctttctaaagcagccttaatttccttaagggaagatggattggacatttctggttggtcgtgggggaaaaaagccacaagaagccacgctttatcttcattagaaatggtaaagggcaaaaagatcaaaacattatgagagagatcggagaaaagagggggagaagtggggtgggcgggaagggggagaggacagagggaatccagtttcaaaccaggccagtgggggctgcagagaagagaccagagaaaaatgggcttcggttccaaactgtgacaagcgccaggcatcacaaaagaccaatacaacacacacccctcaccaggacacacacaaatataccccacaaggtcttctccgggcgggccaccggggtgcggcggcgaaggagccaaacccggcactcgccaggagacacaccatgtgcagcaattatgcaattagggaaaatagcaaaagatcaagccgggcactttccaccgtgacatttatcctgtacttttgaaaagacttagttccaggatgcggctaggagaaggaaagcgctgggagggttgagaaggatggggaactgagaacggaagggggtagaaggaggacagggagagaagaggcagaagggggggatgggaagaagggggaggggtagaaagggcgagaaacgggggcaggaggctcgcgggagggggcgtagggaaccgggcacggggagcgaggaaggagggaactagggcacgagcggtgtaagcagagacctgcgacgcggaggggaggtcgggggagtgaggaggacgtcagcgagagggaggacgcccgaggaggggaggcaccggcgcggcccgagcgaatacctgaggggggggtgtccgtgcaggtcgcaggctcgagccgaagccctgggagagagctgcccaggcgcgagggggagggagactggggaggccccagggacgggatgtcccctgcggaccgtctagtcaccgaaagccggacccacgcaccacgcacccgaccacgcctgt

SEQ ID NO: 6536 - DNA, 1117 bp, Artificial sequence
  DNA replication origin
cactcctgtagggggataggggctgcggcggggaatgggggggtcggcctccgcagcgaagacataacaatgagcccttccgccccggaggggttaatccccgcgaacccccgcccctggggaaaacggggctcccccaactccctcccacccccgctcccgggcccctcggtggccagtggggggctcttggggcagcgctgacagttcgagccacaatgacccccgtcctcaatgcgggcggcccccgcaccccacgcggcccggggtccctgcccatcccccgcgggcgggccccggacccctggggctccccagcccctctccgctccccccccgcgccggccccgtgccctgcggcccggcggccccggcggcgcgagtcgggggaggcggcgaggggtgtccccgaggcccggcggcgcggccggggggcggcgggccgctggggggatccccgtacctctctttgtgtctggctcctccgtgccgccgcggcggctgctgctgcggctgcggctgggcctggccactcgtgtctctctctcgctgggagagaagcggaagtgcagcaacagcaactattaaacaggcaatggcttcccccagccacacacgctcgcacacacaccactcctccgccgccgcctcctcctcctcctcctcctcgccctcacccctcccccacccggcccggtcccacccacccgcgctcccctccccctgcaacacctcctgggggtgcgcgaggaagacccaggagaccccaggaaaccctgtcccccacagacacccccaccccagcgcctcctccggacgcccgggaagggggcgagggttgtgaattttctcttaagtggtttgggaacctggattctgggcgggagaggggaagccgatggagatggggggcgctgggagtgattggaactagatggaataggggggtcacgagagaaagttctttccaatgagggcttttggaaaggagaggagtagggaggtggcaaattggtgaaaacgttggtaatctggtggtggcaaagactttagagaatgcagcgggtactccacctaaaaagcgattaaagagaaaaaaaaaatcacacaacaaggg

SEQ ID NO: 6537 - DNA, 1117 bp, Artificial sequence
  DNA replication origin
cgacccccccattccccgccgcagcccctatccccctacaggagtggcgatcgggcgtgtgctccggacccccgcccggccgcatagctgtgagcagggcggccagaggcaggcaggccgggaggggcgtcggggcgcggcgcgggggggcctcgggcctcgtcgcccctgccccccgccggcctctcccttcccccacccgggcacccgctccccgcctccgtccccctgtttcggcttcctctcttactccttcccgcccctcctctcttcccgacctcgccaaactccgctcgtggccccacagtctcacccgggccaccggcccctcacgacccccggaaagcggacaaaaacagccccgaggccggccggccgccgggaccttccctccctgccccgccgtggcgccccgcgccccccgccctgccctccttcgcctcccgggctactccctccctgcccagcggagagccccggggggcgagggaggggcctctctcctagctccagaccgttttcccacagcgttccccacttggggccaaaaataaacaagccgcgtccgatttgcaaaagccttaatgggcctgcagactttgaaaagcgagtggagggcggtgggcggccgcgtgcgcccctggtcaatgccctcctgacagcacccgagttccttatttacactggctgcatggtttgtgtgtttctgttttgtttctctccccctgcaggggctgtttgcggggtggggtggggggttcgctatgtcggatgacgattcgagggccagcaccagctcctcctcatcttcgtcttccaaccagcaaaccgagaaagaaacaaacacccccaagaagaaggagagtaaagtcagcatgagcaaaaactccaaactcctctccaccagcgccaagaggtactgtgctcttttttttttccacaggcttcctatttccgaactgcctcttgctgcatttggtctgcctcccaatgaggatagcttaaacgctcctcatggtttatgtgttcttaaaaatgaaagaagggccttggaagccctaattattttctctattgctgcttctgtttttaaatcattgctcacatgcagctgttg

SEQ ID NO: 6538 - DNA, 894 bp, Artificial sequence
  DNA replication origin
catctgagaagcgaggagaccctccgcctggcaaccgccccgtctgagaagtgaggagcctctctgcccggcagccaccccgtctgggaagtgaggagcgtctccgcccggcagccaccccgtccgagagggaggtgggggtcagcccccgccaggccagccgccccgtccgggaggtgaggggcgcctctgccctgccgcccctactgagaagtgaggagctcctctgcccggccagccgccctgtccgggagggaggtgtgggggggtcagccccccgcccggccagccgccccgtccgggaggtgaggggcgcctctgccctgccgcccctactgagaagtgaggagctcctctgcccggccagccgcccagtccgggaggtgaggggcgcctctgcccggccgcccctactgggaagtgaggagcccctctgcccggccaccaccccgtctgggaggtgtacccaacagctcattgagaacgggccatgatgacaatggcggttttgtggaatagaaagaggggaaaggcggggaaaagattgagaaatcggatggttgccgtgtctgtgtagaaagaggtagacatgggacacttttcattttgttctgtactaagaaaaattcttctgccttgggatcctgttgatctgtgaccttacccccaaccctgtgccctctgaaacatgtgctgtgtccactcagggttaaatggattaagggcggtgcaagatgtgctttgttaaacagatgcttgaaggcagcatgctcgttaagaatcatcaccactccctaatctcaagtacccagggacacaaacactgcggaaggccgcagggtcctctgcctaggaaaaccagagacctttgttcacttgtttatctgctgacct

SEQ ID NO: 6539 - DNA, 1339 bp, Artificial sequence
  DNA replication origin
gtgtcccatgtctacctctttctacacagacacggcaaccatccgatttctcaatcttttccccgcctttcccctctttctattccacaaaaccgccattgtcatcatggcccgttctcaatgagctgttgggtacacctcccagacggggtggtggccgggcagaggggctcctcacttcccagtaggggcggccgggcagaggcgcccctcacctcccggactgggcggctggccgggcagaggagctcctcacttctcagtaggggcggcagggcagaggcgcccctcacctcccggacggggcggctggccgggcggggggctgacccccccacacctccctcccggacagggcggctggccgggcagaggagctcctcacttctcagtaggggcggcagggcagaggcgcccctcacctcccggacggggcggctggcctggcgggggctgacccccacctccctctcggacggggtggctgccgggcggagacgctcctcacttcccagacggggtggctgccgggcagagaggctcctcacttctcagacggggcggttgccaggcggagggtctcctcgcttctcagatggggcggccgggcagagacactcctcacctcccagacggggtcgcggccgggtagaggtgctcctcacatcccagacggggcggcggggcaaaggcgctccccacatctcagatgatgggcggccgggcagagacactcctcacttcctagatgggatggcggccgggaagaggcgctcctcacttcctagatgggatggcggcggggcagagacgctcctcactttccagactgggcagccaggcagaggggctcctcacgtcccagacgatgggcggccaggcagagacgctcctcacttcccagacagggtggcggctgggcagaggctgcaatctcggcactttgggaggccaaggcaggcgggtgggaggtggaggttgtagccggccgagatcacgccactgcgctccagcctgggcaccattgagcactgagtgaaccagactccgtctgcaatcccggcacctcgggaggccgaggctgacaaatcactcgctgttaggagctggagaccagcccggccaacacagcgaaaccccgtctccaccaaaaaaatacgaaaaccagtcaggcgtggcggcgcgcgcctgcaatcacaggcactcggcaggctgaggcaggagaatcaggcagggaggttgcagtgagccgagatggcagcagtacagtccagcttcggctcggcatcagagggagaccgtggaaagaggggagggggagggggagagggagagggag

SEQ ID NO: 6540 - DNA, 1749 bp, Artificial sequence
  DNA replication origin
tgtaggttctagttttgacaaatgtgtaaaaacatatattcaccattatagtatcatacagaatactttccctgccctaaaaatcctctgtgctctattcatccctccttcccctctagcctttagtaaccactgatctttctactgtctccagttttgccttttcttcctttttttgagacagagttttgctctttttgcccaggctggagtgcaatggcgcgatctcggctcaccgcaacttccgccttccgggttcaagcgattctcctgcctcagcctcccgagtagctgggattacaggcatgcgccaccaccccggctaattttgtatttttagtagagatggggtttctccatgttggtcaggctggtcttgaactcctgacctcaggtgatccacccgccttggcctcccaaagtgctgggattacaggcgtcagcccccgcgcccagcccagttttgccttttctagaatgtcgtatagttggaatcatacagtacacagcctttttagagtggtatcctcttttatgatttcttttctgccttctagactgttcatattaacctcattttacctgtgtagaagtagatggtagttgatacatgaaaaagcaagcaagctacaaagcgtggcctggggaactcttccatcagcatcacatgagggtgataaattccagaagtagggaagaatagagggctaccgtgattagggaactgtgtttagaagggtttgggtatcaagacagccttggaaagagaagcaggacccacatctgtgcagggcgaagcaggtcaggttaagtcgttgaattttttcaaagtgtaacacgaagccattggagggttttcagcagagtaatcagatcttatttacattttaaaaataatactttgactgctggggagaagtgactgtaggaggacccaagaagcactctcctagttagggaaccagagcagtagctgaggcaagagataatggtttgctctagcaataccaacggtgagaaacagggattgaacatattttgaaggtagaatagctcagacttgctaatggattgaatggagaataaaaggctgtgagagtgttaggagagaaacataattttgctggcttcaggaacttgcagatttaccaaaacagtaaatattgatatggtgaagaaacctggggggtggggaaatagggtgttgcacatgtaaatatgtcttccacgtgacattttccccaccttctatagtgaagaatttcagagcaaactggaaagagttttacaagcaacacccatatccccatcgcctaagtttaacatcttaccatatcatctattcatgcctctatcagcccatcttacttcagtaatgcgtttaaattgcgggcatcaatgcactttcctcagaattcacctcagcacgcatacaatttatgtctagcttttttcttttgatctaaaatttacattcaaggtgaaacgcccagatcttgactgcacattagctgagttcggacacacgcgtacacccgtctaaaatctgagatgcaaaaaagcggcataatcaaacgggctgctggatgtaggaatctggagattagaagagaggtcttggcttgaaatataaatctgggaatcacaagaacataggtctacttaagctatgagattggataaaatcacctagagggtgcagagggaaagggaagggtctgtgccctcagagaccagcgtttggaggtc

SEQ ID NO: 6541 - DNA, 799 bp, Artificial sequence
  DNA replication origin
tcttaccatatcatctattcatgcctctatcagcccatcttacttcagtaatgcgtttaaattgcgggcatcaatgcactttcctcagaattcacctcagcacgcatacaatttatgtctagcttttttcttttgatctaaaatttacattcaaggtgaaacgcccagatcttgactgcacattagctgagttcggacacacgcgtacacccgtctaaaatctgagatgcaaaaaagcggcataatcaaacgggctgctggatgtaggaatctggagattagaagagaggtcttggcttgaaatataaatctgggaatcacaagaacataggtctacttaagctatgagattggataaaatcacctagagggtgcagagggaaagggaagggtctgtgccctcagagaccagcgtttggaggtcggtcgggtgggagcggggggtgggggtggggggcgcaagggttgagcaagcccgaaccagccggcccagccggggtcctgagaatcacccttgctcggcgccaagccaccgctttgacctaagagccaccaggttggggggcagggcgtggagaggactcccggccagaggcgggaaaggcagccgggaggagaggaaagaggaggaggaggggaggaatatgcggcggagggaaacggagaagaggtttacggcacggaggggaaaaacgaaggaagaggaggggctcggcaaggagaaggaaggggagaagggggaagcgcaggagaaaagggtagccggggagccgggaagcgggcgggagggaggggagcg

SEQ ID NO: 6542 - DNA, 1103 bp, Artificial sequence
  DNA replication origin
acgcctataaaagtggagagaccggggaggtgcggcgcggccctggctgcggccgcctctcttcgcccaaggagttgacattttgcaggactcgcgcgacgcccagtcgccggcgctccccgggaccccgccgccgggaggagggggcggaggagggtggagactgcggggcttggccaaggaaggcgcacatcctcgggcgggcggccgtgacgcggcggggattaactttgcatgaataatgtgagtgcgcttggaaaagagacctcctgctccgcgggctcggggcaagagcccgcaggctaccttccccgggcaggggcgctcaacccaaccggctccagggcactggtaatttggctagaggaccgcgcggaggcagcggggtgagaggaggagggggcgacagttccaactgtccacagggtgggcgggatggtgacggagcgtcgcaagaacccggaggggtgcgggcggctaagccgagcgcgcgcgggcgggcaggcgggtgagcgtgggtggtgggggtgtcatcagcctgattacctgcctccgcggggcttctgcgccccggatctgggaggaggtgccctctcgtgttcgggcaccgcgcggcggcaggctgggagctacggagtggacagtggtggaacagggtggccgggctctgttccaatcgcagcggctctgttcctcaaaccccaagcccagctgttgacatgttccttgtgaaatggagtttggcatcctcagcgccgaacccagtggaagtttccatgatgaggaagttgtgtgacatgggggttcggaaaaggttggcaggccaggggggagggttaaagggactgtgggtctcccatcccccctttttcgcctgccccggaactcccgggcttggaaaggagaattatcctggatgttggcgtgcgccgtggccggtgcctggcgactgggcttctctccgcctcctgggggcttggcggggatttcgctagcctcctgggtcgcgctccttcgctttgcttctcttggcgcagcatcttcctctgggtctcctcgagttggttgtgataccaattgtgccaactgtgtgacctccaccc

SEQ ID NO: 6543 - DNA, 1304 bp, Artificial sequence
  DNA replication origin
cccgagacccggaaggggccgcccagcgctctcagccggctcgtagagccagggccgggctcagggagcttcagagcaagaaacaccgaaggtgtaaagcccgagcgagcagctcgagtctcagtcctgcagcctaaggcagcccctccaagccgtgggcgccggccgtccgtctcctcaccgtggcgccctttactcggccacccggggcacagccaggggcttcaccgagccccgggtccaccgtggtcgcggccgccggtcgccgggagcccggagccgggacgcgagggttgggggttggggatgggtcccagtgtcgcgcgggagttcaaagcccggcactggcacggggctccgccgccgcagccgctggagccttgggctcccgccgcggggagagcgggggtagggcgcctgtcccggagtgacccggcggcggaggaagggcgggccgcaggcggcgggcccgggggaccttgagcgggcgggcgaggagcgggtgagaccgaggtcgacagagtgggggccccacgaggcccgcgcctggtcgggaagagagtaggagattcccccgcgagctcagacccggcactgagggaagagacactccgagtcctgcgtctccaagttttgctccaatgcccttgacattgaatgcatgtgtggcgtctatcctggcgcaggcgatttgatattttcaataggcctaacctcaccagtggcgtgcccggcccggctggctagcggctcctgtccccaagacccccgcagtcaccagacctttgcactgcccagcgctggagggggcgaccagagccttacaggctccacggtgggcgggctcttacctcctgacttattcctcctggcgctgcaggggggactgaggttaggtgtccggtgggaggctggactgtgtgtgcgtgtgtgttgggcggaggcgtggggggaagggaagtggagggtaggttgctgagcccagggtccgtaacagcagcacatcccaggttccacccccacccacagggctggtaaatcctcccctttcctggggtctgagtgagaggatagtacaaaggtcagattgtccaaaaggatagtgggttctgctgtgagatttaattgtgacggcatcaccaaatggccgttgaatttctcgatcatttcacagaggaagacatcctattttgagtgtcctgaagtgattttaattttcatctgggcaggtggtgataacttctggaaacaccaaggactaaaaaggaaggaaactgcagaaagtggggggccacagaagcagc

SEQ ID NO: 6544 - DNA, 875 bp, Artificial sequence
  DNA replication origin
ggcttggcgccggacacagggacgcggccagggaccgagccctggaggctgaggctctaagcctggactgtcagccgcgaaggggttcttgctgtgtgcgcgctttggcaggaagaggctgtgtgtgattgtagagacgatgggcggaaaaacagagaagagagaggtacttggaatctatgtaattgcagtgtgccccagtgtgcacttttctccctccagatattttgaaaaaggtgtgcacgccgatgtcttgtaggtggactcccggaggtgggggtgggggtgggtacgagggataagttttacctagagctagagctggcgttgaaagtgaacaggtgacagaagacgtgtgtgtgtgtgtgtgtgtgtacgtgcgcgcgcgccgtggctaaggatgctcgggtgctggaccgcccgctgtgcctccacacccctccgccccgcccccttccagctctcagcgcggggtgagtttccctgacactccccgccggaggcaagcaggcagaggcgaagtgatggtcgcggagtggaacagacaaaagggtgcatttggacgacccttccaggaccaggcggccagagtgtggggtgtgtgtgtgtgtgtgtgtctgtccgtctgtctatctggagggggtccctgtcctgccagttatggagggaccactgagagaagaggaaagaggtaggagcgggagaaagacaggtgaggcggagcggaggataagaaaccgaatgggagagagtcgagagccgagatttaaaagcatcttgcctaattggacgcagatttataaattaatttttaaaagaggtgctagaagtaggagaagaagaagaaaagagccctgaagctaaaattttacagg

SEQ ID NO: 6545 - DNA, 1187 bp, Artificial sequence
  DNA replication origin
cggcgtccgcgtcgcccgggcctagcgcggcggctgaggagaaagcagggagcgaccggcggcggccgagcggcggcgttgccttctcgcccgcccgcgggcgccgctgcaggccgggctgaagcccgggcgtgcgagccgcgagggcggccggggagcccgaggcgctcggacgtggcgaggacgcagaggtgccttgtccttctcacactccgcgaaggccagccactcgagtcgccagagtagtcgtcccggtcgccgccgctgcttcaaaggcagccttagcctcgctgcagccccgatttcctcacacacacacaccgagagggacaataaacagagccgccgccgccgccgccacggtcacctccctcttgtccggcataacaccgcacacacacatttgcacaccggggagagagggagggcgcggcggccgcccccgctgtcagtcagcgccatgctgtccaatccgggccttgtcgccacagcctctcggccaatcccaaaattccaagccccctggaggggcgggacccgaggggggaaacgtcattgcgggtagcaaccgaaaggaagacttggggtttttgtttgtgtgtgtgtctgtgggttttccatttgaagggagagcaggggctgcttcaagggtcaattgagggcggcaaagggaaagggtcgaattggcctcgggtcgattgtaatcctccaagcgtgctgtttactctgagacctaaccgggaatccgaagcgtttgcctggggcctctaaggatgaggatgggggcggggtggggatgggggtggcaggaagaagccgggggccgtcccaaagggaaattattttaaaagagcggttgtaaaccgcaggcaagacgttgtagaccactggtgcaaggaggccccgtgacccggcctccccaagggcctaagtggacgctgctgtcgaaaaaaatcatctcagaccttctccatctccttcttccgtctcctcccctcaccccaaaagagcatatggtcagtttcaagaaaactacatatgaaaagcttaaatgataagggacacacagagaatgttctagggaaagaatgcagggtgggttgagtgttctatttctactctttgttgacctttcttctctgaacaatgcagagatgtcactgtcacttttctcatctgtccagaac

SEQ ID NO: 6546 - DNA, 1657 bp, Artificial sequence
  DNA replication origin
ggtctgtccgggcgtcgctgccctctgaagctcaggccggacgccccagtccctggccgaacaaggtgccgcggcccacccaccccggtacccgccgtccgaccccgttgccctgcacctgaggatgttgtcagcataggtgagcagcagcttggaggcctccaaaaaggtctccggggtgttctggcagagctcagccacggccggggacgccgagcctgaggagctgcccaatgccgccgccgccatgcttgagcgccagcgggcgccgccgccgcccctcgctctccgcgtcccacactgagcaggcgcctcagcgcgcagcagctaccgcagccaccggcaggggcggggtcctcggccggcaggggcggggtcctcggccggcaggggcggggtcctcggccggcaggggcggggtcctcggccggcaggggcggggtcttcggccggcaggggcggggtcgggggcctggggcggggtcggggaccggggccaggagcgggggagctcggctgggagctacggctgccccttcgcggggggcaaggggctgttcggaagaaggtggggggcctcggccggcaggggcgaggtgcttcgacccagagttggggcctggtcgtacaggttgggaaggggttccgcagggagaggcggggcctgggctccggggctgaggggtgtgggcctggaggagggggatgtcgagtcctttaggacggaggagctcggctggaggggaggccggctttggtctagaggtatcgggcgaatggtgctggcacgtgcctctcagaaacccggatccctttgcgctccggggccagcctaattgatccagctattaaggtggagaaaccgcatgtacctccctcctttccccacaaataaaaccaccttagagccttctcttcgcagattgtcaggacgttctacatagatgtggatgaaagactacagaaggaaggagcaacaaacgtcaaaaacaaaaccatggctataaactctgctgggtttgttatatggattcttttcagaatttggctaatgactgaaaatctaagttccagctcaactagtatatgattcctctgtaaggaagtgtatttttaaaccataggttgcgacataataatgggttgtggattcggtttaccgcgtggtgaccagcgtaaaacacatgcataataattacgcaatattatagaatgtcgggggcgggaagggaataaaaatttgcatcccacacagtaagggtaagtaatattttgtgacttgttttttaggtagatcatgtgatcaaggtcttttattcctcttagaagatgcatcccttactactttaatccagtctcttccccaccatgttcttgaaagtgtactttaccagtggcttccttctttgcagaaattccttttcaacctcacgaagtatttttcttgactttatttcttaagataagtgatttgcctgaataacctcttttaaatttcttgatgtttcatctgtttacttttaagaattgaaattttcttccagaatctccgaacaagaccctaagctatgacatccagttcaatgactattcgtctcccaaatatacgtacgcttttaataaatatgtaaatctttggaccaccttccaagtatgg

SEQ ID NO: 6547 - DNA, 1134 bp, Artificial sequence
  DNA replication origin
tcctccctcattcccagcctgggtttggaggcgatttccctctattgactgagccgactgcatctctgggcaagcggcgctttgcctctctcctgtctttgtctgctcttcctgcaaggctacggcgcctggagcagggtctgcagcggccgccgcagcaacgcgagccaagtcgtgccccgcacggccgcccggggccgcaccctcgctcggtggcggcgcccgaagacgccagccgcgccacgcactgcctgcgtcccgcgccccagccgccgcgcaccaacgccgccgccttcgccgggagccaagcccgccgggccggcccggtcccaggtgggcagctcggcttgcagctggttggaggtggcggccgctgcagccctggcagcgggcacacccctaagcatacgcacccaacgcctcctccctgagccacgaggatggagcagccaccccggcccgggactggcgcaaggtaaggtgcagccgcctgttgcttttcgcagagcgcgggatcatccctctgcccgggtacctaggccgtccctccaaggaacaagtagaggagaactattacaccagttctaagccgtgcctgtctaagcctccctgatcccttttgcgcagaccctgggagagacctcctcctggagagagagagtcgaccctcttcgctcctgttcagccggctgctatacaatagtctgcaaacttttgtgaccccttccctgcgcggtgctcaccccgtgctgtgcaacttgcaggtttagttcttgcccttcccccagcccctcttgccatatgcatctgcccatttctctctgtgtgttcttgccagtcgacttttcactccccgcagctctggctcctgaggcgagggtttgggacccagcagtgctcgtcctgcctctaggagctgggtagggacagagaaggtgaaataagagaggtgggacatggaggatggctgcggccacccctgaagcttcgtccagcgcgatgggagtcagtccatccttgcacacgccacccccaactcggcaatgaaacctttggagtggcttgcggctgtgcgccgtgggaactgcaagtgcagatatgggtgggtgaagtaagtggctcagggagggaaag

SEQ ID NO: 6548 - DNA, 771 bp, Artificial sequence
  DNA replication origin
ttctctctgtgtgttcttgccagtcgacttttcactccccgcagctctggctcctgaggcgagggtttgggacccagcagtgctcgtcctgcctctaggagctgggtagggacagagaaggtgaaataagagaggtgggacatggaggatggctgcggccacccctgaagcttcgtccagcgcgatgggagtcagtccatccttgcacacgccacccccaactcggcaatgaaacctttggagtggcttgcggctgtgcgccgtgggaactgcaagtgcagatatgggtgggtgaagtaagtggctcagggagggaaaggctgctcgtgcggtggaggaggaagctgagggtcgggtagatctgcccacggttgagggaaatgaaaaggtactgctaatgtgggcgagcggccagccctgagaggccatctgacgaagaggaaaagggatttgagtccggagggcgctggcctgggtatgtaaatacagatgggggaggggctgggtacctgggggcgcgtggagacaaggaatggagccccggaatgccgggcccttgggtacttgggaaggcaggctgctgagtgcctgggatggggcgatcttcctccccagaagcaaacaaacctccccgcgagaatctgaatgcgttggcatcttgggtggtgactgaatggtcagatcgtggactagggatgcttctccaagctctaagaggaccatagtctgctctcttctctggcacccgcttgcttctacgctccttcacct

SEQ ID NO: 6549 - DNA, 1067 bp, Artificial sequence
  DNA replication origin
gtggatacagcttccagggtgctagaaataaaatgatgccaatcgtaatggaagctggagttaaaaaggaaagtcagaccacgtcctaagaaaatgatagccgccagcggtgctgacgtcggcggtccggccgggcgacctcatcgccccgacggcagccggcccggggggcggggagaggcgggggcggcccccgcgcaggcaaaggcttggggggccagggcgcggcagtgcagctctcgccggagcccagccgagcccagccgagcgtccgccgctgcctccgcgccgccgctgcctccgcgccgccgctgcctccgcgccgccgctgcctccgcgccgccgctgcctccgcgccatggccggcctcagctacctggaggcagtgaaacgccagatctaggccctgcagcagcaggcggacgaggcgtaagaccgcgcagggcctgcagcgggagctgggcggtgagtgtgagcggcgcgagaaagctaaaggtgatgtggccgccctcaaccgacgcatccagctcgttgaggagaagttggacagggctcaggaaagactggccacggccccgcagaagctggaggaggcagaaaaagctgcagatgagagtgagagaggaatgaaggtgatagaaaaccgggccatgaaggatgaggagaagatggaaattcaggagctgcagctcaaagaggccaagcacattgcggaagaggctgaccgcaaatactgggaggtagctcgtaagctggtcttcctggagggtgagctggagagggcagaggagcgtgtggaggtgtctgaactaaaatgtggtgaccttgaagaagaactcaagaatgttactaacaatctgaaatctctggaggctgcgtctgaaaagtattctgaaaaggaggacaaatgtgaagaagaaattaaacttctgtgtgacaaactgaaagaggctgagacccgtgctgaatttgcagagagaacggttgcaaaactggaaaagacaattgatgacctggaagagaaacttgcccaggccaaagaagagaacgtgggcttacatcagaca

SEQ ID NO: 6550 - DNA, 1269 bp, Artificial sequence
  DNA replication origin
ttagtgacaccgacgccggggacgcatttgccagcgctgcggcagtggccaagccggggcccccggacggccgcaagggctccccctgcggggaggaggagctgccctccgccgctgcagccgccgccgccgccgccgccgcggctgcggccactgcgcgctactccatggacagcctgagctccgagcggtactacctccagtcccccggtcctcaggggtcggagctggctgcgccctgctcactcttcccgtaccaggcggcggctggggcgccccacggacctgtgtacccggctcctaacggggcgcgctacccctacggctccatgctgccccccggcggcttccccgcggctgtgtgcccacccgggagggcgcagttcggcccaggagccggtgcgggcagtggcgcgggcggtagcagcggcgggggcggcggcccgggcacctatcagtacagccagggggctccgctctacgggccgtaccctggagccgcagcggcgggatcttgcggaggactggggggcctgggggttccaggttctggcttccgtgcccacgtctacctgtgcaaccggcctctgtggctcaaattccaccgccaccaaactgagatgatcattacgaaacagggcaggtgagcgcagcgtggaggggcccctgggttcggggataaagggtgacgtgtggtcctggggaaggtccgggatgagggagctgaacccagttgttccgcgcggtgcttagagtgtttcaccgcgcgcaataaatctccgtagacaccgcatctccaatgcggtgtccctctgtgtcagtgccccggcggctcttgcagggtgccaatgttacggctgtacaccgcttttccctcccatcatcctcacctgaacagacctggaggaggcggaaatggaaattagggcatgtccacaagctggattcgttagatcctcctgctcggcggtatgcttgtgcatgcctgcatgccggcaaggagccacggatagggaaggctcaagagctggccacctgagcgcagtagatgggctcccgcagttttaggcgccagggtctccacggggcgtctccgggaggtgggcatgaaggctagagcgccggcctcggaagctcggtcggagtaggtggttagatctgccctggagccagacctggctcgggttcggtgcgcgagaaagttctgatatacatccaactgctaacactggctacttctggggaaagggaggggtgggtgctgagaga

SEQ ID NO: 6551 - DNA, 880 bp, Artificial sequence
  DNA replication origin
aagagtgagcagggcgcagccagctccgacccctgaggaccgggggactggaggtagtaccgctcggagctcaggctgtccatggagtagcgcgcagtggccgcagccgcggcggcggcggcggcggcggctgcagcggcggagggcagctcctcctccccgcagggggagcccttgcggccgtccgggggccccggcttggccactgccgcagcgctggcaaatgcgtccccggcgtcggtgtcactaagcatggccgcgggggcccctgcgctggcggctgcgggctccccgctcaccgcctcgcaggagagactgccggaaaacttcttggacgctttgtctaagtccaacttctgaggagagggggccgcgctggggaggtggccagcgctcccgccgctgccgcctcgcgcactctccagcgggtagaagtgcgcgccaggcaggttcactgagctcaccaagagctgctcccctaactgcatgctttgcaaagcgcagacggcagctggctgcttcctctcctccggtggccttattataaaggcaggatgggggagccagcgccctcttccgaggggaaggtaacttccccttcctcccgcgccggggctacccacctgccgactcgcgggccgctactgcgcgtactggcgcgccctgaatccagcgtcctttccggaaggaaagcgccgtgagttggaaagcaggaggtggaaactaacccagaagccctctccttttccttcctcgtacctcttgctcctcaggacccccaccctcctcccaggctcacacgctggaagaaggtgacttagatctttgtccccatccacccactagcccgcgcctttctgccctttttcaattgccaaag

SEQ ID NO: 6552 - DNA, 1063 bp, Artificial sequence
  DNA replication origin
cactcattctgccttgtccgtttgaactggattcaccagggaatacaatttagttagccatttttttttctttttgcactctctagcctgccattttatttttactttaaattgcgctgcttcctcattcttcacccactccacctcactcaacctacacttaaaatctcatagagttggacaactataatgtagttccttctcttttcttaacacctgaaatttcagtttgcatagttaggtaataccaatatttatgtagtgcttcatacgtgccagacactgttttaaatgaatcaattttttcttcacatcaacaggtactattattatctccattttacaaaattgaattactactgattttaattgggattttgaatttcatagcacctcagggctagaactaaccttgaaagttttgtgtctggaattggtgggttcttggtctcactgacttcaagaatgaagccacgggccctcgcggtgagtgttacagttcttaaaggtggcgtgtccgagtttgttccttctgatgttcagatgtgttccccttctggtaggtttgtggtctcgctggctcaggagtgaagctgtagaccttcgcggtgagtgttacagctcttagggcggcgcatactggagttgttcgttcctcccgctgggctcgttcttctcgctggcttcaggagtgaagctgcagaccttaggggtgagtgttacagctcataaaggcagtgtggacccaaagagtgagcagtagcaagacttattgcaaagagcaaaagaacaaatcgtccacagcgtggaaggggaccggagagggttgccactgctggctggggcggcctgcttttattctcttatctggccccacccacgtcctgctgattggtagagcggagtggtctgttttgacagagcgctgattggtgcctttacaatcccggagctagacacaaaggttctccacgtccccaccagattagctagatacagagtgtacacacaaaggttctccacatccccactagattggctagatacagtgtggattggtgca

SEQ ID NO: 6553 - DNA, 1356 bp, Artificial sequence
  DNA replication origin
gtacccaagcggccctgaggctgggagcgcggctgggaggcgccgccgccgccgccgccgccgccgccgggatgcgctctgcttagcgggactgccgggggcgcctgaaggccagcgctccaaggacacgcggccacccgctcctcgcgcaccccggcccagacgccgccagggccggagccaagcaggcgagcggagctgcggggagcgggggcgaagggtggcagaagggagggcgcgcgggaggcggcccctcctcggcgagccatgcgtgccacgggcagctgagtagctgccgggcgccgctgccaagtctccactccgcttttgtcttgccctccagtgaatgggaagatggagatggatgttgagggagtttctccgcgcccggagcccatcccccgctcccagggggctggcggagcctgccaggcgccgccacagccgccccagccccagccgccgcctcagcagctggctcaggatgaactgcccggcgagagtgcaggcgctgaggacagcgacgatcccgagacgagacccaacggcgagaaaggagagagcaaggtaggtccacagtgttggcgctgtgataccttttgaacaaaaccaaggagttgctgtcgtggctgtcactttaacccctccgctccccaacccccttccctggtttgtgtgggggtgggggtggcagatgtgaagaaggcttaagatttaagggaatccatgggcgatagtgactttccgaactggagggtatgtgcagaagtctgtcctggtttcagtgttcagcggtgtgtgcagagaaaagtcgtctggtacatgcggtgtgatgctctgggcaagcacagcacctcagtagagcagtgatgagacctttgcttgccctcgcagtctaactgaggcttatttggatgatatgggtctaagagaaacatttctttaggagctgccaagtggcttctgagactccttggagggtggtgacatcaacctaaagataacaatgggagcaaagtttggctcatttgcagaatggagtgccctgcttaaccccgctctaagctggaggtcctcctcctgacctggcatcctccttctaggagggcagggatcaagtgcctggcagcagatgagccctacaaatcttttgcagccctgctgtgtcattgtagaccgggggatagctgctacttgctgtggaaagaggagttcttcaggtaattggattctagtaagaaatggcttgaatgttattttctggtgctgatgtctcttccgctgagaaaattgtaaagtagaggaaatggcatagaaaatactgccttggtagtattagtagggtgtgtttattac

SEQ ID NO: 6554 - DNA, 1131 bp, Artificial sequence
  DNA replication origin
gagggaggggccgggccctggccgcggcgggaggaggggcggccgcagctgcatccagccccgttggcttccttcccagctctccttcgcctcctcctcctcttcctcctgtatgagtcaggcatttcccggggatttggagcaggcacgcgcggcccgggcgtccggagctgtagcagcagcagcagccgccgtgccggggccgccaccgcggcgggcacccgcgtcccgggcgcccacggaccatggagagggcagtccagggcacagacggcggcgggggtagcaacagcagcagccgcagcagcagccgtgctacctcggcgggctcctcgccctcctgctctctggcgggccggggggtctccagccggtcggcggcggccgggctcggcggcgggggaagccgcagcagcccgggctctgtggccgctagcccgtccgggggaggcggccgcaggagggagccggcgctcgagggcgtgctcagcaaatacaccaacctcctccagggctggcagaacaggtaacgcgccagccgcccgcgccaccgcgcgccgctgtgtgtgtgtgtgtgtgtgtgcgtgcgtgtgtgtatgtgtgtctgtgtatgtgtgtgcgcgcgcgattgtgccttcagcgaacccagtgatgcctcccaacggtgcccttcctgcgtccctgctcccctccaggtggggttctcaggatggggcgcgccgtggctccaccccgggaccgcaccgcagtggcggggagggaggcgagagccctggttttcttctatgctggcacctgcagagactggagtggtggcaggaggatcgtgctggtccccgtgctctgcttgtccgcggtttcccgcacgcctgaagaatgactgggaaagggaggcagaaggggcgtgctttgtgccggggtgaaaaagcgttagcacgtccgctccgattacagtaattctctaagtaacagttcattttaaagtttggtgtttcagaacaccaccaccatcaacaaaaaacctgccacttgtcatcctgggcgactgtgcatactcctgccccagtttgtgccttgcagcctccgatgtttgtaatggaagttttgtttaaaaacagaaagaggccgggc

SEQ ID NO: 6555 - DNA, 1569 bp, Artificial sequence
  DNA replication origin
aggttggtgtatttgctgagcacgccctcgagcgccggctccctcctgcggccgcctcccccggacgggctagcggccacagagcccgggctgctgcggcttcccccgccgccgagcccggccgccgccgaccggctggagaccccccggcccgccagagagcaggagggcgaggagcccgccgaggtagcacggctgctgctgcggctgctgctgttgctacccccgccgccgtctgtgccctggactgccctctccatggtccgtgggcgcccgggacgcgggtgcccgccgcggtggcggccccggcacggcggctgctgctgctgctacagctccggacgcccgggccgcgcgtgcctgctccaaatccccgggaaatgcctgactcatacaggaggaagaggaggaggaggcgaaggagagctgggaaggaagccaacggggctggatgcagctgcggccgcccctcctcccgccgcggccagggcccggcccctccctccgcactagtttcccgggcaagttcggagcgggtggccggctaggcgagccctcttcgggttcctccttctcttccttcgtgtccctgcggcctctcaggccctcgggacactctaggaggccgatctgcagggtgggcacgccctaaatccacgccaagtcacccacgcattccttctgccaccctctcttggatccgaaggggcgaaagggaatctctgcacgtcactccccaccccttatccacctcgggacctggagggaggggcagccccacccacccggtccacccggatatggacccgcccggcctgacaggctcacacgcacactccctctctcggtcttccgcacacgatgctgcgccagacgctcctacacagtaacctggaaattatcaccggcggagcaaagtcacagctcagggaggccctccgcgttgtctggcggaggaggggagtggcaggtgatcctcacaggtaagctcgccgggcattttcatgcagcaggattatgataaatgcttaacagacacacggctgggctggggtgaggcgcgcgaactctcaggtttgtgcgagtgcttccttaaattgagtgtcctaggtcactcactggcctaaccctaatcccctgccctgaatggcacgcataaacctggcaagtcaaaacctatccattgctaccacactgcacgtgcacctaggagcagaggctctgaaaccgggaaaactgctccagaggcaagggaaattaacagatatttacaaacattgaaggattctctgtgttggctgtaacttctgcgcccctcttcctacctaaagatactctttctatcccactaatattttttgtgaatatagatatccattgtaatctgaagtatcaaaaattacctagaaaaaagctttgaggaactcagactctctctctcacacacacacagacaaaacaaaaggtgatagatgataggtgatctccgtccaaaggatctacaaacccatcaagcagataaatacttcaagagttaaaaaaaattactaaatggaaaagtcagctctc

SEQ ID NO: 6556 - DNA, 1122 bp, Artificial sequence
  DNA replication origin
taagtttgtcataattaacagcttataagctgccttttaaagcccttcaactaggcaggaaaccatgtaatctcgcctagctatacctggggaatctgcctggtagttccattggggatcttctcggggaactgctctaatgccttcctggaggtctggctcatgaagctggtggttatcagcatgagattgggctacagaaaaaaactctttcccgttcatctggggagagggtagaagtcaggatgacatttaagtcactctaagttaaattgtaggacagagttagatatcggaattcctgtatatatttagtggggtctgatgagaaagagcctaaacactggctgatttgtgaaaggtctgatagagaaaaaggcacatgtaccctgactatgccttcaactccagccacctctctaagaggaaattgttgggcaggtgggggagagctagttgcagaatgaaactgtaaaccagaccgggtgtggggaggggaggtaatagaagggttatagggtaggggagcaggggctgaacaagagttggagcctgattcagcctgacggggagcgacctgaggaggagcagtctggggaggaggtgagaggtcagatgggttagtaaaaaaggaagattcacaagactcagtgacacttggggttgggactgaagggacaggcaggagggaaagaaggaggctttgggatgagttgcattgggaacagagactagggagagaatgaagtgtgaaaaatgcctggatgtaaggcacctcagaccatttgcccatttttcgacaaaaatgatctaggtctcgtaggatggagaaatcaaaagtgccgttttctggccatttagaaccattgtcaagtttgtattggggccaagcagtgttgcaaaagaaaataagatgcttagattttaggtcaggcgagagttgaagaggttttaggttcttgagaacacaggctaagggagaagaaggaggaatggagggtggaaggttgcccatagtgaaggaggcaagattaaagagaagggtagagacacggagaaggggggtggggagcagccctgggctgcaatgtgggtgagcagccaaagcaggcatccctgcaa

SEQ ID NO: 6557 - DNA, 1193 bp, Artificial sequence
  DNA replication origin
ggtagctctgttaagtttggtgcacagccttccagtctcttcatcgggtgggtagatggggcttaggatgggatgggatgggatggaatgggatgaagggatggatgatgggtgggtgggttggcaggtgggaagggatgggatgagatagatggatggatggatgatggatgggtgcatgggtagatgggtgagtggatgggtgggatgggtgaatggatggatgatgggtgggtgggatgggatgggatgagatggatggatggatggatggatggatggattatggatgggtgcatgggtggatgggtgagtggatgggtgggatgggtgaatggatggatgatgggtgggtgggtgggatgggatgagatagatggagggatggatgatggatgggcgcatgggtagatgggtgagtggatgggtgggatgggtgaatggatggatgatgggtgggtgggtgggatgggatgagatagacggagggatggataatggatgggtgcatggatagatgggtgagtggatgggtgggatgggtgaatggatggatagatgggtgggtgcatccatcctccattgcccttccaggccagttgtgtgttaaaggtgggcttaagtcagtttatttgccacctgattgagagagtgagccctgtagcaccagaaaagcttcccagcctctcctgaggccactctccagccctacctgctccacagcactttctcttgccgatttactgagcatgattgtggaggaccataatcatgatgccaactacaccactgcataaatgcttatgcagcatattgcatgtatccttaactctcccgtaatactctctaggggaggggaggtcttgttgcctaggactgaagggagctgggcagctggaatgacatgctgattgtggctaatttagagcatgagcttctctccaagctgggaggagggtcgtggatgttgttgctattatctctggttgcagctcctttatcctggttctgtcagtttaggtgtctgctggtcccagtcatgcatctttacctccccctgcacccagcacccctcctccttttacccagaacaaattaatcagccatggagttctgtactgaaagttaaaaatgagggtggatggagcatttgtcttaccttttaaatttgcactttatttttctgaaatggc

SEQ ID NO: 6558 - DNA, 1344 bp, Artificial sequence
  DNA replication origin
tgtttcagagagcacagggttgggggtaaggtcacagatcaacaggatcccaaggcagaagaatttttcttagtagagaacaaaatgaaaagtctcccatgtctacttctttctacacagacacggcaaccatccgatttctcaatcttttccccacctttcccccatttccattccacaaaaccgccattgtcatcatggcccattctcaatgagctgttgggtacacctcccagacggggtggtggccgggcagaggggctcctcacttcccagtaggggtggccaggcagaggcacccctcacctcccggacggggcagctggccgggcggggggctgacccccccacctccctcccggacggggtggctggccgggccgggggctgaccccccccccttcccggacggggcggctggcctggcaagggctgacccccacctccttcccggacggggtggctgccgggcggagacgctcctcacttcccagacggggtggctgccgggcggaggggctcctcacttctcagacggggcggttgccaggcggagggtctcctcacctcccagatggggcggcggggcagaggcgctccccacatctcagacgacgggcggccgggcagagacgctcctcacttcctagatgggatggcggccgggaagaggcgctcctcactgcctagatgggatggcggccgggcagagatgctcctcactttccagacggggcagccaggcagaggggctcctcacgtcccagacgatgggcggccaggcagagacgctcctcacttcccagatggggtggcggccgggcagaggctgcactcttggcactttggaaggccaaggcaggcggctgggaggtggaggttgtagcgagccgagatcacgccactgcactccagcctgggcaccattgagcactgagtgaaccagactccgtctgcaatcctggcatctcgggaggccgaggctggcggatcactcgcggttaggagctggagaccagcccagccaacacagcgaatccccgtctacaccaaaaaaatacgaaaaccagtgaggcgtggcggcgcgcgcctgcaatcgcaggcactcggcaggctgaggcaggagaatcaggcagggaggttgcagtgagccgagatggcagcagtacagtccagcttcggctcagcatcagagggagaccgtggaaagagagggagacggagaggtagaggtagaggtagagaggtagagaggtagagaggtagagaggtagagaggtagagaggtagaggtagaggtagagggagagctcccttacatttttacgagatcagcactggtta

SEQ ID NO: 6559 - DNA, 936 bp, Artificial sequence
  DNA replication origin
tgaggagcatctctgcccggccgccatcccatctaggcagtgaggagcgcctcttcccggccgccatcccatctaggaagtgaggagcgtctctgcccggccgcccgtcgtctgagatgtggggagcgcctctgccccgccgccccatctgggaggtgaggagaccctccgcctggcaaccgccccgtctgagaagtgaggagcccctccgcccggcagccaccccgtctgggaagtgaggagcgtctccgcccggcagccaccccgtccgggaaggaggtgggggtcagcccttgccaggccagccgccccgtccgggaaggggggggggtcagcccccggcccggccagccaccccgtccgggagggaggtgggggggtcagccccccgcccggccagctgccccgtccgggaggtgaggggtgcctctgcctggccacccctactgggaagtgaggagcccctctgcccggccaccaccccgtctgggaggtgtacccaacagctcattgagaatgggccatgatgacaatggcggttttgtggaatggaaatgggggaaaggtggggaaaagattgagaaatcggatggttgccgtgtctgtgtagaaagaagtagacatgggagacttttcattttgttctctactaagaaaaattcttctgccttgggatcctgttgatctgtgaccttacccccaaccctgtgctctctgaaacatgtgctgtgtccactcagggttaaatggattaagggcggtgcaagatgtgctttgttgaacagatgcttgagggcagcatgctcgttaagagtcatcaccactccttaatctcaagtgcccagtgacacagacactgcggagggccgcagggtcctctgcctaggaaaaccagagacctttgttcacttgtttatctgctgaccttccctccac

SEQ ID NO: 6560 - DNA, 1346 bp, Artificial sequence
  DNA replication origin
gggggaggggagcgcggcccgcgcggggcaggaggtgcgaggggggcgcccgccgggggctgtccaggcgcggcgggtgtccctctagtgcgcggtgcccctagcgcctcggtgcgcgggctcccgagctgcgctggggccctagaggaagaggagagcgagcgaggggaggctgccgggcagccggggaaggcggtggaggcccggaggaggggagggggcggggagaggggcgggcgggaggcgggcaggagagggaccgccccgcggaggcgccgcggacgcccgccctcttcacctgttgcccgactcccagcggcggagaaggcgccgcgtcgcacccagggtggctgggttggcagcctggcgggcggcgcggaggagagggcgcaggggtccttctggccgtcttccgctccccctcccggcctttacttctgtcaggccccgcctggcccaggcccgcagcctgtttccttccacctgggcgggtcgggggctgcgggcattggggccccttaaggaaacccaggcctccagggactccgccgctccaggactcggcgcggagggaatgactgagcgacgaccgaggcagggggtgatgtggtacctcgaatgctgtggaaatggcaggaatgatgacccggccggaccttagacccgagatcgatgagaggccgccagcactgcccgggagacggcccgctcttctccccctcctgctgcggccgccgccagagcccggtgttatttcctgcccctcctgtcgggaacaatttgaggaaccaacttaatcgcttggctttgagggcgcgacgcttccaggcgctctccgcggctctgtcccgcggaccggtggagcctgggtgacggcgcctgggccggaggaggggagatgtttggggtccctggccaggatgaatcagcgtaaccgtcccgtcaccctcggggaaaaaaaatgtttcaagaaggcttgaagggtgtgatttgtgtaatgttaactttaggacaaatgagctgtgctttcctggcatgggaaggggatgggggtcctcatttagtgaggcagtttgtaacagggtcagggaagaactgagctcggctgcgtgcgtttatcggctgtatgacccagagcgagtggctctagtttttggacctcagtaatgccatctctaaaatgcaggctttgacagatggacctctgaacaaaaagattatcttccgcttggtccctccttctattttgtgaaagggtagcaagaaacattttatctggaagccaccaaaagaaaaggaaataatctttggctataaatcgagggtatctttgattcacagtgaag

SEQ ID NO: 6561 - DNA, 1052 bp, Artificial sequence
  DNA replication origin
tgcgccctctcctccgcgccgcccgccaggctgccaacccagccaccctgggtgcgacgcggcgccttctccgccgctgggagtcgggcaacaggtgaagagggcgggcgtccgcggcgcctccgcggggcggtccctctcctgcccgcctcccgcccgcccctctccccgccccctcccctcctccgggcctccaccgccttccccggctgcccggcagcctcccctcgctcgctctcctcttcctctagggccccagcgcagctcgggagcccgcgcaccgaggcgctaggggcaccgcgcactagagggacacccgccgcgcctggacagcccccggcgggcgcccccctcgcacctcctgccccgcgcgggccgcgctcccctcccccgcgcctgtgtccccagggcgcagggccgcgcgtccagccccagacccgccggggtccctggggacgcgccagcccggcagtggctcgacgatggaggagccgcagcgcgcccgctcgcacacagtcaccaccaccgccagctccttcgcagagaacttctccaccagcagcagcagcttcgcctacgaccgggagttcctccgcaccctgcccggcttcctcatcgtggccgagatcgtgagtgccgacgggccgggggtggcggggggctcagctggaccccggcgcgtgcttccgccgtgcttctcgggatggagcctgctcagatcttcccgcgggctttagggaaccgtttttgctcagcctcgccttcttcccaaagtgaaagactctaaacaaggtccaggaaactcgggctgtcctgggaagaaagggttgtgatcctcaggatgtcttgctgtgggagaaattcagcttgttgggtcctctcggtggcggcggcagatcctgggagcaggaagcttggcttagtggctattgagtttgtgttgagtgtcagagacacctggtgcctttctcacctgatctccacgtggatggcctcctccctgaaaataaagcttcctaagatcaggggaagaggaaagggcttctttcttt

SEQ ID NO: 6562 - DNA, 1375 bp, Artificial sequence
  DNA replication origin
ctgccgcgaactttagcgacgcggtgccccgcccgctgcgcgatgctccctgggctccggccgggtccagacgcccggcgcgtccgctcccggacccctgctttcccgggacgccctgtagaacctcggcctcgcgccccgcgctcacttaccatttgcgccactttcagcagggccgcgtgggtgcgggggtagctgaggtccagcagcccctccaaggggctcgcgctgggctgggccgcgccggccccgggtccgagcgcgctgccgctgctgcacgtggtgcggacgagcccggctccgtgcgacattgcgcggccccagctcgctggccgcctccccgggcagctgcccaggggccagatacagagggcgggccgggggcgggcgggggcgggcgctggcgagggcggggcgcccgggtccctgccccgctgctggagacgcggagccgcctctggcgggatccctccggtgactggccggccggcgccttccagaaaggtagcggcagtcccggccctcgtagatgcgcggaagttagactggagcgagaggaaaccggatgccttgggtcgtggcctctccgaggtgggcaaggcccggaccacagctggtactgagcctcctgggattttgtgtgggtgcggctgcggatgtgtgctgagagcactttactgaagtttaacttacataaagtgtgatgcccagaccttacgtgttcagctccactaatttttatatatgtgtacacctgtgtaaccgtcgcccagatcaacaaatagaacgtgcccatcaccccagaaagttccgtggtgggccttcctgacctaccttccttccctggccccatccttatccagcctcaggcaaccactacagtgtattctgctttctgtcactgtaggttcattttgcctgttcttggacttcataaacttgaagtaatacagaatattctccttcaacataacaaattagaagatccatcctgttgggaatataagtagttcatatcagttccttcctttttattgctgagtagtactccactgtgcaaagataccgtattttttaaacgtttacccagttgatggacaccaagcttgcttccttcctacctgcttgcctgcctccttccctccttccggcctttcccccctccctcatctcttttctggctatagtcactattatggtacacgtttttttggtggatacaaactctcatttctctgggacaaatatctgcaagtgaacgcactggttacaaggggagcatatgtttgcttctgttagaagctgtcagcctggggaacatggccagacctcatttctacaaaaaacaaaaaataaaaataaattagctgggccg

SEQ ID NO: 6563 - DNA, 1581 bp, Artificial sequence
  DNA replication origin
cccccgcacccacgcggccctgctgaaagtggcgcaaatggtaagtgagcgcggggcgcgaggccgaggttctacagggcgtcccgggaaagcaggggtccgggagcggacgcgccgggcgtctggacccggccggagcccagggagcatcgcgcagcgggcggggcaccgcgtcgctaaagttcgcggcaggcttcctccgggaaagttgctgccgcagcccccgcgctggagctcagtccccagagccgccccggcccttgctcccgcggacccaggtcgccagggtcgcaagtttctccggccacccccctgcgaagcctgacccgcctactgactgaaaccacgggcaaagttccttttcgtctttcttcctcttctctgggccgcgccgcttcgaacccgagccgggggtggaagagtcgcccaggcggcggcgctgagggagcgaaacccgacctcttccccgtccacggcctcctctttcctccgaacccagcgcggcagggcttccctgctctgtgtgcagtttcgctcgaaggaggaggtcagagggtcttgtgttccatagtggggaaaaagaactgggaccgttgagacggccgtcctggtcccctgcgccctcaagttccgagggagggcccgggtctcagggggctctggagggcagggggtcagttgggaaaggcctgttgtcaggggctggtactcatgtaggggagccagactgttgaatgggagtcacccgtggagccaggcaggatgagtgtctgggcttggattgtgaccaactcagcacaagggcctcctaccagggcagacgttgcctggccgattctcttgttccccactcttttcttttctcccctcccgtttttttcttctttaaaagtttgtaatctgaaacaacttttccgtttgtatgatgtgttttgaaactgggttgggctgtttgtgagtctccaccattgtaatgtttgcaccaagaacggtggggaggggagcggtaagtttcaaaaagaggtgtggggaaaggagtgtggggctggacaaggtcacacacccagaagctggggcctgctaaggtggcctggccccagggggttgggcacaggacgtctgtgcatctatagcactgccattccagacactgagtgtgcatgaggtggccctcatgtcttgcttgggccagacctaaagagaaggggcgctgagttcctgcctccctaagaacggtgtctagatagaccaaaaactaggaagagccatttcagcaacgtacaaaaaaatctggtgctgagcattgttgggtttgagcagggcattttttggcccaggctaagagatttgatcagccaaatagaagagaccagcccatctcaccatccttaaaagatgggctggggtgagacatatcctacctgagcattggaagggatgagtttggtagacagagaatgggatcagaagcctccatcttggcccctgagtttgctggacaaagatattgtgggatgaaaagtcttcttgttggtctatgagtttggtacacaaacataatggagatgaaacctcggcaac

SEQ ID NO: 6564 - DNA, 1176 bp, Artificial sequence
  DNA replication origin
cggaggccggagccgcagcgcgggagggacggacccggcctcggcgcgccggggatggggctgccgggaacgcagtggccgggcccggcgccgagctccagcgggcacgggatcccgaggcgtccgcgcaaggccgggggagccagcgggggctgagggagaggtggagtcgttaccaaaggttctgcccgtcctcgtcgtcgcctgccgcggcgccaccgttgcccgacgctatctcgttgcccaaggggccgccagtgtaagtcgaggataatcccggcggagaagaaccgaaggagccgactcgccccacggccgccatcttggtcgggaatcacaccactcccggcaagactaaatgtgcgaggcggctgaggcggtggcggtggaggcggcgggaacccggatatggggcgttcagcgcacgggagcggggcggggcctgcgggggcggggccccgggccgggccaggactgatggagcgagcgagaacggactgcgcgtgcgtggctgcctggccggcgctgaggggctgagcgtacgcgggcggcggggtgggccgctatgctgcaactgaagcccagtgatctgacagtatggaagtgctttccttccgctcatccgcggccctgggctgcggcaggggggttgggtgtgtcaggtgaaaagtgctccctcccacccttcagacaggtccccaaaccctgcggcctgcgcggaattcctgcattgtcattgccggcccacccactgttcaggctgagagcggtcccccgcccaaaccggcgcttcgccggcgccaagatagaaatgggtcgcccggctggtaaagaggctgccctgcaaccctgggctggagtattgctgtggtcctggatttctggactttatttgcgttctcaagtggcgaagtgttcctcaacctggacccacatcagaagcaggttctccgagcccctaagcagcggcgtgacaaagtaattgtttaccctggaaatagactgttattttttaaaaattattgtcagggcttgctttaatgttcttaatgtttttgtatgagatcctccatgtgagatttgaaaagatccactatgcgggtcatctaaccggtcactagacattgattccacacttactacgtcgagcacagttgacactgggaatacatggat

SEQ ID NO: 6565 - DNA, 1268 bp, Artificial sequence
  DNA replication origin
ttgcgcaatgtttgtgtccctgggtccttgagattagggagtggtgatgactcttaaggagcatcctgccttcaagcatctgtttaacaaagcacatcttgcaccgcccttaatccatttaaccctgagtggacacagcacatgtttcagagagcacagggttgggggtaaggtcacagatcaacaggataagaatttttcttagtacagaacaaaatgaaaagtctcccatgtctacttctttctacacagacacggcaaccatccgatttctcaatcttttccccacctttcccccctttgtattccacaaaaccgccattgtcatcatggcccgttctcaatgagctgttgggtacacctcccagacggggtggtggccgggcagaggggctcctcacttcccagtaggggcggccgggcagaggcgcccctcacctcccggatggggcggctggcctggcgggggctgacccccacctccctcccggatggggtggctgccgggcggagaggctcctcacttctcagacggggcggccgggcagagacgctcctcacctcccagacggggtcacggccgggtagaggcgctcctcacatcccagacggggcggcggggcagaggcgctccccacatctcagacgatgggaggccgggcagagacgctcctcacttcctagatgggatggcggccgggaagaggcgctcctcacttcctagatgggatggcggccgggcagagacgctcctcactttccagactgggcagccaggcagaggggctcctcacgtcccagacgataggcggccaggcagagacgctcctcacttcccaaaaggggtggcggccaggcagaggctgcaatcttggcactttgggaggccaaggcaggcagctgggaggtggaggttgtagcgagccgagatcacgccactgcactccagcctgggcaccattgagcactgagtgaaccagactccgtctgccatcccggcacctcgggaggctgaggctggcggatcactcgcggttaggagctggagaccagcccggccaacacagcgaaaccccgtctccaccaaaaaaatacgaaaaccagtcaggcatggcggcacgcgcctgcaatcgcaggcactcggcaggctgaggcaggagaatcaggcagggaggttgcagtgagccgagatggcagcagtacagtccagcttcggctcggcatcagagggagaccatggaaagagagggagagggagactgtgggga

SEQ ID NO: 6566 - DNA, 878 bp, Artificial sequence
  DNA replication origin
gtctgggacgtgaggagcccctctgcctggctgcccagtctggaaagtgaggagcgtctctgcccggccgccatcccatctaggaagtgaggagcgcctcttcccggccgccatcccatctaggaagtgaggagcgtctctgcccggcctcccatcgtctgagatgtggggagcgcctctgccccgccgccccgtctgggatgtgaggagcgcctctacccggccgtgaccccgtctgggaggtgaggagcgtctctgcccggccgccccgtctgagaagtgaggagcctctccgcccggcagccaccccatccgggagggaggtgggggtcagcccccgccaggccagccgccccatccgggaggtgaggggcgcctctgcccggccgcccctactgggaagtgaggagcccctctgcccggccaccaccccgtctgggaggtgtacccaacagctcattgagaacgggccatgatgacaatggcggttttgtggaatacaaaggggggaaaggtggggaaaagattgagaaatcggatggttgccgtgtctgtgtagaaagaagtagacatgggagacttttcattttgttctgtactaagaaaaattcttatcctgttgatctgtgaccttacccccaaccctgtgctctctgaaacatgtgctgtgtccactcagggttaaatggattaagggcggtgcaagatgtgctttgttaaacagatgcttgaaggcaggatgctccttaagagtcatcaccactccctaatctcaaggacccagggacacaaacattgcgcaaggccgcagggtcctctgcctaggaaaaccagagacctttgttcacttgtttatctgctgaccttccctccactat

SEQ ID NO: 6567 - DNA, 1173 bp, Artificial sequence
  DNA replication origin
catcgcacgagctgcagccgtgaggacggcggagcagcagcgccgacggggaagcggcagggccgccgggtgccgagcgggaaggcgcgggcggctgcggcgcctgcgggagtggcggcgcggaggcggacgcgcgcgggtgcgcgtggtgagcgtggtgccggtggttgctgtggccgcccgctcccgccggagcgccggcgcgcccgttcttgggcggcggctcgtcggcagtggccaccaccgcgtcgagcaggttgctaagcaggaaggcggacgaaggcagcgcgtccatacccgccgcctcggctagcactactttctggtcgcacacggggcagcgcagcttgagcggctctcccgccgcgccgccgcccgccgccggcagccggtgcgcctcgaggcaggggcggcagaaggcgtgcaggcagggcaggacgtgtaggcggcgcgccgccgccccagggcccccgccgccgccccccgacgacgtggacgtctgcgaggaggacgacgacgcggacgagttggaggagagcggcgccggcgagccgcacatctccttgcacagcaagcagatctggaaatcggtctcggggaacgaagccatttgcaacccagcccggaggagggaggagaccagagaggaagaggaggaggaggaggagagagcggacgaggtgggtgggggagtcaccgactcactcagaaaaatgcatcgattaggcctgcaatccgggagccggcaccagagcagcgctgcccgcttggcctcgccacgtccggcccgagcgctgccacccccgacactgcaggcattaaatgccactatccagcggcgacacagattcctccggataacttgggggccgcgtgccttccgaagagggaacgccggaacaagccccgacaggcgaggggcgagcgggggcagggaggtcggaagactccctggagcagctgaggcttcccttcgcgatagacgaaaggagttcccaaaaggagagttcgctgtgcagtcccagtcccggcgagagcagaatttggttccacgagtatttggtgcgttgcttttctttaaacggatttagtctgttcttgggaggggaaggagccccaaactagtaaaggcgggagcggtgcgtcgccaagccggtgtctccccgcgcgacg

SEQ ID NO: 6568 - DNA, 909 bp, Artificial sequence
  DNA replication origin
ccagcgcgtgcgcctcaccaaggaccactacatcgagcgcggcccgccgggtcccggtgccgcagcagcggcgcagcagctcgggctcgggccgccctttcccggcccgcccttctccatcctctcagtgtttcccgagcgcctcggcttctgccagcaccacgacgacgaggtgagtgcgtgggggcgtgtgtttgtgtccatcggataactgcgtgtgtgctcaacagcgtttcccggccggtcccacagcgaggggaggaggccctctccggatttggtttgtatttcctttggctacgtggcagtccttgctaccaaagtagatcatgacctgggaagtatgtggaagtggattctgtgtacgtgtcgcgaggggctccgaaaaatcccatagcgtggggtcctcccttttctgattttaatttctgtgtggcaaaacgcggcaatcgtcttgagttaggcgtgagttgggaggagataggtgtgtgtgtttgtgtagacgtggcctgctcctgctcttgtgggcacaccagaggcctcccaacgtgctgagaaggcgctcctttattttcagatttttgtttggaaaactcatagattgttgcctttaaaatggggcgtgagcccggaagagatggttgtgtgggtgagtgcgtggagtttgtgtgcctccgtagacctggtttccacgtgcgcacttgtgaggggaagactggtttttttgttgttgggacagcatggcagtccttgcctccttatgttgggtaagagtgggagcgtctgtggatctttgagggccaagggcccccagtcttaagcccttctctctctgcggctgcttcctatattgtttaaaatgcgtgttctggcccctgaattctcctagcgtgaaatcgccgttcgtgg

SEQ ID NO: 6569 - DNA, 1339 bp, Artificial sequence
  DNA replication origin
ctcacggggccaggcaggacccactcccaggcccggagcctctgccgctgttgaccctggccccgcgtcactgctcttgccttgctgctgctgtggaaagggtgcagcaggaaggaggtggtcagtccctgaagcccgccacgatgggactgggccgagtcacccgctggtgggggagcagcgtggttgggcacggaggggcggacagagaagggccccgaggtagagctgtgcccggggcagtgccacgatccatggagccaagcaggagctgggcgtggctgcagctaccaagctgcagctgcagacggaaacatctctgcactcttggggatccaggaaggtccccctcccccaaaaggctaagaggtgtctgctcccgctgcctagcctctctcttctcccagcgccactccgacctcggagcaaggatggggctgagcccacgtgctgtcgcacgctggctgggtgtgcaaacgttcagggtagcactgacatgccagccccctgccacctcagccccctctggactttgggcaccgatgagcacaggagggaggccgagggggtgctgagggcagctcagcactggcctgtaggcgtcccttggcacaaacagcccgggcgccatgaatggtggcagaaggtagacaggctcctgggtggaagggggcgagtccctggtgaagccccaccttcaagctggggagggcccgaagcctggggttcgggccactagtctcatggaccagaggggtaacttgtggtgcttttccctgggcctgccaatggccgccatggtccaagcagcacctcctccccactgaagcccataacaactgctggctcagcaagaccagaagatggagagacaaggggagacaatcagctgcagagagaaactatcctctctgctgagaggatggagggaggatgggacaatctacccacagagaggcactaccctctctgctgagagctgaacactcgctgggacaccctggctatggagacaagctatccactgtgggcctcctctgagctgttctatcgctcaataaagctactcttcatcttgctcaccctccacttgtctgtatacctcattcttcctggatgtaggacaagaactcaagatccgctgaatggtgaggctaaaagagctgtaacacaaatagggctgaaacatgccccttgctcaccacgttgtgggggaaaaggagagaagagctatggtcctttggggagcccagacctgggagctacccgagctggggctgtgactctctctttggggccctgtggttcctggcatctccaagcttctgggcactattgc

SEQ ID NO: 6570 - DNA, 1242 bp, Artificial sequence
  DNA replication origin
cggggctgagcaggcgcgagggctggctgctgggccgacgaggggcggtgccaggccgtgggtccttagtcaagtgacgcgaagcggccggcctgggcgccgactgcagagccgggaggctggtggtcatgccggggttcctggttcgcatcctccctctgttgctggttctgctgcttctgggccctacgcgcggcttgcgcgtaagtctgcgggacccgggtacggggaggcattgctaggggacaggctggcggggaaccgggctggggtcgcagccacccgcggtcccgcagggcggggagcctgagccccgaagtgccccccagcaggctcgcggccggcggaacgcaggcagtggaccggccttcccgtcgggggcgggccgggcggggcgcgcgtccttccaggcagctcggtcgcttgtgcgttccgctccggccgccctttgcgcttggatccacttccccatctgtaacgaggtgttgagacgaggtgcgtgtaaacatttcctaagttggctttccgggaggggattccaagttgcgcgggttagagggtgcctccggctctggtttggggcgccctcgctttcccagttggtgctctgcggagcgctccggaaggagaaaaatggggtcaggagaggcccttgcagtgggaacattgggttatttcccctctgggtgctctccctcttcgtgcatcttgttcctttctcaccactccccgtcgcctgccctttggcttgggtttttctttgtatttgtgggaccgttttccttcggcgtttgggggtccaggttgagggggggaataggcaggctgccgggggatgccatcgttgatcggggcagggctggcgaggcgaataggtgaggtgcggggcgtgcacagttggtgggagaggaaggacagcttcactcgctgcgtccgagctgaggcgactggctgaggggctccaaagcgctgcctggggaggtttgcatcacacctgcggaaaggagagtgggtagttgcaagctgctcctctgcacgttccgcggaccaactttggttcctccagggtgtaggtgggctgagcctgcagtatgctttaagtaagagctggtagcatttgacaccgttgacttgtaagttacaccctttaataacgctttcaataacgtgcctagggcagagaaaagtggtacatttatctacaaccaagattgaacatcttaagtatttggaaaacagctg

SEQ ID NO: 6571 - DNA, 1567 bp, Artificial sequence
  DNA replication origin
cccgcagagcgcgcggcccagcgcagccccttttggcaccgaggtttccaggtgcccagcgcgaaggcggagccgggttacagccgcctcctcggcgccacagagaagacccccgggagttcggcggcccaggcgctccggctctgcgtcccgagcctcccccggctctccgcgctcctccctctcggcgcgcccggcgcgaagcctgcgattcgtgagccgagcgcagagcgcagagccgagtggcgcacgctgggcagtggcctgggcaaccccaaacgcagccagagccctcacccgagtccgctggcccgcgcactcccggaccatgactgccgagggacccagcccgcctgcccgttggcacagacgcctccccgggctctgggcggcggcgctgctcctgctcggtctgccgcgcctttcggtgcgggcggatggtgagtgtgcgggaggcggcggggcggggggtggagcgtggggtccgggcagggagggcgtagctcgccggggctgctccctctgaccggcccggcaagcggcaagcgcaagcctgagaggaacgaacgagccgcggtcctgcgacccagcatccctctcctggcccaccaagtctccgcgtgcccgtgcgcccaaacgcccgcctggtgcctggaccctcccttagcgccgagcgcgtaggtcccgcagtcccgccgctggctttcctaaggtctccaagaaagctcgaatgaaatcacctctaaggtgccctagaacctcctctgctaaggggtgattttccgccgtccctcagtttctcaacgtctattaatgtgcccctgaggacaccgccgatggttagaaaactccctcggatattttggcttggtccgggaagacgtgaaagatgagtgggaatcagcgaggctaagagagagagaatggcctggccagagggaaaagcacgtgcaaaggctgtctctgagtgacaggaaaaacgggacaaatgataaagcaaagtacctggaggcgaggggacgtcttgagacatgaggtagagaagtgggcaagggccagattatggcaggttctctgagaattgatccacttcttgttcgtttgcttggtttttcagcctgaatttagcttgtaatacttgccctaaaatgagcaggattggagctctgtatccattcccttttgaaaagctaattcagctgtgttttcatattagaacaaaatcccgctgacttggtacaggagcatctgaaggaagcaagcttaaagccagcagttctcacacccatgaggtagttctagcttaggacgaattagactgataaaagagaaaagccctccgtcaatttaggatgcgttgtatattttaaaatgtgattcttgtttagccaacgatattgagtgaaactagaagacatggggaaaaaaaaaaaaagcatggttgtcaggaaaaggggaaagccaaggaaaaaaccgtctaggtcgtagagtttttagtgctctctgttttaagtgcaggcttgaaaagctctccgttcctaattaaggatgaatgtcgtatttctcc

SEQ ID NO: 6572 - DNA, 1126 bp, Artificial sequence
  DNA replication origin
agcggcgtcggcggggttggccggggcggtgtggcgctagagcctgggcgggccgggggcaaggagtcaaggcttgggggcgggtgacgggcgggcggagggcttgcccccgtgtggtcctcggagcggcccgaggtccagcctcccagcggtcccggaggaggatgcgaccggggggccccgggcggggcggtcggcggcggctgcagcgctagcggcgcgggggctgggcggcggcgccggcatgaggcgcagggccggtgtccgcgggagggtggcgctgccggcggcccggccgctcccgctgcaattgctcgctgggctcgtcgtgccctgccagtggggcccccgcagctctcgtcccggccgccgctggtgaccactcgccgcccctccggaggcttcacccgcgccctcccccaggacgcgccagcggagctccggctccttcgccctggacgcggaggccgcggtgtgcggggcgacggcgaggccggaagatggcctgggtgctcaagatggacgaggtgatcgagtccgggctggtgcacgacttcgacgccagcctctcgggcatcgggcaggaactgggcgccggcgcttacagcatgaggtactgggctccctgggcggggagaagcctctgtctccttggggaaggcctgcgcagccctgagtctctgccagatgcggctgctcccagaggtgcgcgggcctcctgggctgcggggtcggagtcctgccgcgtggcggtcgggggccatggaaccccaaaggcctctgctcgccctggtgacgggcgggtgggggaggatggccccgcaagcgtcggcctcggaccgctcctgagtgcttcatatttgctgtaaaacacgcccagctattaggatggcttgggttggtgggggaaggggcttcttttccttataagtgatttacaagtcccattggagctagaatacactgtacgaaaaggcagcacttatattgggagaatactgtctagcgttttgggatcagttcctactttgttgtcctacattatgatcttttctggctgcagattttaatcacttgatgttagtaaattataattgaaagagcagcggtgggagtagcactgtga

SEQ ID NO: 6573 - DNA, 990 bp, Artificial sequence
  DNA replication origin
cctggtgaacttaataactgctcttcattaaagtgccaggatttattttgtgagatgacagtgtgacaagttggtgcagagcatgggccctggagctggatggcctgggctaagtcccagatatgacttatggctgcaagactttaaacaagttccttagtgtctctgtctttagtttcccatctttagagtagggaccataatggtactttctgcataaagttattatgagttaatgcatgaaaagcactaagaatggtccccggcacattagcaattactcaaaattatgagctattattattactgttattgtcctagacaacttgctaaacattctctgatgacaaatttcaagagttgtgtgaatcttctagacagtctagaccagtggtctcatgcttctggaacctgtttcctcaacatgctagggtagtggggtgaggatgggatgggaatggatgaacctgggtggtacggtggtgggggtgatggtggaggtagttgatcagtggcagtgggactgtggtggtaccacggtggtggagtgatggttgggtgaaggtcgggtggtgtgatgatgcctgggtggttgtagtgaggtagttgttggtgctgtggttgtttctggggtaatggtggtgttggtggaatgatgtgtactggtggtcgtgggtagtcatcattggtggggtgacgtgaggtggtggagtgggtgatggagtgatggtcaggtggtgttggtggaatgatgtggactgggggtggtgcatagttggtacggtggggtggttggtgttggtggagtggtaggtcggttggggtggctgtttgtgatggtggtggagtgatggacaggtagtgttggtgttgttgatggaatgataatgaagggttggtggagtgatgaggaggtagctgttggtagtgtaggttggaaaatgatgatggaatagttggttggtggtggtgatggagccgtaggggcag

SEQ ID NO: 6574 - DNA, 848 bp, Artificial sequence
  DNA replication origin
gacaagagagaatacatgcctgctcgctgggagcagggaggcggtgtggcggggcagggggcaacgtgccagttttctttctgattaatgatgctcacgctgctgcgcgtggctcatgcgctttgtctccagccttagggctggcggagaacggcccagggaatgagtggtaccgcgggcgcccggcgcacccagcaggtgccatcactctggatgggccagttctggatgctcccagtggcgcagaggcggcgacactggcaggcgtccggctgccgccacctcccgggtgtggcgggtctggggcccggggtctccggccagagcagctgtggagccacgtgcaacacgcgcgttgccctcagcccgggcggggaccggacgcatccggagctgcggggaggagccgggcgccgcccccggcggcagtgccagccgcgtgggagggcacggaccggcggaggggcagacgacggaggcggccaagctggaggaacgggaccgagggatcgaccgaggctggctggctaggggtgggactggcagagctacggacaggtgggagcagtcagacagcctgagagagggagaccagaacgcaaagagagcgagagcattaagtaggcagggagaggcacacagaaagatagacagcaacactcgcgtgctccctccctccacacgccctcctcttaccgagcgaagcggccaggggcacagagtgggagaggactgtgggcacagaagaccggaagagggacgctgcattgctggtgggacggagggattcggacggacggacagaccagcgcacagactggcagcctgcgagagtggcagctttgaga

SEQ ID NO: 6575 - DNA, 1194 bp, Artificial sequence
  DNA replication origin
atatgttgctacttggctgcctctattattgtacaccttgaaggtgaggttaattaagtcctgttgtggggtttgagggccagaatttaatttttggagttttatttaatgtcaggagcagattggataataaaatgtacattgagaataagacggccttttgaccttttagggtctagggctgtcaagcatctcagggtcactaccgaatgagccatgaaactgggctgggtttttcatatttgatgaaagagcctaaatgctcactgatttgggagaggtctgataaagaaaaaggagcattaaccttcactatgcctttagcttcagccacctttttaagaggaaattgctgggcaggtgggggagggctactcacggaatgaaactgtaaactggaccggatgtcaggaggggaggtgataaaaagattatagggtggaggagcagaggctgaggaagaattgggacctagctcggcctggtgaggagcagcctggggaggaggggagaggtcagatgggtctgtagaaaaggaagattagaaagactcagcgacgcttggggttgggactgagaggacaggtgggagggaaagaaggaagatttggacgagttgcactgggcacagagactagggagggaccgatgtgtaaaagaatgcctggacatcaggcacctcagacaatttgcctattttttgacaaaaattatttaggtcttgtaggatggagaaatcaaaagtgccattttctggccatttagaacaactgtcaagtttgtattggggtcaagcggcattgcagaagaaaataaggcatttaggttttaggtcaggcgagagttgaagaggttttatgttcttaagaacacaggctaagggagaagaaggaggaatggagggtagaaggttgcctatagtgaaggaggcaagtttaaagaaaagggagagtagagacacagagggaagaggttcaggggctcttaccttccagaaaagcgggaaaggggtcggggcacagagatatgaggtcggggtgtggaaataagggatcggagcacagagatataagaggtcggagcatggaaataagggatcggggcacagagataagaggttggggcatggaaataagggattggggattcttgccccctagaaaagcaggacttgccaataagggtgaaggagaa

SEQ ID NO: 6576 - DNA, 953 bp, Artificial sequence
  DNA replication origin
ctctctgaagaatcacccccacccagtgccggcgtgcgcccagccttcccccagccctttccagggcgctgccccctgcctgccctcactactccaggcgctggccgcgcagccccgccctggagctgcctccccgcctccttcctcctcctgcgggcgagcagaagcccgctcgcccgctgccgagtggcagtcacgactgtgaggtcgccggcgaggtggccgcgggcgcggcggggcggggcagggcgcactctcctccacgcccgcggaagtgccggggaggtgggcagggcggggagggagagggagcgaggctggaggagggcacgtcggcgcctcggcgaggatgggagtccccaggacccggagctgagcagcctggcgcgcggcgggcagggcgcgcaggacagaagcctcgctgttcctccgggagcccaacaccgttcccgcgcggccacgatgatccctccgagcagcccccgcgaggacggcgtggacgggctgcccaaggaggcggtgggcgccgagcaaccgccctctcctgcatccaccagcagccaggaatccaaggtaccgagcacgcttgcccccaagagaacacaaactcactctcctctcctgtcggtccagctttgtctctcctcctatctagcacgggcgtgggggtctgagacttgctagttagcccagggctgtaggacttgaacgtccggtaggacccgctgctcacgatgctggaccacgtccctgtggacccagccttcccgcccacacattcacacacgcaattcatggtggctccgggttcagagatcgatttcttgcggggtggtagcttggttttttttgtgctttgaacctgcttgtgtccaaagcacgtgtaggtaggtattaggtggcttctgaaggctgagggatggagacagccgagggatactcttccagaaaag

SEQ ID NO: 6577 - DNA, 814 bp, Artificial sequence
  DNA replication origin
ggtggtcgatgggaccgggcgccctggagcagggggcggcgctcatcggggaggcttgggccgcacaggagcccaaggacggggtgggaggctcaggcatggcgggctgcaggtcccgagccctgccccgcgggaaggcagctaaggcccggcgagaaatcgagctcagcgctggtgggctagcactgctgggggacccagtacaccctccgcagccgctggccggggtgctaagcccctcattgcccggggtcggcagggccggccggccgctccgagtgcggggcccgccaagcccacgcccacccggaactccagctggcccgcaagcgccgcgcacagacccggttcccgctcgcgcctctccctccacacctccctgcaagctgagggagccggctccggccttggccagcccagaaaggggctcccacagtgcagcggtgggctgaagggctcctcaagtgccgtcaaagtgggagcccaggcagaggaggcgcagagagcgagcgagggctgtgaggactgccagcacgctgtcacctctcactcccctgtaggcaacgaccgcagcagcatgtccaacctcccaccgagacaggtgtgtcttttcttagagtgtgaggagcacaaaggcatcacagaatctcagctgggggagaagatgcagttcaaggaggagaagctggcagagaagtcgacacaagctgaggagctcaggtgagggaggctctgtgtggtggggcaggcaggtgaaaggtgtgtgagtctcggaagcggggcagctcagctggagaaataagagctaacctgg

SEQ ID NO: 6578 - DNA, 1025 bp, Artificial sequence
  DNA replication origin
gcatttgttgtgttcaccattggtgaactggattgctgaaaactgtccttgatgatgacttcagagtacctggccaacaaaccagctagaaccaggagttattttttgcacagcagcatcatggcatggctgttgcagccattttggaaccttgaggcaacaagtctgaggagaaaaggcaagatgttgaaggtggccatgtggaatcatggaaagagactgagtccttaacgtcatccctgagcagctgaacacacacagaggagccttcttccaggcttcttgttatgtgtgataaagagaaagacagcccctgccatctgggagctggtctggttctatcagctcggccttggcgttctgttgagcataaacaatttcacagaacagcaacatcagacccaacagacaagaccactttgtgacttgattgataaaggcaaaagccagaccactctgtaatcatgtcaacggccctgtggagagaagggtatggctgatccagtgaatttattatctgacgcaggagagatctgggagtcagtacccgggaatatgggtccccagaccccgcactgcagacctgagggacctgcaaatatgaggaacaggtgtgtggtgctgggaagaggtacaacaaagcaaggggccatcgagctgccttcagatggtaccaagaagccactaggctggaggaacgttttgcagcctaagtctttgagaccatgggtgtggaccagagtgtaagcaggtctctgaatctggggggcaacaagggtgttagagtagaacggccctgggacctacggtcagtgtatccaaggagcgggaatgggataggaggaaggaagtggtgtggaaagtctggcccctgccctgcagggaggcacgaggatggctggtggtcctggggtcgcctttgggctgccacccacccacagagaacaggggcaaagcgcacgttcaaaacccagcgcagccaggttccaccgcggaactgcgcggggaaggagagcagaaaggct

SEQ ID NO: 6579 - DNA, 959 bp, Artificial sequence
  DNA replication origin
cgggcttccgcactgcccgccgcgccctgcccacagggaagcgcttccccaggcggcggcggtcctggtgcggaccctccggccgcagccatgtgggacccgcgggcagctaggtgcgtagcggcgcgggaagcactggggcatctctggccttccgggcccgccacccttcctggcgggaggcggccgcgcgcggggactggcgaccctgaggtagcggccgaacgggcccgcccggccatccctgtggggcccacagccatctaggtgcagacccgagccagttgcgcggggtcggtcgcgggggacggcttcggccttttcggtccggagggaccagggcacgcgctgcgacaggactgcggcggcgcgcggcctgcctagctcccaccccggcatcgaagccgcagctctcgggcccacctccgcatcctcaggggttcccgggggctgccgacaggttcctgaccagcgagcgcgcccccggggcaagcattcttggcgggcagaaacctgggagcggagcacagcggtgcaagggaaccgtgccaggcgggaagggcggaatttgcggggaacttggagcgcgctggcctcttcccggcagtaggaggccttcttccctgcccgcccgattgagggctgctgggctggctcaaactggactgcacggtccatcagcctgggctcaccgagtctagggggaaggtagtagtagggacccaaggctgggaagcggagcccttagaagcccttgcttctgcctcggagcgtttccgaaccggagctcggagtctgttgcctgggaggcgcgttgcgtttcctcccaactccctgtctccgtcccgcggggagccctgtgcacttgcaacccggctgagatagagcccatctttgaggtgcagctcaagccaccttttctcccagatcggggtgtttctgggcagttgaaagctttg

SEQ ID NO: 6580 - DNA, 1127 bp, Artificial sequence
  DNA replication origin
gggtgggagctaggcaggccgcgcgccgccgcagtcctgtcgcagcgcgtgccctggtccctccggaccgaaaaggccgaagccgtcccccgcgaccgaccccgcgcaactggctcgggtctgcacctagatggctgtgggccccacagggatggccgggcgggcccgttcggccgctacctcagggtcgccagtccccgcgcgcggccgcctcccgccaggaagggtggcgggcccggaaggccagagatgccccagtgcttcccgcgccgctacgcacctagctgcccgcgggtcccacatggctgcggccggagggtccgcaccaggaccgccgccgcctggggaagcgcttccctgtgggcagggcgcggcgggcagtgcggaagcccgaaagctaccggagcccggggcaggggcggcgcgatgcagaggcggcgttcgggggcccccagctgcctgcggctcggctacccagccgcgatcagagggggcgggggacgcaggaaccccggcgtccgggcggtgtgcagccgcagacctattccaagtttccacgtagttgcgagagcccaaaaactgtcacgtgcacgtcgctgctgagtgggaggaggtgtttgtcatcgcgttcaaaaggggcgtttcggtgtctcccgtcatgcaagcaaatggtatggctctcggccgcctttgaataaacgagtgcttcgaaccctttaccaggagggactaggcgcacaaccacctccgacactcctcgggcatgcgagaattcggctttccttagtggggcccatcaatgttgtccgggaggtaaagaaagtgatcggccaacggcctcagcgtgggttttctccttccctcgttcctccctccaacaaaggacgtacggagaacaagccccctagctcctacagatgaggagctcaggagtcgggcgaatatcaagtacttactgtgtgcttgcccctccactctggggaggctgggggtccgggagtgaagggggcagcgagaccgcgggctgctccacgctcaccgtcgtgtccatggagagtaagtgcgcacaggcctgagcaggcaacaaaatgaggatcttgccttgtctttccacctccccagtgatg

SEQ ID NO: 6581 - DNA, 1035 bp, Artificial sequence
  DNA replication origin
cattgcgagccgttagggccaagctggagggagggcggcgaggcgcggctgccggtagggcggggccctgggctgctggcggggcggaggccggaggcggccttgggcgggtggcttctctgggtcccacggttcctgcccaggctcttcgaaccaggaccagtgcgggtaatgtgaattgacacttgttccggttcagggctgccccacccctggttgccccaaaccctgcggcctggtgggcttgggcaagtgggctggagtagcgctctgttaggaaacgagtatgcgagggagggagggtgggtgtggtcgaaatgcccaagcctcgtttcaaaaatgaagacgcatgaccttaaaattatttctggagaagaatgcttgcgcgagaggtgtgggggggggggcggggagcgggatggagggaggagtatagagtctgttaaaaatctgatagacacggacttgttatttattccggaaatatctaacgaggcccaccaggttcaaggcactggggaaggaccagggtcgtgcatttgaaaagcttaccttagtggaatagactggctgaagcaaacaaacaaggtaatgacaggtgtagtatggctttgcaggaaacacacagagtgatgaaaaagattttgtagacgaagcctctggctggataggatggctaaaaaagacctctaggaggaagtgatagttgaggagcctcctgacaaaaaaggcacgaaatacacctaaccacgactttacatacagggactgcagattccagaaccccctgaataagcccactaattccatgttgagcacctgtctctaaagccttctaagggctgtttctgtgctgcccacttcccctgcaatttcagaaggcttgatcacccttacagtttatgggggctggcactgtggcactaatgggggaggttcgagagacagggagaattatacccatcagctttgagagacaaattctttaccttttcactgtttctatgtcactatatttctcagagtcatgagtaa

SEQ ID NO: 6582 - DNA, 1613 bp, Artificial sequence
  DNA replication origin
tcagcttcaagcgattctcctgcctcagcctcccaagtagctggaattacaggcatgtgccaccatgcttggctaattttttgtatttttagtagaaacaaggtttcactgtgttggccaggctggtcttgaactcctgacctcaatccacccacctcagcctccccaaagtgctgtgattacaggagtgagccactgcgcccagccagttcattctttcaacaatgtttaagcatctacctaagcctggcactgagctgggccttgggggctacaaagatatctaagacttttttctccttagagagctataccgtctatggagagggacagagagcccccaaaatgatgaacatgttctaagtgttgagatagaggcatgtgaacactctttggcagcccagaaaagaaaggggaagaggaaatggcacagaaagggtgaggcaagaactggcctggaagtctaggatggataggattttgccagttgaagaggggtaggcacatttcaggaagaaagaacagcgttggagaaggcacagatgtgtgtgaaaacccctgttggacacgttcaggggacagctagaagttgtgtgtggatacattgtagggtttgtgggaagtgagtcaggaaaggggcataaaatggggctggaaagagagatggagcctccatgtgaagttatgctaaggagatcgggctccatcctataggcaggagtaggtggtggggggcaacgggaagttttcaaccattatccaaactctgttgtagaattaaaaagtggaaagaagagaacacaggcagggaaaccataatagtgtggtcagacttcaacatgatagcagtcaattcagtaggaatcttgaatttgagtagtcaagttcatagagacagaaggtaggaaggtggttgccagaggctgggggtggggatgggggtagggttagggggaaagaggagttattgtttagggtataaagtttgttttccaagatgaagagttgtggagatggatggtggtgaaggttgcataacatgcatatacttaatcccccgaactgcacagttacaaatggttaagatggtaaactttctgttatgcatatttacaattacacacacacacacacacacacccttcagtgcacgcaaaccctgctggactccaaccttcagagcttccgatttagcagggctgagtgggacctgaggatttgcattttctgacaagttcccagatgacgttgatgctgctggtccggagaccacacttcgggaatcactggtgtacgagaccaagtgactagaatatggaggggtgctctgctcgcttccacgtggctactattgttatgaacaacaacagccggcgtttactgagcactgctcctacagcttatctcacaactgggtgaaggagcagaggatgcgcagggctagaacctggagtctaaactcgtccttcacccgggttgctctggatcttactggttgtgagacagggagggaaagagagacaaaggcagggagacaggcccagcagggccggcagagcctgtagtgacggaggggagcagccttatctccgggaacccgagcgccccgtgcg

SEQ ID NO: 6583 - DNA, 1347 bp, Artificial sequence
  DNA replication origin
cgccgccgtcccgagggggcgatttaaatgtctccgttgcgcgcggctcggccgccgggggacggcgggagaagggaggacgccgtccggggcccgctaaggtcggggtcggcgcctggaggcgggcgggggcgtccgggtgcctccctggggtcccagcccagagcgtggggggagagccgctagagttgtctcctccgccgcccagctagactcggcttcactctctgaatcgaaaagtaacttggctcctctgcctccgggcggccgccgctggcccagcgagcctcctgaacctcgcagggcctggaggagtcggggcactggagctgcacccctccccggttttggggaacccctgaggaaggagtatagcctctccagcgccgctgcgcggggtggggctccccaggggcagggtgtctgggatccactggggcgcactggagcccagagccccggcgcccccccccccccccagctcctacaagaccctgggtggaagtggagcggagaagctcctaggatatagggaagaggaaggtgagggagcacttcccagtgacaccgccggtggggcaggtagttatctcttgggagagcctgagtctcatctcatatgggccattcgacccggagaccttcaccagaagccttaagagagagacgtgtttctatagtggccaaggggtccagttgtcccctgagtccggaggggtgggcctaagaagggggcagctctcccccattaagcaccataagccgagtggtacagagcttgtgcccaaccccagcagagaagcactaagggggggttggtgccctccttggccacatcctctggaccagagggtataaacagccacacagtggtcacttcttgataggagagagagttaggctgcgggaagttcccccgttcaaggtcgtgcctcatgggggcccaggtgacagccaggccggggttgattttattgtgtattcaccagcctgagcgtccttaggggtggcaggcagggaggtcgaggtcactgatgctggtgctctcagcatgtagttatgcaggagagtcactgctctgtattggacagaggctgatggaaaagggtggtttgtggatcgcagtactcaagcattcctggaaaaggggactctgagaccagcccactaagaatcatgctgttcaggagatcagccttcaagagaaccagttttcaaagccctcacatagctctcgcccagctccacatctccctctctcacttactccagttgctgggtataagaccgagtgtgtctgttcttaacacttgtcaaattccccttttaaagcggagcaggctgaac

SEQ ID NO: 6584 - DNA, 1160 bp, Artificial sequence
  DNA replication origin
ttattgttttctttctgtattaaggtagaatttgcatgcaataaaatgcaccaatttgagagtatgactccatgagttttgaccactgcatacgctgtgtgactaccaccccaccacaataaagaatacttctgtcaccccagagagtttccttgtgcctctggctggtcatacccctctcctgatagacaaccactgttctgacttctatcaccatagatccatcttgcccattctagaatttcacattggtgggaatatacagtatggactcttgtttctggcctcttttaatcagtgtgatgcatttgagattcgttcatgttggtgtgttgcttgtttttccccttactgagtagcactccattgactgaatatccttgagtttgttcatccatcctcttgttgacagaacacatgacaactcttagtcttcttaacaatccatgacataagtggggctgttatccccattttatgggtgaggagaccaaggacatgcagatcttattaatataaaagggaaggtgattccagatggtggtaggtgctgtgaggattctaaggcagggttacttggtcaggcagtggtgtcaaagtcagcaggaagggccaagcagagtgaggcctgagacttgttggaggtggcagggggaggtcaggggtgcccttggctgtggtggctctagagaagtgatggggcaaaagccagatggcagtgggtgggtgagagaagaaacaagaaggacagtgactcttgactgcttctccagaagcttggctgcaaaggagcaaatgggaccagcaggtagttcagggaggtgttttaaggacgggaagctctagatcagtgattaggccaagaacgtctttgagccattttctggtctcccaagtcccttaccctcttggaagagatcagaggtggtcaccctcagcttcaccctcatctatgtgaaccctgatgccctaaccctgtgcctacacccaagggtcctggagaggttgaagagacaagagggaggatgggaggctgctccagagatgagggatggggggatgaggttggtgagagtgatggaatctggtacatgggctgggggcgaggggccctcatcttctgagccaggccccaagataggaataaggtcagagcaagg

SEQ ID NO: 6585 - DNA, 912 bp, Artificial sequence
  DNA replication origin
gagcgtcggggcctttggacgcccgcgtcctgcgcttccaacttgcaggccacactctgcagccccgtaagccgggggggcggggtagtgccgcaggagggcgggctcgggggtggggcaggagcgctcgcgcgcgctctccacgaatcaggagggcctgggagggcctacagggcgcgacgtcggtgggcagggttcagtgggcggcctgaggcgaagagctgcttgcctccgcctgctaggttgcgcgcgcacttcaggccttgcgggcatgtccagctcttctgtggcttccagcaggcgaggccaaacaggatctttctcacttccccacatctcctggatcctggagctgatgcagtcaggtcccgtgctcaccgggggaaccggcgagcctctccaaagtattaaaggacacttccggaagagcctttggcctgtggtcagcccgcagacatcggtggtctctgtacctgtaggagccccatgagggtccaggtgtgggagacagtcctgggacagggcttctgcggccgaggcaggtggaaaggcactccaggggagctgctgtaaaaggtagttggtaggcaagaggtgggcgttctgctccaaatccaggacctccactggcattctggctctgtgtgtgtgggcgggaccaggtgccagttgcccttggggcgtgctcacgtgtgagtagctgcttttccaagggcacctttgggaccccagtgaatcacctcatggggtagatccatgatagttgaagaagtgcccttttagtcaggaaggcaagccctagtgtaatagcccaggctccagggcatgcccttcttaatcctcccaatacagaccacaatactgggacggactcccaatactccctaatacagaccacattagggccccatg

SEQ ID NO: 6586 - DNA, 1519 bp, Artificial sequence
  DNA replication origin
ccggccccccgcaagccaagcgcgcgggggcgcggcgcggggggcgcgggggcgcggcgcgggggggcgctcgcagccgctgcctgggcgcgcccgccgcccggccccgcgctctgggagaggcggcccgggcccgcgccccagctcccgccgccgccgccgctgggctcgagcggccgccgcctcgtcaccatgaaccccggagccgcgcccgggagagccgcgcacggggaggcggagcgggaggcccggcgccgctggaagcgggagcgggcgggcgagggggaaggagcgagcgagggcgggagggcgggagggcgggagagagggagggaaggagaaaggaagggagggaaagaagaagggcgggcgggtgggtgtgtcccggcccggggaccggcctccgccgcgggctctgcccgctcgcctgctcgcctggtgggggagaggggagcggggccgacacagggtgagtggagggcgggagggggcggccgcgcgcgcgggggcccggggcagttgagtggggtgaggggctcggggtgtagcggacggcagaggggctcggggggttagaagtgaggggtgtcaggggggcctggcagaatgagtgaggtgagaggcctggggtgtgagagatgtggggaggagtctgaggcagatgggtggggtgaggggagcggggggattcgcgggggcccgtggggggcactggaaggattcggaagggtgcagtgtgggagcccgggggccgagggggcatggcatggaggcaggagcgaggaagggggcccgaggagggatatttaccgcgaggaggcgcgggaagtgctggcggaggtgctgtgagggtgtctcgggaaggtgctgggcgaggggcgtccaggcgagggaaccgaggggcctgggacgtgagtgcggagggaagcggtgtgcagaagtgggggctgcccaggagcggtagtgacacccagacggcccgcagaggggcccgggcgcggcgctgctgtgatggagaccggggagcgtggggaaggttcggagaggcccagggctgcgctccccagcttgaggggtcccaggagtgagcgggatcgggagtgatctgtgcagagagggagtctgcggaccgggccagaggctcaggttgttcggatgctggcgggactcgcgtcagcattcggccccagagcccgcgtgaggggcggcgggtcctgaaggaccaacctcctgcacgtgagggtgtcgtgactgagaggggcctgggcagtgggcattttcgggtgctgtgcagcaaggggaccgggggagtccgtcgagggcagaagagcggaaggcgctggtggcagaccaagtctggcagggactgtgcttgtgcaaggcagctggccactgtcaggcctaggacgacggccagagcgtgggagagacgacaaagtgcctcctcagcctgggagcgtcggggcctttggacgcccgcgtcctgcgcttccaacttgcaggccacactctgcagccc

SEQ ID NO: 6587 - DNA, 1294 bp, Artificial sequence
  DNA replication origin
ccctcgctcgctccttccccctcgcccgcccgctcccgcttccagcggcgccgggcctcccgctccgcctccccgtgcgcggctctcccgggcgcggctccggggttcatggtgacgaggcggcggccgctcgagcccagcggcggcggcggcgggagctggggcgcgggcccgggccgcctctcccagagcgcggggccgggcggcgggcgcgcccaggcagcggctgcgagcgcccccccgcgccgcgcccccgcgccccccgcgccgcgcccccgcgcgcttggcttgcggggggccgggcctgcgggcggccgccgcgccgcgcacccatggacggcccggccatcatcacccaggtgaccaaccccaaggaggacgagggccggttgccgggcgcgggcgagaaaggtgaggaggggcgcaggcggccgcgggctgggggcgagcgcacaccccgcgccgctggagttcactgccgggcgccggcatgggcctgggggaggggtgcacagggcccggagggtgcgtgggtgtggggtgcgcccggaggagagcgaggctgccagagtgcgtgtgccgactgagccagtgtgagtgtgcaggggctggcggagagactgggagcgagtgtgtgtgcatctaaccgggaggttgtgagtttgtgtgcgcgcacgcccgcagagaagttgtgagcctgtgtgtgcacctaacacagaggttctaagtgtgtgcacttgtatgtgtgtgtgcacacgcggacagagtgattgtaaggatatgtgtgcacctcacagagaggttgtgagattgtaagggtttgcgcacctaacggagatgttgtgagtgctttttttcctgacaggctgtgagtttgtgttgtgtgtattagaggtttgtatgggcctgactgaggggttgtggaatgtgtgtgcgtgagcatgagcctggagaggttctatgcctgttcactcctgacagagtttgtgagtgtgtatgattgtgtgactacaccacccaactggcggattgaatgtgttgtatacatctactgggagggcgtgtgtgtgtgtaaattgtatacaatgaggctgtgtgcatcagtgcacctaaccacgaacctgtgtgtacagatgtgtgtgccttcctgtgtatcagacaatgaggccatgtgtctgggtgtgtttagttggttgtgcaagtgctggagtctgggggggagaagaggcagttcggagccatccccgctttctcccttctccactctttgctgtctccgggccaccagcatgtt

SEQ ID NO: 6588 - DNA, 1672 bp, Artificial sequence
  DNA replication origin
agttacagtggtggggaccaggagtagggaggcagagactggccccgtgccaggcctagcactgcccacaggcagggcgaaggcgcgggagcagtttccagcaggtaggcctgggcagagagttggggggcgggggtttccagggaaccagtggggcagagtgggctattcaagtcaagggcatagagcatagggtcccagggctcagggccacagagcctccgcggcagaattgggaggcggcagcagcccagcaggtgaaaacactgatggggcagggcagctgtggccggcagcccaaggggaagaaagtggcagattttgtagatgggcagggaagtccgtggcccacaaattcagtgtgcctgcccccaaccctggccccatcctcctttcccctcactctagagggcggcaccactccctgctccatggaaactgagcaaggtaatctcgggctcccttcaaaggtacccacaaaagaaggaagggctcctgtagggagagaaagaggcactggaggagggagaaagcgaggagagaggaggcacccagggacacgaggggcagggggagagaagagggggtgtgtgaagcgggtagggagtgccccgggaaagagaggggagcctggggaagagaaggaaagacctggggaggagggtggggagggagagagggaggggtgtaggggaagacagggaaccaggaaaggaggaggtgcctggggaggaaaaatgggagaaaaagggaaggatcccaggggagaggggaaatcagaggggagaaagaagaaccagggggaggcaggggcacccagtggggacagagggaaaccctggaaaagcggaggcgtggggcatggggagagaaagggaaaccagggaaggaattgggcatccggaagagaaaggggccctgagtggaggaagtgcacccccagggaagagaaggagggcttctaggagaagggagaggaccagggataggagggttcccacttgggaaggtggtgaaagggagttccccagaggaaagagggcaggagggtttgggaggctggagggggcactgtggggggttcccctgaggaaagagggcaggagggcttgggaggctggaggtggcactgtggggagggaggaggcccccaatctttgagcacccattcctccctggagtccaggtgaaagagaatgaacacaggtgccatgcgagtgcgacctcagccctggcagctgagggcttggctctacgggctggggctggatatcagacgggctcccggacccctgggggcgatgctgcctctcccagtgacaccagccgagtcccaactttttggctgccagtttgactttccagtcccccatgtgccctggttgacactgttctgaggccatccagtagtctttctggcactctgtcaccatgttgtactcttccatgagctacagctcacagtttctgtctgcacctctggtcactgcctgcctgggcctctggtaactgtcactggtcactatttctgcctattactcagtgtccttctacggggccaccactggtggacatcctgcttgtcacccaatgtcctcacgttttctgttgcttgagatcaccttttcatggccactatgtctgcctgtcactcatgtcattgtcacaccaa

SEQ ID NO: 6589 - DNA, 1290 bp, Artificial sequence
  DNA replication origin
aagggggccctgcctgccctcagggacctcagagaagtcggtggtgacagagtcaattcgctaagtgggtcatgagctcggttaattaacgcttcttggagctcggctgtcccagagcggtaggtccccaggagcggcagtggggcagtggactctcagggtcgcaggactgacgatgccttccgccccagggcttcatccaggccaagggctacccgacctacaccaacgtggaggtggtgaacgacggcgccgagtcggccgcgttcaagcagctcttccggacttggtctgagaagcggcgcaggaaccagaagctcggcgggaggggtgagcgggcggggcggggctgacgggggcggggcgggactggcgggggcggggcctggcaggaatcggcaactcgttgggatgggtgagcgggcggggcggggccggagggggcggggcctggtctgcacggggcggaacagagcctcaggatgaggaaaggggcgtgggctgcggaggacgcggcgggacctggaatcttggagggatggttgaggagtgggcggggcggagatggtgttgggggggggcagagggcgccactgacgcctactgtccccccttcagataaatcgattcatgtaaagctggacgtgggcaagctgcacacccagcctaagttagcggcccagctcaggatggtggacgacggctctgggaaggtggaggtgaggggtactgggttagctgggggaagatgggcacacggaggtaagctttgcctacaggtaaacggtatgactgctatctaaagtgacccaggtgcacatccacacacaatcagggacacaaagggacacgtgtacatttacatactctcctagcaggcagttcatacatagtcacgcctaatcatacacagccacgggcactcacacaacacagacacacagtacagtaacacttggacacttaaattctccctgtagtcacatgtaggacaaaatcaaacatatgcttatacagacacacatactaacaccttgtaattgcacataatcacagccaagtacacaaccacaaatatgaagctgcaaaaactctacatcagacatgaccacggtcacacacaaccatcaatccgcagagacacaccaacacagacacacgatcacacatcatcaattacagccccacacacccaaccccaattaacagccatacactgtcaaccactcatctggtctcagcccagtgtcctgcgagacgcaggggttgagggctacttccaggctctgt

SEQ ID NO: 6590 - DNA, 1038 bp, Artificial sequence
  DNA replication origin
catacacagccacgggcactcacacaacacagacacacagtacagtaacacttggacacttaaattctccctgtagtcacatgtaggacaaaatcaaacatatgcttatacagacacacatactaacaccttgtaattgcacataatcacagccaagtacacaaccacaaatatgaagctgcaaaaactctacatcagacatgaccacggtcacacacaaccatcaatccgcagagacacaccaacacagacacacgatcacacatcatcaattacagccccacacacccaaccccaattaacagccatacactgtcaaccactcatctggtctcagcccagtgtcctgcgagacgcaggggttgagggctacttccaggctctgtagagggtgtggttgtatcttgacttgttggctgaccccctaggcagagccctgaattttttaggccctagtttttaaataaagtggggtcagaaactgtggtcccatctggccccaaggctgatgtggggatcctgtggtcttgtgggaacagaactgctgggcctatgcgaggggtcctagttctcgaggtaggtggaggtcagagaaaaggcaagatttccttcttcctttgccctaatatggatggacagaagtgatgagtgggaagagactgagagaggaggagatggggcaagggggaagaagggggagacagggaaagaggaagacagggaaggagcacaaagagagacagagaagaaaagactgggaaggacaggggatgaggaggaggcagagggaagggaggaggaggtggggtggaggaagagcagggagagagggggtacagggagaagagagggagggtcagtgatagatgggatacacagagagagacagagagccagacagtgggagagggagacaggaaagcagaaggaaaggcgagggacggagggaaagagagccctgggactcaggtgccaagcacaaagtcagggacaggatccctcctggtaggcagtggacaggcaggcagagacagggcc

SEQ ID NO: 6591 - DNA, 784 bp, Artificial sequence
  DNA replication origin
gggtggaggagggaggagtaaacagagctgaggatgaggctggtgaaaagtgggctctgagagggtcgaggtgggcatggccagtgtgaggcctagggcatcagggaaactagtggagaaggtggcatcttactggctttgatccccaggcctacaggatgatgaggatctacaggcgctgctgaagggcagccagctcctgaaggtgaagtccagctcatggaggagagagcgcttctacaagttgcaggaggactgcaagaccatctggcaggagtcccgcaaggtcatgcggaccccggagtcccagctgtgtgagtgccctggggtcacaggggaggggatagagtgtggaatctgctcagggctgggtaaatacaaaggtcagtcatggatcaaaaccacagatggggaaactgaggcctggcctggtggggcataggtcatttatataacctgggctggcagtggggaaactgaggctggctggggttggggagcagggccagttaaattgccatcgggaaattgaagcctagtctggactggagagggcagtcatggaacgaggaccgcagatggagatggcaaagcttttgagggatggggatacttaaccatgaccacagatggggacagccaggctcagaagcagggagggagttggacggtggcccaaggtccaggcagataaggtacttccggggttgagtggccaggtgggagctagggctgcaggaggcagctcctccctgggactggagccacaggaggggtgttaggg

SEQ ID NO: 6592 - DNA, 857 bp, Artificial sequence
  DNA replication origin
ggatccagaacccaggaggcggggccgaggaggtgccgggccccgcggaggcggagtgggacaaatccataacccaggaagcaaatctgtgtcgaagcctgggggcggggccagagccaaggcagcggggcgaaggaggggccaggctcagaggcggagctcaggccgggagcctctgctccagaggcgacgtggaggcagagccatacccaggaagcagcccgggggcggggccagggcccaggaggcgagcctgggaggatcccgcactggaagggcggtgtccaggcagggaggggcggtccctcggctttggaggcggtgcgggggcggagccagggtccgggaggcagtgtgggcggggtctgaccaaggagccggagcggcgaattctaacgccacctttgaggctggcgcagaaccgaagggctgagtctggggagaaaagctgaggggagtcccagtgggaggtggatggcagtctagcggggacctgagtggggcgagatcaggcgggaccggggatggagcctgggccagacaccgagccccccccaagtattttacttcaattgctcaactaattcattgcgactcagcttgctgttgcctcatttgtgaacctcaggtgggcctgtttgcttctctcggtttgaccaccaaagtgataatccccaaggtgacggatgcaaacgaaattcttgaaaaaattctgatcttaaaataagcccattaacccagggtggctttcataaatacatgagaacgactgtaactttgcacaaaactttgctgccaatatgctcgggaacagtgggtcctttcatgtacatcacaacttccctttcattcaccca

SEQ ID NO: 6593 - DNA, 1157 bp, Artificial sequence
  DNA replication origin
gaccacccccggcctcctcccaccgcggtccattcaggtccctgcaccgcactccgctcggaccccaggccgccggtgctgtcgctactcaagtgagtcccgcggtgcccctcccgccgcgccgcccgtcgggcatggactcgggccgggacttcctgaccctgcacggtgagtgcctggcccgcgcgagcgggagaccctgcaggggtggacccctggaaagctgttccgggccctggacagggagcccccagctccttcggccgcctccacaccaccccgggcccgcctctctgccccttctccggactgggaaaatctcagcccgcggctccctgggtgggactgccgggcacgaccctgggcgtttccaggcttgtccgagatctagcccggggggtgggtgggcgggcggtacgggtctaaagacttccctccgcctcgcggacccccttgtcctggtcatgaaagtctgggctccacgatcccgctcgcacggaggggcggcgaaggaaggaaacagcatccaagaacgaccaaaattctccttgccccatccgggccgccccagaggctccccaaagcctgggcgtgcctggaccgcgtcaggccgcgcgggtgtggcggagcaggggctaagcgggtggggagaggaggtgtgcaaggttaaccgtggtcgggccgtgcagccttaactgcccagcgcagaatagtcagcgatgctcaggctgaaagaagcagcacgatcccctcatctgcgaccctcctcgggggacagggccaggtctcagccggagctgcctgctccatcctttgtccagcggagctttgtttcctccaatatgagccagctctttgccctttcgctgtccctccagcagcgaggggagcctgggctcccgaaggcagatctggaggccttctgggaggcgggaggttggggagggtaactttgggcgcctctttgctccaggacaggcactcactcactcttggtgggggcttgccctcctgccctcccaggtcacttgccatctcagcaaaccctgctcctttcataccaatcactgctttactgtatatccctctcttttttagtacccttggggttggaggctttagtggccaccacccatccatctaaactgttcatggac

SEQ ID NO: 6594 - DNA, 912 bp, Artificial sequence
  DNA replication origin
agtagcgacagcaccggcggcctggggtccgagcggagtgcggtgcagggacctgaatggaccgcggtgggaggaggccgggggtggtcccgggacaccgccccgcccccgctgccctgcgcccccgccccctgagcccgccaaccctcgtctctccccgcccccttctggggacgcgagagggagggcagagctgggggcccggaggactggccaaccctggcccgggccagcgggcgcgccccgaccagaaatagccagattcctccagcttcctccgccgccgccacccacgggccgcgggccctgtcattaccgcgggcggccgggccccacgccctgttgtgggcgcctcgctggggtcggggtgatgctggaaagaatccggcgtcatcccggggaagggatcgtgtaaggtccgacgcccagccgggctgctgcgctagggagacgcggcgtccaggcttccagccgcagctcccagcgttcgcattcccttctgcgaaatgggtgcacggacacgattagaaggtcttcagagagcaatacctggaccttgtcgggaggagggtccccttccctctcgctgggaggtttctaaccccaagagtgcctttggtggagtgttgggggtgtgggagggggaagcaagcaggtgcacggatttcacttttgagccactcatatcccaaaaccccagcgatccatgcagccgagggggaggatccccagggtcccttcttcaggtggcctcccaaggggctgtctgggcaaggtccctatgcagacccaccccctaactcttgggacccagaaaaccccctttataggttgcccagagacccctcccaccacagaccctgggagggtccctagatcctgttgcccaccacccctttggagagtcccttg

SEQ ID NO: 6595 - DNA, 1160 bp, Artificial sequence
  DNA replication origin
taggagctggagaccagcccggccaacacagcgaaaccccgtctccaccaaaaaaatacgaaaaccagtcaggcgtggcggcgcgcccctgcaatctcaggcactcggcaggctgaggcaggagaatcaggcagggaggttgcagtgagccgagatggcggcagtacagtccagcctcggctttcacaactttggtggcatcagagggagaccagtgagagggagagggggaggaggaggcggagggggagggagagagagggacttcaaacccttgtaatgggaagctatgcttacacatctcaggggagctttggccaccccaatgcaagatctcagataaacttccctctggactccagtggacggagacctcatcatctttgagggcgcagttccaactccacacctcatggtccaaggcttcagctctgcgccacaacttgctgttcacaggaggcagcggttcctgctattggctgatgcacccaaggccagccaggggtgtggggcttctctcgcaataaacgtctttagaggctacggttctggtttcagctccctcttcgtttctggctgttgggagatttcccttgcttatttgtggttcaactatgcacctatccgaaccattccagcaacattcaaagctatcaaagatgcagtcattctcatagagaaagcagagcttgctgtgcaggtactcgtggtcccggtgtggtcccagcctgctctctatgttgaggtcccacaccttcaccaacagggagtctctggtcatcaggtactgcccactatggctacattttacattgggtatggatgaaattatttctgagaagaaggacctactgctgggatcttgaggctcttcaaaaaacttggagtgtctgttgcacagggtcgaggagcccatgctgcttagtcaatggttcctttgctactactgtagacaagcacattgcactggtatgagtggaacttggctgccacaatgacttctgtcagctgctccaggttagcaggtttgatgtctaccacgtcaaaatgtctatgtgtgatttctaagtgtcataaattaatcctcaggtcattgatagtgctgtaattctaaatgaatcttgaagtcatccatcttcatcattcaagttataactttc

SEQ ID NO: 6596 - DNA, 1118 bp, Artificial sequence
  DNA replication origin
accctgagtggaaacagcacatgtttcagagagcacggggttgggggtaaggttatagattaacaccatcccaaggcagaagaatttttcttagtacagaacaaaatggagtctcctatgtctacttctttctacacagacacagcaacaatctgatttctctatcttttccccacatttcccccttttccattcaacaaaaccgccatcgtcatcatggcccgttctcaatgagctgttgggtacacctcccagacggggtggccgctgggcagaggggctcctcacttcccagaaggggcggccgggcagaggcgccccccacctcccggatggggcggctggccgggcgggggctgccccccacctcccggacggggcagctgccgggtggagacgctcctcacttcccagacggggcggctgccgggcggaggggctcctcacttctcagacagggcggctgggcagagatgctcctcacctcccagacggggtcgcggccgggcagaggcgctcctcacatcccagacggagcggcggggcagaggcactccccacatctcagacaatgggcggccgggcagagacgctcctcacttcctagatgggatggcggccgggaagaggcgctcctcacttcccagactgggcggccgggcagaggggctcctcacatcccagacgatgggcggccaggcagagacgctcctcacttcccagatggggtggccgctgggcagaggctgcaatctcggcactttgggaggccaaggcaggcggctgggaggtggaggttgtagcgagccgagatcacgccactgcactccagcctgggcaacattgagcactgagtgaacgagactccgtctacaatcccggcacctcgagaggccgaggctggcagatcactcgcggttaggagctggagaccagcccggccaacacagcgaaaccccgtctccaccaaaaaaatacgaaaaccagtcaggcgtggcggcgcgcccctgcaatctcaggcactcggcaggctgaggcaggagaatcaggcagggaggttgcagtgagccgagatggcggcagtacagtccagcctcggctttcacaactttggtggc

SEQ ID NO: 6597 - DNA, 1263 bp, Artificial sequence
  DNA replication origin
gtgatgactcttaacgagcatgctgccttcaagcatctgtttaacaaagcacatcttgcaccgcccttaattcatttaaccctgagtggacagagcacatgtttcagagagcacggggttgggggtaaggttatagattaacaccatcccaaggcagaagaatttttcttagtacagaacaaaatggagtctcctatgtctacttctttctatacagacacagtaaaaatctgatctctctttcttttccccacatttcccccttttctatttgacaaaaccgccatcggcatcatggcccgttctccatgagctattgggtacacctcccagacggggtggcggccgggcagaggggctcctcacttcccggacggggcggccgggcagaggctcccccaccacctcccgggaagggcggctagccgggcgggggctgccccccacctcccggacggggtggctgcggggcagagacactcctcagttcccagacggggtcgcggccgggcagaggcgctcctcacatctcagacggggcggcggggcagaggcgctccccacatcccagacgatgggcggccgggcagagacgctcctcacttcctagatgggatgacggccaggaagaggcgctcctcacttcccagactgggcggccgggcagaggggctcctcacatcccagacgatgggcggccaggcagagacgctcctcacttcctagatggggtggcggccgggcagaggctgcaaactcagcactttgggaggccaaggcaggcggctgggaggtggaggttgtagcgagccgagatcatgccactgcactccagcctgggcaacattgagcactgagtgagcgagactccgtctgcaatcccggcacctcgggaggctgaggctggcagatcactcgtggtcaggagctggagaccagcccggccagcacagcgaaaccccgtctccaccaaaaaacacgaaaaccagtcatgcgtggcggcgcacgcctgcaatcgcaggcactcggcaggctgaggcaggagaatcaggcagggaggttgtagtgagtcgagatggcggcagtacagtccagcctccgctcggcatcagagggagaccgtgcagagggagagggagagggaggagagggagactgtgcagagggagagggagagggagagggaggagaggaagaccgtgcagagggaaagggagagggagagggcggaaatttttaactgtacacaaaactagggaaaag

SEQ ID NO: 6598 - DNA, 1019 bp, Artificial sequence
  DNA replication origin
agaggtctgatagagaaaaaggtacatgtaccctgactatgcctttagctccagccacctctctaagaggaaattgttgggcgggtggggaaaagctagtcgcagaactaaactgtaagccggaccgggtgtgaggaggggaggtggtagaaggattataggatggaagagcggaggctgaggaagaattgggacttagctcaacctggccatgagcagcctgaggaggaggggaaaggtcagatgggcctgtagaaggaagactggaaagattcaacgacgcttggggttgggactgagggggcaggcgggaaggaaagaaggaggatttgggaggaatcgcattgggaacagagactagggagggaacaaagtgtgaaaagtgcctggacgtaaggcacctcagaccatttgcctattttttgacaaaaattatttaggtcttgtaggatggagaaattgaaagtgccattttctggccatttagagccattgtcaagtttgtattggggccaagcagtgttgcagaagaaaataaggcatttaggttttaggtcagatgtgagttgaagaggttttaagttcttgagaacacaggctaagggagaagaaggaggaatggagggtggaaggttgcccatagtgaaggaggcaagcccagagaaaagagagagtagagacacggagggaaggggttcgggggttcttaccctccagaaaagtgggaaaggggtcggggcgtggaaataaggggttggggcacagagataagaggtcagggcatggaaataagggatcggggtgcagagataagaggtcggggcacagaaataagggattggggcacagggataagaggttggggcatggaaataagggattgggggttcttgccccctagaaaagcgggacttgccactaagggtgaaggagaaggggttgaggggttcttgcctctcccctagaaaagcagagaaggggtagagactcagagagaaggggttggggtacttgcccct

SEQ ID NO: 6599 - DNA, 810 bp, Artificial sequence
  DNA replication origin
cctttgaccttttagggtctagggctgtaaagcgtctcagggttgctgctgaaggagccatgaactgggctgggtttttatatttgatgaaaaagcctaaatgctgtctgatttgggataaagaaaaaggagcattaaccttgactatgcctttagctccagccacctttttaagagtaaattgctgggcaggtgggggagggctagtcacggaacgaaactgtaagccggaccaggtgtgaggaggggaggtgataaaaggattatagggtggaggagcagaggctgaagaagaattgggacctagcttggcctggtgaggaggggagaggtcagatgggtctgtagaaaaggaagattagaaagactcaatgatgcttggggttgggactgaggggacaggcgggagggaaagaaggaagatttgggacgagttgcattgggcacagagactaggaagggactgatgtgtaaaagaatgcctggacatcaggcacctcagaccgtttgcctattttatgacaattatttagatcttgtaggatggaaaaattgaaagtgccgttttccagctatttggaactactgtcgagtttgtattggggccaagcggtgttgcagaagaaaacaaggcatttaggttttaggtcaggtgtgagttgaagagcttttaagttcttgagaacacaggctaagggaggagaaggaggaatggagggtggaaggttgcccatagtgaaggaggcaaacacagagagaagagagcgtagagacacggagggaaggggttcgggtgttcttttttttttt

SEQ ID NO: 6600 - DNA, 834 bp, Artificial sequence
  DNA replication origin
cccggccagccgccccgtccgggaggtgaggggcgcctctgcccggccgcccctactgggaagtgaggagcccctcagcccggccagccaccccgtccgggagggagatgggggggtcagcccccccacccggccagccgccccgtccgggagggaggtgggggggtcagccctccgcccggccagccgccccgtccgggaggtgaggggctcagccccctgcccggccagccgccccatccgggaggtgaggggcgcctctgcccggccgcccctactgggaagtgaggagcccctctgcccggccagccgccccgtccgggagggaggttggggggtcagccccccgcccggccagccgccccgtccgggaggtgaggggcgcctctgcccggccgcccctactgggaagtgaggagcccctctgcccggccaccaccccgtctgggaggtgtgcccaacagctcattgagaacgggccaggatgacaatggctgctttgtggaatagaaaggcgggaaaggtggggaaaagattgagaaatcggatggttgccgtgtctgtgtagaaagaagtagacatgggagacttttcattttgttctgcactaagaaaaattcctctgccttgggatcctgttgatctgtgaccttgcccccaaccctgtgctctctgaaacatgtgctgtgtccactcagggttaaatggattaagggcggtgcaagatgtgctttgttaaacagacgcttgaaggcagcatgctcgttaagagtcatcaccaatccctaatctcaagtaatcagggacacaaacactgcggaaggccgcagggtc

SEQ ID NO: 6601 - DNA, 1077 bp, Artificial sequence
  DNA replication origin
ctcctcacttcccagtaggggcggccgggcagaggcgcccctcacctcccggacggggcggctggccgggcggggggctgacccccccacctccctcccggacggcacggctggccaggcggggggctgacccccccacctccctcccggatggggcggctggccgggcggggggctgacccccccccacctccctcccggacggggtggctgccgggcggagatgctcctcacttcccagatggggtggctgccgggcggagaggctcctcacttctcagacggggcagctgccgggcggaggggctcctcacttctcagacggggtggttgccaggcagagggtctcctcacttctcagacggggcggccgggcagagaccctcctcacctcccagacggggtctcggccaggcagaggcgctcctcacatcccagatggggcggcggggcagaggcgctccccacatctcagacgatgggcggccgggcagagacgctcctcacttcctagatgtgatggcggctgggaagaggctctcctcacttcctagatgggatggcggccgggcggagacgctcctcactttccagactgggcagccaggcagaggggctcctcacatcccagacgatgggcggccaggcagagacactcctcacttcccagacggggtggcggccgggcagaggctgcaatctcggcactttgggaggccaaggcaggcggctgctccttgccctcgggccccgcggggcccgtcccggttcgggtgttcttaaccctccagaaaagtgggaaaggggtcagggcacggaaataagggattggggcacagagataagaggttggggtgtggaaataagggattgggggttcttgccccctagaaaagcgggacttgccgctaagggtgaaggagaaggggttgaggggtacttgcccctcccccagaaaagcagagaaggggtagagactcagaaggggttggggtacttgcccctcccccagaaaagcagagaaggggtagagacatggagagaaggggttggggtacttgcccctcccccagaaaa

SEQ ID NO: 6602 - DNA, 1040 bp, Artificial sequence
  DNA replication origin
ggaaataagggattggggcacagagataagaggttggggtgtggaaataagggattgggggttcttgccccctagaaaagcgggacttgccgctaagggtgaaggagaaggggttgaggggtacttgcccctcccccagaaaagcagagaaggggtagagactcagaaggggttggggtacttgcccctcccccagaaaagcagagaaggggtagagacatggagagaaggggttggggtacttgcccctcccccagaaaagcgggacttgccgctaagggtgaaggaccaaggcaggcctccctgcgtggtctgacacctttgaaacgtgggtgaatgatcagagaggtgtccctgcaatgattaaacactacgggaaggctgccttcccagtccgtgaccggcgccggagttttgggtccacaaataaaacgtgtctcctttgtctctaccagaaaatgaaaggaattgaaattaagagaagggagagattgaagggtggcaccaagattgaaaggagaaagaggttgagggatagtgagggaggttggagaagagagtaaaaagaggccgcttaccggatttgaaattggtgagatgtttcttgggctcatcggtctgaggacctgaggtcgtaggtggtttcatgtgcgtccgtgtgaagagaccaccaaacaggctttgtgtgagcaataaagctgtttatttcacctgggtacaagtgggctgagtctgaaaagagagtcagcgaagggagatggggtggggctgttttataagatttgggtgggtaaaggaaaattacagtcaaagggggtttgttctctggcaggcaggagtgggggttgcaaagtactcagtgggggagctttttgagccaggattggccaggaaaaggactttcataaggtcacatcatcacttaaggcaaggatgggccattttcacttcttttgtggtggaatgtcatcagttaaggcaaggaccagccatttacacttcttttgtggtggaatgtcatcagttaaggcaaggaccag

SEQ ID NO: 6603 - DNA, 1277 bp, Artificial sequence
  DNA replication origin
agcccccagtcccagccctcctccctacctgcaaggtgtacgctggctgtggctgtactgagtccagtctgtccccctccaggttcggcacccaggtctccggaggagacacagttacccgaacccttcgcctgaataactccagcccctgtggtaagacatgcatgagagaagtcagtgttcttgccacaggctgtgccttgtggtgagccaggctgggagggaaggtgggagggaagccgatggcccatgaacaggacccaggtgtccagggggcctgtggttacggaagtgtggatgggcccacagatgccctgctctcatcagggttgctgtttggaggaacagacaataagaggggatccctttctcattcctccagccggcaggacctgacctgcctgagagctgctggggatacagcggggacaggacagcagggtttctgccgaggggcttccctcctgatgggtgggacagatgtgactgtggactgcagtgtgtggagtgtgtggcatacaactgaagggaaggccggagtgctgggggaacgtgttgaagggccaggctcccctgtggaggggaggcagagtgtaggctgagtctaagaggaagggtaagccgatgtgggccaggggagcatgtgggggcaaagagtgctctgggcctgagaaagggttaggagaggaagctggtgacactgaagagggggccctggccatgcctgcccctgaggagagctgcgagcaggactgaaggcaggaggggaggggaagatgggttcgatgcaggcagatgtctaggtttgggacaggactttggggacttctcagcttgggggcttctgggagatgaggtggggctaccggctgggtgtgggaaggcagatggaggtgtcagaggagggcagggacagcttgacattgtcatggtgcaggctggagagagagcaatggggagccccagcttaggttggggacagattgatgggggtggcaatctgttcagctgggggacttcccccagtggtactcagagggacggcacagttcagttctttcagggttaggtgttgccaggtgggtgcaaagggagatacgaggatgctggcaagacagaggtggacatggcggcccccaaagactagtctgcctggggaaggacgtgaaagctgacataggctgatggatagatggggagaaggaagggcatgtgggggttagagagcccagcctgcccacaaacaggccggaaggagaagcagctgtgggagagag

SEQ ID NO: 6604 - DNA, 1294 bp, Artificial sequence
  DNA replication origin
gggaggggcgggttcccaggccgactctccttgtggttggctgaggctggaggtggacgggacttttggagggtcgctcgcgtctgttcgcagagctgtgggcggagttgaggccttggaggctgagatgtggttctgcgcgtgtgcggacggctgtctgttaactccgcggtcagttcccggactggtggctggtctgcagggttgacctgcgcaatgcagaggctgcaggtagtgctgggccacctgaggggtccggccgattccggctggatgccgcaggccgcgccttgcctgagcggtgccccgcaggcctcggccgcggacgtggtggtggtgcacgggcggcgcacggccatctgccgggcgggccgcggcggcttcaaggtgaggcccgagggtctgggcgccgagtgtgggaagacgccggcgcgggctggggtccggttcgtatgtttggttatcctggacgccggaggcagctccgcacccagctgtggtcgctttgtctccctggggtgggcatgggggagtgggggtcactgcggctgctctttctgctgcaggacaccacccccgacgagcttctctcggcagtcatgaccgcggttctcaaggacgtgaatctgaggccggaacagctgggggacatctgtgtcggtgagcgaaccactcaggccctgcgctgggccttccccgttcttccgttcgtccagagctctcctcacctccccgccccgaattttcactgggggaacctccatggccttgacctttgaaggggtcctgccccttcacacctgtgggtatttctcgtcagatgggaggagagactgagaaaagaaataagacgcagagacaaagtgtagagtgggcccaggtgaccggcatcggtctccgagttccctcagtatttattgattactattttcactatctcggcaaggggagtgcggcagtgtgggggaaaggaagagagatcagactgttactgtgtctgtgtagaaaaggaagacagaagaaactccattttgatctgtactaagaaaaatttttctgccttgagatgctgttaatctgtagccttagccccaaccctgtgctcacagaaacatgtgctgtattgaatcaaggtttgagggatttagggctgtgcaggatgtggcttgttaaccatttgtttgcaggcagtatgcttggtaaaagtcatcgccattctccattctcgattaaccaggtacacagtgcactgcgaaaggccgcagggacctctgcccaagaaagcctgggtatt

SEQ ID NO: 6605 - DNA, 955 bp, Artificial sequence
  DNA replication origin
tgctattgggagtcaagggggcacgtggccttgccctttaggtttagggacacagtcctgacctggggagccctggttcattcatttactcattcgacaagtacttattgatcatctactaagtgtcaagggtgtcgcaggctccccggatacatggtacctctctgccttggtggagaccccagcctagcacgggaaatgggcactaataaaatcattccaattgggtgtaaaactggtaaaagtgtgaaatgttcattctccagttagagagcttgtcacaccccgcatgtctgtaaaatctgttctcccggccagcccggaagcccaaattccctgtcttctcgaaagaatgggaaagcccaaccacgtcggagcaggactcgggcgtctcggaagtatttaggtcccccagctcgggtactgggaccggagggatagcagagcctcctaggaagtgggtagaggaattagagcctcggcttccatctccagcccccaagcagtaagcggtcctggctgcccagccttccgtttggctgcgggcaggagacagggatttgggggtcaggtctcgggtttggctacaaaaggtggaaagacttccggtctgcatttctgggcggggattcgtaaagatacaccttctggttggctgcggtaggccaaggtaggcggggcattgagtggaaagctcggctgggcggtgcctgtgggccctcctatagagggcttggtaggcggtggcggggaggggcgggttcccaggccgactctccttgtggttggctgaggctggaggtggacgggacttttggagggtcgctcgcgtctgttcgcagagctgtgggcggagttgaggccttggaggctgagatgtggttctgcgcgtgtgcggacggctgtctgttaactccgcggtcagttcccggactggtggctggtctgcagggtt

SEQ ID NO: 6606 - DNA, 1194 bp, Artificial sequence
  DNA replication origin
tcgatgaacctctacctaagcacttcttccctttcaccgcgaactcctaccttctcgggtttctagcttgctcactttacatccagccacactggagatggcggccggaggcgggcccgaggtggggcgtgaccagcgcagtgacgtcagcgcgctgcgtgtcggcaggtggaggaagaggggaaagtttggcccgtgcgtggggctggggtggagggcgggacagaggggctgggcccaggcaaagcttctgtcgctgctgctgcggaggccgaggacaggacgtgggctgggccgggcagtgccggactcggaggagcaggaggcgaggtccgccggagctctgagcccccgctgctctgccgcgcggtgaccccgcgccccggcgccgtccgacccgtggctgttccgagacgattggtgggggcgcggcggcggcggcggcggctgttgggggtggggagacgcgcggcgaggagacgagcgaggtcagcgagtttgagggaggaccgcgagccgctgccgccgtcatgtccgaggactcgagcgccctgccctggtccatcaacagggacgattacgagctgcaggaggtgatcggtgagagcaggcgctgcggaggggggaggcgcggcgctgggaggcgggggacacgggaacgtggggagccgcgggagctcggggagcgcagccctcataggaattcgtggggcgcttgtggggctgggggcttgtaggacgcttgtgtcgaggagcgcgtgtgagacgggaagggggttttgaggcgcgcgcctgtgaggtggcgtggggtggggtgaggcttgagggggctcaggagagatttgtgtacaggattctcaaatgtgtggacaggagcggcccatgtgtcttgtagagaaagaaagtgcaggtgtgggacaggcctttccgaggctgtgtgagaaatgggatcttgaagtgggcacagccatcgatttctgggattgtgggatagatagggagctttaagtttttcctccatccgtgctggggcgaactggggatcctccaggtgaagctgcaggaaccgcgctgagcaaccgagacccaacttacgactccttccaactgactttccagtcggggaggtagacattaaataagaagacaaaaagaagtaagaagggctgggcgtggtggctcacgcctgtaatc

SEQ ID NO: 6607 - DNA, 1028 bp, Artificial sequence
  DNA replication origin
gagcaaccgagacccaacttacgactccttccaactgactttccagtcggggaggtagacattaaataagaagacaaaaagaagtaagaagggctgggcgtggtggctcacgcctgtaatcccaccactttgggaggccgaggcgggcggatcacgaggtcgggggttcgagaccagcctggccaatatggtgaaaccccgtctctactaaaaatacaaaaattagttgggtgtggtggtgcgcgcctgtaatcccagctactcgggaggctgaggcagaagaatccttgaacccgggaggcggagcttgcagtgagctgagatcgcgccactgcactccagcctgggcgacaaaccctgactctgactcaaaaaaaaaaaaaaaaaaaaaaaaatttgaagaggctttggcaagtgccatgaaggagataaacaagatgttctgatagagaataacctggagatctacttagggtgatttcaaggaaaattctttttctgaggcgataacatttcagttgagccctgaagcatgagaagtgaggattaagagcctcgggaagatttttccttacagagggatatagagatgcagtggccttgagtaagggaagagcttgatttgttttaggacctgaaggaaggctggcaaggatagagagggaagggaggagccagatcttagggatcttctcagctttggtacagattttggaattttaagtatcactggaggccctcaaatagtgccttgacgtgatccgataaattgggctggtgtgtgaaaagatttgaagggggtccaggaataccagttggcagagaccaaaacttgcacatagattgtaattctcacagaagcctagggattgggaggaggctggggactggggatgaggggagtatttgttggacaacaataacccagtgaccttggaaatcaaaatgtttagctatacaggctcaatccaacggacatgagcagacacctgtgtattggaggaaggcgaattatctgctttgccagc

SEQ ID NO: 6608 - DNA, 977 bp, Artificial sequence
  DNA replication origin
ccttatagctgcagctgcctagttgctcggggtttcctggcaggagaacctcttctcattgggagccttaggcctaggtggccaaagcacgaatacactcagagcaaaaacaaggacaatgattccttgcctgaccatgtgtcaggccacgtgtctggtattgcgtcttttctataagaggcacgtggtcagacaggggatgtgcagagggagcagccaggtggagcgggatggaagctgtgtatatgattaggagataagggtgtcccctggcgggaacagaggcactctaccgggctctgaggggctgtctctggacccagtgcagagacgagcagaagaagctttgcctgatctcaactgtccagagcaggtggggacacccagcaaggctggatgcaagggcagccctggggaccctgacgtaaccatggttttgtcctcttggcctctgcacagccactgagtggttagtgggtgagcaccgggcccatgccattatcctgggacactgctttttcgctgttggggccgtgttgctgacagggatcgcctacagtcttccccactggcagctgctgtttctggtgggtgggatacttgtgatccccttcatctcctatatctggtgagcaagcgagtaccgggcatgtacagggctgggtctgatgggctggatgtcgatgagtatggagggtccttgaagctgtgggaatgggtgggatttcccctgggagaaagtgcatgtggatgggatgagataggaaggcaccaagggcagagcctctgaacctcagcattaacctcctccccgacccagagaagaccctcaaagagatgttagagaggtggtcagaaaaccaggaggaagagtgttgaaggccaaggggttaaggccaagggaagggtcagtgttgaaggtaagaggggtgatgctgggaaagggtctgccagccttggtgaccttcttgaggtgg

SEQ ID NO: 6609 - DNA, 961 bp, Artificial sequence
  DNA replication origin
ggccctgcggccaggcgactgtacctgctgcgtgctgaagtcccagcccaggcagcagcggcgaggggcgtgctccgccatggcctttcgggtaaggctgcgcgtccgtcagtccgtccgtccgccacgcggcgtgatagtcgccgcgctccagcgcccagagacgcaggggcccgcccctagctccgcccggccggactgtggaccggagtcacgaggcgggcttgcgctctggcgccgcctgcggggctacgcgagccgggaccgcgtcctgtgcaatcgacggtgcccccacgcagcccgctttccttcgaagcgcaccccctctggttctccccatcttcatcttatgtcttcatgggccgtgccctgacaccgcctggcttcccttagaggacgcctgggccagaggtttcagctataagccggcttgtctttcagagggagcctgcctgtccttctggaggccctgggcctgccgtcctctgtggctgtatcttggcactggagcagctgtccacccatggtggtgactcaggggccacagggaaatgggccctggggttggaagcactgagtcctgacaagccctatccagatccagcaaatctgaatggttcccagtgtgtcacatcccacctgtgtatttaaactcagcggctcctgatgcccccacggggagacactccttcctggagtcaattggtattgatggtctaatgtgtgccaggcatggtaaaggggaatgagaaccagagtcagacccactccttttattcatggagctgagggcgcctgtcccaccagctacatccttcccgtccctaagactaactgctttccagaattcctccccaaacccagcatgtgagaggctcctcctacgaacttcccagcccaccagtgcccttttcatgcacttgcaatggtctgtctcccttgctgaacttgagctgcttgg

SEQ ID NO: 6610 - DNA, 929 bp, Artificial sequence
  DNA replication origin
ttaacttcccagtagctactgctctgagccactaggtcttaaacctatctgcaggattttgtcactctgggtgagaacatgcgtattttgatttagctggagtcctgagctcagtaaaggccttgggcagaaaaatctggaagagtctgcaggagtcagatcacagaggactttctatagaggcttttgcaataatttgagcaaggaatagagaggtataaagtaaaacaggagggataaagaggaaggaaaaaggaactcactatacaaatataggaagaaaactcaaagtgagaatcacttttcagctgatgaaatactccaaaataaaaaagaaatccagaattttggaaattcttccagagaaatgacacaacttcttcagcaagtggactgcaagaagagagagggaatgagggagaaaaagggagagaagttctaaactgcaccacttgggagatggtccctctcagtgatctgtgggcatagctaaagggagggcacaggaagcacgtccaccaggcccattgtttgggtgggaggttgtgaattatgccaagtgagtttggggagggaggagagatgaaggagggggagaggagagatggtgaaaggagagaatggggacagcatggaaagggtgagcatggggcaagtaagagaggccctgcgaggcacctcagacagctgaaacaaggagggcagggtgtgggagagaagagactgtggggtttggattggggaagaggatggatggtagatcaaggtatggggtgggggcggctatgggtcacggtttgtggaggagtgggcagtcagggttggagaaagagataggatgaggttagggggtgagaccgggctttgtctcccccattctgctgatttgagtccctagattagctttaattctgcctctgcaaggggaa

SEQ ID NO: 6611 - DNA, 1317 bp, Artificial sequence
  DNA replication origin
tctccttcccgctccttccttcggtctcgttccctgcgcgcttcctgcgccttcgtccccgagcagcgttcgggctccaagggccggtcggcggggccgggctcagggccgctgcgggcggcgcaggctgcggcccgggctccggggcgacgcgggggccggggggcggcggcggggcacgggccggggcgcgcccgactcaggcatagcgcggcggggctgggcccgggccccgggcgcaggggccgagtccggaggggccatgaacggggggaggggtgggggggaggggagctgaaccgagtccaaaatggctcctgagcggcggccacggagccgagccagcggggaaacccggatgttggatacaaagaggcgggcgggctgggcggggagggggaggggaggcgggccctccggccgcgtggtccgcgcccccctgaggggcggggccccagagaaacaacaacacggaggccccgcccccatcccgcgccctgtgggaggacgcgcgtgcaccaacttgctggaggacagggcggggcgcgcggacggaggtggcgggaatgggctcctgaccactttgcccgggagcctgtggccactgcactcgcaattagtgccccgcacgctcgagcccaagctcctgacacatgctgccctacaaccccggaatgagtggatagtcccgggactctggcccagacgcctctgtgccttggattccccacctgtgcaatgggggtgacagtgaaccgtgggaaagtcggatctctactgatgggcgaattaagtggcagaaagaggctgacttccctgaattgacaagcagtctcccgtctgcaatcccttgccacacactcaaaggcacagctagggcggggagtggtcatttaaacccaaccaagtgagggagcgggcagagtcccgcccctctaagcccagcaggtggaaaagggcctctggcaacctgctggccctccctaatcctatcttgtcttctgcagttcctgcgccacccacagcggccctgagcttcaatctgcactttcaaaacttcccagttgcctccagagccctgcagttgaagatcttgtctagcacatggttttgctgttttcctcaccccgaactccctccttggagggccatcgttctctgtctcagattccaccctccttatcacacaactagagcttcggaggaacgtgatggggctcccaactaaggagggaaagaccatcatagctcagggatgaggctccgagatcctcagataacattaattgtcctctgtcttctcttgacttggcacat

SEQ ID NO: 6612 - DNA, 1130 bp, Artificial sequence
  DNA replication origin
agcggccctgagcccggccccgccgaccggcccttggagcccgaacgctgctcggggacgaaggcgcaggaagcgcgcagggaacgagaccgaaggaaggagcgggaaggagagcgcagccgccgcctggccctgcgcgccccgggagcgccgtgcggccctgcccgcgggctccgggtgtgcgcggggcggcgccgcggaacatgacggcgccctgggtggccctcgccctcctctggggatcgctgtgcgccggtaagaactgggcgcggcgcggggacgccgagagggcgcgcggggctggcctctggcgccgcgcggtgtttaccaacaaagggcgggcccggggcctcgtcgccgcaccacctgtattcagccctcacctccgggggcgtgggctgggggcgcggtgggcgcccggctcgccgaacttgggggcacgatcttgtctgtgcagtcatctgcgggattctggttcctagaggcgcccctgcgatgggggccgggacgcggagcctcagggtcggagttcgggctacgcgggcgcgtggaacccagggaaagagtgaggaaaacctgagcgtggggaaggcggccaagaggggtgggcagatctcattgggggtggcaggattgtaggtgcagcagcagcagcagcatgcggggagggttgcatgtccctcagagtcactaagtgtagcgaagcgaagggggcggcttcacgcagcccaaagtcccctgcatctcttgccaccagtctgcgtcgcgttaccggcccggcgggctgttggtgctggctcccacctgctccctctttccctgccgttggccccgggatgcggagtgtggtcgcttcgcgggaccgctttgtttgggcacttgggaggggagggggtgggtaagatggaaaacccaacaggtccctcttccttcgggcctccaggaggcacgtggcggggtgggtgaccagcgctcagctcgcccgcggctgcgggcgtgtggctggaggtgttcggccagcgcatgtgtgtttgggggtatgtgggcgcgggcgtaaacaagcggagttccgcctggaaagcttgtttctcctacggtccaagcaccgatttccctctctcagtggtgcc

SEQ ID NO: 6613 - DNA, 905 bp, Artificial sequence
  DNA replication origin
cgggcctccaggaggcacgtggcggggtgggtgaccagcgctcagctcgcccgcggctgcgggcgtgtggctggaggtgttcggccagcgcatgtgtgtttgggggtatgtgggcgcgggcgtaaacaagcggagttccgcctggaaagcttgtttctcctacggtccaagcaccgatttccctctctcagtggtgccggggtgcgcctaaccccggcgggcgcgccgggacgtcccctggccagtcctgggaaacgtggggagctgggcattgaagctctggcgagaaggtcggggcggctggtacccggccgccgggtcctgcgcgtctttgttcccagcccccattacacatgcagcgcgggtcccccgccgccctcggtggcagccgcctggagtctgggaaaccctcgaggggcggggccgggcgtgcaggggcggggccggagtccccacgctgctgcgggggtggggatttgggatctgcgtcccattcccaccctggttctaccttctcctgtgcgtcgtcgtgaggcttagtttacaccgaaagcgagtgagttctgtagggtagtagcgcgcgcgcgcgcagcctgagtccggaaaccgaagggcaaagaccagctggcacctgagtaccgtatggaagagggcgttgcagctctcctggagccgcttcttggaggcgaagtggtggtcgtgttggactttctgctcttttttgccccgctcccttgggatgccttttccccaagaaggagtgctcgaaagtgaaaggggaggcattggtctgctagagggagggcggcagcaagctgacttgataggcagaccgcagcccacctgactgcctccagacccgctgggtgcctgatccctggaagtgctggggctcttccaagccc

SEQ ID NO: 6614 - DNA, 1334 bp, Artificial sequence
  DNA replication origin
aatcggcagtgcttccctgctcaggcccaagagagaaggagcctgtggagaaggcaaccaaggctcacagcagggaggggccttgcccaaggctgagcagaaggaagtgggtgtggaatccagctttcttggcactggccacgctgctgtgcccctaccccatccgcatgcttcatgggaaagtttgtctcaggcctcagagtctagggaaggatgtttccaagatgaattctgcattatttttcaataaatgcagttgggtctctactgtgtgcaagtactgttatggtgctggggatcttagggaacaaaataaaaactcttccccacatggaggaaggtggctacaaacaatcagcataatcaataagccacttttacattatgtgaaaaagtggtatctaccatggagcaaagagaacttgggaagggaaggggtggggtggaggggaaggtgcaggttaccacttttaaataggatgatcagagtaggcgcactttggtcacatttgagcgggtttgaagttggggttagccaggccaatgtctggcagacgttccaagcagagattggaagagcagtgcaaggaccgtgtgtcgggagcatgcctggcatactgggggaaatgcagggaggctagagccactgagcagaaggaagcgcaggagatgaggccagattgcaggggatgcagccagattgctgcctttgaaaaaatatggcctttgatttagaatgaaatgggggtaggggggcggaattggaaggctctgaacagaagagtgccgtgaactgactgattttctttagggagtcactcggtcatggaggccggggtagagagggatgaatagaagcagggagaagagttaggaggctcaggccatgatccagtgagagacgatggtggccgggccaggacggtggcagtagaagtggtgagaaacacttggacttcagatgtattttgaaggcagagccaacaggaaatcctgatgggttagacacagggtgtcagagacagagaggaggcagggaggacgccaagaattgtggcctgcacagctggagggatggagttgccgtcacctgagatgggaagccatcgccggggcagacggggcaagctttggaaagaacagagaccgcaaggcagcctattaggaactgggcaggcagaccagctggacctggcactctggaggtcctgccctcaaggagaggtccctgagagatgccccccgactctccaggattgggggccaatagcccagcatccttgaggggtgagtgggggcaacacagaaatcagtctggcgtgtcttccttcccc

SEQ ID NO: 6615 - DNA, 1224 bp, Artificial sequence
  DNA replication origin
ggggagtgagtagggaggggctgcaaggagaggggaggctccccagggtaacctgatttgtccaggactggggggtatcccaaggtgcagaaattttactgccaaaatgaggaaagtcccatgtaaaccgggacaagtagttccccccacatccatctcccacttcagacagtgcctacagctgctctctacctgcctggctattgtgtcctgtcatagcagtgtcaccattgctgattgagcaccagctatgtgcctttgcattcagaaaaccctccttcaggaaagccagttgagaaaacagtgcaggggggtctagtttctggtgtgaacagttaatattctccttgtgcagcatctctaccttgatgtgaatacacatactacagggcctgtcagtaaccagcagaggccaggaaggggccagagctgggtgagggggcacagaggaaggagtcagtgtgggtgggtgggcagtcagaagaggtgtcctggaggaggtagagtggggaggagagcaggaggtgactctggcatcactcagggcacacagaattttggagaatgtctaaatctaggagcagggggctgcatgtgtgggatagaaggaaagagggaggcactgccatggtccaagcaggggcaaggaggcctgtcccagggcagtgatgttgggtgagggttgggaacttgtggccagtgccagaagaaagggtgtcaggaggagccagtctggaaaggaagattcacagtctgctcccatcatgagctctcaggagccttccggatgcagggagggatgcatccagttccagaagctgatgaacctggggcaggatggagttgggggtggggctctagagtgaagcccaaaggacagggaagcctggccccggaagagtgcatagccggatggagcggtcccagcctgatgagctgcggtagggctgctgcagatggccaagctgatgcagatggagcagctgtcctggtggggggtggagaatcatgaggtgctagcatctaggggatgagcgactgtggtcttacaatcaagccaggtccagcctccccaaactctggggctatgtgagaccaacaccaggggcccctgcttacctattttcccctacaaccttccacagccaggggatgggttctgaaatctgcaggcctgacatcctaggcctgaggggtgtggctgaacctgagcccagagcatcc

SEQ ID NO: 6616 - DNA, 1572 bp, Artificial sequence
  DNA replication origin
gccgagacggcggcggcgcccgtaggatgcagggatcgctcccccggggccgctgagcctgcgcccagtgccccgagccccgcgccgagccgagtccgcgccaagcagcagccgcccaccccggggcccggccgggggaccagcaggtgagcgagtgcccccgcgcccggcagccctggcccggccggagccccctccgcctgccgccgcccaactttcctccccgagggccgaagcctccagtccctgcgtgctcctccctgccccgggtccgcccagccgctccctccccgatcagtgccccagagagccggagggggagaaggggcgcagatccgcccggctggagggtatccccgggggagacgtctctaaacaccgtgcgccccccttcccttccctttccttccgggtttcccggtgcgctgtcgagggccgggggagggggagctgcggccccagcttcccggccatccctggcgcaggctcggggagggtctgggattgggacccggataccggaggccggagaccccaaggtcagagcggcgactaggcgcgccatgaatgtggttccagagagcggggtttgcgggggctgaccgagcagggctggatatgggggaggaagccacgcaccccctttctctgggcccagggggaaccgtccgctggggctgtcctctctgtgggacgagatctctgcgcgtttagaccatgtagagatctcggtgccctttgacgccctaaaggggccgcatctcctctgtctgatctctgtgcttctcgaaggggtggagatctctttgcggtgagattggagagagttctctgccctcctctctctgagccggaacagatccacgcaccctgatgggaggtggctctcgacctctgtgttatttgatcgtctttggtggcgctctggaagaaagtggaggtgccaagctttgtccgagaggccaagagctggtgggggccagaggtgtggggactgttagtggtggtgatgaggatggggggaaatgatgttggggacaagtccctggctgtaggcctgccttgcaaacacctgttggagagcagagcacagccagatcaggatgccatggctaagatagtgcaggactcactcttgtgctcctcagtgccttcagcccagccccgggccatgggatctatctcctcttaaggtcctgggcctatgttccattcccaggcatctgctcgcctcctgctgagaccccaggtgtgtctcccagtgagcctaggcagtatcatccagatggcaaaccacgtgacccccaccatgccatggcatcccaagccctctcccaggttcccaccatccttcaggatctagtgggaccgtgagcagcagaggccccagctactgggggcccaggccattgccgctgccctcaactccatctgtttgacctcatctccactcagttagaattgggcaggtgcatatgaatcggtggtaatgagtgcgaggtggaatgagggtggtcaggctgctgttgcaggagcatggagagggtgaggtcaggtgacagccagggtgtg

SEQ ID NO: 6617 - DNA, 1373 bp, Artificial sequence
  DNA replication origin
aactttcctgtggactgactttcctactgatcccctcctgcaagcagagcagcccctccgtatgtacctaaggcgtccaacgaagccccacacccaggtcgcaaacggacgctgtcccccacccccctctttgccctcccacctcttcaagatccccatcatggaggagcaggtcccagcctctgggctcccaaacccagcacctctgtgccctctgagaccctggcacccatttggctctctaagagcggttcttgcttttgggagccctgaaaatgtggcagaaaagtgtaccatcccttccaatgactgtacttttttcgtgggcaaaagctgatggcctgttttttgttgttgttttgttttgtttttgtttttgtttttagaagcgcaagatttattgtgaagagggaaagaacaaagcttccacagcgtggaaggggacccaagcgggttgccctgatggcctgttttgtttaaacaagaagtgtgtccccataggtcctgggcatgggcatgggagcaactgtttgtcagcgtatgtctccgtgtgtgtgtgcctgtgaccatgtctctgagtgagaaacagtgggtgtgtaagtatgtgactccaggctctgcatgtgtcaaggtgaaggttgtatgtggctcaagagggtggaagtatatatataaagaggtatatacatgtatatatatgtatgtgtgtgtgtgtgtttgcgcgcgcgcgtgtgtgggtgtctctgtgttggttgcctgcttgcttctgggtctgggtgtgtgtttggttctgtcagcatgtgcgtccgtgtgttcaggtagatgtgtaccattgtgcagatttctgtggcatcactaagtgtgtctccaggaaagtgtggttcgagtgagtgtgtgtgtctctgtgtcagtgtgtcagtggatgtgtgtctaagtcatgtgggtgtctaagtttgtcagagtgtcttcctcagtgtcagtgtgtgtcaatgatgtgtctgtctgtgtctgtgtgggtgtgtgggggtgtgtatctgtctcagggtgcatgtgtgtgtctgtgtcagtgcaggtatgcctatggcagcgtgtgtctgtctcggcatgagtgtcagtgtatgcccgtgtccacgtgggtgggtgggtgtctggtagccttcccaagtcagcaaggttgcgtgtgtgtgtgtgtatactctggcgggtgctggtgtgtatgccagtgtttgttaatgtgagcctgtccgcgtccgcgtgggtggccatctgtggtgaagcgtcgccgggtcgccgtgtgtgtacccccgcctatgtctgtctgtccgcggccgcgtgtgcggctgtctgtggctgtgagcccccgggtcagtgtg

SEQ ID NO: 6618 - DNA, 1780 bp, Artificial sequence
  DNA replication origin
gcaggcggcgccgagggcttccacctccacggggtgagttgccgccgcggcgccggtgaccttggcgaggcgcccgcaaccccgcgcccgggcgtccggtcgccggctggctggcgactgcggcggggtcccggcccgagtgtttccgcctgggtggcgggaggtgccccctgcccggtgggagcctcctgggagaggcggcctcgcgggactcccggaccctggctagtccgcggccgcggtcgggcccagcgcccgccccaagtgccagcagtgccggaagcggagcgttttcctggtccggccgccgggaatggcgctcctcccgggtgaagaatgcaccactaccagtcgggacgcactcgtgcacttagcacacatttacgctcgcctgccgcgggccgctctccgtgctgggcctgggaagagagtcagccacgccgaggacagtcccgggggccggggttaaccgagtggacgcagctgcgggggagcccgtcggcgcgcgtcctgccagtcgtagggtcgtaagggcttccgagggtagaggaccggtgcaaaccagccacgggatagtggggagcgggagggccgggagagtgctgcagaatcctcgaggagagcgtttgcagctggggagggtcccagcctttagatgccgctacatggaggtctgggcgagcaggcttccggagagtggagacggagtggggttcctagaacggagtgtgctgtgagggtgaggagagggtcccgcagccggatggagatttgtgcctgcggtgagggaagggctataatgtaggtgagaggggctgggggtctctgaccccggagcgctgcggggaagaggcgtccctgcaccccccctttccctagtgaaaggcagctggatgcagagatgagtggagacaggcaagcttgtcggtttgtgtgttttgaaggtagggtctgttgccagctaaccacatgagagggctaaaagtttcttaacgtgaaaaccaggctggcttggagaacccagagttgacaggatttgtgcttgggaatgggctttcttatggtgagacaccaaacagcaagcgtggacagtggaatgcatccagccaggagcgtcttccaacaggtttgattaaaggcaaaggaactcaggatattggcaagaggaggggtggggcgatgatgggagcttcgaagacgggaggggcctgcctgatggagagggacaaattggagagggaccagggatcagaggttgtcagtcacaaaaacaaagttttgagctcctactctggcaggcagaattctaaggctctagagataaagcagtgaacagaacaaacatggtccctgttctggagctgacatttggatgatggtagggaaagaagggaaatgaaaaaatacatggtaggtggtaattaccagtgataaaaataaagcaggttaaggggatacagaatggtgagtgggtgctatttttgatagagtggtcaggaagggcctcttctcaagtcacattcgaacagatgcttctgaaggaagtaaagagtggacaatacagatatttaggggaatagtagtattccaggcagaaggaccagcttgtgcagaggccccgaggtaggttgtgcttgtgtgtttgaggaaatgccaggtgaggctggtgtgcttggatggtgtggccagtgtgaggaggagaccagagcagaccgtgtaggaccttgcctgttgtcctgaagatttaagattttattctgagatgtaaaaccatcaggag

SEQ ID NO: 6619 - DNA, 935 bp, Artificial sequence
  DNA replication origin
tggagcagcagggtgtgagcaccgccgagaaactgctgcgtgagttttacccacattcagactccagccagacccagctgcggctgctgcagggcctctgccggctggccaccagggagaaggctaacatggaggctgcgctgggcagcttcatccagatagcgcaggctgaggtgtggctggtggggactggcgggcatgggcaggtggcagggccgagaagaccaggcggccaacacgtgctgacgtccacttcctacctggtgtgtagaaggacagcgtccctgccctgctggccttggcacaagcctacgtgttcctgaagcagatccccaaggcgcgtatgcagttgaagcgcctggccaagaccccctgggtgctgagtgaggctgaggacctggagaagagctggctcctgctggctgacatttactgccagggcagcaagttcgacctcgccttagaactgctgcggcgctgtgtgcaatacaacaaggcaaggagccacacacacactagggctgcgggatggcggaaaggattctaggcattccaggaaggtgaagcaggctttgcaggtagaggccatatggaataagaactagtcgggaagaggcaggctgagaggggcacatgggcgacagaccagaataggaatgaggatcaagggcgatggaccaggtgagaggaggtgcacaggggtcgtgttatgtccagaggagggaacactaaaggacagaaagagatgggaaagcttcatgggttccaagctggagggacttttgcaggtcagagcaggccaggaatgggagtggcggaacaggagggctacagggaaaggggttacgccagtgtctggggtagctgagaggagggcacacagttggcttcttgcaaaggttggggtacccctggggtcccttggcagtttggtt

SEQ ID NO: 6620 - DNA, 1222 bp, Artificial sequence
  DNA replication origin
caggagctggagctcattttttttttttttttaaacagtgtggaataacacattcactgagcacttatcactaatctaagaacatgtgacatgtgttgattcttctaaaccccccaaccctatgaggtcttaagacaaagaattggaggcacagagaggttaaggaacttgcccaggattacccagccaagtaacagtggagccagagttcaaaagcaggcagtctggttctggagccgaagctcttaacactgccacgtggcctccatgcaaaagcaggcagtctggtcctggagccgaagctcttaacacggccacgtggcctccatgatacctcctgggtctgttcctggctctgtgtggattaaacggatttacatgaactcccaggcatggcgtgcctggatatagatggaggaagagagaggaaggagttgaggatgactgcaggtttctggcttgagtgactgggtgggtggtggggctgttactaagatagggaacacaggaagaggaacagatggcatggggggtggggaacagacacaaggggttcgatttggggcctgcagaattttatgtttctaggggatggttgggcggagataacaagtgggcagtgggtcctgggggatctcaggctggatgtgtggtgaaggaggcattcagggccctgtagatggcatctggaactggggaaaggatggggtctcttggcaggatgcgatggggacaggatgtgtgggtgttgtttgtccatatgtgtgtttccgtgttgtctgagcatgtgtgtacatgtgagtatgcctgcctctgggtcatgaatcccccacctcctgggagaacctgctggtcagctgggagctgggttgtttttgtttgtggtttgaccctgggaggggggtgccaagcctgagaaactacccacggagaagcccccggaaacatctgtgagtcttcccccaggcccagggtgggggattggctggggagggagattttcttgcttctctcacgcttgcctaggggaggctgtccctggggtaaacattatccagttagtaaggttgacagcaaactctacaggattcggggactttgtaggcggctgggaagagggcaaaggagtgtttggaaaggacacctgagtagaggagaccaagacagccttctggttggtttttcctgttctctctcatttcctgtgatggcagtgggggaa

SEQ ID NO: 6621 - DNA, 752 bp, Artificial sequence
  DNA replication origin
agtcctaccagtgccccaggcctcaacccaagccagtcttagggagggggcacctttagctgcctccatcccccttcaggaatctgaagaatgtgtcctttaacctcagagccccaggccttggccagtccccccaaaacacttggggtcacatgacccctgtccctcaggaacttcctgggagaaggggagggcacctcccagcacctctagcccccactgaaaaaccagcctgggtggccctgagagggcagaccgaaagccttggcacctcctccccaaccatccctctgaaggagagctgggggaggggacggctcctcggctttggcctccaggacctggcactggataggtgccaaatgtttgctggctacatgaggcacttgttcctgcagaagggaaactgcacctgacaatgactgcttcctccacctaagtggggccttcttccctctctcattcattcattcaacaaatacacactaagctcacatatgtgccaaacactgtggcaggcactcgcgcatgcagggagcaagacttatacaactgctgccctcttgaagctctgaattgagcagggaggacaaatagagtggggtgctgggatggagggtctgaagggtgggacagggtacggctggggtgaaggtaggtctctccgaggaaggaatgtaggcagagttccagataggggctccgcatgggtaaggaacaggaggagggaccagcacagtgtgatcggagga

SEQ ID NO: 6622 - DNA, 1071 bp, Artificial sequence
  DNA replication origin
ttgctggctacatgaggcacttgttcctgcagaagggaaactgcacctgacaatgactgcttcctccacctaagtggggccttcttccctctctcattcattcattcaacaaatacacactaagctcacatatgtgccaaacactgtggcaggcactcgcgcatgcagggagcaagacttatacaactgctgccctcttgaagctctgaattgagcagggaggacaaatagagtggggtgctgggatggagggtctgaagggtgggacagggtacggctggggtgaaggtaggtctctccgaggaaggaatgtaggcagagttccagataggggctccgcatgggtaaggaacaggaggagggaccagcacagtgtgatcggaggaggggcagcccgcgaggctgagcctgggctccagggcaggctttacctcgagggcacggcaagccacagaaggcttaagtagggagtgacaatgccagatttgcattttaaaaacgtggctcagcaccgggagtggagggggtgtgaccggttggaggtgctgccagggccaggagagatgacaggtcaagggcataggagaaaggcagataccaagatgtggagaaggaagagggcagggctgtcaaggatttggatcgggggaggtgacgagctactctccaaaaggcttgagacttctgggtggaggtgctgggtgggcagcaggagacggggaggaaccctctggtgtcaggagtgtgggctacggctgtgtgtgtttgtgccgggagcgggagtgactaagtgtgtgactatggctgtggtgtgggcatctccacagtgcgtgcctgtgaatgggccccggggaggagaaactgaggaaggggaggaagtacgtgctgcggaaggaggagaagtgcgtgggagagagtctacgtgtgcctgcgggtggccggtgtagctgagcccgtgactcacagcagtggcctctgagagtgacggcgactgacaaacaggtgagcctacgacacaatccctccctcccggggtccgtgactcaccgcgcctccctctacgctcatccc

SEQ ID NO: 6623 - DNA, 1284 bp, Artificial sequence
  DNA replication origin
aaaagcacataaaccaacaaaatgacacgtacacacattaatggcattgaaggggggggaagggagtggtaaatgagggtatgaagagagaggtgagactgcaaaagtgagaaagggccgattatttcagctttgtaggccccaaggagttgagacttcatcaggagggtactgggaagccactggaagcttggctccagctgcccagacacctccgcctgcaggctcccaggtacacactcaatgcatgcggaaggacagggcctttatcttcccccaacctgctttcctcctgttgttcttgcaggaaaggtaaagtggagcagacccctgccattctacatgcacatctgtggctgaagaggggctctcaccatcaactccaccgcagatgccatccaagaaggccaggaggtcacccccacccccaacctggaggaaggtagaatggaatcctgagggctgggctagtggctgacagcattcatctaggacagtcagaagaacccagaatgcagcgggagcaggactgggagggggagggtcaggctcccacgaaggctccctggaggaggcagtgcaagctgagcccttaaaggcattgggattctggtaagcagagagagggcaggagagcattccagtcgagaagaccggctgcagtaaaagcgtgagggtggaaacgctcgaggtgatgagtagactcgtacctgcggttgggaagtggggctgagggtgggctcccaggccaggacttggttgccggggcatgtcgtaccgggagggttggccccgagtcaggaaaggccttggcgggagcagagaaggcagtggaccattttaagtggccaagatctggcccggaagaaaccagcctttttatttttttaagggaaggttgaggtgggagtggggaagctagttctaagaacccctagtttggaacttctgcagggaagggtctcttggcccgtgggcaggaatgaagttcaggcccactgattacatccatccttcccgctccctgcctccccgctccccacacaccccagattcctctccagccacagtttacttttccggcggatctgggggtgggtggtaggttgggggcggaggggggaacttttagattggaataaaataaactccctctagaggggtgggggtggagagcgtacaggagacgtcggctctgccactgtctagcccgtggccttgcggagttacgaggtgctcccggcctcggtctacccatctgtaaactggggcggtggggcgagg

SEQ ID NO: 6624 - DNA, 940 bp, Artificial sequence
  DNA replication origin
ggcccgcagcagggcacccccgtgcctgccttccgggacgcaggtgggggttggggacacggacctcagtcctcatagctcctgatttgggaccagggagtggttcctgagggttcccaggcaaagcctctgctagagttttcttcggaagttagctgggcatctaactaggcagctctgccacaggctggggggaaggacagcataaccaaaaccagaaccccattatgatttttgtgggccctaagtacctttgccttaatgggctccttttccataaaaaaatatttaaaagtatattttacgactgtggtggtataaagccgaatatgttaatgttatatattcaaacaatttcttcggcctgaaagtttgtttttcccttctgatagtaaaatgagttaaacattttcatgagcttctaaaaggattgtggaccctaggcagtgttgccccctgtgccggatgggtgagttggccctgggtaaaatcagagcgatgtgacacagcctggaaagaacatgaaaggacctagaggatagaattctcccctcctggaggaggccataaacacaggaacagctgcacaggaagggccttgaatgacctaagaagtgtggattttaaggcgacagaggtggtgagaaactgctgcaaggctggattggaggactgatggtttgggggtggcactggtggtggggagagaaatgaggaggctgttgctatggtagtcacatgttggagctcacaaatcaatgtggaaatgaagcagggggcaaggggaagacatacttgggaagccgaagcccactgatatgaggcagtaatgcagagagaagcctgggctatcttctctggcttgggtgaatggcagatgctgctacccctcttggaaaataggaagacgggaggagaacgtgtatgtgcaccaggactt

SEQ ID NO: 6625 - DNA, 1281 bp, Artificial sequence
  DNA replication origin
tatgtgttctggtaccattctagcactggggatgcaataaaaatcaaataagacgtggttcttcatggagatgctacttcagtggggggaagactgactgtggagatgtcactttccaaagatgtatgcatgttctagaattttgcctcttccctaccaaaaggtgatgtccaatacccccttcctttcaatctgggcagacttgtgactcacttgtaaccaacggcatgttggttacagatgtgatttttcatgacttctgagactagatcataagaggtgatatagcttctgccttgttagatgggacatgtctttggagctacaacttaggaagttcgacaacccagagattgccatgttgtgaggaagcccaggccacatggaaaggccacacatgtgtgttctggttgacatccctgctgatgtcccaaacattgtggcacagaaacaagccatgcccactgtgctctgtccaaattcctgtttggggtggtttgctatgcagaaatactatctagaacactaagaaacaagtgaataagtgagcaagataatttcatattgtgagagggaaatatgggaaaacataaaacagcatgaaaataagggcctctttagatgggggaaggggggaggactgatcaggaaaggcctttctggagagacattggaactgagacctgagtgagaaggagctcaaccgctaaccctctgggagaagagactttcagccagagggttcatcaagtacaaaggtctggaggcagaaatcagcttggtatgttctgagaagagcaagaaagacagtgtgactagggtgatgtgggtgaggaggagagtggggccaacgaaggtggagaagaaggcagagaggcaagtcattctggtcctacaggtcactgagaggagtttggatttaagactgagtgagctggggagccggtggagggtattatgcaggagtgactggatctggtcaattcttagtaagagttctggctgcctggtggaggacagagcgtaaggacacacagggcaaagggaggaggaccattggggaggctatggcagtgcctaatcccccagggaagggaggatggacggtggcctgagacatggtgatggcggtgaagatggggactggtggacaaattccggacacagaggcaatgacagagagcaccagggagggaggaggcgcccagtcctgcaggtcccgggcaggatctagacgtgggtgaggacaggaaccctgtatccgtctggaatccgaaggga

SEQ ID NO: 6626 - DNA, 958 bp, Artificial sequence
  DNA replication origin
atggatgggcagaggtggagcgtggtcttggagcgcatggagccaagttgtgaaaactgaatggcaggcatggaagtttgggtcccatcctgaaggattttaatcaggggcaagttggagtatagagtcggttagagtcagtccacaggggagaagatagggcagggaatctgtcccagcagtccaggttccatgtgatgaggatctgatggtggcagatgagggagaggagggactgtctgagggctgcccaggagtcagagtcgacagaacctaaacgagctaaaatatgctaaagttcttggtgtactgtttgatgcaacttctgaaaaccatctagtgaccctgggggtgaggaagggaaaactctgggctgctacccggctgtctggataagtgagtgggggatgcataagtgggggcagtgggagtgggagaaggggcagggtggttggtggtgtgtggagaccacaggctgactttggacaagataagcattaaatgtcgggctgtcccagtcagagctggctttctggggaccaggcaatcagatgtggagctcaagagagaagactgggctggcaagtgtttgtgtgcagatggggattgaggctgtgaggggagcagcactcgcaggggtctgtgaagagaagcgggcttagggtcagatatgggagaaggacttcaaagaagcagcagccagagagggagggagaaaacctggagaagagttggtcatggaggatgctaagggaagagcatatttgaggggggagagagcaccaatgtctggggctacacagagttgtggtaagataagcaggcaggatgggctgctggttcagcaaggatgcccctgagcactttggcagagcagtgacagtgagaaggcacagccaggtggcggggctgaggagggccgggtgaggctgtagagataccaggagggaggcttctg

SEQ ID NO: 6627 - DNA, 1081 bp, Artificial sequence
  DNA replication origin
tacacagacacagcaaccatccgatttctcaatcttttccccacctttcccccttttctattccacaaaaccgccattgtcatcatggcccgttctcaatgagctgttgggtacacctcccagacggggtggtggccgggcagaggggctcctcacttcccagtaggggcggccgggcagaggcgcccctcacctcccggacggggcggctggccgggcggggggctgacccccccacctccctcccggacggggcggctggcctggcgggggctgacccccacctcccttccggacggggtggctgccgggcggagacgctcctcacttcccagactgggtggcagccgggcgggaggggctcctcacttctcagatggggcagttgccaggtggagggtctcctcacttctcagacggggcggccgggcagagacgctcctcacctcccagacggggtcgcggccgggccgaggcgctcctcacatcccagaaggggcggcggtaagaggcgctccccacatctcagacgatgggcggccgggcagagacgctcctcacttcctagatgggatggtggccgggaagaggcgctcctcacttcctaggtgggatggcggccgggcagagacgctcctcactttccagactgggcagccaggcagaggggctcctcacatcccagacgatgcgcggccaggcagagacgctcctcacttcccagacggggtagcggccgggcagaggctgcaatctcggcactttggggggccaaggcaggcggctgggaggtggaggttgtagccgagatcacgccactgcactccagcctgggcaccattgagcactgagttaaggagactccgtctgcaatcccggcacctcgggaggccgaggctggcggatcactcgcggttaggagctggagaccagcccggccaacacagcgaaaccccgtctccaccaaaaaaatacgaaaacccgtcaggcgtggcggcgcgcgcctgcaatcgcaggcactcggcaggctgaggcaggagaatcaggcagggaggttgcagtgagccgagatggcagcagc

SEQ ID NO: 6628 - DNA, 913 bp, Artificial sequence
  DNA replication origin
ctaggaagtgaggagcgtctctgcccggccgcccatcgtctgagatgtggggagcgcctcttaccgccgccccttctgggatgtgaggagcgcctcggcccggccgcgaccccgtctgggaggtgaggagcgtctctgcccggccgccccgtctgagaagtgaggagaccctccacctggcaactgccccatctgagaagtgaggagcccctcccgcccggctgccacccagtctgggaagtgaggagcgtctccgcccggcagccaccccgtccggaagggaggtgggggtcagcccccgccaggccagccgccccgtccgggagggaggtgggggggtcagccccccgcccggccagccgccccgtccgggaggtgaggggcgcctctgcccggccgcccctactgggaagtgaggagcccctctgcccggccaccaccccgtctgggaggtgtacccaacagctcattgagaacgggccatgatgacaatggcggttttgtggaatagaaaagggggaaaggtggggaaaagattgagaaatcggatggttgctgtgtctgtgtagaaagaagtagacatgggagacttttcattttgttctgtactaagaaaaattcttctgccttgggatcctgttgatctatgaccttacccccaaccctgtgctctctgaaacatgtgctgtgtccactcagggttaaatggattaagggcggtgcaagatgagctttgttaaacagatgcttgaaggcagcatgctcgttaagggtcatcaccactccctaatctcaagtacccagggacacacacactctgcctaggaaaaccagagacctttgttcacttgtttatctgctgaccttccctccactattgtcctatgaccctgccaaatccccctctgcgaga

SEQ ID NO: 6629 - DNA, 756 bp, Artificial sequence
  DNA replication origin
gaggtagagatgtgtgctcatgaacacggaggggattactgatgtggggtggatgagactgtcgtcaagagtgtgggacaggaagagagggagagtcttggccagatccaagaaaggagccctcagaagaggaggggagtcagaggcaaggaaggggctgaggcagccagcccagctgagtggaccccaggagaggtatcaaggggtggtgtggggtggggaggggccagtgtcagaaagtggatggggagcggcctgactctgcttttgtcctgtggccttctggccaaaggcagggaaaggtggccaaacactgagaccaagaacaaagaaagaaaactgctggtggacttcttccaccatgagcaggccaccaagcccgcagcactgcactgcagcccccagctctgtcctggggttgggggaggtgaggaggggcaaggtggggagcacacagagcacccgctgtcctcggaacaccacagcgactagaggtaagggagcaccggatgtggctgggatgtgggcagcaaggggccagaggggccttgaaggggtcacagaccatttaatgaaggtgtattgaaggccaccatgggccaggccctagttagggatggatcagaattatatagcatatgccaggggtcaggcaggtaatgaagtgatcggaaggtgatgaggcagtggcagttgagattcacgttgcagtcgccccaagctggccaggccagggagcagaagcatggctggatg

SEQ ID NO: 6630 - DNA, 1341 bp, Artificial sequence
  DNA replication origin
tggcaattaaggtgaatcacattctcactctccttttctgcatctctaccccacattcccacaaagctttattcacaccaagtctccagtccttgcctgcattgtgtgatgggtgcctgcagtgatgggtggggacacccatcactgtccagggtgtccccaccatcctcacagcctctctgtctggcctcctgcctttgagccagcccaccacactctcatttctctgcccagcagaaaccaaactgtcctctgcatttactgtctcaactggaagagaaatgcagaatgacaaagaacttgtgaacaagggtcagctccaacagagagtgaagccaaaggggctgggcagaaagagagatgaagacggggatctaaggaataaggctgtaccagagtgagagtacgggggaggggttgaacaagagttcagggaggagagaattcccagcgctgagccagagactcctttacagaggcccaaggaggcgtggagggagggggaaggctgccaaggctctttctgtctccatgagtgtgtcaagaatgcaaagcactaatgctcttcacttggtccatcttgcagggttgagtttgcagtgagcaaccttgaaggatgagctgacatctcgctcagggccaaataaccgacttgcttactgcttgctataaaatggcacgttacccaaggtcagagttcccttcctataacctccccatccctcacacattcacaggtatctatccaagccatggcatcactctgtggggcttgggggcaaggcaactgacactggacgctggttctcatgcttgccaagcatgaagccctgtgctgctagcagctgtggaacatagccgttagctttaaaagagggtaaaatcacgtcctggacaggacagccaggtgagttgggaagggaagagagcctgccacgggcacaggcatgttgggggaagtggaagtggtgagagcacagtaggaagtgagaaggggcgggccgtgcttaccaggccgtggacttaaaccaggatgagagaacccctggaggcgtttaagttggcagacttggatttcaggaagagctctctggcttctgggtggagaatggccagtggggtaagtggtgagaggaaagacagagaacggagaaggttagatgggcttgggaaattatccaggccctggatggaggtagagatgtgtgctcatgaacacggaggggattactgatgtggggtggatgagactgtcgtcaagagtgtgggacaggaagagagggagagtcttggccagatccaagaaaggagccctcagaagaggaggggagtcagaggcaa

SEQ ID NO: 6631 - DNA, 903 bp, Artificial sequence
  DNA replication origin
gtctctctccaccctctcctccagctccaaggctcccaaagttatggctctgcccagtctcctctccaagatttcacacctttgttgcccccggcctcctacagcctccccaccctcttgtcagctcccactcaagcttcccacctcccttaaacacggctgtctctagggagccctcccaggccagccccaccagacgagggtgttaggttttgaagggaaggtgagagttaaagaaacacagagatatacatgtacacatatgtaacaaacatccacgttgtgcacatgtaccctagaacttaaagtattaaaaaagaaaagaaaagaaaagaaaagaaaagaaacacagagggagagagagtggaggcactacagcaaacacaggcatattgcaaaaacctacggaggtaggggaccagcttaatgccagagcccacgcggcttacaggctggggtacttataggtatgggtgggaggggtgtgtgcagtatggccctttttgcggcagaatgtgatagtgatgttctttggatctttgcgcagcagggtgtatagggatgttcctttagctgggcctttgccgggtagggtatgataagaatgttcctgtgccttgtggtcaggttaggcgggatgtttctcgtggccagaaccccgtggaatgtttccctttgaccagggtctgtgaaatggcaggaggcttacaaaatagtgcagtttgcactaacacaggggagtaggttgagacccaaatgcaagcgaatggccaccttggggaggtcggtgagggcggttggagagaggctgggggttcttgaggaggaggctgggagtagtgaggggatggctgggagccgttgggagttgactggggactgctgggggctggccgggtacaa

SEQ ID NO: 6632 - DNA, 1169 bp, Artificial sequence
  DNA replication origin
agacggccttttgaccttttagggtctagggctgtaaagtgtctcagggttgctgccaaacgagtcgtgaactgggctggatttttatatttgatgaaaaagagcctaaacgctatctgatttgggataaagaaaaaggagcattaaccttgactatgcctttagttccagccacctttttaagaataaattgctgggcaggtcggggagggctagtcatggaacgaaactgtaagccagaccaggtgtgaggaggggaggtgataaaaggattatagggtggaggagcggaggctgaggaagaattgggacctagctcagcctggtgaggagcagcctggggaggagaggagaggtcagaagggtctgtagaaaaggaagattagaaagactcagtgacacctggggttgggactggggggacagatgggagggaaagaaggaagatttgggacgagttgcactgggcacagagactagggagggaccgatgtgtagaagaatgcctggacgtcaggcatctcagaccgtttgtccattttatgacaagaattatttagatcttgcaggatgaaaaaattgaaagtgctgttttctggctatttggaactactgttgagtttgtattggggtcaagcagcattgcagaagaaaataagacacttagattttaggtcaggtgagagttgaagaggttttaagttcttaagaacagaggctaagggagaagaaggaggaatggagggtggaaggttgcccatagtgaaggaggcaagtttaaagaaaagggagagtagagacaaggagggaagcggtttgggggttcttaccctccagaaaagtgggaaaggggtcggggtgcagagatacgaggttggggcatggaaataagggatcagggcacagagatataagaggttggggtgcggaaataagggatcggggcacagagatatgaggtcggggcatggaaataagggattggggtgcagagataagaggttggtgcgtggaaataagggattggggtgcagagatataagaggttggggcacagaaataagggattgggatgcagagatacgaggttggggtacttgcccctcctctagaaaagcgggacttgctgctaagagtgagggagaaggggttgggggtttcttgccccc

SEQ ID NO: 6633 - DNA, 1117 bp, Artificial sequence
  DNA replication origin
ggctgccggcggcgaagaaggggcgcgggtcggtctgcgcgctaaagctgggctgcagcaccgcgggggctcggctgccagaaccgcagccgcagcgggaacccgggaaccgacaggaggcgggagcgcagcggcgtcggcagcagcggctgcgagggaggcgcccgcgccgcaggcagccagggccagcctggccgcagccaccgccgacacctgctggcccggccgagagccaatcagaggcgcccggagcgggggagcctgcggaggcggggcgggggcgcgtgcagggcgcccggcgggaggggcggcccgcgatcgcgcctgcgccggggcagggggtgcccgccgggccggttcctccagagcacctcgggcgcgcgggcggcacgcgccgggaggggcggggcgcaccgggaggaggcggggcagggctgcgcgcgcccggggcggggacccgcgcccctcccggggctcttccctgcggcgcagtgcagtattggggccgcggttcgggagcccccatgtgcgactccaggtccttccccgattctaagtcaggcttttcctgtctcctgcctctgagtcctgggggcccggaccctcagtgaccgtagagtaatgggtcaccagaatccggggcctgcctgaatctaagacatggtgtggcgctcctccacagacagctcttccccacttcacagtccctgggtaattaaagtctccgtagtgacccctatctggattgctttaattctcccataaatttactactacgctaacgacgctcattcattcaacacacatcaaaggggttaccgatcagggagctgtccaggctaatgcgcccccaagtctcccaaacacagctgcggaaccgccgggttagtgagcccgcgctgtcagaaagactcccaaagactgctgcaagtgaggaacgctttcgggctcgtgccaggagttcccggtcctggaagaatgactgggagttgaaaggttccactccaggccgggacttcattgtgcgtttgcatccattaagccagggatcttcctgagacccactgcctcagccccaacaactcggctgtgaaaacactttgtcaattttagctgc

SEQ ID NO: 6634 - DNA, 1363 bp, Artificial sequence
  DNA replication origin
gcgcgttgcggcaggtgccctgggcgtactgaggcgcggtggcctgagcccggccgccatcgatgaccccggtcgcggacttgcttcaggctggccaccccccgtgagtaccgtccgcctccctcttctcccctctggcagctttgcgccactctcccctcaacgttgccgcaacttcgggggtgggtgtgtgaaggtgtggaggtgtctctcacgctcccccgcaccctgtgcgcgtccggagccaggaaccctaggcgcggccagtcagcctctgcggaggggcgaggggcgcgggtacttgaacttgctcagggatcatcgcggagccagaatcgcctctttctctcgctgctggggtgggagctcgcctctgcgtttccctcgcgttttccgatcccggatggccacgtagtgcttgggctgcggttcaccgcgtacctactgtgctgcgggcgcaccggcgggacgcctcaaaccatccgttaagcgccccgcaagcagcccagcgcgacggacctgactcaaactcttaattctgtaaaacgggggtaatcagggactctctcaaggtcacagctggtgctcagagttagaacacaggtggattgcgtctggccctcgcccgcgggctgcctggggaggggagagctgttggcggggcggtcacttcagcttcatcccgggttcctcctcatactccctttccgccacagccgccagacttgaagaggtagggagccaatcccagggggctctacatagatttggaggtaacggcggaggatcttcctgatggacgcgtggagcggaaagattcagtggtgggaaccccaagacctgcggctttttggagcacttgctccccttcttgttccttaatttactgacgtcttggcagggtaggggaatttgttcttatatccgtcctgctcctcttttcttttgccaaataagcaccgtccccaaggataagtacgtatcccaaaactcttaaatgcacacactggtttgggcctagggacttcctaagagaagcgagtacgctgtgggcttggttcgctaacgttggctcctatccgctcctagaaaatgccttgagtctggcttcatttccatgctctccatctccccgaccatgatctcgatttgttgattttcttgacacttactcaggggaggaagactgagactgggggctggccagtcttggggtatgcaaatgatgtcgggtgtgattcttttactccaggtcctttgaggtggctccagtggggccgcctgtggtgttgtgggcgcttctcagagctctgggctggggagagcgtcacctagcctctcttgccattatcaccttgtccct

SEQ ID NO: 6635 - DNA, 996 bp, Artificial sequence
  DNA replication origin
aattacaacaccagagattatggcctttttcttcataattttctgtatttcagaactctaatgctattttttaagttagaaaaaggaaacatagttaaccctttttcattgcatatgacagcttaccatgtactattgtgtccagaattggtgggttcttggtctcactgacttcaagaatgaagccgtggacccttgcggtgagtgttacagctcttaaggtggcgcgtctggagtttgttccttctgatgttcgggtgtgttcggagtttctttccttctggcgggttcgtggtctcgctggcttcaggagtgaagctgcagaccttcgcggtgagtgttacagctcataaaacagcgtggacccaaagagtgagcagtagcaagatttattgcaaagagcgaaagaacaaagcttccacagtgtggaaggggacctgagccagttgccactgctggctcgggcagcctgcttttattctcttatctggccccacccacatcctgctgattggtagagcctagtggtctgttttgacagggcactggttggtgcatttacgatccctgagctagacacaaaggttctccacatccccaccagattagctagatactgtgtgtggacacaaaggttctccaaggccccaccagattagctagatactgtgtgtggacacaaaggttctccaaggccccaccagagtagctagatacagagtgtcaattggtgcattcacaaaccctgagctagacacagggtgctgtttggtgtgtttacaaaccttgagctagatacagagtgccaactggtgtatttacaatccttgagctagacataaaggttctccaaggccccaccacagtagctagatacagagtgtggattggtgcattcacaaaccctgagctagacaaagggtgttgattggtgtatttacaatccctgagctagacataaaggttctccacgtctccaccagactcaggagccca

SEQ ID NO: 6636 - DNA, 946 bp, Artificial sequence
  DNA replication origin
tttggtcattttgctgtggttgcggggagtcaaactcatgaactcaaaattacctgtacacacaggttcctgcattgatttatgaggctccctttgccatatgctaaatttgactttatcctcacagcacctcccttattacacaatgaggattcaggatgtgtgagatgcacttcaaatgagaagagagacatgagaaaatactgccctacaggtccagagagccgggtttcatccccaccgctgtcacagtgactgtgtgaccatgcccaggtcaccccttttttgactacagccctctcacctgaggcactctgtgagagcgtgagactgctctttgaggatggaacaccggtttaggatttgactgccatctcgggtatatctagaggtagaatggcccgagaaaacctatgaaggccaacctttgaagggacagcagtcacagacatggtcagaaggctcagggttgggggtgtgggtgctggagtctgggggaggggggatggtggagtgttatggtatggagtgtgagggggaagtgtgcatgagagtgagagagattgggtatatcatgtatgtgtatgtgagagaaatggggatgtgtgtgtgtgagaaaaaaggatggggagagggaaggtgctgaggtggtaggagaaggagaaggagggaaggacaagtgggagagggcagagggagaaaagaggaggatagaagagggtctgtggagtatgtaggaaagatgtgtgtgacagcatactgtgagggaaagagggaaagggaaagagggaggaagggcagaatcgagggaggcagagagatggcagtgttagtgagtgtgcagatgtgtgtgactgcatgtctgcctgtggtgtctctgcattgggggtggctgtgtagaggctggagtagtatacacagcccctgcccacgcatttctcagaaa

SEQ ID NO: 6637 - DNA, 1632 bp, Artificial sequence
  DNA replication origin
ccgagccgccaccgcaggtcgaggacggtcggactcccgcggcgggaggagcctgttcccctgaggtgcttgggcgctcctttccttatccttccggggctgctcccgcttcctctcggagccaaacttcgtagcaggcgcgcggtccgggcggcgggctgggcgcagccgggaggcctggggttgggagcggggagctcaggtgggggacggtgagggtgggccgcgcccggggcgcggagggcggcggccgggcccgggttccggtcgcgctgcctctctggggccctgggggcatcgcttgcggggagggggcgccgcgggggcgcgtacaggagcccggatggcaggcggggtgggggtgggggtgggggtctgtggtttccgtccggggctctggccttggccgagtttgggggagggacccggtgcctcgggatgcgccgggccctgggtggggggcggggtggggacggggggctccgccttctcagctcttgcggcgagttggggttcgggcgctgaggcagagacgccaccctaagtcccatcagtcctggggatcggaccagtggactttctcttaagatttcctctttcattcttaagaatagaagtgttattattttttttaatgccctggctatgtgagtttgaatcgaagcaactttaaaccttagagcaactaaactctaagtgcagcgggtgcgatgcgtcagtagggtgagcacataaaaaatccatgtcttgcacctgtattttagcgtactatgcaggtgagtgaaagcagtggataatgtactgggagtcttatggatttatggtagtgggtatgagaccctggtgaaataagggggtggaggaaggcgaaggtgatggcttactgtttcttaccaagtgaactgcaggattcagcctctgactcagaccgcttcgagaattttgttcgtagaaataatttaaatttattcaaatagtttgatggcagctaaaattgaattatagagcacgttttcttttcagcggagtgaatttttccttcgctccaaagctggccaaatggaattcaagcattgcaacttctttcagtgttttgtctggagagaggactttgaaccgagacttttcgaagttaagttcctatagcctgcttctgaatctgccaagcttgaaagctttggcagttgggtgtatgtagttgttgccttcgttctcttcccttttggagggagcgttgtctcctactttgtatcttccagacatctgtggtcttccccccacccctcgagtttgtgagtggtgaatgaagaaagactaggctgctggtatgcagaggtcggcaaaaggaaatcgaggagtggttttagtgaaatgagagctttgtatcatgaataatggtggcttaggctagacatcaacttgaagagacggcagcatttcctttcataaagtctaggctaatgtttttcagatcgctaagttgtagtttgtctggaatttaggaagccatttcagtatttgtcacttggtgaacgaacattcaataccttcagatgtcttcgtgttgacttgtattcatcctaagaaatagtaaatatagtctcaagtgttatttatgttatactgctggtt

SEQ ID NO: 6638 - DNA, 1328 bp, Artificial sequence
  DNA replication origin
cccctcacctcccggacggggtggctggccgggcagggggctgacccccccacctccctcccggatggggcggctggccgggcggggggctgacccccccacctccctcccagatggggccactggccgggcagaggggctcctcacttcccagtaggggcggccgggcagaggcgcccctcacctcccggacggggcagctggctgggcggggggctgacccccccacctccctcccggatggggcggctggcggggcagaggggctcctcacttcccagtaggggcggccgggcagaggcgcccctcacctcccggacggggcggctggccgggcggggggctgacgcccccacctccctcccgggcggggtggggggctgacccccccacctccctcccggatggggcggctggcctggcggggggctgaccccccccccccacctccctcccggacggggtggcggccgggcggagacgctcctcacttcccagactgggtggctgctgggcggagaggctcctcacttctcagacggggcgactgccaggcggaggggctccttacttctcagacggggcggttgccgggcagagggtctcctcacttctcagacggggcggccgggcagagatgctcctcacctcccagacggggtcgcagccgggcagaggtgctcctcacatcccagacggggcgggggggcagaggcgctccccacatctcagactatgggcggccgggcagagacgctcctcacttcctagatgtgatggcggccgggaagaggtgctcctcacttcctaggtgggacggcggccgggcagagacgctcctcactttccagactgggcagccaggcagaggggctcctcacatcccagacgatgggcggccaggcagagacgctcctcacttcccagacggggtggcagccgggcagaggctgcagtctcggcactttgggaggccaaggcaggcggctgggaggtggacgttgtagcgagccgagatcacgccactgcactccagcctgggcaacattgagcactgagtgaacgagactccgtctgcaatcccggcacctcgggaggccgaggctggcggatcacttgcggttaggggctggagaccggcctggccaacacagcgaaaccccgtctccaccaaaaccagtcaggcgtggcggctcgagcctgcaatcgcaggcactcagcatgctcagtcaggagaatcaggcagggaggttgcagtgagccgagatggcagcagtacagtccagcttcggctcagcatgagagggagactgtggaaagagagggag

SEQ ID NO: 6639 - DNA, 883 bp, Artificial sequence
  DNA replication origin
ccaggccagccgccccatccgggagggaggtgggggggtcagccccccaccccgcccgggagggaggtgggggcgtcagccccccgcccggccagccgccccgtccgggaggtgaggggcgcctctgcccggccgcccctactgggaagtgaggagcccctctgccccgccagccgccccatccgggagggaggtgggggggtcagccccccgcccagccagctgccccgtccgggaggtgaggggcgcctctgcccggccgcccctactgggaagtgaggagcccctctgcccggccagtggccccatctgggagggaggtgggggggtcagccccccgcccggccagccgccccatccgggagggaggtgggggggtcagccccctgcccggccagccaccccgtccgggaggtgaggggcacctctgcccggccgcccctactgggaagtgaggagcccctctgcccggccaccaccccgtctgggaggtgtgcccaacagctcattgagaacgggccatgatgacaatggcggttttgtggaatagaaaagggggaaaggtggggaaaagattgagaaatcggatggttgccgtgtctgtgtagaaagaagtaaacatgggagacttttcattttgttctgtactaagaaaacttcttctgccgtgggatcctgttgatctgtgaccttacccccaaccctgtgctctctgaaacatgtgctgtgtccactcagggttaaatggattaagggcagtgcaagatgtgctttgttaaacagatgcttgaaggcagcatgctcgttaagagtcatcaccactccctaatctcaagtacccagggacacaaacactgcggaaggccgcagggtcctctgccta

SEQ ID NO: 6640 - DNA, 1181 bp, Artificial sequence
  DNA replication origin
tgtccttatgttgatatcgatgcatcttgtgtaacaggcacttcttcctatttttcagattgggtttcttaggggaagacttttttcctgtagatgtatctgtagtgttggttgagtagggcacttcagctttgattcagggttcatgcagcagtgtagtatctttatgatttctttggctgcagtcagcatcagtggtatctgtgatttcctctgtggcttaggatatggttgttaatggaggcaatggtgatattttgctgggggatggagatgccacccaggctgttcctcaggccagactggtggtggtggcggcggcagtgacctgagggtgcctgtctttgggtccctggatggtataggtgggcaccagtattagtgactgtaggtgggttaatttatggccctaaagatggcttgctcaggtcctggaggtggcagtagtgggcagggagggtgggtgggtcattttgcctctgggtagtgtacatggcatctgcaatggcattgtggtggcgagccaactgttgggctcccatgtggcgtatgctgatgctagcagtggtaatgatgttctgcgcatgccagtctccatgcccccatgtggcatgtgtgggtggatagggcaggataatcaccaggtcctgacacagtgtgcttgggtgctggtggcaggtaggctatgtcttttgtcagggtttctgatggtgtatgtgcttgctcagggtgataggtggagtgggccagtcaccaggcccccaagcagaatgtacgggcactggggattggggtaggctgggtcctgtgtcaggcctcctgatgtgtatgtgtgtctggggcaacagacatattgaaatgacccccaggcccttgggagatgtgtgtggacacctagagaggtgacaccaggtgaagcagggccttcctcagactttctaatggtgcacatgggcacaggctatggtgggtggagcaaggcattccccaggttcctgtatggtgtgctcaggtggcagcagcagcgggcaagatgagcccatcctcaagtcctgggttggtatcctaaagggctggtccctaggcccactgaacacacttgcaagtatgcaatagccctgttactgtgggggtaggggtgagtacagggttgctgttggtggcagcatccccaggcagca

SEQ ID NO: 6641 - DNA, 1157 bp, Artificial sequence
  DNA replication origin
ccaagatcgcgccactgcactccagcctgggcgacagagcaagactctgtctcaaaataaacagaaagaaaagaagggaaggaagggacaggagggacgggagggaaggaagggacaggagggacgggagggacgggagggacgggagggacaggagggacaggagggacgggatgggggaaggaagggatgggaggggggaaggaagggacggaaggggggaaggaagggatgcggggaagaaagggacagaagggggaaggaagggacgggagggggaaagaagggacgggagggggaaagaagggacgggagcggggaaagaagggacgggagggggaaagaagggacgggagggggaaagaagggacgggagggggaaagaagggacgggagggggaaagaagggacgggagggggaaagaagggacgggaggggggaaggaagggacgggagggggaaagaagggacgggaggggggaaggaagggacgggagcggggaaggaagggacgggagcggggaaggaagggacgggagggggaaggaagggacaggagggggaaagaagggatgggagcggggaaagaagggacgggagggggaaggaagggacgggagcggggaaggaagggacgggagcggggaaggaagggacgggagcggggaaggaagggacgggagcggggaaggaagggacgggacaagacgggactggagggagggagggagggagggaggcaggcaggcaggcaggaaggagcaaattagtaaaaagagattcctagagacaatctagtaaaatttacaggcctgaaatgaaaagaaaagctaactcaaacaagtcacacagaagagggaaaaaaaaaaaaaaggtaaggtttacccacaagtcctacagaactacagttagtacaaggaagagagctcaaactccaaagcatggcacagaggtaagccactgagaggccttcttgaaaacaaacaaaaaatactaacagccaggcgcggtggctcatgcctataatcccagcactttgggaggccagagcaggtggatcacctgagatcaggagttggagaccatctggccaacacggtaaaacctcatctctacaaaaatacaaaaattagccgggcatgatggcaggtgccta

SEQ ID NO: 6642 - DNA, 891 bp, Artificial sequence
  DNA replication origin
ctgcccggctgcccagtctgggaagtgaggagcgcctcttcccggccgccatcccgtctaggaagtgaggagtgtctctgtccggccgcccatcgtctgagatgtggggagcgcctctgccccgccgccccgtctgggatgtgaggagcgcctctgcccggccgcgaccccgtctgggaggtgaggagcgtctctgcctggccaccccatctgagaagtgaggagcccctccgccccgccacgaccccgtctgacaagtgagaagcccctcctcccagcagccgccctgtctgagaagtgaggagcccctccgcccggcagccgccccatctgggaagtgaggagcgtctccgcccggcagccaccccgtccgggaacgggggtcagcccccgcccggccagccaccccatccgggaggtggggggcgcctctgcccggccgccaccccgtctgggaggtgtacccaacagctcattgagaatgggccatgatgacgatggcggttgtgtcgaatagaaaagggggaaatgtggggaaaagatagagaaatcagattgttgctgtgtctgtgtagaaagaagtagacataggagactccattttgatctggactaagaaaaattcttctaccttgggatgctgttgatctatgaccttatccccaacccggtgctctctgaaacatgtgctgtgtccactcagggttaaatggattaagggcggtgcaagatgtgctttgttaaacagatgcttgaaggcagcatgctcgttaagagtcatcaccactccctaatctcaagtacccagggacacaaacactgcagaaggccccagggtcctttgcctaggaaaaccagagacctttgttcacttgtttatctgctgacctt

SEQ ID NO: 6643 - DNA, 1257 bp, Artificial sequence
  DNA replication origin
ggagtggtgatgactcttaacgagcatgctgccttcaagcatctgtttaacaaagcacatcttgcaccgcccttaatccatttaaccctgagtggacacagcacatgtttcagagagcaccgggttggggataaggtcatagatcaacagcatcccaaggtagaagaatttttcttagtccagatcaaaatggagtctcctatgtctacttctttctacacagacacagcaacaatctgatttctctatcttttccccacatttcccccttttctattcgacacaaccgccatcgtcatcatggcccattctcaatgagctgttgggtacacctcccagacggggtggcggccgggcagaggcgccccccacctcccggatggggtggctggccgggcgggggctgacccccgttcccggacggggtggctgccgggcggagacgctcctcacttcccagatggggcggctgccgggcggaggggctcctcacttctcagacagggcggctgctgggaggaggggcttctcacttgtcagacggggtcgtggcggggcggaggggctcctcacttctcagatggggtggccaggcagagacgctcctcacctcccagacggggtcgcggccgggcagaggcgctcctcacatcccagacggggcggcggggcagaggcgctccccacatctcagacgatgggcggccggacagagacactcctcacttcctagacgggatggcggccgggaagaggcgctcctcacttcccagactgggcagccgggcagaggagctcctcacatcccagacgatgggcggccaggcagagacgctcctcacttcccagacggggtggcggccgggcagaggctgcaatctcggcactttggaaggccaaggcaggcggctgggaggtggaggttgtagctagccgagatcacgccactgcactccagcctgggcaacattgagcactgagtgaacgagactccgtctgcaatcccggcacctcgggaggccgaggctggcagatcactcccggttaggagctggagactaggccggccaccacggagaaacagatgctggcactatgcttcctgtacagcctgtagaactgtgagccaattaaacctctttcttatatattatgcagcctcagatatttatttttagtaatgcaagaacggcctaacacagtgagtaacagtccaaatataagaagattcagccaggcacagtggctcacacctgt

SEQ ID NO: 6644 - DNA, 1405 bp, Artificial sequence
  DNA replication origin
cgggggctccgctctggcgccgccgcctcctgctgcccgcctgccgctctggcgctcctgggctcggagtccggggttccgagacgcgggggtcgtcggggcgttcgagactctcggggacgctaaggctgcgctccggctctcccgcgcgcggccccactctgggggacgcctcgcttgaggcgcgcgggcgtcaagggctcggggcgcgcgggggcggcggccgggtgggccccggggcggcgggcgggggcgctgctgcggacgcgggcactgttgcgggcgccgccgcgcggcctctcgccatggctcccccgcgagcgggcggcttgcacctcccctccgcgctgccgtcaccgcccgacgcgcgccgagccctcccccttcccagccccgcccgccgccccgcgccgccacctgcgggccgccctccaggatgcccgccggccacgtcctagtcgcctggagccgcgccccgccttcctcgcccgcggctgcccctgcacttttacccacgccgtggggcacagagaagtatccggtaaagacctggatccggaaaagctgatcacatccctccccgagcgcttatttacttctagcacttctcggggtccttccagagtcagtctaagagaaggatgggacccccgcggcccggggcgctgattgtcgtgaacacagtggaagtccaggcgttctgttcctgcagggcgggctgtctcctagcaaagccgcccttaggcttaaatggagggaggatggagccggggacggggggaaggctggaggggatggaactggctgttggactaagatgccaccaaagggtgacaggcagggggctggcggacagcagagaggggatcaggaaccgatccaggaagtaagagctcacaggccactctattatgcaaatcacttgtggacggtttaacagggaacaacccacatgatctcatttccagttgaggctactgagtctacttcttttcaacccaggggtcatagaggacattgggaggacttgaagaagactcagaccagaaccaaaggtgtaaggaaactaaaccctgcaaaacctgatttctcatactggcatagacttgacttgaagagatcatcaagtgtatagtgaagattggctcaggcaagaatcatccatgaatgcttactctagggggctgttactggctggcagatatttgtctgggttgatgtgtctccccatagatggtttagacctgttagtagcaaaagcggaaatagtaactatacaaagaggcaggcagacagcatcttaaccaggtgatcaaaatttacatcaccaatgagagcagatggatatcatgtccacatcagctatgcagtattcctggggacaatgcataacctgaatcatgat

SEQ ID NO: 6645 - DNA, 1851 bp, Artificial sequence
  DNA replication origin
tccgcagcagcgcccccgcccgccgccccggggcccacccggccgccgcccccgcgcgccccgagcccttgacgcccgcgcgcctcaagcgaggcgtcccccagagtggggccgcgcgcgggagagccggagcgcagccttagcgtccccgagagtctcgaacgccccgacgacccccgcgtctcggaaccccggactccgagcccaggagcgccagagcggcaggcgggcagcaggaggcggcggcgccagagcggagcccccgcgagtgcccccgtgccgcccggccggctgcagcggagggaaccgaagccgccgggcggccggggccgggccgagaacgacgcggaggaagcccccaccgaggccccccggcaccgcgcctgctgccgggttgcgctccgtgcacctcttgcgggtaagccaggggtccgctcacccgcgccgcctgcgcctcgggcccaggggctggggaaggacacgggtgttctgggagtgtccgcgtgagatagtggcggcgtgagaggccgggcgccgggaccctgcggggacagccctcctaatgcaccggccgcacctgcaggaggccctcggagcccggaaaagtgcccctagggcatcgtgtcggccacgccgcgtggcctggattccgcgctccggcactccgaggtgacagtgaggcgaccttcaaagagcctggagctgagcgcgggcagcaccccgattcccactcacccgcaaaacttgatgaaaatgacatcatctgagcgtgtcagagagcagagagcctttagagccctcctttgcatccttgagagttaacaagtttactttgtcactttcttgacctgatttttaaagttcttttctagtctccaaggtcaagctcttgcaggtaaaaacaaatgtaatgaactgtatcgtttcttcttttgtaaagttgtgtttcaggaaagatgttaaaagtcggcctgctcttgaggctggtgctgggtgccccttccgctttaagcttgcctgttttagaacccgtggctgcacttgttcagacactgaaattagcgtccgctttgagagccttcagagtattcgtcgttggaccgctgatttttttttttttctgatatgcttcactggaactttatttgcttcaaaagtgtaaacgttgtcaatactgtctgtgagtgtgtattcgggactggtaaccttttctggagggtcttttgtttatctggaaggagagtggaggttaccatagggaaacggtctagttccagggtcctttccaatttccaactacaagagcagcgaagaggaaggtgctcagactaagctctgattagccctggagccagtctgcactggggagggtctccccagattgagtgaagggacaacaggctgggagcttgactggtaggtttggagagttggacctggagtgacagatggcgccttcccctctgtctctcggtttggaatggtcatactcggttgctctttgatcttggacctcagctttgtcacagaggttcccagcccagtgtagcctaagccagctggaaagctgagcccggctctgggggatgctgaatcggtttaaagcccttgtctcagggctgcgagtttggcaacagttgggtttcagcttggccccagcaccagccgtttcctgtttgatgccccagggaccagtttcccatccccagcgctcgcttgagggtgtctccactctggctgtgttgcttctccttctctgtggtcttggagtgggaaacctggactgaaattccaactcctctctattggctgtgtgaccttacttaacctctctgtcctgctctcccctct

SEQ ID NO: 6646 - DNA, 1126 bp, Artificial sequence
  DNA replication origin
tgtgcagtaagtcttttgaattattagctggagttaaatgggaaggaagaggtgaggatatcaataacgtgaagcaggaaggctgaagaccgtgagttctgtggagggaacctgacctgcgggagagagggagggagaaagagaacagagagctccagccagctcaccctttggggtgactggaagctgcctagaaggtggttttgccctaatttacaaatttactgcccttttgaggccttatctggtccaggctcacttcctactctgctaccttctatcatggtgttggaaaagaaggagcgcctagcagggtgggccttttgagcatgggagtccacagtgtaccccttggagcccagttgcagggagagcaagatggacaggtggtttcatccagaattgggttttgctgtatgggtgccgtgaaagtcccacgagagtgagggaggccgagccttaggcaccagcgttgctggagccaaagggctgggggattccagctggacaggaagtgggcggtagaggccatgcagaggaattgaggggctgggggtctccatggaatagcggggataactgagggagagctgtgggggaagggggttgcagtcagggagggggtatctaaattccagatttcagaggtggcccgggtgtggctggcagaagtggcatgtgataggagggccgtggaggtcccagacttgagagctggggagtcaggtggtgtcaggtgtaggggtggcagtggcagcctggatgagtggctgcactcggtggagaggacggccgccaacctctaccggggcggagttgctgatgggtggacgagtgggcataggcgggggtaacccagctggatggcctgagtctcaagcgagcaaggatttttaaaggcaaatgggaggaaatgagagggggaggtggcccaaggagccagaggatgctggcaccaactccagacctgagtgcggcagctcagagcaagaccctaatcttgaccttccaggaggtttaaaccctagtttgattttgacctagatgatggaacgtttgcgtggtacgaactgaaccttcttagtgggagagatggaaatggttggaaagacgatggtgagctaag

SEQ ID NO: 6647 - DNA, 2083 bp, Artificial sequence
  DNA replication origin
gagcccggaggggcgaaggcctataaatgtctcacgacggaagaccaaggtgtgggattggcaaagagagagcagagcttcctcactggcaggggctccccagccccgccccatacctgcgcggcggccccgcctccacccatccattggctagatccgccgcccgtcagacgagcccccggggcccgcccccagccctgagctgcgcctcttagctctggggccacagcgccagcgccactctgccaggctcccggccatcgcccgcctggtgcgccgcccgccagctctttgcccgcgcggggccgcccgccgcgggctcagggcagaccatgcgcccgccaagtccgctgcccgcccgctggctatgcgtgctggcaggcgccctcgcctgggcccttgggccggcggtgagtgttcgcccggccgcccagagtcccggcagcctgggggttgcggagggcgggggaggtgggggatggcgggagccgggccgtctgtgcgcgtgtctgtgtaagaggaataggggacatcaagcatctcgactcgcctcctcccaccgctccagaccgaacctagacgcgagggctgggatattggtcgtgcccagtccctcccagcgcagcccggagcaggcacagcatcagtggaggggcagcggggaagagtgggccccagacttgccttccttgtcgtggttgtgggtgcgcagcggggtggggcggccagtgggtgcagagtcaggtactgcggccgattgagatggaaggtttggtacaccgtaggtgagagggaggatgtgaggggccgttcttgtgtgctgtgaccgtctggaggtgcctgtgggctgtcagcatcagaaccagtgctgggggccccaggacttgagaaggggttcttgggatcaggtgagtgacaggcacatccctccgtgtgccctcccactgagcaaagcaaaaaggtaccagaccccaaggtggaagctggtgggcagtgaggggctaagggtggtggttaacaggaggggccaggcctgtacatggagagagctgagcagggagccaatgccaacaagcagtggcctccctcttcctcccacttctgcttcctctcaacgtgggtatgtgtatgcccttgatacatgtgtactcgtgtgccccatgtgtgggtgtgatatgtgttcctgtggatggcttacctgggctgggaggcagatgctgattgaggcaggagatgcatggatcatctcactctagaacaggggagacctcagcactcattgagtctactgaagcccattttacagatgggcaaagcgaggtccagagacacaagagccacatctgtctcccaccagttagacctagacaaaggttgattttctccctaccccagactttgagtaatctagagttgctgcttaggcagggccttaaatgcccactccaagttggctgggggagggtgaggaatcttgattatctagttcattctctcccatggtcacttcccttaccatcacctccaccagagcaggtatctctgtgtttccatctagcggatgtcttgagcaccctgggaatgggaagctcattgcctgtcctaggagcggacctctgacaattggcaggagcctcacctccacccatgacagccatgagacccacctcctgagcactcaaaatcttaccaagctctgtcccagaggccacagctctggcacaacttgcatgaagccttcaggcctctccaaccaccatctggccctcccaaccccaggttcaagccactcaaactcttcttggatgaaccggggatcttgggaccactgttgtcaccccattcctccatcccgagaagcttctgagcccaggggcagagtggattcagagaggtctcctttcacaccaggccacttctacttcacacttcctgagacagcccaaatctgtctcctccctccaatgcctaccctccccctgtctttccacatcttattcgtttagtgcccaactctatctcctcctccagacagccttccctgattgctccagccaactcaacccttccccctctaacccca

SEQ ID NO: 6648 - DNA, 1317 bp, Artificial sequence
  DNA replication origin
aagacagcggcagccctcaggatgaaggatatgaagaggtgcatgtggatgtagttccgcgtgcagtggagcttcctgtgtggggtgggcagatctgggaggccaaaggggccttggatccccaccccagccaatgctgtcctatgtgctgagcaagggtggggcaggggagcatgtgtcctccagagggcaggccccgcctcaaaggggatcccatcctgaaatacgagccccacccccaggtaccccatccacctgtgcaactgggctcccaagggcctcaacctcgtgtgtggccccagaagcctcattcctgtgtgcaggccccactctctggtgccctgtccccaggtgcagggccatcctaggggagactaggctgcaacacatggaagagctcagccacctgccttctccaggggaagctggcctggcaggagctggggagtatgtgctgctggggggcaacagtggaggggtcggggcacgcctgggccacgctgggctccactgtgggagggacacttgccaggtttgctttgaggcctgtgacttgggctgggcctcacctgaacaggctcaggatagctgtggcgaccagaagggtggcgagggacaggccgtagccaatggtgtagccggtcttcacagaaccgtagaacatggtctgctgctgttggagggacagggagaggctcttgggtggtggggtgggaggctcatctagggggtattggcaggggtggggtgccctacacactctgcctgcccaaccctgcctcagcaaatgaggaggctgaggtctggggctcccaagagcagctgagcccctgacccctaacgccctggtttctacagacagggcaggactgtgtcttagggtggggtgggggttgaatgtacttcctgtctttgcttctttacgagggacaagttggtgagggagagaatgaagaccttgcacgtcccttttgttaatttcatgtctccagccatgtgcccggcttcccttctgtgccagctctgagctgggcaccctaggggtggggtctgcttgcccttcagacacccctcgaggccctgtctctgtatagggaggagaggtatgcgaggttgcgggatgtcgaagaagacactggcactagtatgtcccattttgggcccttgggagttggggtcggtgggatgagggcagtctggcctttccggtggaggagggcaaagctaggccccgagggtgtctcgcttggtcccctctcctgatgccctccccatggacacaggtgcagtgcagcacgacagccactaggcaagcca

SEQ ID NO: 6649 - DNA, 1235 bp, Artificial sequence
  DNA replication origin
tggctcacaatgctcatgtctgacttggcctcacagctcctgggacagaacctctgagaagctctgggaatggccaaagtgggtcccctaggttttctctcccccttgttgaaatgcctgagattccagtatgatcatttcactctttggggagaaggtactgctgacccctgatataatgcactgcctctggggtcatgcatgaagcaatgagttactgaccacaaggaatgagtgggggctggggctgatctcaagctctctgtcaaagcttggggcactcagagagggtccctaagaatcccttggagatggcccccttagtgactggcaatgaattccttagatgatccctttacctctcttccctaggaaggcccagaaccagcctgctgtcaggatcagaacaaaagaggaggactgcatatgtatggacccactccagatggcacggggacggggggagtaggaaaagtggcatggtgagcagagccctggctatgcaggtggcagatggcagagttggaaggaatcttggaattccttgcacagatggggaaactgaggctgtaagttccccaaggccacataggaagttagcaacaggtgggacaggtgctctgggctgtggccatgaagtgtcccatttcccatctgcttttctcactggcggcggcaggtctgtgagcacccagatgggtgagcaacatctcctgttgccggaggggagtgtgatttgagtactgccaggtggggttgggtgggggttaggctatccttggattgaggggtggggtgggagggaagagggaggagggagagggagaagcagggggagaagaggagattacagtggttaaagataacggcgagactgagggaggtgggccagggccaggatcctcaccgagccctcggagcactggtccgactccccgctgtcgaagagggccaagtctttgatgaagacagcggcagccctcaggatgaaggatatgaagaggtgcatgtggatgtagttccgcgtgcagtggagcttcctgtgtggggtgggcagatctgggaggccaaaggggccttggatccccaccccagccaatgctgtcctatgtgctgagcaagggtggggcaggggagcatgtgtcctccagagggcaggccccgcctcaaaggggatcccatcctgaaatacgagccccacccccaggtaccccatccacctgtgcaactgggct

SEQ ID NO: 6650 - DNA, 1345 bp, Artificial sequence
  DNA replication origin
tggtctgtcctgtaagattgcaagggcctcctcccccacccccactctctgccagaatacgtagggcctcaggataaggctatcccagagctagggagaaaatgtctcaggggccaaacctggggcatctggaagcccctggcagctgctgcagacatcctgtacctgcatgggtgcacagacagctggcccagctcccagaggccccaggttaaggccaggccagagcagcttacatgcttctgaccagctagcccgctgagggctgccttctgcctcttcctccccagcccacttcctcatctgactcacagtggatcctagcaccggcccaggagttagttagggaggggctgtgtgcccattggttggataaggactctgaggctcagagcgggacaaatcacttaggcatcagcatcaggagccaggggaaggggaggtggggagaagggacccctccacgggctggaagaagcctggcagagagagctgcatgggacattgctaggcccactgccaagccaaagcttgacagagggtgtggccagcgtgactgaggtagtgatgctggccctatggggccttgctggggccttagctccagcagtcaagctgcagaaagggctggaggttgggtgagaagggaggggacaggtggtggggaggcactcagtctccctgaaggcctcggctgttcccctcttgcttctctggcctgcagctcatcagctggggagtcccagggcagagcctgagctctgtgagcagctgtgggcacctggcaacactggacctggcaggaaggagtggtttgaagagctgtctggtgggcccacagggctgctcagagctgaggcttgaacttgaacattaactagagcaatgagggagtgaaagggctttccagacagaaagcctgcaaaggccaggaggtggagacaatttagcatctgcagggaactagaggggatttggtgtagtggagtcaagattcctatcgatcaggagttgtctggttggtgggagtgaacaggtggagctaggcagaggcagaatttctctcttggtcctgatgaggggcatgcagtaggagcttcacttcagggaggtcaaggcaggctttctggagggagggactgagttattggggagttgactcctgggccagaaatgcatgccccaggggtgagtcaggagtctggagacgctcacccagcaagggcagagcttagtgatccttcacatatttgggattgggtcctgacaaggtcagcaaagctatgcccctgcctctagaagacagctcatgggttttctctcaatttccctaagtatctaccct

SEQ ID NO: 6651 - DNA, 1225 bp, Artificial sequence
  DNA replication origin
ggctgccctccacccccagccccagctccagcccccagcccgtccccactgctcatatccgagcagatagaccccggccccaccctcccgtgctgagcctcctttctgccgggaagttcgtccgggagtcaaacatcgctgccctccggttgcgccacggagggggagccaggataggaagctgccgtgaaatcaggaagctgagcgcgccgggccccggatccgaacagaaaaggcttccacccgctcccctgagggatcccacgctgagggactgaaccccgcaccccagccgcgctcaccacccccaccctctcgcctgggctgctctgacctgggggtgagtctggggtccccaactggtccagtcccccatccctatcccagggcggcgcagggctcattttgctctgtgcctccaggacttggctccagtggacccatacctacctggcggcctcatgctgcatagggccacccagggcaggagatttaaatcccaggactacaaccgcagcgatcaaatcatctaaggtgactggcccagggccaggagacagagggaccagaggagtagggaccagaggcccaggccccactgtgcccctctagccgtgtgacctgaccactgctgagtggcccccttgctcagcctctgctggggagatgcagccaggcttgcggaatgctgctctggcatggacacccgtgggggcagggggctggctctgttggcaggaggctgtaaaggaaggctgccaggctgagcaggcagcagggtggggaccacggggcactagacctggcaaggtctggatggtgactgggccaccattgtagaggagaggcctctgtggacatcccctcctcctaccccaagctcactactgcccatcctgggtcactctcatgttgcccccatcctgatattccacacccctccccacatatgtgcgcttgtgtttacatacaagtccatgtccagctgcagcagtatctcctgggtatgttgtcctactcacgagtgggcaggaactctggcgctggctcagggtgacttggttctaggtgccagaggagaaatggaggagagaccagggtattaggcaggtgctgtgaaacagcctgatggtctgtcctgtaagattgcaagggcctcctcccccacccccactctctgccagaatacgtagggcctcaggataaggctatcccagagctaggg

SEQ ID NO: 6652 - DNA, 791 bp, Artificial sequence
  DNA replication origin
gcggataagcggggggacaggcagggccctgcgtaccatggtgccgtggcgctgggggctcacagggccccgcgggatcgcgctgcccccggcggccaggccagggccgctccatgaagcgccgcgctgggggccgcccccgcgcagggccccgcgaccatggcccccgggggcgcggccaggcaggcggaggcgcagggccgcggcgagtccagcgccaagcagctgcggccccagagcctcgggcgcggcgggcggggggcgcggggcgccgattggagcccgcgcgtcagctggggccgccgtctggacgcttaaagggccaggccgcctgcgtgccggcggggggcgcggacacgcgtggtgtgcgcggtccccgtgcagcccgccctgccgcaggctgccctccacccccagccccagctccagcccccagcccgtccccactgctcatatccgagcagatagaccccggccccaccctcccgtgctgagcctcctttctgccgggaagttcgtccgggagtcaaacatcgctgccctccggttgcgccacggagggggagccaggataggaagctgccgtgaaatcaggaagctgagcgcgccgggccccggatccgaacagaaaaggcttccacccgctcccctgagggatcccacgctgagggactgaaccccgcaccccagccgcgctcaccacccccaccctctcgcctgggctgctctgacctgggggtgagtctggggtccccaactggtccagtcccccatccctatcccagggcggc

SEQ ID NO: 6653 - DNA, 2048 bp, Artificial sequence
  DNA replication origin
cgcctccgcctgcctggccgcgcccccgggggccatggtcgcggggccctgcgcgggggcggcccccagcgcggcgcttcatggagcggccctggcctggccgccgggggcagcgcgatcccgcggggccctgtgagcccccagcgccacggcaccatggtacgcagggccctgcctgtccccccgcttatccgcccacctgccagctctgacctcccaggcacacggcccgcgggcccgggtggaggggctggagggatcttcccccctcccccggtctcccggctccatctgctgggtcccgcgggccgggaatgcggcgctgtggcgctgctctcggtggggagggggttaaattcctgtggtgggggcgccggcgcgcgaggctgaggtcttgctaggcaccggcgaaggggggcgctcccctgcgcccggacggcgccgccctcgggctgggtaatggggggaagagggagtcggattcccgcctgggccttgggccacgtgggcgctggagccgccctgcctggggattcgggatgacccgggccaagggggtgtgggaggacacccagagctcccgtaccaactcctgtgtgaccttgggcagatcccccgccctctctgggtctatttccaagggaaagaggggaggtaagtgcacagaggaggctggcatggacactccctcaccaaaaggaggagcctagaggtcatgagcctgtgcccccttgctcagtctgggcccccccactgctgcccagcatagaaagaattgacatgggaggggggcgcagatggactccccaggtttcatcatggggccttccagggaggctctgaggcagggtagagagatgaggcttctcatcagtgaggcaaggtacccctcaggtgtagaaggctctgacttgggtgagcagcctggagagatgtctggcacctggccaatccccagcctgacttggggcaagggtttgagggcatgaaaccccctggcaaccagagtgcctgaccacctccctggtcctgcatcttagctaggctggagtgacctggactgcagctggcacagccggatggggaggggcacgcattgcttccgggaaccagcacatctggctgtggaggccagcacagctggtgggcattgtgtgggaggggccagacatgggggtggctgaaccctgctgaggggctgccaattgtggactcgggcagcatctctgtgcccagtcaagagagtccaatcaggtcatgaggtttagggccccccaagggccaaggatggtgctgccttggctgagagtactaccttagcaatggagtgtttgagaaagcactcccctcctttcctgctgagaggccagagggccaaagtcaggcctcatttggcctagaggccaaagtgcacatgggaaggttgccctttccctgtggcaggtgggcacaggtgggcagtggagggcattccataaagggagagcagagagatctggggctctgttgcctggggtggacttcccccaacaggcctggcttcagcaaacccttatccaagccacttctcctgccagtctttggcccctggaggccctaaggagcccctgttgcaacccaagttgtaccctgatccttcactgacctgcaggtgcagtggctctagggaggagggagcaggtagaggggatagtggtgagtgtggggaagcacggctggtctccaggtggcgggatgttctcgctttttaagtcattaaaggctcagaaatccagccatgtggggtctagcaaggaaggggtggtcttagcggagctgggagtccaggggctctggactgtggaaccctctcattctgagcctcggtttctccatctgtgtagtaggggttggtcccagaagatgaatcagaatgagtcagaggagggagatgggaggggcttggtgccacgtcccagttagattggccaggcctggacagcctgggacagagggagatggatggcttcttggctggggtaaggggtgtagtggagaactcaaggaag

SEQ ID NO: 6654 - DNA, 2435 bp, Artificial sequence
  DNA replication origin
ccctcacctggaggggagtgctgtaaatagtttctttttccttcacttccaaaaaaaaaaaaaagtaaaggcttcaaggagtcacagaaagggggggcacttgggagtgagatgccctccaccagctctggggcctgccagcctgcatacccctcctcgtcggggcctcaggcagggtacatccagccacttctggaggtggagcagggcccaggcccgcactactgtgctccccgggaaggcagtgggtccctcctggagtgggccctgactccaggccccagcgggtgcacgggtgcagctcggcagctagttgttggcgttcatcctcccgccggggctggcagtggtggggaagagcggaggcgggggcggcaggtggggcgggggcggcagggtctggggcagccccgggagcaggggcagtgcgtgcgcctggggctgggttgggggcaggcctggggcagcggggacgccgtcgccggccagggtgtggctgacgcggaagcacttctccttgtgggccttgagcatgttggagaagcggaagcgctggccacacacgtcgcacgggtacggcttctcgcccgtgtgcgtgcgccggtgccgcttcatgttgggccggctggtgaagctcttgccacagatctcgcagatgtacggcttctctcctgggggttgggggtgggcagcagggcgtcagtgaggggtcgccacaccccagtctggggccagcctccgtctcccatggagccatagtggggcccagccccggcgctctcagatcctccccgaccctggggcattttgtgccagcctcacccaaccctgggaggcaggaagcatgggtaaacggaggcccagacttgagaaggggtgtggccaagattattccaggtgtcctgagcggggctgagaaggggtcccaggcccggcaccgagctccgtccccaggggcagccgcacctgtgtgggtcttcatgtgctcatcgaagtactgcttcatgttgaagtccttgccgcaccattggcacatgaactgcttgtggccaatgtggatgctcatgtgtgaccgcagctggtacttgtactggaagcgctcattgcagttctgggggtggggtttgggggtgaggcccaggcacagagcagaagagcagcctttgtggagggaacagctcccctgtggccacagggccaaggagggacacactcaggggctcctgggcaaggagatggggacatgagggcaagccgaggtgcatctgggtgggcagtacatgggcacaagaggagaggccacaagcacccaaggcttaggtggggaatgggggtcggaagtgggaaaaagccagagagtagagggagccccatgcttaaggcacgaggtccctcatccttcctcctgatcagacgcccagcccctgcccccacctccccacctgcagctctgttgtctcatctgagctccaggcctgggatgctcctgaatctgcctccccagaaagcctgctcctagggctgtagcccacacacacttcccaccctgagtgtgtggggctgggttggggaaggaagggcaggatgggagtgggccagagaagagtaggggctgggtgggagtgggaggcaggggctgcagacctcagagggcagggctctctctttctggacactacattccaccccctagccctttgtttttcagcagctgcgctccctgattcctgcccctcccaggtgacccctcgggcaggccaggcaggagatggaagctcacctcacatctgaacggcttctcccctgagtgctgcagtgagtgcaccttgagggacatgctgcgcttgaaggactttccgcaggtctcgcaggtgaagggcatgtccttggtgtgggctacgaggtgggcaccagggccatcatgttttacgggcctgcccaagcaccccgacgttgggcccagaccctgcctcctggggcagccctgtgccaccacccttctctggggctggccttatactctgtcccaggacctgtgctgattcccaggagaggccccctgcctccatggctgggtctcctatctgctctgaaggtctgcctcagacatgctggggctctgtggttctttagcctctggtcaagggaagtggccaaggctgccttgcccccaaagcttcagggaaggatggaaggaccctgggtggacctggcttcagctcaaatcccggcccgaccactggcttcccactcagtctctctggacctccgcttcctctcctataaaaagggactcatagtggtcctgagcttcaggggtggtgggctttagaggggacatatgcagaaaggccctggtctcaggccctagccagcagtctggaggaagttagctgcactcctcccagcacccacggatgggtgaggactaacaa

SEQ ID NO: 6655 - DNA, 1601 bp, Artificial sequence
  DNA replication origin
cctggccggcgacggcgtccccgctgccccaggcctgcccccaacccagccccaggcgcacgcactgcccctgctcccggggctgccccagaccctgccgcccccgccccacctgccgcccccgcctccgctcttccccaccactgccagccccggcgggaggatgaacgccaacaactagctgccgagctgcacccgtgcacccgctggggcctggagtcagggcccactccaggagggacccactgccttcccggggagcacagtagtgcgggcctgggccctgctccacctccagaagtggctggatgtaccctgcctgaggccccgacgaggaggggtatgcaggctggcaggccccagagctggtggagggcatctcactcccaagtgccccccctttctgtgactccttgaagcctttacttttttttttttttggaagtgaaggaaaaagaaactatttacagcactcccctccaggtgaggggggtgctgggggtctgcagcagaaagaaaggggcctgggcagcaggtgtggccagtccctctgccaaggcctgtgccagaggggttggccagttggagcctgggtcagcctcagcagcctatccccatgtcctctatgcccctaatttgcttcctcatcttggagggtttggggagaagttggcgtgccacccccacaacccctgaggaggtgtagacccagtctgagagccgcaagcactgaggcagggcctgagactggacctgggtgagcgtggggggtggagggtggcgaggtgcggagactgcagaccagtgcttcactgtgtggagtggggcaggcaggggctggaccccagggacttgccttccccacccactctgctgccagcaggcccagggatccctgacctgcaccaggtggcaccaagggtcctgagtcctggagatgtccccagaagctgctgtgcctcacagcgctgtgagccagaccctccttgggcagacaggctgactggcagcaccagctttgggggcagagtcctaggatgaggcttgggcagtgctggtagggtttcaaggtgctattagtggggcaggggcagggcggctgctcacagagcaccccagttcctcaccagctactctggccatatatcccacaccagaaggaacaagtgtggctgtgtccatctctgctcccccaaaggcccgctctaggccttatcctccctctaggtcctgccacaacctgtccctggctggctccagcgtcctcgtccctcctgggcctgtgcaccggtgggtggggcgcccatagcactgccggtaaaggagcctgcatgttcaggcccctcgggggattggggggactggggaggcgcagcctagacccaattgcttgcccccatgaggctagcactaataggaaacccttttttgttgtcatttaatgtctttattcctgcctttaatatggggaggaaggttccataagctacatgtttcctagttaagctctttcctattgtgtttatacagttttgtttgttatactctttgcaccttaaacccccaccactccccgacactattgccttcccagcatggct

SEQ ID NO: 6656 - DNA, 1039 bp, Artificial sequence
  DNA replication origin
cagccaacgagtgctactgtgcttccctctccaaccaggtccccaagaaccacgtcagcctggttaccaaggagaaccaggtcttcgtggctggaggcctcttctacaacgaagacaacaaagaggaccccatgagcgcatacttcctgcaggtgcctgaccagccttgggagccgccagctaatgctgggctctaggcactgtggacagtcttggggcccagaaggggcttgtgtctacacaagtgaatgccactgggtctagggtgagatgtagactggggaggttgactgatagccacctacttgaaggttgaagacagtcaataggcagctgccaaaaagcagcataactttggtatcttaatttcaggggtgtggtagccccaagttggcatatgttggaggccctggccctgcacaggggttggggtggggcacagtaaggagcagcaaggtcggtgtgaggatcctgggcagggcctctgcgtgaaggccaggcccggagctcacagcagtgtcccagacaaaggaacaatcctgtatggtcctcccattgtacagatgaggaaactgaggcccaggaggtatcagcagagtggagtgccaggtctgagttggggtgtgactgtgagatctcaaagggcagagacagtttcctggagactggccatataagtttgagccttgccagtggggtgggatttggagatgtgaaggggaagatggcagtgtttccggccaaggaacggtaagcaagggatagaactggggctgagcctggtgagtggtgtgctcagggaggcctgatcagcaagaggggtgacaggcgcttggtgccagggttaagctcacaggccttacggttgcactgggggatgagggcagcttcaccagctactagctcagcagtgtgggcacattgtttattctctctgggcctctgtttgtaactggggatattctccttcctgcatgataaggttgttggaaggttaaatgatgcttataaagtgctcatcagcaaggtgctcagccct

SEQ ID NO: 6657 - DNA, 1351 bp, Artificial sequence
  DNA replication origin
gctcatcagcaaggtgctcagccctcagaaaactttccaaaaagatgaacccctagtattaatatcttaattataaagctgtggaggtggacaaggctgtggactgtagattttacagggcgaaaaggcagggccgtatttggaagtttcctgaacagtgggatggggtggagaggagggggcaggcaggcctcagttgggagttgttcagcctgggaaagcaaggccatagctggacctccctcacagagctccccctcatttctgtgctgtggtgccctaccgcctgctataatggtggttgccaggagcctgcctgggtgtgggggacgctcatctgctctcagcctgatggtaggaggggcactgtttctcagggcacctccaggctgtattggccctacctgggttcccgacctcctccgtgatctggggcagtgggactgagtggggctgggctgaggctgggggagtggggggcggtagctgactggacacctggcctgcagtttgaccatctggactcagagtggctggggatgccaccgctgccctcgccccgctgcctctttggcctgggagaagctctcaactccatctacgtggtcggtggcagagagatcaaggacggcgagcgctgcctggactcggtcatgtgctacgacaggctgtgagcatggctggggtggggctgagctccgtgggggtgagtggggcatggaggccgcagctggtctagggcctggggtgggatttggagctagagccttgtgcttagagtgaaggtgggcttgggtaagggcggggaggttggggggcagggtgggatcaaagaactgagaggcctcggaagttccagcaatggatctgacgcatctcgaatatgtgttaggtggatgggcggatgggtgcagagacagggactgagccgagcctggatgggtgccctcccccacccccactcccgtctcctccaggtcattcaaatggggtgaatcggacccgctgccttacgtggtgtatggccacacagtgctctcccacatggaccttgtctacgtaattggcggcaaaggcagtgacaggtgaggctgggcctggagtgagtctgtggagcagaggtagaatctcccagaggctgtcaggggtttgtcctggctgccccggcaggtgattgcagggaggcgtggctgggctcctgcttctctccacccatccccaccctccaccccacaggaagtgcctgaacaagatgtgcgtctatgaccccaagaagtttgagtggaaggagctggcacccatgcagaccgcccgctcactctttggggccactgtccatgatggccgcatt

SEQ ID NO: 6658 - DNA, 2101 bp, Artificial sequence
  DNA replication origin
cggcaggtgattgcagggaggcgtggctgggctcctgcttctctccacccatccccaccctccaccccacaggaagtgcctgaacaagatgtgcgtctatgaccccaagaagtttgagtggaaggagctggcacccatgcagaccgcccgctcactctttggggccactgtccatgatggccgcattatcgtggcagctggggtcaccgacacagggctgaccagttctgccgaagtgtacagcatcacagacaacaagtatgaaagcttgtcccttccgccaaggacaactgcatggctttgggcttctgtcagccccagcaggagctgcagtccctgtcttgggtctccagtgttgactttggacatcagtatagaaataggctttctctcctgatcagcagtgaggtggggaggcggggcaagggttatggccagcctggtctgcaggagggggctcccagggctgggggaggggatgccaggttcctcattcagggactcataccaggcaatggcctggtgcaagggatatagcagtgaacaagacagaagctgccctgcctgggacatcagaaaagagaaaactgaactgagagacagttggactcagctcgcaaaaggggtgagggtggtgggaggaggttgccccagactaaggaaaggtggtgctgaggcagtttggagaaaaaactcaaggcctataggagggaaggtgttgctccagctgggtggaggtgggtgggtgatggagttgggatggcggtgctggggctggagcgggggccagcaggagagggactgtatctcatctgtgttctactaaagtacttcatggcaactgatatagagagcagattagggatttcccaggggtcaggaaggtcaggggtgataaaggcctggagctgggggcacagcggagatggggttgaggggatgcaccggacaaagacaggccagggcttcttacactgtgatgggcatgcaaatctcctggggatcgccttaaagtgcagattctgattctcggtatgcggagggctgaaagcctgtaagtctgcatttctaacgcacccccaggagatgctgacgctgctgggccatgaaccacactttgagtagcaagagtctaggaggtgggagaaacagggcttagctattgattggatgtgggggtgagagggggagaagtacatgcttctgagtgagggtgggaggccatttactggataatcattgggattgggtagggaaagtgagggtccagttaggacatgtggacttgaagtacctgggggtgtccaaaaggaccccacccgggagagagagggctgagctggagggagagatctgggggtcagtagcacacggaggggccaagctccctcaggagagagagtgtaaatgggaggagctgaggtccaagccctgatggtggaggcagctgcattatccaggaaggaggccacgaaggtgaggccgaagagatgggtgaggaaagtcacgtcagcagggctgtgtgctgtaggacctcagtgcgtgtgcagtgactgtggacctcaggaaggtcagttttggaggatgggactaaggcccaaggcaggagccagggtagcgaagatacattgagaacaactgggctgtgaagggagaagaaggatagagcaggtgtgcaaggtgggtggggctgcaggggccgctgaggggcaaaaggactgcgtccagggcaaggctgggggcctgctaggggctggggttgtgagttggagggtggagttagttcaggagaggagtaggggcagtggggagatccatggtggactttgctggacaggttggatagaatggcaagaggacaaggaaaggaaagtggaggagcaagagaatggggaaggaagggaagaccagagggacagggaaggggaatggggttgggggcatgggtgcctgggacttggattgcaaagggttgcagttggagctgtgggtgctgggtggcagggacagtcactgggcttgccgaggcatcccaatgatgcaccttctcacacacccccaggtgggcacccttcgaggccttcccacaggagcgtagctc

SEQ ID NO: 6659 - DNA, 813 bp, Artificial sequence
  DNA replication origin
gcctgattctggtcagcaccttggacagcagccagtgccctccctggccccgcctggccccgcctggccccacatccgctactcctgggcacctcctcaaatagcacagcctccagctggtgcccagggcctgaatacacagagcgctgagagagtggggcagtgtggtcacggacacaggcagggactgggatgtgacaggctggagctcagggacttgttgggggaatgggggtcagtgacaggctggaggcttaatgcgaggatggaggcttggctctaggggcagcacctggggtggtcatgggatctcagggaggggagtgggagtcagagaaagggtcttagagaagctggggctttgtgaggagctaagggagactcactgatcgaggtggggaccctgcaggcagaaacctgactgtagtgatagaggtggggtttctccgcacgcaggtcatgggggccttggcaggagcggttttggcagagggtggggccggtgcctctggaaggtatgaagatgtaaatgaaggtgagggaggcaggctgcgagtgagggctctgcgggcaagagccttgatgggtggggtgggggcaagagcagcagctgggatggggcactggtgttcggtggcctgtgaactgtggggggcacaggggcaggcagagtgatggtacaaggtccccaaggggctggaggggcaatctctcttcagagtgggtccccactggggtggtgggaccatgaggtggggctaggcttggctggagactgtaattccctcacccaacctgtctccccagccctgt

SEQ ID NO: 6660 - DNA, 1149 bp, Artificial sequence
  DNA replication origin
ggaatgggcatctctgtgcagaacgtttggtccacaaaacttttttaaaaatatactccagaagatttaaaatctccagcgcactcgagatcgtgctcgcttggatccagcccagcgcgccatcagcgcctctgtcactttcagaactcttggcgccccctcggcccccgtagagtagcgttgaaaacgcgcaagtgacgtcgcttgtttccctggtgacggttgccagggcagcgcgtgtcggcgtccggaggaggtgacctagccgccgcggtcctagaagggagaagtggagagagaccgctgtaagtgccggggagagcggaagggcccgggccggagctgggaaagcccgcagctgccgggggcgcggaaccgagcccgagcgcaaccccagcccgagcgcgctgccactggccgggcgctcaccgcgtgctgggcgcccagcgaggactcttccccttcgtcctttgaatcttcacacacagccctcttctaacccaggcagacgcttattttccatgcagtacatgggttaatgaggcgcagagggtgggtcgcctgccccaaagtcatagcgtagatggcacagtcagaactcgaactcaggtccgcctgacaagcgctgtttgctgggcctctgccactgggccctctcgcaccgcactgaaagatgcgacccgacggcgtgcacttccgcatctcccagttccccttccaggcccagcccccacaggactggggactcgcaagagggagttcccctccaagcccggagtccagccctgagaaccagagcatcaccccgctcccatcccaaacccatccctacgaagatgctagcagtgcacagagcgccaaactaggcatccgtgggcggcctccccacacctccaggcccctagactgttgttgagaatactcgaaaagaacacagtaaaagaaaagaagaaagagaaggagaggggaagagaaaaacaatgaaaaaagtggcaggccgatggggcaaggggtctcaatccttcctcactggtccctgtcacctatggtcccatatcctgtgggatcttgcttcctcataggactccagagtgcatgccactcttcctactccctggctctaagtcctacctgagccaagagttcttt

SEQ ID NO: 6661 - DNA, 1328 bp, Artificial sequence
  DNA replication origin
ccctcccggacggggcggctggccgggcggggggccgacacccccacctccctcccggacggggcggctggccgggcggggggccgacccccccacctccctcccggacggggcggctggccgggcagaggggctcctcacttcccagtaggggcggccgggcagaggcgcccctcacctcccagacggggcggctggccgggcggagggctgacccccccacctccctcccggacggggcggctggccgggcagaggggctcctcacttcccagtaggggcggccgggcagaggcgcccctcacctcccggaccgggcggctggccgggcggggggctgacccccccacctccctcccggatggcacggctggccgggcggggggctgaccccccacctccctcccggatggggcggctggccgggcggggggctgaccccccctcacctccctcccggacggggtggctgccgggcggagatgctcctcacttcccagatggggtggctgctgggcggagaggctcctcacttctcagacggggcagctgccgggcggaggggctcctcacttctcagacggggtggttgccaggcagagggtctcctcacttctcagacggggcggccgggcagagacgctcctcacctcccagacggggtctcggccgggcagaggcgctcctcacatcccagatggggcggtggggcagaggcgctccccacatctcagacgatgggcggccgggcagagacgctcctcacttcctagatgtgatggcggctgggaagaggcgctcctcacttcctagatgggatggcggccgggcggagacgctcctcacttcccagactgggcggccgggcagaggggctcctcacatcccagacgatgggcggccaggcagagacactcctcacttcccagacggggtggcggccgggcagaggctgcaatctcggcactttgggaggccaaggcaggcggctgggaggtggaggttgtagtgagccgagatcacgccactgcactccagcctgggcaccactgagcactgagtgaacgagactccgtctgcaatcccggcacctcgggaggccgaggttggcggatcactcgcggttaggggctggagaccggcccggccaacacagcgaaaccccgtctccaccaaaaccagtcaggcgtggcggcgcgtgcctgcaatcgcaggcactcggcaggctgaggcaggagaatcaggcagggaggttgcagtgagccgagatggcagcagtacagtccagcttcggctccgcatgagagggagaccgtggggagagggag

SEQ ID NO: 6662 - DNA, 911 bp, Artificial sequence
  DNA replication origin
tggggggggtcagctcccctgcccggccagccgccccgtccgggaggtgaggggcgcctctgcccggccacccctactgggaagtgaggagcccctctgcccggccagccgccccgtccgcgagggaggtgggggggtcagccccccgcccggccagccgccccgtccgggagggaggtggggggggtcagcccccctgcccggccagccgccccgtctgggaggtgaggggcgcctctgcccggccgcccctactgggaagtgaggagcccctctggctggccagccgccccgtccgggagggaggtggggggtcagccccccgaccggccagccgccccgtccgggagggaggtggggggggtcagccccccgcccggccagccgccccgcccgggaggtgaggggcgcctctgcccggccgcccctactgggaagtgaggagcccctctgcccggccaccaccccgtctgggaggtgtgcccaacagctcattgagaacgggccaggatgacaatggcggctttgtggaatagaaaggcgggaaaggtggggaaaagattgagaaatcggatggttgccgtgtctgtgtagaaagaagtagacatgggagacttttcattttgttctgcactaagaaaaattcctctgccttgggatcctgttgatctgtgaccttacccccaaccctgtgctctctgaaacatgtgctgtgtccactcagggttaaatggattaagggcggtgcaagatgtgctttgttaaacagatgcttgaaggcagcatgctcgttaagagtcatcaccaatccctaatctcaagtaatcagggacacaaacactgcggaaggccgcagggtcctctgcctaggaaaaccagagacctttgttcacttgtttatctgctgacct

SEQ ID NO: 6663 - DNA, 1813 bp, Artificial sequence
  DNA replication origin
ccgcatcccttcccggcccgtgaggcgtccgcaggcggcggcgctcgggacacggcgttcgcggtgctcgcctccgctgcccgaggggaaaagggcaggagaaatctgaggagtccttgggccaggagccaaagcccctcaagtgcccgggcgcgaaccccaggcgccgagctctcacgtctgtctccgccagtacgctagagccggggtagtgggccagcactcaccggcccagccaatccaggacccgctctgcactgccccacccgccgcgcacacgcacgcgtccttttgcggccgctggcctctgattggctgggacggctgtgggtggggagaagccgggaggactgggtgcgcctgcagggatcggaagccggttggggtgtgagaggttttctcgctctaggtaagcgaaacaagccgggggactgcgagccagggactcgggccgcggggcgggaagaagtggggcagcgcttggccaggccgaaaggactttgggggtgggggctgggagtccgtgtctcgaatgagggaggagaggtggagttgccggggctcaggcccggcctcgagcatgggcggatgagaggagtcgggagccgaggcctagggtccttcgggtgaggggagacggagccagcgaggagatggagcagaagcttgtggagtgagttgccgagcggggaagactcgctgatggggtggtaatgagagacgggggccaggagggtgttgactgggcccgacggcggggagcgaggagcgggagcttccccggagcttggaacattctgaagagcgggctaagcggcaggcgaggcgggataggagagcgagcgctccggtcacggagtcacgacaaggtcacaggaagagaggcggcgaggaaggtcgggaggttgaggggagggcgtactagcagaggaccttccagtcctggtcttgcttttctccccgacctggtgtttcctccaccctgggaaagtgataaggcctagggtcctgtgtagtgcttctgtgaccgaattaaatttttctcctgccgagtcggcgggttagagattacaaagcacagcgtaagggcagaattaggagcagccgacatgatgcagcagtgatattcgcctttgtcttaaattcccggagtgggaagcagctatttccctcttcggagtaatccccacgacagggatccctgcttccggaagtacaaaggcactttggagtaagacaggtttggatggaaagttctaacaggttgaagcggtgacaacctggtcatgaagctccagcatgacacacatatttggagtcctgtatactaggagttctctttgtgcaccagagtcacttgaaggggcttcttaaagattccttgagctctgccccagaccacctgaatccggatctccatgctggggccttggcagccattttaaacaagctgatgggcgactgatgcaaaatcagtttgaagccagcgttgctttagatagtaattcccgtgacaaaatgactgtgaagaaagatccttcattcaacctgttacgtctcctgatgctggacggctcatcttcccttaatgcctctttaggttccctgtggaaaggtcttcagtcgtgtcttactaagcgtacagaattaatttgtgctctccaaactgactttaaatatctggttactggtgccttttttagcgtctattcaactttctgacagaaatctgggacaactactgtgggtggatgagaaaacgataatgaaggaaagtctggcagtggtgtagtgaaaaaagtcttttcaaatc

SEQ ID NO: 6664 - DNA, 1299 bp, Artificial sequence
  DNA replication origin
gcgtggggcgggcagggagtggagtcggggtcttactccggtggctgcagggcgcagggtagccgtgtcaggcctgcccaggtgcagagcgctcttccgcgaccccaacagcctctggtccggtctggcgcgccctcgctttcccagagggcgacctgggctatggcggccgtggcgctggcgagcgggacacgcctcggccttgtcctcgagctgctcccgggacagcccgcgctgccccgggcgcgccgggtgagtgcggggccggagcctggaagcagtcttggccctgccctgggttctaggcccggagacggggtggtgcggcggctgggaaatgggggtacaacccagagtgaggggcctcgagggacaggcagcacagcggagtcgacacccctggacctgagcctcaaggagagcagacgtgcagcggcacggggttgagccgactgctggggcagagcgcacagagtgctgtcgggggcgatgaatggccagaatttcagagctgcctttacagagctggttatgtttgagctgggtattaggttgaaaaggaatttgcaatgcaggagcaggaaggaagaactggatattcaggcaagagtagccgcaggtgcaaggacacagaacagggtgaggaaagagtttggtttcccaatgcaatggtgagaggatcggagatgagagtggtggtggctgatgatcctggccaggaaagctgggtctgtgagtagtgaatggaattgtctgtagtgcagaggaatgtggactctattaggcagacaaagttgagccagccaaagccttggagccctggagtgctggataaatagctgtggagactttctagtgcgcaaggactgaagtgcagtggaccagaatgggctcctccacagtgtggagactgagaccctgaaggaggcagtggctgagaattacgggaagtcccaacggctggaggtcagcagtatttgtttcttaagaggatgagagaaagaaggtgcaggagctgagactcctagagatatagaaaatggggacatggagattgggacgtgggtaagcaagtgaggtgggatctttgtgagagtgttgcgggtggtgggggtgcagggagtaaagtcacaacgaggatctgccctgttgagtacagtgttcagagcaacctgaatgttctgaggagccctagctgcctctgtggctggtggcagtgactggggaggacaaaggaggaagagtcctatacaggggcagcagggatggcaggaatggggacggaaggcagtgtggcat

SEQ ID NO: 6665 - DNA, 919 bp, Artificial sequence
  DNA replication origin
cccaaggcagaagaatttttcttagtacagaacaaaatggagtctcctatgtctacttctttctacacagacacagtaacaatctgatctctctttcttttccccacatttcccccttttctattcgacaaaaccgccatcgtcatcatggcccgttctcaatgagctgttgggtacacctcccagacggggtggcggcctagcagaggggctcctcacttcccagatggggcggccgggcagaggtgcccccccacctcccagacggggcagcggctgggcgggggctgccccccacctcccggagggggcggctggccgggcggaggagctcctcacatctcagacggggcggccagtcagagacgctcctcacctcccagatggcgtggcggcggggcagagacactcctcagttcccagacggggtcgcggccaggcagaggcgctcttcacatctcagatgggccggcggggcagaggcgctccccacatcccagaggatgggcggccgggcagagacgctcctcacttcctagacggggtggcggccgggcagacgctgcaatctcggcactttgggaggccaaggaaggtggctgggaggtggaggttgtagcgagccgagatcacgccactgcactccagcctgggcaacattgagcactgagtgatcgagactctgtctgcaatcctggcacctcgggaggccaaggctggcagatcactcgcagtcaggagctggagaccagcccggccaacacggccaaaccccgtctccaccaaaaaatacgaaaaccagtcaggcgtggcggcgcccgcctgcaatcccaggcactcggcaggctgaggcaggaaaatcaggcagggaggttgcagtgagtcaagatggcggcagtacagtccagccttggctggg

SEQ ID NO: 6666 - DNA, 7065 bp, Artificial sequence
  DNA replication origin
gtggcgtgcgcctgtagtcccagctacttgagaggctgaggcaggagaatcacttgaacctggagggcagaggttgcagtgagccgaggtcgcaccactgcactccagcctggcgacagagtgagactccatctcaaaaaaaaaaaaaaaaaaaatggttaggagatcacaagagatttttattgcaaataggaacctttttctgtatgtaagaacccactgtgtgggctgtcatttacaaggcagggctggcttctaggatttagcacacactgaattgcagcaagtcaaggctgtgtgaagccatgggaaatggctgtgtgaagtcacagaaagggacaatgtgaagtcacaggaagaagcagagtgaagtcacaggaaggagcagtgtgaaacaataggaaggggctggaagatgtcataagaagaaattatgtgaagtcacaggaaggggctgtgtggagccagagaaaggggctacgtgacatcacaggaaggaactgtgtgaagccaagggaaggggctgtgtgaagtcacaggaggaggctgtgtgaagccacagggtcagtatgaagccacaggaagaggcagtgtgacgttaggaaggggctgtgtgaagccaaggaaggggctgtgtgaagtcataggaaggggtagtgtgaagccagataaaagggcagtgtgaagtcacaggaagcggcagtgtgaagccaaaggaaggagcagtgtgaagccaaataaaggggctgtgtgaagtaacagggacagtgtgaagccaaaggaaggggcaatgtgaggccaaaggaagggacagtgttgagccataggcaggggctgtgtgaagccacaggaaggggaatgggaagtcacaggaaggagcagtgggaagtcacaaaaagggactgtggaaagtcacaggaaggggcagagggaagtcacaggaagaggctgtgggaagccatagaaaggggctgtttgaagccactggaaggggcttctgaggtcacaggaaggggcagtgtgaggtcacaggaaggggctgtgtgaagccactggaagtagctgtgtgaagccactggaaggggcagtgtgaagccactgaatgggacagtgtgaagccacaggaaggggctgtgtgatgtcacaagtaggggcagggtgaacttacaggaagtggctctgttaagccacaggaaggggcagtgtgaagccacaggaaggcacagtgtgaagtcacatgaaaggggctgtgtgaagtcacaggaagggaagtggaaagtcacatgaaggggctatgtgaagtcacagggaagggcagtgtggagccacaggcagtgtgaggccacaggaaggagctgtgtgaagtcacaggaagggaagtggaaagtcacatgaaggggatatgtgaagtcacagggaagggcagtgtggagccacaggcagtgtgaggccacaggaaggagctgtgtgaagtcacaggaagggaagtggaaagtcacatgaaggggctatgtgaagtcacagggaagggcagtgtggagccacaggcagtgtgaggccacaggaaggagctgtgtgtagccacaggaaggggcagtgtgaagtcacaggaaggggcaatggggtcacaggaaggggctatgtgaagtcagagaaaggggggttgtgtgaggccacaggaagaagcagtgtgaagccacaggaaggggctgtgtgaatcacaggaagaggcagtgtgaagttacagaaggggctttgtgaagccacaggaaggggcatgggaaatcacgggaatgagctgtgggaagtcacagggaggggcagagggaagtcacaggaaggggcagtggaaagtcacaagaaggagtgtgtgaagccactgaaaggggcagtgtgaagtcacaggaaggggcagtatgaggtcacaggaaggggctgtgtgaagtcactggaaggggcagtgagaagtcacagggagtggctgtgggaagtcacaggaagaggcaatgtgaagccacaggaatgggcagtgtgaaatcgcaggtagaggctctgtgaatccacaggaaggggcagtgagaagtcacagaggcagtgtgaagtcaaaggaaggggccgtgtgaaaccacagcaaggggtgctgtgaagtcacaggaaggggcagtgtgaggccacaggaatgggcagtaggaagttacaagaaggtgcagtgggaagtaacagcaaggggctgtgtcaagtcacaggaaggggctgtgtgaagccacaggaagaggcagtgggtagtcacaggaacaggcattgtgaagccacagggaggggtattgtgaagccaaagaagtggcagtgtgaagcaacaggaagggacagtgggaagtcacagaaaggggcagtgtgaggccaccagaatgtgcagtgggaagttacaggaaggtgctgtgtgaagtcacaggaaggggctgtgggaagtcacaggacagggtagtgtgatatcacaggaaggaactgggtaaagccactggatggggctacgtgaagtcacaggaagtggctgtatgaactcacacaaaggggctaggtgaggtcagaggaagtggcagtgtgagttcacaggcaggggctttgtgaaaccacaggaaggggcagtgggaagtcacaagaagtggctgttggaagtcacaggaagaggcagtgtgaagtcacaggaagggtaatgtgaagccacaggaaggggctgtgtgaagccacagaatggggctttgaaaagcggcaggaaggggtagtgtgaagtcacaggaagaggtggtgtgatgccacaggaagggactgtgtgaagccacaggaaggggcagtaggaagtcacaggaaggggctgtgtgaagccacaggaagggggagtgttaaaccacaggaaggcacagtgtgaagtcacaggaaggggctgtgtgaagtcacaggtagggacagggggtagtcacaggaaggtgctgtgtgaagccacaggcagggtcagtgagaagtcacgggaagaaggagtgtgaagtcatgggaaggggctgtctgaagtcacaggaagaggcagtgggatgtcaaaggaagggatggtgtgaagtcagaggaagaagctgtgtgaagtcacaggaaaggccagtgtgaagccacaagaaggggcagtctgaagccacagaaggggcagtgtgacgtcacaggaagaggcagtgtgaagccacagggagggtagtgtgaagccaaaaggaggggcattgtgcagccacaggaaggggcattgggaagtcacaggaagtggctgtgggaagttgcaggaaggggctgcagggagtcacaggaagtggctttgtgaagtcgcagtatgggacagtgggaagtcagaatgagtggctatgggaagtcacaagaagtggccatgtgaagtcacaggaagagacagtatgaagtcataggaaggcgtggtatgaagtcacaggcagggttctgtgtgaagccacaggaaagggcactttgatatcacaggaatgggcaatgtgaagtcactggaagcggtggtgtgaagctacaggaaaggccaatgggaagtcataggaaggggctgtgtgaagccaaaggaagaggcactgtgaaatcacaggaagaggctgttttacgccctgggaatgggcagtgtgaagctactggaaggggcttgtgtggtcacaggaagtgggaatttgaggtcacaggaagggactgtgtgaagccacaggaagggacagtgagaagtcacagaaaggggctgggtgaagtcacaggaagtggctgtgtgaagccactaggaggggcagtgtgaagccacaggaaggggctctgtgacatcacaggtaggggcagtgtgaagtcacaggaaggggctgtgggaagtcacagaaaggggcagggtggtgtgaaataacagggaggggcagtatgacatcacaggaaggggcagtgggaagtcacaggaaggagcagtgcgaattctcaggaaggggctgtgggaagccacaggaaggggctgtgtgaagccactgtaaggggcttgtgaggtcacaggaaggggcagtgtgaagtcacaggaaggggcggtgtgaagtgataggaaggggcagtgagaagtcacaggtaggggctgtgtgaagtcacaggatctctggctgtgtgaagacacagaaaggggcagtgtgaagtcacaggaaggggcagtgtgaagccacaggaaggggcagtgtgaagccataggaaggtacagtgtgaagtcacaagaaaggggctgtgtgaggccacaggaaggggctgtgcaaagtcacaggaaggaaagtaggaagtcacaggaagcgggtgtgtgaagtcactgaaaggggctgtgtgaagccacaggaaggggcagtgggaagtcacaggtagaggcagtgtgaagccacaggcagggaggtgctgtgtgaggccacagcaaggggccatgtgtagccacagaaaggggcagtgttaagtcacaggaaggggcagggcagtgtgaagtaacagggaggggcagggcagtgtgaagccacaggaagaggctgtgtgatgccacaggaaggggcactgtgaagtcacaggaagaggcagtgtaaagccacagggaggggcagtgtgaagccaaaggaaggggcagtgtaaagccacaggaagggtctgtgtgaagccacaggaagggtctgtgtgaagccacaggatggggtttgggaagtcacatggagggccagtgtgaagtcacagggaggggctctgtgaagtcacagaaaggggctgtgtgagggcagaagtggcaatgtgaggtcacaggaaggggctgtgtgaagccccgggaaggggcataggaagtcacaggaagtggctgtgtgacgttacaggaagaggcagtgtgaagtcataggaaggggcagtgtgaagtctcaggtagaggctgtgtgaagccacaagaaggggaagtgtgaggacacaggaaggggctgtgatgacagggaaacaggctgtgtgaagccataggtaggggctgtgatgacagggaaacaggctgtgtgaagccacaggcagaggcagtgtgaacatgccagaagtgtccctgtgaagacacaggtagaggctgtgtgaagccacaggaaggagcagtgtgacatgacaggaagggcagtgtaaagtcacaggaaggggcaatgtgaagccccaggaaggggctttgtgaagcgtcaggaaggggctgtgtgaggtcacagggaagggctgtgtgaagccactggaaggggctgtgagagttcacaggaaggggctgtgtgaggtcccaggaaggggctgtttgaagccactggaatgggccatgggaagtcacaggaaggggaagtgggaagccacagcaagtggctgagtgaagtcataggaagcggcagtgggaagtcacaggaagtggctatgtgaagtcacaggaagagtctgtgtgaagccacaggaagggacggtgggaagttacaggaaggggcagtggaatgtcacaggaaggggccataggcagtcataggaaggggctatgtgaagccacaggaatgggcagtgggaagtcacaggaaggtgcagtgtaaaatcccatgaaggggctgtgtgaagtcccaggaaggggctgtgtgaagtcccagaaaggggctgtgtgatttcacaggaagggtctgtgtgaagccactggaaggggctgttaggtcacaggacaggaccatgtaaagtcacaggaagtgttgtgtgaagccacaggaaggggcattgtgaagtcacatgaagtggcattgtgaggtctcaggaaggggcagtgtgaaatcacagatagaggcagtgtgaagtcacagaggcagtgtgaagtcacaggaaggggcagtgttaggtcacaggaagggtagtgtgaagtcacagggagggatagtgtgaaatcacatgaattggcagtgtgaggtcacaggaaggggcaatgtgaagtcacaggtagaggcagtgtgaagtcacaggaaggggcagtgtgaagtcataggaaggggcagtgggaagtcacgggaaggggcagtgtgaagtcataggaaggggcagtgggaagtcatgggaaggggcagtgtgaagtcataggaaggggctgtgtgaagtcacaagaaagggctgtgtgagttcacagtaagggctagtgtggggtcacaggggctgtgtcaagctacaggaaggggccctgtgaagccacaggaaggggcagtaggaagtcacaggaagggaggaaggggtagtgggaaatcacaggaaggggcagtgtgaagccacaggaaggggcaatgggaagtcacagggaggggcagtgtgaagtcacagaaaaaggcagtgtgaagtcacaggatgaggctgtgtgaagtcacaagaaggggctgtgtgaagccacaggaaggggcagcgtgaagccacagggggccgtctgaagccacagggaagggcaaggagaagtctcagggagggatagtgtgaagtcacaggaagaggctgtgggaagtcacaagaagggactgtgtgaagccacaggaagggccagtgcgaagccacaggaagggccagggtgaagccacaggaaggtgggaagtcacgggaagaagtagtgttaagtcacaggaagattcagtgtgatgtcacaggaagggctgtgtgaagtcactggaagtggccgtatgaagtcacaggaagggctgcttgaggtcacgggaagtggctgtatttagtcatatggaagggctgtgtgaagttacgggaagttgttgaatgagacagcaaaaatcgcagcaaaatcccagatttcttccccatgcttagcaccctcctatactcacatctttatcccgagactgtggattcttccctcatccttgtttgtgaagtgagaagtacatgggctattggaaaatttaaatcttgcctgccagtaatctgaatttctaccattgtaacattatcatattagcacatatgttgtaggat

SEQ ID NO: 6667 - DNA, 1547 bp, Artificial sequence
  DNA replication origin
cacaggctccgcgccgggctcgcccgccgggcaggcgcacggcggacacctgcgagcctggaggtggcggtcgctgcgaacccggcggcgcggccaaacctgtgctggctgcctgggccttctgggcctcctgggccagaagctggcgctgggggcggcggcggggtgggaaagcggcgccgccgtggggcctcctggacgcgtcggcggaggtggcttcgtcccgcggagtccaggcttcaggtaagacgcgcgcgcgcttggggctggagcggactccgacacccgcctgggacttgaagtggaggtgtcgaaccctcggccccctggaggggacgacgcggtgctgggccccggggtgagggggaggttctaggacgccttcgggatccaggagagtttgcagaactgaggggtgacgtgtgaagcgagctgagggaggcgcgggaggtgggcggggcgggggtggaccctcagggtcgggggccggggattgggggtcgggggccgggggccggggacctgggcaacgccctggggcttgccagttcgagccctcagctcgtggcaggcactggcgtcgggtcctcaggcccttttgctttgggaggtgatgggtggtgcacatttggcgggggtggtggggagccacgcgaggtgcgcggagcgggcctgggcctccccaactgcctttgaaggcagaaccccggcaggcctgcagctgattcctgggcgctttgggggccagtagggcacctaccatgtgtgtccggtggtaagagcttgccacggcctgcttggcagtgccagagtagcctctgaagaaggaacccagtgaactcctgactccatgtgtgtgtttaggaacccgtctccagctcactgatgggaactctctgctaaagtatgtgaccgtcaggccagagtcttgcaccaggtgcagggcgaccagtgtctgcctactttattgccagccaacacttagagcgtactcttgggagaagcaaggctccgcgtggaaaaggatgacttcagggttatggggcgagcttgataggacttagtagctaagagcatagacagaggaggtttcattcaccaaatgtttactacaatatgtgccccgccttcaaatcttggttctcggctactagcggtgtgcgtttaagcaagtcacttatcctctcttagcctctgtttctttctctgtgaagtggagatgaaagtacagtgcctttatcacggggttgcagtggggatgaaatagtgccaggcaagtcctcagcccagtatgtctaacagtaagtgtgtggcaaatatcagcagtcgtggtgactaacgacagaaagtgttagaggtgcttggagtccaggttcatctttaatggtactagctgccctctctggctctcatgaatcttgcagatcttccagctcatcctttcaatattaattttgaggaatctcagtccctgcagagctaggaaagagcataggtcccctcatccccaggggtggtcagcacgttccttcctgagccttgggccc

SEQ ID NO: 6668 - DNA, 783 bp, Artificial sequence
  DNA replication origin
gccgccccgccgccaggccgcgccgcggggtccgggccaccgcagcccgggccccgcgtcctcccgggccgcgcgctgcggccggcgccgagagcgcaacttactttccgcctgcggcgagcgccccggcccgggcgcccagcccggcaacagcggaggctactgaggcggcggaggccggccccgcacccctgcctacggccgccgcgccccgccgcgctccgcgctcgcccctacctcagccggcaggcgagcgtccgtccgcagcggccgcggcgccgacaactccctcccggccgccgaaaccccgcacccagcgctaatcataataccgagcgggctgccggccgcggggagggggtgccgggtagctgcgcctgcgcgggctgcgcgtcactgtgacgtcagcgctggggcggggccgcgggaagggcagggcggggcggcgcgcacctgcggccggcgcgcgggctgctggagggcatcctggcggctttctgaccccggcgagtcggggctgaggcggctggcgggacaaagcgggcaaggcgcccaaggaggatggaggacgggggaggaggaagcaccagggacacggaacaatggccgggaaaaagtagcgcgagctgtcaggggaaatcggagggaagggaccgcgtctgtacaggactgcgtcttggcggcagggggcagggagccgcacgcgctttactctttggttcccgcccaggtttaaacaaggataaaaaaattgtaaaaatacatatacatacacacatgcac

SEQ ID NO: 6669 - DNA, 979 bp, Artificial sequence
  DNA replication origin
gtttcggcggccgggagggagttgtcggcgccgcggccgctgcggacggacgctcgcctgccggctgaggtaggggcgagcgcggagcgcggcggggcgcggcggccgtaggcaggggtgcggggccggcctccgccgcctcagtagcctccgctgttgccgggctgggcgcccgggccggggcgctcgccgcaggcggaaagtaagttgcgctctcggcgccggccgcagcgcgcggcccgggaggacgcggggcccgggctgcggtggcccggaccccgcggcgcggcctggcggcggggcggcggcggggcccggcgggagccgtcactgcggcggcggccgcggtcgcctggaggccctgcccttgcggccgcggcgggattgcggcacctcggaaggcgcccgcatccccgcgccccgccccggagcgggccgagtgcggcgcccgcggggccccgcgccctgggcgcttggtagggtgtgtgttctttgaatgcgttttcccctttcagaagactgtagaaatccggcctcagcaaaagggttccgtggtcaaactgctttacaatagagtggggatgttgtctgtagagaaagggcaaaggggtaaggaaagaggagcagtgccattcccgagggagagctagaatttttgcagactgggagactgggaaatctacgttcttttccatagtcatcgcctgttgatttctttctggtccattttacagggaccttcctgccttttacttggacttgggttgcaggaaagtggcagccttttatcttcggggttcttggagctgtgctatttgtaactgttggatcgcatacagtccagtagtttcatagggagtttcaggctttggggagaatttagcagtggagttcctaaatctatagaggtctgaggatatgggacctttcaaactgtcatgttactttccaccccccttccctttaattatgtgcattc

SEQ ID NO: 6670 - DNA, 992 bp, Artificial sequence
  DNA replication origin
cgaggttcttttcccacgccctgcccgacagctgctctccagctgtcctccttggaagctgtccagtgccgggagagctctgggcctgggatccaaatacctgggttcagtctcctgtggttccctggcgtgggcctccctcctctaagccatgaggagtttggacccgggttccgaagcctttcctacctgcccctgtccgtccctcaggggccgctgcagtctcagcctcctgactcttggctgctctgtctctgggcacttttcttggccgggcgcggggctggtacctcccagctcttggaagccatggaggaaggcgggctggaaccgtcgggcggggggcggggggcggggggagttcaccctctggagtcctcaggggtgtcgggggaactgggtggtcaaagtggggaggttctcttgggtagggtcaccaggggcccctaaggcagcaccgccagggagggtgggcccgcaagaggctcgtggggggcgtggtggggttggatctgaggctgaggtgaggccagcaacgagagaacagtgggcgagccagtggccagaagggctgggggatgaagtgaggtgcagggaagggggtcccccagggttccaggcggggaccgtgaccgcagggaatggctgtgtgaggccagggtgtgggtgggacggcatcggcctagatgtcttcctcagtccaacttagatgcgagggagctatagaatgtgaagcagcagacacgctgttcctctacccctactcttccaactatgccattgagtcctgagcacctgcggcgtgccagatggcacccacgacaggccgggggatacagaagaggaactcgccacagctccagccagctagagcctagcaaaccgcggcaacctccccgtcctgccaatatcccttttgacacaacccaattggttccacatccaccctcccccgtggccttgtgcctgaggtctggccccattggagggtc

SEQ ID NO: 6671 - DNA, 1084 bp, Artificial sequence
  DNA replication origin
ttccagtctaggttctcgtccactacgatcgcccagtgaggccccgcccctcccaccgcagttccgcccctcccggagctaccgcccagtgaggccccgcctctcccgccgcggccccgcccccctgcgtgtgaccgcatctaggccccgccgcgtccgccacgcccagcgctcggcggcgcccgccccactggcctggcccgccccccgcaccgagcactctttcgcccggcctccggttctcgccggctctcggacccgcctccgaagacgtggagcgctgcggcggctggtgagtcggggagggcacctcggaccccccagctgtccgcagcagagcccggccccttgcagccacagagccccggccgctgcaggctccaggagctccgcctggtcgccgccctgcgttcccgggccgcctcccggtgccagcacccctggggatgggaagtgggaccaggatgggcgcgggggctgtgggggcagggacgagtgaaggtgttgcggggagcggcggtcgcaggggaggggagaggtttgtggaggggattatgggtctggggcgagggtttgagtcctgagagaaaggcggtgaggcggaaatttggggctggtgaagtcaggatggaggatgttgggggcctcagcgctttggggaaggaggcagtgagtggggtggtcggcggagcggagtgaagggtggtttttagaagggtcagctcgcgggtcccggggttcttgcttcccgggcagtccggggatcagggcggactaggctgtctccaagcaggtttggccggagcgggcttgcaggataatgctcacatcgaggtgactgagtttccaggcttttgactgggacatactgtacagtttaaataatagatacctgtctggctagtgcctgggacacctgagaaacgtggatggaatggggttctcccctataggcagcgtctgattttgtgggtgccttcacagcaccagcattggtgtgcgctgccttctgtaaaaccttatattccagcaggacggtgtatggagatcccagacttaaaaagtgcagctgaggtttattcag

SEQ ID NO: 6672 - DNA, 1191 bp, Artificial sequence
  DNA replication origin
agtttcatttataaattaggtacagtaagggattaacaacaatgaataataataaaatagaacaattataaaaatagactgtaataaaaggtgaatatggtctctctctctctctccaaatatcttattgttctggcctcacctattttcagactgtggtagaccctgggtaactaaaaacacttaaagccggcagggcgcggtggctcacgcctgtaatcccagcactttgggaaaccgaggcaggcggatcacctgaggtcaggagttctagaccagcctggccaacatagtgaaaccctgtctctacaaaaaatacaaaaattagctgggcatgatggtgcgcgcctgtaatcccagctactcaggaggctgaggcaggagaatcgcttgaacccgggaggcggaggttgcagtgagccgagactgcgccactgcactccagcctgggtgacattgcgaggctctatctcaaaacaacaacaacaaaaagtcaaaaagtgtggtggacagaagaaataggagagcaggtaaggaaatggtggggtgaggagcagatgagaacaggtattaagtaggatggtcagaaagggcctcagggagaaagtgagagcccagcaaacactgagggaggtgaggaagtgagccaagcagccaaccgagggaagagctttctgggcagaaggaatggctggggcagactctgagcctggaggtggaaaggtgtctggcgatttctaggaggagcaagggttttgggatttggctgtggttggatgttaggttttaattataaaaggatctgcgtttttcacaacttgaaagtgagctacagttaaaatgagacttgttcttatacctgaaagtgaccagaaaattaggttctggtctttaagagatggaagagggaaatgtgaaggggcgtattcctttcccctgccccgaccgctcgcggttggagagcccagccacatgccgccccggctcggagtgacagcccaaccaggcctctgccttctcggccgcgcctctcccgctgccgtccggatttcgatgggtggtacagtacgttaggcacgcccctccctttctcccggcctggtctcctgttccaggcgacagcccaatgagggctgcctttttttcttcggaccggttccagtctaggttctcgtccactacgatcgccca

SEQ ID NO: 6673 - DNA, 1065 bp, Artificial sequence
  DNA replication origin
tcccaggcagagcggcgccgggacgcctctgggcgccgcgcggactcatgccggggagggtcgaggaagccgcccgtcgtcgccaggcgggcggcgactccttggtgctgcccgctgggccctaacccggcccgcgcggagggtgcgcgccggagacacacgaagccccctgccggctgcgcttacctctctccggtgtcggcagagtccacctcctcctcctccgccgccatagccgccgccgcgcaagcgccgggacttatctcgaagccggctgacaggccgactgggccgccccgggctggcgcggcacttaaggcggcgcaggccgccagcgcatgcgtcttccgcgcactagcacggcccggcggcgcgcccgcgtttgcgcgtgcgcggccttgcctccggctttgcgtccgccatccccagccagcatgcactagttctcccgcccgacgctcccgggtgtaagcgcggggcgggacagtcagcccagagggactggcgagactcacccgaatgagttaggtgttttagctaatttgaataatgactgtattcatgcatcaccccgtcggtgttggctgtcaggtggcaccttggggacggaggtgcgtccggtcctggaagagcctagctagtgtccgatagatggtgcagtggcaaatgaaatggcgtaatcgaggtgctgtgtggcgtcccgccagcctttccccgcgggttggggggccagggggagagggcgactcacaggagccttcagtcagttgagcactgctctaggtgctgatgttactgtagtggccagagccagcaatttccctcccactcgactctctagatacctgggagggtgaaaagagtcggtgttggccgggcgcggtggctcaggcctgtaatcccagcactttgggcggccaaggcgggcggattttctgaggtcgggagttggagaccagcctgagctgaagaaaccccgtctctattaaaaatacaaaattagccgggcgcggtggcgcatacctgtaattccagctactcgggagcctgaggtaggagaatcgc

SEQ ID NO: 6674 - DNA, 815 bp, Artificial sequence
  DNA replication origin
acgacgggcggcttcctcgaccctccccggcatgagtccgcgcggcgcccagaggcgtcccggcgccgctctgcctgggagaggctcccctcagcgtcggggccccgaggtgtctgagccggactccggccgcgccgggaggccgccttgaccccgcgcggagggtccgccccgttgttgtataagccaccccgcgggccggcgacggagctggccgcggcggccgcaccggctcgggctctgccaagggacccggcctgccccaatgccgccggcgggcggtgcccggtcgaccctgcacctgactgcgaggcgcgggaaatgaccgggtctgtcagcctcccatcgcggcttccgtctacaggtactacctgtgctctgtccagcctcagccactggacgatccttcccgtagccgtaggaaggggcggcgcttccttggaggggatattagaggcccgaattcgcccgggaagcggcgggagggcgggggtgccgggaaggagggaggggagaaggagtgagggaagtgggtgtatggctgtgagtttcagatacttcatagaaagaaagttagcccttaagatagagatacacgttcaaatgtcataattcatctttcggatgaaggtctttggcttgcaagctccactgtcccttatttgtttgcgcttctgggattattctggctttactggcgaagtgtgtgttgcatgtgccttagaagaacacacataatgtataggaaactgtggaagttggagggcagatgtctaatgtgaaacttttttatatacaggtatagtgagtttatt

SEQ ID NO: 6675 - DNA, 983 bp, Artificial sequence
  DNA replication origin
cgccgccccagctccgcacacagcaggcacggccagggaccgggaccgtggcccagcgcctggaggcgctctccacgcgcatctttcccgatgccggggcgggaagccgagtggctttgtccggagatgccaggggatgtgggcaggggacgaagaggtttcccaactggccaaaccctggcttgaggaaagactgaggtggtcattgacccgtgggagcgccctggggcttcgagggaacggcagccgagcccgggagactggtgttgggtacccgcgggggccggcgggttccacgtgggtggaccccgagctgagggcagggtagggtcgcggatcgctgacctatgagctcccctactcccgcacaaggacacctgcacatggacccgggcttccacccgcttctggctgggttggcgccgggagcgcgcaggggagggacggcggcggagtgcggggtttggcgggtgaggtgggtgaggtgtggccgcgggggagggggcgaaggcactagaaggctgcggtcgcgctgtcgctgctgttcccaccgtcggcgcggggcgcggagggggcgaagaggtgcctgccagtcgcactgcggtctaggggtgaaaggaaaagggtccatgtaaaggagaaagggcaggcagagactcttgctggtgccagcaggcacggaaggatgtggccgcggggacttggagtttagagggcaacgctgggtgtcataatgccggagatgaccccgggtgcagaggcgattccagttgggtagagctacagagaacgtggcccgagaaggggagcttccttaaattagacatatcctgtgttgtcctaaacctagcatttaccctctcccaccccgctcccacaacctccagggtcctagcggagtcatttaagcgctcagtactaccagcttcattttaggtaaaaatcaagactaattctgcactttattaacctcctcgtaccca

SEQ ID NO: 6676 - DNA, 825 bp, Artificial sequence
  DNA replication origin
ttttccaggaggaagatggggtgcccatcgcgaatggggcgcgccgggccgcctggccgggcggtcacgtgtcccccctcccccgccactgcggcgggagttccaatcagagcgcgccagggggctcctcccgggcaggaaccacccggctcggcggcggagggtgggccgccgtcacctgaccgcccgcccccgccccccgcgagtaaggggcggtggtagcgtctgctcggttacaaatggcccctcccgcccggctcgcccgctcgctcgggctcggcgcggacccgcctgggcgtgctcctcccgccggctccaggcgtcccaccgccctgcccggcgccagcccgcggtcccagccactcctgagggcgcgccgggcacccagcgcgtaggctcgcccacggaggtcgacacggaagtctggaccgccgaggcgtgtggctcgtctaccggcaggtgagcgtgcaccgcgggcgtgggatgctgtggggacagtgcgggggacgtgtggggtcttcggatgcgaacgcgagtccgtgcgatgcccaggtcaagtttgcagagagagtctgcggtgtctgtctccttggcctcctcttgatgctcctgcgggttgggggctcggaccaaagcttctatttgggggaagggcttcaggacattcttgccttgagatacttgacaaaggttgaaaagacacatcaggtgggagcttgtagctgctgctgatggggtgagacaggtgcagtcgagtgtgcacgcatatgtgtgtggctcctgggtaagggtcagctcgagatggggagaagcctctgcgacggg

SEQ ID NO: 6677 - DNA, 860 bp, Artificial sequence
  DNA replication origin
aggctgccctacagctggaaagggacatctccactgcatgccagggccaggggcttgtgcaaactgggaagccaagcagttttgagctggtggatgatatgttcaaatagtgtttttaagacaatttattggccacagtaggtagaatgactagaatgagagactgcagtggagaagccatcaaggaggatgttaagagaatatcacaagagaatcaagagatggggtgtggatggggaggacatggaggggcagatgtgccccacattgtaaaccagccaggtgagctgcaggctgctcatcaggtttcagtgcctgcactgggttggaccagcgggtctaaggacttgaccccagctgcacaattctgaggctctctgacaaggagtggggggtgagttgatggcaggtagaaattggtgtcagggtgaaggaggggataaggggtgatggccctggaagggggtcaggggagcgacttatttcaggcattctgatgtgatgtgttggggggcatgcaaggagaactgtccatcagatccaacaggaagaggatgaaggggaaagaaatggccattggatgtatcttttagaagcccattggggccttcaagagtgtgaggtgtgtagggtagcagagttgtgtgtccgtggtcaggggcccaggaagagagatggcacacttacctgggtaatttgaggagggtttaataaagggattgtgtacaggggtgtaagcatggcagccagcctgcagggaccagaggagggagctataaccagaacctgagagaggcctgtgtagagaggggccctgcagagtgagcctagggtcccagtgtcctgaccccgctcccctc

SEQ ID NO: 6678 - DNA, 860 bp, Artificial sequence
  DNA replication origin
ctgatgtgatgtgttggggggcatgcaaggagaactgtccatcagatccaacaggaagaggatgaaggggaaagaaatggccattggatgtatcttttagaagcccattggggccttcaagagtgtgaggtgtgtagggtagcagagttgtgtgtccgtggtcaggggcccaggaagagagatggcacacttacctgggtaatttgaggagggtttaataaagggattgtgtacaggggtgtaagcatggcagccagcctgcagggaccagaggagggagctataaccagaacctgagagaggcctgtgtagagaggggccctgcagagtgagcctagggtcccagtgtcctgaccccgctcccctcttgccaggagttaagagggccattgatgaagtccctccctaccacgtgtcagcctcctggagctcagggcctggtgacaaagggaggagaggggattggggaggggcaagcagaagacaccgcaaccaagctgcagggtgagggagacagggatgatgtagcccagacacggcggcaggttaatggagatggtggaagcagaaaggggtgggtcctgggcagcccagcaggtgatggttggaggctaggagcacagctgtggtgcctgtaatgggaggtggggggaggggagtcgggggtgactggagagcagccaagatgggaaaggggtaggtttgagtcacaggatatgtcactggtcagtcctccttccagcagaaaaaaaaagaaaagaaaagaaaaagaaaactcataattgaagagaaaagaagaaatatacttgagatacccatgaagaccaagttataatgatgaagagtacacagtgagctcc

SEQ ID NO: 6679 - DNA, 976 bp, Artificial sequence
  DNA replication origin
ctgctcccggcccagggccaccctcagctggtcctgcaggagccggttctgctccagaaggtctgaggcctccttctggctctgctccagctccttcttgagcagagaggtcagctcgtgtgtggagagccggtcacccccatcttcagaagacaggtggacggggacgatgggcacctgcttctcttcccggagaggcgtggtctccacctgatgccaccgctgctcgatctccacgtggacgttatgcgtcttgaggtcgctcacaggcagccctgggctccggtccacctccatgcgcagggctgcatcctcagtgcctggcccgcctgtggcgtccagcatcccgaagtgcttgcggcgctcctcccgcctccgtgcacgctcccgctccagctccccaggctccgcctcagggcgcaggggctcgtgggtgtcagcaggccccacaccgcccacccgctcctgattcagggcctgctggatgggacggaactcagcccagtcaaaggtcttggagaggccctctcgcctccgctcccacgtgcggctcctcttctgctcagggtccggctcccccggctctgcctcttgcttctcagtaggcctcgggcaggtctcaaaagagcagctgctcttgtttttttcctctggcaaccagctggtcacatccggggcggtggtcgggtgcacatgcttcatgatggtctggatccagttccgccgaatcccagatgtcatggccgacggggtaaactcgccctcctttgtatgtatctggaagccatagtttctctgaactggatactctgtgacatcgtaacatgcagacaagtcaatttctccatccaagtcggctgcctcctcagccactgaatccctgtagtatctcaggctttgatcggcgaggacaaaccagtgtttcttccactggctgtcctcatactgcttagtcagccagcctttcttgaaattc

SEQ ID NO: 6680 - DNA, 1589 bp, Artificial sequence
  DNA replication origin
caggaatatttttcagaaatatgtgcaaaatatggaagctcatgatgaatgattccttgacctctaaaaaccaaaaagttctctaacccgtgtgatttatctgatgtcaaacaaagtctctggtgtatgatgtttgctacaactgaatggtttttcacatatcttaagaattggtcatttgcagcggccgcggggcgctgagggcagctgtggcggcgcggacgagccgggacggcggcgaccggagcttgagaggcgggccgcagcgggaagcagcgggcccgaggccgcgtccttgggcccacggcggctgggcggcggcggtgcgggcgggagctgggcgtcgcgcgcgctgtgaggcccgggcggctcaggagcctcggcgcgtgcagcgagccgcccgcagggaaggaggccggtcagggcctgtggcagggccggcgagggatgcggcggcggccgcgctgagcccctagcccgccgggagcgccaggccggccgggcctgcgccgccgccgccgccgcgccgaccatgtcggcagccaaggagaacccgtgcaggaaattccaggccaacatcttcaacaagagcaagtgtcagaactgcttccagccccgcgagtcgcatctcctcaacgacgaggacctgacgcaggcaaaacccatttatggcggttggctcctcctggctccagatgggaccgactttgacaactcagtgcaccggtctccgaaatggcagcgacagttcttcatcctttacgagcatggcctcttgcgctacgccctggatgagatgcccacgacccttcctcagggcaccatcaacatgaaccagtgcacagatgtggtggatggggagggccgcacgggccagaggttctccctgtgtattctgacgcctgagaaggagcatttcatccgggcggagaccaaggagatcgtcagtgggtggctggagatgctcatggtctatccccggaccaacaagcagaatcagaagaagaaatggaaagtggagccccccacaccgcaggagcctgggcctgccaaggtggctgttaccaccagcagcagcagcagcagcagcatccccagtgctgagaaagtccccaccaccaagtccacactctggcaggaagaaatgaggaccaaggaccagccagatggcagcagtctgagtccagctcagagtcccagccagagccagcctcctgctgccagctccctgcgggaacctgggctggagagcaaagaagaggagagcgccatgagtagcgaccgcatggactgtggccgcaaagtccggggggagagcagctacttctctctggagaagaccaaacacgacttgaaggccgaagaacagcagctgcccccgccgctctcccctcccagccccagcacccccaaccacaggaggtcccaggtgattgaaaagtttgaggccttggacattgagaaggcagagcacatggagaccaatgcagtggggccctcgccatccagtgacacacgccagggccgcagcgagaaaagggcgttccctagcaagcaggacttcaccaatgaagcccccccccaagctc

SEQ ID NO: 6681 - DNA, 1385 bp, Artificial sequence
  DNA replication origin
ttgtacaaactataaagaaattatccttatctgctatatgtgttgcaaatattttcccaggtttgtttgtcgtacttaattttgctgtttggatatttaaaatttaatatcaaatcaaggacttcccctcttcaagatgatatgttctcccatgatttctagtcctttgagatcggtccctttgaaattctttgtggataaggactgagtcaggtcttggccctgtctcccgccccttttcctctggcatccaggtggaggaaccaagcaggaaaaacacatagacgaagacagctcccaacttcctagagcagccgggcaagaagcttgcaccagggccttctgccctcgccggactcactgagccagtcaaaagcagggtgtccggggagcccagcgaagagtggagcaagctgagggaggaatgggcagtccgagaaagggagaacagaaggggctgtaccctcgcatggggtggggttggggctggtgggggcctggaggctagggacaggcccaaatctggggtgggtggtgtgttgggggaaggaaagagaaggaagggctggagcttgagatgtgggaggcgaaggaggaggctgcagctatggggatgggggaagaatcgggaatgtgcaaggagaagagcagcgatgtgcaggtgggcagcaagggtaggagtcaggatcagatgtggtggcctggaggaggagcccagttcagggaagagccagggaggaaaagggtggcttcctccaggaccctgggaccctcgtgctgcccactgctttctctggccttaggtgggcagggcagaaaccagaccatactcctgagggcaggtggggaagagggcattctaggctggccctgttcctcacctcccaacccaggacagatccctaagctctctaacgtaagtcctctcttgccattgtgaggctggggtgaaatgaggggtaggaaatggctttgtaatgattgaaaggctgcctggttgcacaggcctgctgtggccttctggaggacaggatagacatggataaaagaaaaccaagccttacctgattggaaaacattttactttcatagtgcagcgtggggtgcctgcccctgactgccttacacatgggcctcggccgtgcttccagagccttgttctgtggtggatgcttagcggatgataagcagaggccttgtctgaggaaggcgagacatgaagtcaccactcaggtcccaagggggagaatctgtttagaatagagcctaaggggccaccgtgctgaagaaggagccaaatagttctgtgaccccttgggccagaagaagctatggggagttttctctggaaataagagtctctggcagggtctggaccacacctg

SEQ ID NO: 6682 - DNA, 1012 bp, Artificial sequence
  DNA replication origin
ccgccccgtctgagaagtgaggagcccctccgcccggaagccgccccgtctgagaagtgaggagcgtcaccgccccgcagccaccccgtccaggaaggaggtgggggtcacccaccgccaggccagccgccccgtccaggagggaggtgggggggtcagccctccgcccggccagccgccccgtccgggaggtgaggggcgcctctgcccagccgcccctactgggaagtgaggagcccctctgcccggccagctgccccgtccgggagggaggtgggggggtcagccccccgcccggccagccgcccggtccgggagggaggtggggggggtcagcccgccacccggcctgccgccccatccgggagggaggtgggggggtcagcccccccgcccggccagccgccccgtccgggagggaggtgggggggtcagccccctgcccggccagccaccccgtccgggaggtgaggggcgcctctgcccggccgcccctactgggaggtgaggagcccctctgcccggccaccaccccgtctgggaggtgtgcccggcagctcattgagaacgggccatgatgacaatggcggttttgtggagtagaaagtggggagaggtggggaaaagagtgagaaatcggatggttgccgtgtttgtgtagtaggaggtagacatgggagacttttcattttgttctgtactaagaaaaattcttctgccttgggatcttgttgatctgtgaccttacccccaaccctgtgctctctgaaacatgtgctgtgtccactcagggttaaatggattaagggcggtgcaagatgtgctttgttaaacagatgcttgaaggcagcatgctcgttaagagtcatcaccactccctaatctcaagtacccagggacacaaacactgcggaaggccgcagggtcctccgcctaggaaaaccagagacctttgttcacttgtttatctgctgaccttccctccactattgtcctgtgaccctgccaaatc

SEQ ID NO: 6683 - DNA, 1255 bp, Artificial sequence
  DNA replication origin
gctgacccccccacctccctcccggacggggcggctggccgggcgggggggctgacccccccacctccctcccggatggggcggcaggccgggtggcgggctgaccccccccacctccctcccggaccgggcggctggccgggcggggggctgacccccccacctccctcccggacggggcagctggccgggcagaggggctcctcacttcccagtaggggcggctgggcagaggcgcccctcacctcccggacggggcggctggccgggcggagggctgacccccccacctccctcctggacggggcggctggcctggcggtgggtgacccccacctccttcctggacggggtggctgcggggcggtgacgctcctcacttctcagacggggcggcttccgggcggaggggctcctcacttctcagacggggcggtcgggcagagacgctcctctcctcccagacggggttgcggccgggtagaggcactcctcacatcccagacggggcggcggggcagaggcgctccccacatctcagacgatgagtggccgggcagagacgctcctcacttcctagatgggatggcggccgggaagaggcgctcctcacttcctagatgggatggcggctgggaagaggcgctcctcactttccagactgggcagccaggcagaggggctcctcacgtcccagatgatgggcggccaggcagagacgctcctcacttcccagacagggtggcggctgggcagaggctgcagtctcggcactttgggaggccaaggcaggcggctgggaggtggaggttgtagcgagctgagatcacgccactgcactccagcctgggcaacattgagcattgagtgaaccagactccgtctgcaatcccggcacctcgggaggccgaggctggcggatcactcgcggttaggagctggagaccagcccggccaacacagcgaaaccccgtctccaccaaaaaaatacgaaaaccagtcaggcgtggcggtgcgtgcctgcaattgcaggcactcggcaagctgaggcaggagaatcaggcagggaggttgcagtgagctgagatgtcagcagtaccgatgcagtttcttcctagcgtcgatggtctttacaatttggcatgtttttgcagtggctggtactggttgttcctttccatttttagtgctttctttaggagctcttgtaagtcaggcctgatggtgacaaaatctctcagcatttgcttgtctg

SEQ ID NO: 6684 - DNA, 1192 bp, Artificial sequence
  DNA replication origin
ttcccaaggggcctgccggagcgtggcgtcacaggagcgtcgcgtcacgtgaggctgccatccaatcgcggcgcgcgctctgccctgcgggcagcgggtgccaggcacggtgtcagcaggcaacatggccgagaggccggggcctccgggcggcgccgtgtccgcgaccgcgtaccctgacacccccgcggaattccctccgcacctccaggcgggtgcgatgcggcgccgcttttggggcgtattcaactgtctgtgcgccggcgcgttcggggccctggccgccgcctccgccaagctggccttcggcagcgaggtcgagcccggggcgctgttggtgctgctgctgcgggcgggcgggcggggcgccgctgggcggaggaggggcgctgcggggcccgcggggctcttggggtggggcgggggtgggcgcagggcgccgccgcaccctcgccggtctgtcccgccggggccccgggccgcgggcggcgctgcggtcagctggggtggcagagagtgtttcgcctctaatcacgccaaaccctcgtccagtgtaggtggtaagagacgtcggggactgaggcctcttcccttaccagggacctaaaaccttttctccggttgggctagttcgctctcggggaagaactacacctcctacatccaccctctacctctcattttaagtcccttgtgcctgagcatttctctccacgtgactcttaaggtgagaagcctcttgcccatccctttactccgtaattaacgggtgttgtgaccagatgaccagtctgccccactaccaggaaaattgggagtttgggatactgtaggcataagaggatactgacagagacgttctggatgttttcctgacgctgagaactcctaaacttgcatcctggcgtctgctaaggtgtatctctgcctctccctcccacgtcgtagaccagcctctgcttgctataggggtttcattgcgtctgcagcccaaggttagcctctgacctggacagtggtcactgattatttagggttaagcctatttagggctaatccagtagtagctgccatgcttcaggttagtatcccattgggtgtagttcatggggtaagtggtcgaaagtaaaatgaataactttgtatgggccgtgaagtttgttgtcaggaactagaccttcataacccttta

SEQ ID NO: 6685 - DNA, 1292 bp, Artificial sequence
  DNA replication origin
ggaggtagggggtgggagagagctgtttggcatgagagagagccatgggggtgggagagagccgtggcggggtggggggtatgggagatagccatggggggtgggagagagctgtggcgggggtgggtgggggagagagccgttggggttgggagagagccatggggggtggaagagagccatggggggtgggagagagccatggggggtgggagagagccatggggggtgggagagagccatgggggatgggagagagccgtggtgggggtgggtgggggagagagctgttggggttgggagagagccgtggggggtggaagagagccatgggaggtgggagagggccaaggggggtggaagagagccatggtggggagagagtcaaggggggtgggagagagccgtggggggtgggagagagccgaggggggtgggagagagccatggggggtaggagagagctgtggggggtgggagagagccgtggggtggatgggaaaggccatgggtgacctttgtggaagggcttctgcccaggactccaccccatctgtgcagcctaggcaggtcacccctctatggccaagttttacatgtatgaggctggcgtttgacccgaggttcacaaccctttctccagaacctttactgactactacccagctaaaagggtggtctagcagatggggcctggtgcagccacaagacgacaaatcattacctgaccaaagttccagggtttgcatttgatacttctggcagcccccacgtaatggcagcccgtgtcattgaggatgtactctttgcgctcgtcctcatcaggcatgaaaaccatgtcctctgaagcaagaccacacatccacagaggttatattctgccctgggacaggagcaggcttgccaatggggactgtctgtgctgggggagattcaaggtctttgtgaggggcttggaacacccaatgttgggggagggaggtaagcgggagggaaagtatccaaaagaacttcccgagccagctgtaggggacttcccctgggaaaatctggagcaatttaagcatgagttaagaaaaggatgaatcataaaccactgaaaagaaagagagagtccatgagtccatacagatggaagagagaggtagatgggagtgaagggaggactctgcctacaggaaatgccaggggctagcaggtaaacatggtggagagctggccttggaaaatcactgtgcaaccatcacagtgaagaatggttgaagcaagaaccatcagtggatgctaaatct

SEQ ID NO: 6686 - DNA, 951 bp, Artificial sequence
  DNA replication origin
gtgaagccggaggcagttccccagtcccagaccccggtggggctcccgccgccgccgccgctgccttcccctgcagtccccaacccgggacccggcctcgggcttcggcgatggctcctcggaacgaggcgccgcggctctctggactcggccagacaccgggcggcgcgcaggagaagcccatcgagctctcccggcagtggcggcggccgcggctgcaggagcggccgccgcgcaggttgatgacgcgctgacgcggggcgggggggggtgggacgtgggggcgcggtccagaggaggggacgcgcgcagatgacgtgcggctcgtggggcagctcggcagcatggcgtccgtgacgctgagcgaggcggagaaggtgtacatcgtgcatggcgtccaggtagctacagcagcggcgttgggtcggccgccgggttcagcctggccctgcgggtcgcggcctgccctgggtttgccagtgaggaggcagccgagctgcggcgactctccgtttaccttgtgattaaacggttctgctgccggcgtttgcaattcagagctggcaacgtggacgtttttaggactgttagcgcatttgcagttttgcgggtctataagattccgaacccgggcaggaagcttgggcagtctcggaggccttttcttagtgagagagcatcggccccagggccatccattcggcgttcgcgcacagatcttgtccgagcctcagttttctcttcgaggaaatgggagtttggaggtgggcttctggcctgcttttcctcacctcgtggttaggagggcgcatgcgaggtgaacgcactttgaaaatacaaattgccgtacaaataaagggggaagggtttttaaaaagcggctaggacgcctgtaatcccagcactttgggaggccgaggcgggcggatcacgaggtcaagagaccgtcct

SEQ ID NO: 6687 - DNA, 963 bp, Artificial sequence
  DNA replication origin
tttaggactgttagcgcatttgcagttttgcgggtctataagattccgaacccgggcaggaagcttgggcagtctcggaggccttttcttagtgagagagcatcggccccagggccatccattcggcgttcgcgcacagatcttgtccgagcctcagttttctcttcgaggaaatgggagtttggaggtgggcttctggcctgcttttcctcacctcgtggttaggagggcgcatgcgaggtgaacgcactttgaaaatacaaattgccgtacaaataaagggggaagggtttttaaaaagcggctaggacgcctgtaatcccagcactttgggaggccgaggcgggcggatcacgaggtcaagagaccgtcctgaccaacatggtgaaaccccgtctctgctaaaaatacaaaaaaatttagctgggcgtggtggcgcacgcctgtagtcccagctactcgggagactgaggcaggagaatcgcttgaacccgggaggcggaggttgcagtgagccgagtctcaaaaaaaaagcggctaggcagccgatagcctaagtgctgtttccattttgccaatgaagaactaagatccctaggcagctataacctaatgtcctctgtgttctatattaaatccctggttatgaccactccagaacgagggttgaaaaatgttggacctggtaacgagctaccctgtatcctcctccggctgtgtctccacttgttaacctacggtgtggtcctcctatcagagttcttcatcccatccttggcagagttctggcgacagctcctacctcttttcctcatgcctttcctctgtcagtaccaactgcaaagtcagtggtcccgtgatgtagccatcggattgaagcggccagctatcattgaagtcccacaacgtgagttaaggacatgtccatttaaaaatcgtgacctgccgttatcttctgggccc

SEQ ID NO: 6688 - DNA, 1157 bp, Artificial sequence
  DNA replication origin
tgagccagggcggagcgcagctgcgccgggcttgggcgcctggggccgccgctccccaccgtcgttttccccaccgaggccgaggcgtcccggagtcatggccggcctgaactgcggggtctctatcgcactgctaggggttctgctgctgggtgcggcgcgcctgccgcgcggggcaggtgagtgccgggctttggaggcggatggcgtggagtggtgagctagccagccagcggacgcccggcggagatgcggccgagggacgcagggtgcggagggtgcggagggtgcggagagagggcggggacggcgtagtcaaaatgcgcgggtggctccgggacccccggactgttcggttcctgcgcgcgccgcgtcgggcgcgtgggccttgccctcctggagtcaaccttgccctcggcacgtgagagtgtccccgatcggggagcctcccggtccgggaggatgagcccggtgctggccgagaaggcgggaaaaggagctcccggtagccgatcccaggcgacatgtccaaggtggcgcgccgtgcgccccagggtctttgccgggattcttgaaagcacccaggcagggtgtgggaagagatctttcctctccaggctcgccctctacctcctcgcctggtccagagagaaggtgcaaaaaaagtgctttcacgtccgcatttcccactagatcccctttttcccgtccgcacgctgcattccccctctcctaaagttgaagagcgttggtgcaaaaatgaaagcgcccggatttcttttagggggtcccagagaaagccgccaggcatctgcgccaccgcagagactggacattcccgcgcccctcgcactttttggcagtggactttgagggcaggaggctgttgttccggggatatgtgtgaatttcgagttgtttcggttgggggaagggaccaacacgtcccagtgacctgtgccagccaggaaatgccctgtgggccctggatgtattagaacgtagtaaataacctggtttcttcatgtaagaacttgatgtgaggctagtacaggtttcgcgagattagtacaggttttgtgttttttaaatagagctctccaggaagccatgtgggtttgattccccttgctgcatctagggtggatttgtgtttg

SEQ ID NO: 6689 - DNA, 1061 bp, Artificial sequence
  DNA replication origin
cgggggtggcgaccaagtgacccgctccgctcctccctgtgtccgtcctgtgtccgcgcgcgcgggtgcctttcccgccggagactcggccggtgtgcttcgtgctgtagttatcgttagttcctcttcccgagatggggccgccgagagaccccagcgcctttgaaaagcaaggtttgtgctgcgcttccagttccgaaaagcagatgtttaagcccttggactgagggtgggatcgcagctccgaagacggagaggagggaaatggggccctttcccctctattgcatccccctgcccgactccttccccgcacccacgtgccctagattcatggcagaaaatgaccaaatcctgtgtatttgttttatatatttaataactgttttaaatgaaagttttagtaaaaaaaatacaaaacaaaaagattaaattgctattgctgtagtaagagaagctctttgtatctgaacatagttgtatttgaaatttgtggttttttaatttatttaaaattggggggagggcatgggaaggatttaacaccgatatattgttaccgctgaaaatgaactttatgaaccttttccaagttgatctatccagtgacgtggcctggtgggcgtttcttcttgtacttatgtggttttttggcttttaatacagacattttcctccagagatgtgtatgtagctttttctttatttgatttgggaaagggaatcccagaattgcaagacgttaccctaaaacctgagcaagggaatctcggaaaagttagagaagggctacttctgtctcctttacctggctgtgagagatagatggaaacagtattatttgccctgatggcgattgtcttgcatctcaccacactgaccctcagttcccatccaccccccacctgtcacggtggcaaacacagttttatatgatttaactttttgctcattgttctaagctctgcaaaacacccaggcaagcatcaaaatggtaaaatcaatagttcctctgagctggatggctttcacgaaaatgactcactttaaaaggcatgtag

SEQ ID NO: 6690 - DNA, 805 bp, Artificial sequence
  DNA replication origin
gcgcagcaggacctgcgcctctgcgtgggctgcggctgggtgcgcggtcgccgcaccggccgcctccggcccgccgccgcccccagcgccgccgccgccaccgccggggcgcccaccgcgctgccagcctaccccgcggccgagccgcccgggccgctgtggctgcagggcgagccgctgcatttctgctgcctagacttcagcctggaggagctgcagggcgagccgggctggcggctgaaccgtaagcccattgagtccacgctggtggcctgcttcatgaccctggtcatcgtggtgtggagcgtggccgccctcatctggccggtgcccatcatcgccggcttcctgcccaacggcatggaacagcgccggaccaccgccagcaccaccgcagccacccccgccgcagtgcccgcagggaccaccgcagccgccgccgccgccgccgctgccgccgccgccgcggccgtcacttcgggggtggcgaccaagtgacccgctccgctcctccctgtgtccgtcctgtgtccgcgcgcgcgggtgcctttcccgccggagactcggccggtgtgcttcgtgctgtagttatcgttagttcctcttcccgagatggggccgccgagagaccccagcgcctttgaaaagcaaggtttgtgctgcgcttccagttccgaaaagcagatgtttaagcccttggactgagggtgggatcgcagctccgaagacggagaggagggaaatggggccctttcccctctattgcatccccctgcccgactccttccccgcacccacgtgccct

SEQ ID NO: 6691 - DNA, 2168 bp, Artificial sequence
  DNA replication origin
atggcctgcggcgggcgcctacgcgcgcgaggccggcggcggttgcatggcgagcgggcgacgggccggcgagctcacggtgggaccgcgggagccggcggccgggcgcagtgcgggcgcgccgggcgcctgccaagcccgcaggggcggcgcggaggcggtgacggcggctggctcggcgcggggatccctccagacccggttgcgtttggggttccccgccgcccccggcgccggggcccttgggctgccgcgctgctctgcggggccgggtgctatcccagagcaggattccccggctcggctccgcctcccgcgtgccccgccccgccccgccctccgctcgccaggctcggggactcaggggagggcggggttccacgcgccggggctgggagaggaatcgccggggcggggctgggtgcgggggcgcggcggagagcggatcgcccggggtgcgtgcgggcgggcggggaagcctgcggacgcgcccgggcgcccccgcgctccgggtgaatcgcgttctcagagggaggctccagggcccggagaccatccttttgtcaggcctgaggggagcttcgctgtctcgccttagtgctaccgaacctcctttgttttacagaaggggaaactgaggtcgagagaggggaaagggcctcgctaggccaactcatgagccagaaacaagtccgcgccactagctctttctgcctttttacggtgtctcttacctcaaatctgtagagtttggctgctttttaatggctccaacacagcagactcacttgggattctcctcgcagcaagcgaggaaaattccaagaactctgtggagtttcgagtggagagtgactggctggggggaatgtgagccctgaagctgtgccgcctgggggtcccgaggacacaggtcctgacaggtcgagtgagcgcgtgttcatgaaacagttgtaggttagaacccacgtcaaaggggcagttcatcccctttgggatattatacgggaggagggctaccaagaataacgtgtcaagagatcagatttatcacatttatattgaaaagcactttcttagtagttcggcccctcacacttggaaacaaacttcaacgacccttcatcattcccatcgttctttaggggacatttatgttgaattattatctattttattttagttggaagcccttgtactccatgagcaccaagtattcctgattcggagaggggaggggtggagggagcagagaaaggcctcaacaaaaccgccttccttctaaaccagctaatcctgagaggtctgccaagagtccagctacattgctaggcatcctggctgattacttttctggaagcttttgtccattgttttctaacaatgagtaaaatgggactgagaaagttgcaaaaacgcctcaaaataaagctccccaacttattccacctcttgccatctaagcaagccattattctgacttagccttggtttccccatctgagttggggggtgggtggtacctcctcacagggctgctgtgataatactcccaacccagtgtctatctgtccccagatgttcccacatggtggttgctgtgatgtggttactaacagtgctgcccaagttggctgcctagagtggtccttggtttctacagaaatggttcatttccccaaggggatgggactcccttttcgtttcagcctccatcacttttgtgcttggaagtggtgctaccagggagaacaatgtgaattttcctgcttttaataaaaatgacttctcctttcaacctttgcatatcaggaacagaagctgctcagtgatgtggcagaacagttttaatttaagccatgtgtctggtgaaccctgaagaacaggaatatcaagtgatcctgagggctgagggaggcctaatcttcaaggggtgcgttttgagccaggctgttgcctgtgactgcagatgacattctctggggtttcagtcagaggcagaggcttcctgagctttcctgagacactcctggctttgtctgtgcaggggggaaggcagcagcaaagggaaaagacaagagatctatttggggagccaagcagttccctgcaaagttgcgccactgaagctctgcatcctagcaacctgcattctgcccacttttcca

SEQ ID NO: 6692 - DNA, 1041 bp, Artificial sequence
  DNA replication origin
tgcaggcatggtgggctgcaggtcccgagtcctgccccacggggaggcctctaaggcctggcgagaaatcgagctcagcaccggtgggccggtactgctgggggacctggcgcaccctccgcagctgctggcccgggtgctaagcccttcactgccccggggccagtggggcaggccggacgctccgagtgcgggactgccaagcccacgcccacccagaactctagctggccgggaagtgccagtgcgcagccccggttcccgccggtgcctgtccctccacacctccccgcaggctgagggagccagctccggcctcgaccatcccaggaaggggctcccacagtgcagcggtgggctgaagggctcctcaagcgtgaccagagtgggcgccgaggccgaggaggcgccaagagcgagcgagggcttcgagggctgccggcacactgtcacctctcaatctgaggccagctctctgctcatgtgtgtgtgtgccaccatgcctggttgtaatacactaacctacattttctttaatgctttcactggttcaggtggggaagagctgtattctccttatgattcagttcagtgaatatttactctgatccctggagtatagcaataagtaagaaagggttcccatcttagaggaaacttcaatcagggagacgttggcatttagacagttaaaacatacacaagcaacgagaagtgtgtaaacggtacagaattaacacaaaagagctgtcagttaactagggctctagacaaggcttcagggcagagatgaaggctgagtggggttacaaatgtcaaaggtggggcagaaagcagagcaggaggggaagacacatcacaacagagcagtatgtgaaaaggcactgaggtatgaaaagcagcatgggatgcccagggaatgacaaggaggtctatgatttcgaagtacaaggtgtaatgtaaagaagagcagaaaatgagattggcgagaatcttggggaatactgaaaagccacataaaggcaatggggagttaggaaa

SEQ ID NO: 6693 - DNA, 1143 bp, Artificial sequence
  DNA replication origin
attctcataaggagcgtgcaacctacattcctcatgagggtagttcataataaggtttgtgcacccctctgagaatctaatgccactgctgatctgacaggatgtgaagctcaggcggtaatgccagtaatggggagtggctgtaaatacagatgaagtttcgctggcttgcctcctctcacctcctgctgtgccactcagttcctaacaggccacagaccagtactggtcagtagcccaggggttggggacccctggtttacagaatataaagcacattcatatatattatcttatttgttctctgtcacaactctggcagataggggttcactaattcacttattcgaccattaggtactactattaatatataccaggcacttggcatacagatatggtcaaatggagtgggaaacctaccacccaaccaaacaaaaaaaaacgcatgttaaccaacaaataaataattataaatagttatcagaactgagcaggaagtaaagagggtgctgaaaaagaacaacaggaaccactctgaggaggcctctaagaggaggtgacttcagcagggatgggaaagatgagccactcagtttaggggcaagctctgggcagacaccaggaagctcctgcagctagagtgcagggagggagggaagatccctagatctggcccagaaggctgcggcaaggggccgatttcaatttaattctggggtaagcactgaggatttaggtagagaagtgtctgttctagtatttgccttaggatcacgatggctgtagtgtgggaaatgaaacctctccaggatcgcctgggaactggtatagggagtcccgggccatgcgggggcgccaaggagtcaggcctggtgtccctgcagccgcgcggatccacttgcagatgggtccctctacgaataacgagcctactagggcacgtgcttttactgctgcactgaggacgtgaaatgcgcgcaggcacaacgagactttcttctttttcgctctttcagagggcccgggctcccatctacgctttgctggttacgttggcatgttgggcatttccccctctctgcctcagtctcccgacctgtcaaagaggacggtgggccagccatgggtgacacgcccgtg

SEQ ID NO: 6694 - DNA, 1021 bp, Artificial sequence
  DNA replication origin
ccactccctacactcaggccgatgctgggggacactcctggtttgtcaccccactttgggcttgccaaggagaggttgtcataatagtctccatgagtgaggcaggaaggatcctcacaggggcctggctggtggaaagcagacatctcagaagtcgccaggctctccctggaaccacagtcctggctgccatgcctcgtgccatgcaggtatggcctggatctctgctcctgcggtgggtacgggggctgcccagcagcgagggtggtgactgccccaggtgcccctgtcgaggcagcaagaggaggcttggcagcaccatccacagtcagcttgctgcccacaacttcccaacgggcctgtgggcccaggcggccccctccattgacagggcctctactccccctgggcagagtctcctcctgcaggagctgctgctgctgctgctggaggtggattttggccatcttggtggcgaacaccctgcgagtttcctcaaactcggggttgttgcctgcacccttgtccactcggaagagcccatccttagaggcctcatacatgttcaggtcctcgatgaatttactggcctccaggcccaggtcgtcatacttatccatgctgcagacaggtgtccgggcctagcccaggtgccgtgtgtgtgtgtgtgtgtgtgtgtgtgtgtgtgtgtgtgtgtgtgtgtgtgtgtgtgtgtgtgtgttgagggcagcggggagatgctggcgaagggtcggggctcaagtccggcccagtacaagtaaagacttccacctgcctagcgtgaagggcatgaccccaggatttaagagtccagccgaagttgagacctcaacgccagctggaccaagtttgcttccaactccctttcccctggagacgtccttgttggggtagctggtggcacttcgccgtcccgggcctgctcagcggagttcttttctcctcttcaaattataaaaggaaaaagaaaacagcaaaaaagtaaaatcacatcctcctt

SEQ ID NO: 6695 - DNA, 802 bp, Artificial sequence
  DNA replication origin
gtcagctccaagacggagctgggaagtggttcacagccgtgtccccagacaacgcctggcacacagtaggcgctcgataaatgacaggtgagtggccgagggaaggcgcccacttcgaggagttccgcagcctgaagaaaggccccgccgagccggaggaccccaggggactccgccctgtcctctgcaatctcgggtgccttcccggccgcgacgatcgggcggggtggggctcgccgtcatccatttaccagcctcgcctctcggacgggcgcgccgttaatgagattagcaatttaaaaaccagctagctgcgtcggcggcggaggcgcggggccacccccaagccgagccggggtgggacggcgcgcctggcgaccgcgcactgagactgccgtgccggacccccgagccggagccgagcgcgccgaggccggggccatggagaaagcgcggccgctgtgggccaactcgctacagttcgtgttcgcctgcatctcgtacgccgtgggcctgggcaacgtgtggcgattcccgtacctgtgccagatgtacggcggaggtgagtgcccaccgcgccccggccccagcccaactctgtgcgcgtccccgccgtgtgtgcgagccggggttagacccaagttacagaacggcacactgaggccgggaaagcgagcgtgatttgtccgaagttacagacccgggagtgttcccaggacacctcgttccggagccggagctctctcccaagccgccctcccaagccctcgggaacccctcgccccatcccgggggcggccaa

SEQ ID NO: 6696 - DNA, 1277 bp, Artificial sequence
  DNA replication origin
ccgcgattgtcatcctggcccgttctcaatgagctgttgggcacacctcccagacggggtggtggccgggcagaggggctcctcacttcccagtaggggcggccgggcagaggcgcccctcacctcccagacggggcggctggccgggcggggggctgactcccccacctccctcccggacggggcggctggtcgggcggggggctgaccccccccacctccctcccggacggggcggatggccgggcggggggctgaccccccacctccctcccagacggggcggctggccgggcagaggggctcctcacttcccagtaggggcagccgggcagaggcgcccctcacctcccggacggggcggctggccgggcggggggctgaccccccccacctccctcccagacggggcggctggccgggcgggggcctgacccccccacctccctcccggacggggtagctgccgggcggagacgctcctcacttcccagacggtgtggctgccgggcggagaggctcctcacttctcagacggggcggttgccaggcagagggtctcctcacttctcagatggggtggccgggcagagacgctcctcacctcccagacggggtcgcggcagggtagaggcgctcctcacatcccagacggggcggcggggcagaggcactccccacatctcagacgatgggcggccgggcagagacgctcttcacttcctagatgggatggtggccgggaagaggcgctcctcacttcctagatgggatggcggccggacggagacgctcctcacttcccagactgggcagccaggcagaggggctcctcacatcccagacgatgggcggccaggcagagacgctcctcacttcccagacggggtggcggccgggcagaggatgcaatctcggcactttgggaggccaaggcaggcggctgggaggtggaggttgtagcgagccgagatcatgccactgcactccagccggggcaccattgagcactgagtgaacgagactccgtctgcaatcccggcacctcgggaggccgaggctggcggatcactcgcggttaggagctggagaccggccaggccaacacagcgaaaccccgtctccaccaaaaaaaatacgaaaaccagtcaggtgtggcagcgcgtgcctgcaattgcaggcactcggcaagctgaggcaggagaatcaggcagggaggttgcagtgagccgagatggcagcagtacagtccagcttcggctcggcatgagagggag

SEQ ID NO: 6697 - DNA, 902 bp, Artificial sequence
  DNA replication origin
cccggcagccacaccgtctgggaagtgaggagcgtctccgcccggcagctaccccgtccgggagggaggtgggggggtcaggcccccgcccggccagccgccccgtctgggagggaggtggggggggtcagccccccgcccggccagccgccccgtccgggaggtgaggggcgcctctgcccggctgcccctactgggaagtgaggagcccctctgcccggccagccgccccgtctgggagggaggtggggggtcagccccccgcccggccatccgccccgtccgggagggaggtggggggggtcagccccccgcccgaccagccgccccgtccgggagggaggtgggggagtcagccccccgcccggccagccgccccgtctgggaggtgaggggcgcctctgcccggccgcccctactgggaagtgaggagcccctctgcccggccaccaccccgtctgggaggtgtgcccaacagctcattgagaacgggccaggatgacaatcgcggctttgtggaatagaaaggggggaaaggtggggaaaagattgagaaatcggatggttgccgtgtctgtgtagaaagaagtagacatgggagacttttcattttgttctatactaagaaaaattcttctgccttgggatcctgttgatctgtgaccttacccccaaccctgtgctctctgaaacatgtgctgtgtccactcagggttaaatggattaagggcggtgcaagatgtgctttgttaaacagatgcttgaaggcagcatgctctttaagagtcgtcaccactccctaatctcaagtacccagggacacaaacactgcggaaggccgcagggtcctctgcctaggaaaaccagagacctttgttcacttgtttatctgctgaccttcc

SEQ ID NO: 6698 - DNA, 1068 bp, Artificial sequence
  DNA replication origin
ctgtccctcgtccccactgcccagtctcagctgctcccccaggagcagccctcacctggctgctcagccctggacatgcttcaacttatccacagccttactcctctctgtacctcagccacccctctacgaaatgggggttcaaccagatcacagcatttttttctttttatttgtttgtatttctttctattcttttttttttttttttttagagatgggatctcactatgttgacgaggctggtctcaaactcctagcctcaagtgatcaacccatcttggcctcccaaagtgctgggattacaggcgtgagccactgcgcccagccaaagaggatcacagcttttcaaactacttaagtctcccctcaaaaggacaaacaggtggaagggggcttctctgggtgtggggatctggtccttagactccccaccccacaaagcagcctatgactccgggggtgagtcctccagactcaagttggcaactgttaatctgggagtcttccacatctgtggccccaaagggatctataaccctgggaaactgagtcacaccacccagaggaacgggcagaagttaagcatggctggtgaggcagtgggttgggggaaggccgcagtggaagctgggattctggttaggtgaccctgagggacccagctcccaggctagggagtctggggcttcatcctggaagtgatgaggagagtgtaagtgcaggggtgaggcagcgtgaatgtgcatgagtgtgcacgtttgcagggcaggaggaggaggtgctgaaccttaatatgaggaggatcctgcaggagtacccccctccccaacccctgtcccatccctaaccttcccccttccagtcaagggcatagcttcctcaccctctccctccctccagttcaaaggttccttagtgacaggctgtgcctaatgtacagatggggaaactgaggcccaggaacaatgggagggtccagagacccttgtgtagaacttgtgcagggctcagacccagacttctggctccagcccaccaggttcacctagctagatggctcagaga

SEQ ID NO: 6699 - DNA, 1181 bp, Artificial sequence
  DNA replication origin
cctcaggagaggcttggggcggcgggacggatcaataccgcgcgccagctcctcggtggcccgcccgtggcccccgcaactccagagcaacacccggaggcggggcggggcggggctgggcgaagggggcggggctggcagggggcgggactggcagggggcagggtgggggtgcgagcgaggagccgcacaggcagtcccggcgcggggcaaccacagcgctcaggtaagggcgcgacgaagggcgcgcgtctgcggacgggtgtctgcgctccacgcttagctcgtccaggtgggggctcccgcctcctcggctgctgcggtccccgcccagctccttggtcccggcggcagtcatcccccggccgtccgagtccctcgtaagataccccgctcacagcgtcgtcctccctgcctggctgctagcctgcttgggttcggggcagcgccccgggcctgacctgagccgtggtggcagggccacggggccccagccagcaggagagactgccaggaggaggtgacgccggctggttagggcggaagggcccgacccgggattccaggaggtggccttttcgcatgggagcggcatggcaaatgcctggcggccggaacaggagctcgggtctgggaaactccagcgactgagtgtgtgcctgggcagggagaggaagggaagctgggacatatgcgacagcagggaggggtgcttgtctaggacaagaggcttgtagccatggtggggccgaggaagggtgcagcggggagaggcgagcatgagactgagggatcaggtgtgacagttcagcgccccctccctggggcagtgcgtgtctctactctcccccactgggcaccagacaacgaaggggctgccacggcagcccatgaaaaagcctccacagcaggcagaacttccctgcctgttcagaccaggaaataccagagtgagtgagtgtcacgacaaggtgtgtcaggggcctaaggagccaggcctgggagaggacagggaaggccccagtgaccctgcccgggagggacctagcgtggacagaggccaggaatgcagaggagagaccaggtctggctactggttagagcgccacaggggcagccgctgactcacctgggcacgccgtgactggccagttctgtcctcaccctgccccaccccaccg

SEQ ID NO: 6700 - DNA, 1374 bp, Artificial sequence
  DNA replication origin
gaggccatatgctcctcctgaggccatggccactctccagcccttgcctccctcctaagccccagggatgcctggtggcccacacccatgctctaggggacccatagatcctctaaaccgtgctcatccctgaaggagccccttgaacccaccatacccctcctctcagagtcccacataaccccgagaaggaggcgcaggtaagatatttcaccagcaggggcactacgttacagagaggccacacactgcctgtgatcacacagcaagaggaaagcagcacaaggccccataccagctcttccagaatgtaccgctacctcccactgccccacaggcacaaaggatccccacagggaagaccttggaggcctgtttagaacctgaagcctcagttcattccacctgctggggcggtggctctgccaggctgtgctgtagactcagggagccaagtgccccagcagacagtcccgcaggccaacagggctgtgaaggggagtgggggccaaggtccggagcctgggggtggagggcatggggaggggaggctttcccagagggccagagggacacctcaccagaagcctccttgaggtagcccccacccaccaacacagcaacacctctagcaggcagggaccagaggagcaaggcctttgggagtggagcccctcaggcagcagggggtgcagaagggggcaagaaaacaaggctggaaaaggggaggccagagctagggcgggctttggcaatgtggggagggatggagaagcaggaaggggcggctctgcaggattgggacccaggaggagagcaatgtggggcaaaagggtgaggtcactgggacctgcagtcactcagacaagggtcccaggctggaaaccctccaaggggtgatgtgcagcttggcagacagtaaactcccacctcgcaacaacccaagggagccaggggatgagcttggcaggccccaggcccctacttacctccactgggggtctcttcagcctggcaggttgggggatgcctcccacctcctcagtagggggctgagtagggggctggtgggccaccctttctgctcttccacggccgccttggaccctgagcctccccctcactggaacctgagtgccactgagagcaatgggtgactaacctggtggccagagggggaatcaggctgctgacggggggcttctttgttacaggtttgaactaagttccctcccgctcccggggggtctgtcccagataagtcttcagccaccctttccaaggtctcaggccttcgcacaaagcacacgcggccggcttcatgctctactaggcctgttgagactcaggagtggggaggaaaggggacttccc

SEQ ID NO: 6701 - DNA, 921 bp, Artificial sequence
  DNA replication origin
cggccgccggtcactgcccctgccagccggcgctcggtggccacgggctttggccacgggtagtcagcgagcatcatttattcatcctcggtgtcaggttcccgcgccgcccgcccccgccatcgctgcggtggagggcccgccccctccttcccgggagatcgggccgcaggctccccctccctgcccccaccttccgcatccccagggacactgaggtgggggtgggcgggagggaggacaggctggggccaggtccctaatcaacaggtccccctcccttctgcaaatgggcctcagtttctccatctgggacaagggggtgggactggaatctgctgatctaggaggcccttcccattctgtcatgctggatttgaaaaatatactggatttgagtttggggggggggcagagcgggcaggttgccatggtgacaggcgctcagggatgtcctgggctttctggcttggcttcctgcccagaggcggctctggtcaccctggacaccagagctggagagcaggggatggtatggtcagagctgccagccggcagtgttatggagggttccagaagaagccagcatcttcagccccacaggacagaagtgggctgtccctggaagggctggaggaccattttctgaccctggctgccctcaatctctgccccagcctgaacactgactctgacttcagtctaagccaggaccctgacctcatgctgaagttgacccacactgcactctggccctgaccccatgttgagccttgacaactgagggacagagggaggttctgaggagatgtagagacctgggtgggggctgaagacttaggaagaggagtggggaggcctggagttggtagactccccttccctccttttcttccttccttctattcttatttatctcct

SEQ ID NO: 6702 - DNA, 2476 bp, Artificial sequence
  DNA replication origin
ttttcaaatccagcatgacagaatgggaagggcctcctagatcagcagattccagtcccacccccttgtcccagatggagaaactgaggcccatttgcagaagggagggggacctgttgattagggacctggccccagcctgtcctccctcccgcccacccccacctcagtgtccctggggatgcggaaggtgggggcagggagggggagcctgcggcccgatctcccgggaaggagggggcgggccctccaccgcagcgatggcgggggcgggcggcgcgggaacctgacaccgaggatgaataaatgatgctcgctgactacccgtggccaaagcccgtggccaccgagcgccggctggcaggggcagtgaccggcggccggcccgttcgtccctgggctccgcaagcggcgcggtggcacgaagatggcggggtggccgggcgcgggtcccctctgcgtgctgggcggcgccgcactcggggtgtgcctcgcgggggttgccgggcagctggtggaggtgaggccgcggcacggagggactggggaggctgtcaccctccaggcagggggctgggggagaggggacgcctttttgatccggagcttgtttgatcccttactcttgccctgagagatccagtctcccgggcgatgcagccctgccccaagccctgccaggctgtgagagagactcagccccactcttagggtccctggtctgatggaagggcacagtacccgatttctggaacattagtctgacgggggagactcaccttgaccttagggattcccagcctgacttggggacacagccctgcccagactgatgggggatactgggcccccatcctccagcctttggtctcactggcagggaggtgcacagccctgggtttcctggacctctagtctgatggaacagaccctgaatttagggtcttctggaggcaacagcctctatctccagagatgttccagggacccctgtctaatggagggggagacatagccttaagatggagacgagggcattccaagttggagggtgggggcagcaggatgaggagaccctttacagagaagctatgtggagcactaggtccagaggggcaggcagggcaggacctagggactgggaagtctgacttggtcctggtgataaccgggagctttagaaggtttctgctcagggacaagtcatgatgagttctggtttggaaggagggtaaattgggagcaggcacacagtgggagaggtgggaggagctgctgagatagcacagaagctgggggagagccctggtggagagcctggctggggccaggaagggtggggccatctgtagcctccctaacccccttgtaccccactcctgcggagcctgaaaggggagccaacgagggagctggcagaccagacctagagttctgaattgtgaggccagagggagaaggcccaggagccagggccagggaggagcaggggatggaggctgtgcaggcaggggcggaccagagggagcaggaaaacagaaatgcaagaggcagtgagaggtgcccagggaagtcctgaggggtgggggcttggggacagtgtgggatagagaggacagagccatggggaagttgttatggggggacacagccctgaactggagggtttgatggggacatagggacagagccctggacccagatgtagcctgtccctgctgttgcccagagggcatgaccacaaggctgggctagagtcaggtgtcagctccagtgtccctgtaaggggagctatgctggcttgagccctgtgaggcgtacttgggcccctcacaggctgccctgaggcctgggtacagaaactgagctggcctaggtgcagacagaaagctgggggtgggggttaagtcagttctcagccaaggactcttctccctcacccccaggaactcatcttttcccagttctagggaaattgcatttggaggccatctgcctgacatctgcctacagtctgagcaaggccttagctcttccctcacggaagcaccaaagacatgggcagggctgggggccatgtcaccacccaccttagccctgtgtgggtcaccatcaccctccatcagcccgtgaggctctgaaggaggtggggacctccatgctccagaaatcagaccccagcagggcccaacatgaggagaagaccagctgtcatctgctgccgtccacccaagacccctatcagtaagagtaggcccagctccacccacatcagggctggggcaagaatgtgtaggaagtgagctgccttggctcagaacctgagaactttgccatggccctcagagtcttccagtcatacaaccagccgggccaacacattgagccttagaattagggcagctgccaccatcagggccctaaccctaatggcacagacatgtccctgaccacacccacatgcatgccaaccaca

SEQ ID NO: 6703 - DNA, 948 bp, Artificial sequence
  DNA replication origin
atgggtatgggctagaacgagggcagaggtgtgtggctaaagcagaaaaggtgggacgtggggaacagtggagagaggacgagtgaggctggcggtagtgggcagcggtgagtggctgcgcctaaatggggccctgtcccacaggcatgtggcctcagttccggaccattcaggagaaggaagtcatcatcctgaacaacaaagagtgtgacaatttctaccacaacttcaccaaaatccccactctggttcagatcatcaagtcccagatgatgtgtgcggaggacacccacagggagaagttctgctatgtgagcggcctctcctcgctcactccccttcaggggcacctgggggagaggcatctggggagggagagcggaacggtggaggttgggtaggggaagggaagggggtgggcaggactctgggatatggggatggaggatgtcgggggagactgggaggaaacagatgggggctgggaatggggatggctgttggaggtgagaggagtggggggtccgtggggagatggagggtgggtgttaagaggtgggggatgaaaccctttgaggaagagctcctgggtctggagcacttctcacctatgttggcactgggggactgtggaggtgtggtgtgaggacatcccgcctgtcctggagctgggtcgtctctggccttgcctggcctccctgacccttactcccccaacccttcccacaggagctaactggagagcccttggtctgctccatggagggcacgtggtacctggtgggattggtgagctggggtgcaggctgccagaagagcgaggccccacccatctacctacaggtctcctcctaccaacactggatctgggactgcctcaacgggcaggccctggccctgccagccccatccaggaccctgctcctggcactcccactgcccctcagc

SEQ ID NO: 6704 - DNA, 1687 bp, Artificial sequence
  DNA replication origin
atgagcctgctttttctcaggccttgcccactgcctgagatttgtccccgggccggggtggggggtgcagctgtggaggtcacagtccacaacccctccctggtcggcgcagcctcgaggtgttgtgggaccatcccctcccgggccggtgcccgcccctcacacaggctgcctttgctagcccccacccgcgactgccggactggggctgtcccctccacttcctctccccgcagctcccgggacaccctgaccaggtactgcagctcaagcctcccgcctcagggccctggccaggccctgcccactcttgttccttttggaacaaacactccagtttctactgggaaagcagcgggggcctgaccaccgcctgtttttaataaggagctggtatttccccgaaatcgccagctgtggctgacctcatggggatgacggctggccctgggccagggggcaggagccggctcccgtgtgagcccctggcctgcagacagacgcgcagggaggaggcgctggcttctcgtcccatctcagccgttggctcatccaaaactctgtctatctgtttgactgctgtgttgtgtaccctgggtcgataccctgccagcccccgcaccccagccctgcccagggccctgggttcaagccccgctttactcctgcctcgtgtgatcttggcaaattgcttaacctctcgccactcatttcctccactgtagggttgagactgttgtggggattagagagggaacactgtggggagggtcggtggattccaggaacgtttctagacggcagggggaggggggtctcaggagctgaggcgccagagatcaggccctgggcttcctgggtggggcattgtgggaggagggggagcttgggaaattgtcagccttgggggagacagggacagcacagaggttccagcagaatgagagtgcttcgtaagggatcagcacggtggggggtcggggggaggctgtgggcaccaaaaggttggggagggtgtcagcaaaggctttctagaggatgggcgcttaggtggaatgtggcggcgttggtggggtggggggtctcagggtgggagcagaatcctaaggcaacagcctggacgctggaacaagtgaaggggtggaatggggggaacagaatggaggagagtagaagcaggcagtcgggttcaggatatcttagggggactctgcctgaggcactgtggagagtccagaagtcccatctgtaattgagggacaaagattgagggaaccagagggggacacaggctccagtagcagagagggagaccagcagccccagaaggagcagggaaaccaggagaggagatgcagtagacagggaggcaggcggctggatacagatagtggctgggagattttgcttgctctggtgcctgcacctttcagatgcttgaggctcctcgtgaaggtaacaactataactacaataaggaataagggtgactaatatttattgagcacttagtgtgtgctaggcagtgcactaagcacttacaggtatcaatgtgttctatctccacttcatttctatttatttatttctttatttttcctaactgctaggctatataggatctatttatttattaattcactcactgattcattcattcatttaacagatgtttatcgagtgccag

SEQ ID NO: 6705 - DNA, 1777 bp, Artificial sequence
  DNA replication origin
ctccagcctaggtgacagggtgagtgagactccatctccaaaaaaaaaaaaaagacctccccttcccagagtggcccagggaatagtaggtaagtaactgagccatcagcgaaagggcaaattctcagccagggagccggagagtggtggaggcaggtagtagggctgttccttgggctctccagcagggattcttgcctcccagcctctgccgggttggggcaagactcccactttatttttaagaagtctggcctggaacttggagctccttgaaatattctcccctacagtcccttctctcccccacccactttaatgaaaaccattgtttttcaagcacatgttaattaaaaagcaaacatgctttgctaagtaatttggaagctctggttctgcaaaccatagccattccagttaaataacatccctcacccagcttgccccagtgttttgggagctgaagacccccgtgggtactgcagatgcactttacagtttaggcaccctgtggtggagtggtcaggatagggtgtcctctctatctcacaggtggggacatggaggacccaagctcctggcaagttcagccccaccagccctctgcaatcctgtgctttgggcccaggggaaatagctggtaaggaggggtgaaagactcatgtgtgccatcctgcaggcaaggtcactgtctcagagccatggcccagctgtagggtgaagggaggaggatgggagcatgacagccctgtgagcccaggcgggaaggctggcaggtgctgcatggcctgggctacctcccatagttcccagtgcagctgggtgacatctacccgaagctgggatagtaggtccctgaggcgagtgcccaaggtgaggactggcctgatgggtggagggaaccttggatgctccgaagcacccactccagcccagctccccccccggtgtctggtgatcaatatcactacagtgcccatatccccaccttggctccggtccttgggagtgctggggttctgaggcccttcacacagggcggtaccctcagggcccatcacaaggtgctggggccgctaaggttcaaggttcagtgacctccagccttcctgttcccagcccctggcagagggaaggggcatctcaccaagaagccttttcaagccttgccactgcctcacagcctgctggtgggctctcccaactaggattccaagagcaggagtgctttccttgggtgtgcttccaggtgtgagcctgtgtccaggtatgtgttcctgtttccgtgtgggctgtgagtgtctctgttagccaataccctggtgtgaggggttcctttctccttcctgaaggagaagatgcctgggctccttggggggagtgtgaggggggcagtgaccaggaaaagtatgtgtgtgtctggggaggtgggccctgggccctgccagacacctgggctggttggtccagagcttctgcatccactcagggacacaggccccgggtgggagccaagccccagtttgtgcactggccagccctccttgtcctctgccctcagctgctgatttttgtaaaacgaggagtgtgtgttgggaggtgtgcaacttatcacacgcacagtgttttcccttcgggacacacacaccctcgcaagccaccacacacggtgacaccagcgacgcatgctggtggccggctcccagggctcagcctccctcggcgacgcgccagtgatacacactcccgcctctcccactcccacccacatcccggg

SEQ ID NO: 6706 - DNA, 869 bp, Artificial sequence
  DNA replication origin
tgccgacacacgcaacaatgcgggtgaaccttgaggatgttacactaagtgaaataagccagtcacacacacacaaaatactgtagagtccacttatctaagggtcctagagtagtcaaattcatacagacagaaagtaaatggtaggggctgggggaggggagatggggagttattgctaaagggaaaagggagagatgaagtgtcttaggctgggctcccccagaagtaatccctgagacaaggaccagatcaaggactacctgcaagtagtctccctggaaggtgattccagggagcgtgggagaggggtggggtggggggcgtgggaagaaagaaaatccccccaaaggggtgcatgcagagcagatgacactatgagcaaaggggtctcagccctgctgggaacctccgggagatggtggtattgtctcactgagggatgaggaaggcagactatctacagactcccatctgtcactggctgggcagggcccctaggttggctggaacattcctatgcggcacctcagcatctgcttcaggaggctgtgtgggcatctgagggaagacgtcctggcagagggcacagaggcctggtgatgggagcagaaagtgccatggagagggacaggtcctgagtcagagaggtcagggagggctgcagcatgcgccctggggagatgttttctcagtgccaccctggccgctgtgtggagaagagactgtgggggccacaggggcagcagggaggccagtgaggagggtccaggagagaggagatgcacacttggcccagggtactggtgggggtgatggtcgtaagtggtcagattccagggctgttttgaaaacatcctcagcaacat

SEQ ID NO: 6707 - DNA, 642 bp, Artificial sequence
  DNA replication origin
ctgaccccttgccctgactccgatggtgaaactgagccactctgccagcagtgtggctctaggtcagaggtagaggctttgtggggatagccccgggctcctcagcagaagacagcgtgcaatccctgcgtggtggagggaggtgcacacacctgcagacccctgccccattctatcccctgctctggggccagggcccctcccctgagtcctggagcctgatgaggatagagaggggaggcttcctcgaggagatgattcacgcaggcttgatgtgaagagagagcaaagccctgcagagaggctgggggccccagatatagaaatgtgggggagatcaaaggctttgagtggggagtgggccacactggatgggaaacaccttgcaggccaggacccaggagtcagggcagctccagggggcgccttttcatgacctcgtgtggatgcgcgtgtctgcgtggcaggggggatgtggtggggtgagagcaacttggaaggcctgcgtggatcagactgtccaaggggctgtgttgtgtggggagtcctgagtgtgtgtgagagtgagtgtgtgtggatgggggctgctggcagtgtgtgggagagagtgcatgttaggggtgagtgtgtcgcaggagtctg

SEQ ID NO: 6708 - DNA, 1206 bp, Artificial sequence
  DNA replication origin
gcgaatcccctgaggaggctgcccggtacccccgcgcgcccccggccgcgacgctgtcagtccactgggctcccgttcgggccgggtcggggtccctggggaggccgctcggctgccagccccgagcccggcttggctgctgccgccctcccccacgtccagccccaccctcgcctcgtcccctgccctcagtcccatcccaggcctgtcgttcctctcggccctaggccagccccgacccccgcccaggtctgcagccacacatcccgctccctccctgcccagcgtctcttcgggtccgggtctccgagtctcgacccattcagctgctggccgggcctctccagcttgcccagccccaaccccggaggctcgaggctgccagacctggggctcaatccagacacccactctcaggcttcacctccctcccccgttcccacccccactcccaaaagctatcggccggctcggaccgggccgcctgggaccctcgacttaggggaaggcaaggaggagtccgcgggggttggggctgaacggggcgggatttctgtgtttggctggggagggcacgctggagctctaagaggaggggcccttcgaccccaaacctaccacctcccggtaccaagtggggaaactgaggcagagggaggggctggggatgcctggagcgcagggctttaaggatcgcggaggaagcgaatgcatgaggccctgggaaatgagtctgggctaagcaacagcctgtgcttgcccgcttaccagttgtgtgtcctggacactaccactcttcggctgtctggacctcagtttcctcatctgcaaaatggagaggttggccagctgattcaagggcaatgttaactttactgtttagtttccacgagggtgggcatcctggcccatgggctccaggggctctcaagactcagcctgtggatattgagctcctcggagcctgcaaacctgccctccaaccctcagtgcaaatctgtcaagcccaagtcctaaggcctaggatccagctgcagccacccttctgctggctcaagcccatccagcttccagactgcactcccaggtgcattccccatgtatttcttctgctgctactttcttcttctttcttctccttctccttcttcttcttcttcaagacaaagtctcactttgtcacccaggctggagtccagtggcatg

SEQ ID NO: 6709 - DNA, 765 bp, Artificial sequence
  DNA replication origin
atcccgccccgttcagccccaacccccgcggactcctccttgccttcccctaagtcgagggtcccaggcggcccggtccgagccggccgatagcttttgggagtgggggtgggaacgggggagggaggtgaagcctgagagtgggtgtctggattgagccccaggtctggcagcctcgagcctccggggttggggctgggcaagctggagaggcccggccagcagctgaatgggtcgagactcggagacccggacccgaagagacgctgggcagggagggagcgggatgtgtggctgcagacctgggcgggggtcggggctggcctagggccgagaggaacgacaggcctgggatgggactgagggcaggggacgaggcgagggtggggctggacgtgggggagggcggcagcagccaagccgggctcggggctggcagccgagcggcctccccagggaccccgacccggcccgaacgggagcccagtggactgacagcgtcgcggccgggggcgcgcgggggtaccgggcagcctcctcaggggattcgcccatgatgaaagagggctcgcttctcggctcagggtctctattcgccagcgggggccggatgatcaagggaaaaaaaatttaaaagcccgtgctttccagaagagaatgaagcggcggcggcgtcccgggttccctgctcgggtctcgatgttacagctgcccccgccccgtctccccagcactcacatcccgccgccgtaagactccgggcct

SEQ ID NO: 6710 - DNA, 881 bp, Artificial sequence
  DNA replication origin
ctcctctcggcctctccacactcccgcgtcggcggctgcggagggggtgggggcgggagaggcccgggagggcgcgggggagggaagaggcgcccggccggggagaaggggagcggcagacgccgaggcgagggatgcgcgcggcgggcggtggctccgagcggcggccgggcggggggcgctggaggccaggccggccagcggggggtatcccgagagctccatgaagtccccccggggccgcggacggggcgctggcttggggaggctgtcgggggggccccgacatccatggcaaggcgggggccgcggcggcgcgctcggagtaagtcggggctggggacccgcgccgaggggaagtggccggagtcggggaggagcgactccgggcctggccggagcagccaggctgctctgtctcggtgtcagtcggcggcgcctcctcggaacccgggggagtcgccagccccgcgccgctcggctcggtggcttttttggaaacttgcaaatgttttcgtagagagaaaagggggagggagggagcgagggagtgaccgaaacggagcttggggccgctggaagaactgaggccaaggccgggggagctagagacggactgacagacaggcagaccgacagagcgtcggggccgctgcgcgcccgagccgcacaggcgcaagcggggctctggccaaggatggggaaggggtgcgggaggcggctgccgagggtctgggatctcaggaggccgaacggccgggggctggcggccggaacacctaagggctcagtgtggctgcaaagttgagatcgcaccccctaactgcacgccccgcgcggctcagaacgcgccccctgcccggccctgactccctacgccg

SEQ ID NO: 6711 - DNA, 1568 bp, Artificial sequence
  DNA replication origin
aaagaaagaaagaaagaaaaggcggcgcgggaggggggcggggggcgggccgggggcggggggcccggccatatggatgtgatttcttcgctccgaggcagacgggccgctccgcagcgctcggcgcccgcccgccgcccgcccggcctccggctctccctccctccctcctgtccctccctccctccctcctttgcgctgctcgctcgctcgctcgctcgctcgccctcagcgcatgggccccgcgccgggccccggggcctcgggccgccgggacgccggggtcccataggccggggcgtgggcggggcggccagcctgacgcagctctgcaccccctaccaccaccagggccggcggcggcggctgccccgagggacgcggccctaggcggtggcgatggggaccgcccggatcgcacccggcctggcgctcctgctctgctgccccgtgctcagctccgcgtacgcgctggtgagtcccccgccgccaacactccgggacaggctgcgggcttaccctagggtccgcgggataggtctaaggcacgcagtcttgagttcccccagtagttcgaactttgggtgagagtcccctctgatccaggatcctgggtgcctgctgtctctgggatgtctggactgtgggttccagctgcctgaagcctccctatttctgaagcctcgtttggggtcccaaatctggcaatttgtggttgagttttcaccatcctctgcttctgtgagcaccatggctgtttctccctggaagatgacagtgtgacccaacagaaggctgggctttggccctgctgcgtactcccacagactttgctttggggacctctgttttctgcaagttttgttgcagtcccggacacagggaatgtaggtctgaggtcagaatcatccaggcagggggtaggatttaggggccccctccagccctcacacacacacatgcacacgtctggcttcacccagggtagaagctgtttccccaaggaggtgggtgtggtgtggcatggagaagggatggagttccctgaaggagactgacctcacagtgcacccctgtaggagaagcacagcatatcctgtggggaagtgaggagacccctggaaagactgtcactccctgagagtgacctaaaagcagaatggtagggaaggctagagggagaggagagacagagacaaagccgggtggggaggagagatccccccagctggaggggtggacagactaagaacagcaaaaaaaatagggagacaggcaaaggcagaaagctggagacacagagtgggcagcacctcctcctcctgggccagggtctggggcccacttgctgggaagggggctgtcccagcccctcagtcctattccacagcaaccccatcccctgggacgagcccgttcctggggaggctgtctgcctgtgcgcctaacttcaaagcctcttctccctgctccccagtgggggtatctgcctgctagagagcagggcagtcaggcagcctcctcctcctgaccagcagcagctccctacacggggcagagctccaggc

SEQ ID NO: 6712 - DNA, 1425 bp, Artificial sequence
  DNA replication origin
aggtagagtggctagagggtactgggttgaggtaggagccttgatggcagcgcggggcgtgtgggacactcggagcccttggcagcagggtcggcggcagagctgagggttgcgagggaccctataagacgggtttgagtggctgaagccagtggcgctggcaggaggcgggcagggcgagggccgggctggagcggggcggggcggggccccacgaggccagtggcggcaccgggagcgggcgggcagaggggtactcacgtagccggcagcggcggtggcaggcggcgggggcgcctgggcgatggcgcgcagctcctcctcggtgaggcgctcagcctcatcaagcgtggcgccagagtagagcacagcgtccttgacgaagatgctcacggcgcgcagcatgaaggacaggaacaggtgcatgtggatgtagttgcgcgtgcagtgcagccgcctgcggggcgcgcgacatgaccgtgggtgggggcacggggacgcgcggtgggtggacaggaagctgggttgtgcgccgtaggtagggacacccgccgggggtgatgggtgcagggagggggtcgcatcagacctcggccaccgccccccctccaccatgtcccgccgcctctcgccccgccccgcccacctaaagtaggccaggatgagcacagctacggtgagggacgccagggacacggagtagcccacggtgtaaatcatgcccaggcggtcaaacacctcctgtgcggggcggggggagacacagtcagagccctgggacccagggagagcatcagggtaagagcaagaggccagggtaaggttgctggaggagtcaaggtcaggggtcagggctgggtcaggggtcacccgtggggtgggagtgaatttatcctggtcaggttggggaggagaaaggctcgcacccgttcacgagtctcattggtgagaaatttgacacactcgctgtagttggcccacgtcctgttgtgcccaggcaccagctcccagctgccattgcggtcacagcgtcggtaggcatggcctgcaggtccatgggaggtcagggccggcagggaggtctcgaggcactgaacccctagctccaagtctcagcctccttgtaatccccaccccttccagcaggcctcacctttgtgattgaagtcataaatgtagtccggacagggcacagccaccacctcacctggtgcccccagcggccagcacaggatgtggtcccattccggcagacaggggcgccctgtgcccagagacagacagggtaggggataccaagggagagtcaaggccatgattagtgacccagaaggatgaatacatctgtggtttgtttgtttttgtttttgttttgttttgtttttttgagacggagtttcgcttttgttgctcaggctggagggc

SEQ ID NO: 6713 - DNA, 937 bp, Artificial sequence
  DNA replication origin
ccgcaggcctgctgaggctggcaatggtgtgggcagccccgcgccccatcccagcaaggggactggtggggtaatagatgctggcctagtccatggggctcagggtagagggagggtcccggatcccaattccagccccaggctgacctctgacccagtatcctactctgatcctgagctgaatcttggcctgatggttcctcctttccctctcctgggccgagcctcaattcaggtgaatctaacctcaggtgaacctgatccctggccaagccctgctgtttcctgagcctggaatagggtcaggatcacagaagggcggcaggcctctctcctgctgttccacttggggcgggatgtgctgtgtgggcgcctccccccaggggctgccctctccctgtcacccacggtcccacccctgccggcacctcgctacccgctgtgcccgcgtaccccagccgaagactgtgaagccccacaggtacttcttctctgagaagaaggccatgaagatgaggctgtgcaggtacagcccctccaccagaatccagtagtagttggtggccaggaagtaaaggaagaaggtcacagccaccctgcagcccgcctaagagaccagctggtgttagtcagagggcagggcctgcctccgggaagtcagggctgggctggggggctggggcggcaggagaggacaagtggtgccggccaaacaggccaggaaggggcaggcttcgtttggggggctctctcagggggatgcggtgtcaggggcaggaggcaaagtgaagaggtagagtggctagagggtactgggttgaggtaggagccttgatggcagcgcggggcgtgtgggacactcggagcccttggcagcagggtcggcggcagagctgagggttgcgagggaccctataagacgggtttgagtggctga

SEQ ID NO: 6714 - DNA, 853 bp, Artificial sequence
  DNA replication origin
gggtatgacctggctttacggtaagaaaaagagctgtgacattcctgtgccccaggattctatgcactcccaatctgcatgtcgccagtccactaggacacctcctagccccagagcctgcatctgttcctgggactgggcccaggtctccccaactctggggcttgtcatggtgaggtcagggtcaggatgtatgtcgaggggcagggaggcggtggctgttgacctgtgggcctctgggtgctgagtgcagagagggctccagccacccggcccacccctctgcagtctggccagttgtcccggagcccagccaagctctgcagctgccaacaataatggacaattatcggtaactggatcccagagcctgtggggggctgggaggagtgcgcagctccagcaacccattctgcagaggtgctgtgaagctcaggtgatgctgaggtgctgggcccacggctctgggccatggaccccgcaggcctgctgaggctggcaatggtgtgggcagccccgcgccccatcccagcaaggggactggtggggtaatagatgctggcctagtccatggggctcagggtagagggagggtcccggatcccaattccagccccaggctgacctctgacccagtatcctactctgatcctgagctgaatcttggcctgatggttcctcctttccctctcctgggccgagcctcaattcaggtgaatctaacctcaggtgaacctgatccctggccaagccctgctgtttcctgagcctggaatagggtcaggatcacagaagggcggcaggcctctctcctgctgttccacttggggcgggatgtgctgtgtgggcgcct

SEQ ID NO: 6715 - DNA, 1046 bp, Artificial sequence
  DNA replication origin
ggcctgccgcccttctgtgatcctgaccctattccaggctcaggaaacagcagggcttggccagggatcaggttcacctgaggttagattcacctgaattgaggctcggcccaggagagggaaaggaggaaccatcaggccaagattcagctcaggatcagagtaggatactgggtcagaggtcagcctggggctggaattgggatccgggaccctccctctaccctgagccccatggactaggccagcatctattaccccaccagtccccttgctgggatggggcgcggggctgcccacaccattgccagcctcagcaggcctgcggggtccatggcccagagccgtgggcccagcacctcagcatcacctgagcttcacagcacctctgcagaatgggttgctggagctgcgcactcctcccagccccccacaggctctgggatccagttaccgataattgtccattattgttggcagctgcagagcttggctgggctccgggacaactggccagactgcagaggggtgggccgggtggctggagccctctctgcactcagcacccagaggcccacaggtcaacagccaccgcctccctgcccctcgacatacatcctgaccctgacctcaccatgacaagccccagagttggggagacctgggcccagtcccaggaacagatgcaggctctggggctaggaggtgtcctagtggactggcgacatgcagattgggagtgcatagaatcctggggcacaggaatgtcacagctctttttcttaccgtaaagccaggtcataccctatccctccaagggtgtaccaggcctagagtcaagttggtggtatgtggtcggggaggacctggggctcccttcccagaggcacagctcacccaaatataccatgtgccccttgagctggcgcaggccaggacatactgacacaccgaggtctccctgtggcctctgcttgggacaaaacctctcaccccatccagtctcatccacgagggctaggacctttcaaaccaggttgtggggg

SEQ ID NO: 6716 - DNA, 1419 bp, Artificial sequence
  DNA replication origin
ggaggcctggcactgccctgggtgcagatatcctcagggcagggcagtcctcctcttagaggcatccagctggtgtgggatgcccggccctggcctggggacaccaaacctgagatgggggtacccagtatgtcctgggggcattagttcaaaggggaaggacagccctatctggaggggagttccatctaaagggaagatggagacaagtctaatgggggtgacagccctgtcttggggtgacccagtagggcagaggagaggcgcacctctgccctggggggcaccctgcctgagacagaggctcagccctgaccttggggtactcagactgagtggggagacacagccctgtcctggggtgtgggtggggattggggctccctggttgtaggaagagaccaaaccctgtcctagagggaatccaatctgagaggagaggcccacctccacctgggggggcacccagtctgagggggaagccacagccctgttgcggggtgcccagtctgaatgcttctaggtgagtgggcctcattggcttattacttcagaaacctcagttcagaccctagagagtggcatcggacatccctggggaggaggatgagggtctgccctgctgaggtctccttcccccagctaactcttgctgccctccctgtcaccatctccctgcgaggccacccgcctcctgccaggccacctcttctccaacccctgtgcagcctcctctcgtctccacattgctgtggggactttttaaacattcagaccttgttgctctccctcttgaacttccagtggctcccagcctggctctgcagcccttcaagactggcctatgcctccctcaaccattgcatggagctccacgggtgcaccaggcccttggacagcctttggtcctgtccgtcatctggaagggcaggcagggctgggtgtggggctgctcagcaggcacccacacctcctaacgcccacctgagttttttgtcttgggcctcctgacccctcccctatgccctatggggtgtgtgtgggctgctggagatgaggtgcactcctggatgccgagtccgtggagaagagtaagacgggctgagcgggagatgggaaggcagggcagggctcgtgcggggctgtctttaggctggagcaagagcaagaagctcgttcaggccagagcccggggtgggcatgctgtagggtcagtcctcagggtgtcgggctgaggggctctgtgccactctggggcccacgaatggcccaaggtgggagagggcacggtccgggggggtgagtaaggtggtaggtgggtgtcaggtgaggacacttagtgactgtcccagatgcatagtgaatggatgtgtcccaccttgcaggcccctgcccagccagccctctgggctcagactc

SEQ ID NO: 6717 - DNA, 934 bp, Artificial sequence
  DNA replication origin
ttcctcaaaaccgccattgtcatcatggcccgttctcaatgagctgttgggtacacctcccagacgggtggtggccgggtagaggggctcctcacttcccagaaggggcggccgggcagaagcgccccccacctcccagacggggcggctggccgggcgggggctgaccccccacctccctcccggatggggcggctggccgggcgggggctgacccccacctccctcccggacggggtggctgccgggcggaggggctcctcacttctcagacggggcagctgccgggcagaggggctcctaacttctcagacggggcggctgccaggcggaggggctcctcacttctcagacggggcggccgggcagagacgctcctcacctcccagacggggtcgcagctaggcagaggcgctcctcacatcccagacggggcggcggggcaaaggcgctccccacatctcagacgatgggtggccgggcagagacgctcctcacttcctagatgggatggcggccgggaagaggcgctcctcacttcccagactgggcagccaggcagaggggctcctcacatcccagacgatgggcggccaggcagagatgctcctcacttcccagatggggtggcggccgagcagaggctgcaatctcggcactttgggaggccaaggcaggcggctgggaggtggaggttgtagcgagccgagatcacgccactgcactccagcctgggcaccattgagcactgagtgaacgagactccatctgcaatcccggcacctcgggaggccgaggctggcggatcactcgcggttaggagctggagaccagcccggccaacacagcgaaacccggtctccaccaaaaaaatacgaaaaccagtcaggtgtggcggcgcgcgcctgcgatcgcaggcactcggcaggctgag

SEQ ID NO: 6718 - DNA, 944 bp, Artificial sequence
  DNA replication origin
gcgcctcttcccggccgccatcccatctaggaagtgaggagcgtctctgcccggccacccatcgtctgagatgtggggagcgcctttgccccgccgccccgtctgggatgtgaggagcgcctctgcctagctgcgaccccgtctgggaggtgaggagcgtctctgcccggccgccccgtctgagaagtgaggagcccctccgcctggcagccgccccgtctgagaagttaggagcccctctgcccggcagctgccccgtctgagaagtgaggagcccctccgcccggcagccaccccgtccgggagggaggtgggggtcagcccccgcccggccagccgccccatccgggagggaggtggggggtcagcccccgcccggccagccgccccgtctgggaggtggggggcgcttctgcccggccgccccttctgggaagtgaggagcccctctacccggccaccacccgtctgggaggtgtacccaacagctcattgagaacgggccatgatgacaatggcggttttgaggaacagaaaagggggaaaggtggggaaaagattgagaaatcggatggttgctgtgtctgtgtagaaagaagtagacatgggagacttttcattttgttctgtactaagaaaaattcttctgccttgggatcctgttgatctatgaccttacccccaaccccatgctctctgaaacgtgtgctgtgtccactcagggttaaatggattaagggcggtgcaagatgtgctttgttaaacagatgcttgaaggcagcatgctcgttaagagtcattaccactccctaatctcaagtacccagggacacaaacactgctgaaggccgcagggtcctctgcctaggaaaaccagagacctttgttcacttgtttatctgctgaccttccctccactattgtcctatgaccctgccatatcc

SEQ ID NO: 6719 - DNA, 659 bp, Artificial sequence
  DNA replication origin
cgcattgattggctttcaggacctcccagtctctcattctcgtccttggattggccgcgagacatttatccactctccttaggcctgcgcgatgcaagacgggagaaaaggaggggcgtacgcgggcaagatggaggcaactacggctggtgtgggccggctagaggaagaggcgttgcggcgaaaggaacggctgaaggccctacgggagaaaaccgggcgcaaggtgagaagtgtggagtgagggtcgcagttgaggcgtccagcgttcggggtccgggtcgcgcttgaggagagcaaagggctaataaggaaagacagctgccgagggcgcgcatgcgcgggcgctaacgcatgcgcgagaagacggcgccctcccacgatgtctggggctgcttggcgtgggactcctctggcgctggtgcggtcgtcgcgcatgcgcgggggtgggcaaggcagtggtcagcgacccgcagtccatctgactcctgcttcccgggtgttgctcgtgtaggtatctagggctgcctgtaggttcagatgcttgttgggttaggcgtgatttgttccgttcctctatggcctagctggtctttaacccccgccttcgattctgagtcagacagactccccagtccggcagcactccttggacaggg

SEQ ID NO: 6720 - DNA, 907 bp, Artificial sequence
  DNA replication origin
ggcgcggggcgccaggtgcagcaggcgcggggcgcgcgaagctgggggcaccgcgggtgcgggtgcgggcgcggggcggggcgggctcacctgcgcgtagtagagcagccacaactcgtacagccgctccgaggcggccatggcccggcccggctccggccctgctgcgcgccacctgtcgccgcctcctccgcgccgcccgccggttgccctcggccaggcccatgggcggagggcgtcactccggggcggagcggcgcggtactactggggaagtctgcggctgtggcctccgcggcgcagagccacccaagtctgctcgctcctcctcctcactgccggccgccgcccagcttcctgcacttcgctgcagtcaccgccgccccgcctctcctgggaccatgtaaagggcggagagcctggcaggaggaggggcctatgggccgggcggcccgggagggtgccccgctgccctgccccaccagtgccattggaagggccagcctgagcctccgggacgagggtcggggtgaggaattccagacttccccagggtctgaatccgcccaggacgctgctcgcctgactgcatttgccgccattcagggaaggggcggcgggccgcgtggaggtggcgagggtccttcaacaataatctccaccaccaccatgacgaccccttgtagcgcttatcaaatgccaggtgctactctgtcgctttatgggaagaccgaaacgcaacttttgagctctagctgtttgtggagtgtgatggcgggaagttagagagtagcaggactagcctgaaataccttcggggccgcggtgccctcccagatcccagagaggcttagaccgttgccacgggtccccctccctcctccaggaagccttcccaaacgctcca

SEQ ID NO: 6721 - DNA, 1432 bp, Artificial sequence
  DNA replication origin
cttccccagtagtaccgcgccgctccgccccggagtgacgccctccgcccatgggcctggccgagggcaaccggcgggcggcgcggaggaggcggcgacaggtggcgcgcagcagggccggagccgggccgggccatggccgcctcggagcggctgtacgagttgtggctgctctactacgcgcaggtgagcccgccccgccccgcgcccgcacccgcacccgcggtgcccccagcttcgcgcgccccgcgcctgctgcacctggcgccccgcgccgctggggccgcgtagccgcgcgcgcgggcgcgcgcgcgcagggcatgctccggctccgcacacacgtgtgtgcccccagcccgccgggtgcctctggcacttatgccttggggacagagctcgcggtcgtgcacttcatagcaacccacccccgcgagcaggaccgtgcagcctgagtctttcttgctagaggagagtggcctgggccgaggcggccggacacttggcctttttacaaatggggaaactgagacctggagagacctggagactggccaggaggctagggggagggggactcaatttgtctatgagctgcctctcccttgggcgcggcctgattgggtggtcgtggccaacgggtctgggggtgtgggccaaggtagggaggtgtgtggaaggggaatgctcccacttcaggtccttcttgagttgcatccccccacaccccagcgaacaggctgtgataagctcttccctgacttgaaatgacccaccccaccccacccccattctgaggggtagacccaggacctctctaggagcagaagaaaaggttttcctctggatgcccagggtgagggtgggtccttgaggccctgagggatgtctgaaaaggttggagggaggcccgttcctcctgagctccccacccatctcagaaaatacttcaggtggagtcagaaggtgaggggagtgactcagacgtgggtgtcccatcagctgagaacctggtatcactcacaccgtctcacacacatagtcccccattttccttctgtacccacagcagggagggatcccagggtaacactcccctccccttcacccagcacctccctccctgcacctgcctggcatcatgctcctggctcaggtgtgccctgggcacaatggaccattgtgtgccctgaacagtttgtcagtggggggaattcatgctcagacacgctggccctccataaggaggctggcccactgtcttccacggacctggagtccaggccagaaggaccacagcctcttcagtccgctcaggttgtgagaggtccaggccccagcaggaggccaggcatggagtagagtccctctttggtataactcagatcgaactcgacttctgagcctctgcttcctgcctgtaaaactgacacag

SEQ ID NO: 6722 - DNA, 1011 bp, Artificial sequence
  DNA replication origin
gggccaggcaaacaaatccaggatgtaacagcaaacccccaagccaggcggggccaggctgcctgggaagaggaagctagggccagcctcccagctcgccttcctgcccgcctgctcctgaccctgatcctggaacccccaatccagggaggagtaggctatgcaactttgagtcctgttagggacctattgtgtgtgtgcttggggagggggagtgcaaggtaaggggcagagctgaaagtgggtgtttagagaccctttagttggccagccacccagccagcaacacctgcacccctcccttcagcagtgagagctgacatcagctggcaaacctgtttccccagttgtgggtctgggtggggatggagaggggggagtaactccttcctgcccttcctcttccttaaagaccccaggtttagacccacccaccccctccccctgggggcccggctcaactgggggcctcatagtgagggagggggctgtgggtggctgctgagggaagagggaagggtcagagcatcccaggacttcactcagttggagctccttagggccctggtggggaaaccaaggcagggtcctactacgattgtcagacctcacatgcagtaggtgctccttgggtattagctgaatgactggatagaggaggtgggtcccatggcagtgaccagtcaggaagtcaccccagaggaggctgagtttgggctttgaaggctgagaggaagaaacagcaggagcagtgggacaagaagcaaattgtcaggagttggggcagggcagagctagtcaagcaggcctggtggacaggtgggggctcatctagaggactcagagcccaccagagctcccccagggtaggcataggaagggcaggagagtcttgggggactggggacagcacctgacaggctggcggttgggcagcccataaaagttaatgccacatagcatgcagatgagtggcccctgttcaggccggagcagcagtgatgttcagca

SEQ ID NO: 6723 - DNA, 803 bp, Artificial sequence
  DNA replication origin
ctctgtgggatcaactccctgagtgtgtcctcttctgctgcccgactacgtccccctgaagggactgtccaaagccagatggtgagtgggagagtctcctaacagggctgagagttgctcttttaacagccaggcacctgaggacagcactgagaaacacaaaccagagcaggaagggggcccagggagtgggcaggggctgggtgaggggagcaggggacaagggttggcatcctggcaaaatattcagaagcccagtgggtggcaggtgggggacaggggctgggaccagtaggttctggaccctaggcagcccctccccatctctgggagtcatgagagtatataccccatgactcaatggcacttggatgccctttgggcttgtgaagaagggggtcccagagcctacagcgtgaggtgggttgctggtctttaggatggaggcagcagaactggatgagcagcgtgagaagctggtgctgtcggccgagtgccagctggtgacggtagtggccgtggtcccagggctgctggaggtcaccacacagaatgtatacttctacgatggcagcactgagcgcgtggaaaccgaggagggtgcgtcctggtggtgtggtttaggaggatggcagggaatggctgagctctgggtggggctggggtgagtgactcccgtacctgctgttcctccccataggcatcggctatgatttccggcgcccactggcccagctgcgtgaggtccacctgcggcgtttcaacctgcgccgttcagcacttgagctcttctttatcgatca

SEQ ID NO: 6724 - DNA, 1198 bp, Artificial sequence
  DNA replication origin
ccatgcagatgtagtaacctgccttgcactggacacctgtggcatctacctcatctcaggctcccgggacaccacgtgcatggtgtggcggctcctgcatcaggtgtgcctcgtgggcagctctgtggggcccccgtagcccagacctgcagcccatccgtccctcagtggccttccagtcctgtcctcctctagtcttggacaaggccttcatttcctgagcctcaggggacagtcctaagccaaccctggtcctccacagggtggtctgtcagtaggcctggcaccaaagcctgtgcaggtcctgtatgggcatggggctgcagtgagctgtgtggccatcagcactgaacttgacatggctgtgtctggatctgaggtgtgtgtatgcatgtgccctggggagggtgagtttcctgggcaatccccctggagcccagactcctgcccaggaccctaagttgccttcctgcaggatggaactgtgatcatacacactgtacgccgcggacagtttgtagcggcactacggcctctgggtgccacattccctggacctattttccacctggcattggggtccgaaggccagattgtggtacagagctcagcgtgggaacgtcctggggcccaggtatggggaaggggtgcccagcaaagatggaggggcagttgggatcctgtccttgctgacactccctgcttcctccaggtcacctactccttgcacctgtattcagtcaatgggaagttgcgggcttcactgcccctggcagagcagcctacagccctgacggtgacagaggactttgtgttgctgggcaccgcccagtgcgccctgcacatcctccaactaaacacgtaagccccccatttatgggttcatggcccctgaaggtggtggtcattggtgtaggataaaggccctaggaacccacacaccatacatgtttgtgggcacatatttcaaggtttgttacctgtcccttcatcttcccatggggaggtcttgccctgggcctccgcttagccacagttgtgggagatttctttgtgtataagaatttcaatttaaccatccttaaaatgaggacagagagggtatatgggataagggatatctgctggtcgcaaagcccccttgcagtcgcaagttggtgtatatcccctctcccttccagactgctcccggccgcgc

SEQ ID NO: 6725 - DNA, 1679 bp, Artificial sequence
  DNA replication origin
cagtctggggcggggttccccggcttccaagtcgctgtttcgtcaaagcacgagggccgcctgtggccttaattcctaacggcggccccggttctcccttctcggcaataaaccaggcctagttttgtagctgctccgtctccgagtgtgcgttcgcgcgcagcgtctcggcctgccatggccaccgtcccagggtcgccgtctgagtctggcctggctcgcgttcccctggcccgtgaccccctctgggcccactcgccccccctccgcgtggccgtcgctgaactggggcctcagtttacccggcagtgtagcccctgccccacatctcgccccggcttgtggtttccccacgatctcttcatggggtcgccttcgcacgccattcgtccacaaccgcaacccggccaggcgccccgcaggcgcgtttgcattccttcgccgggcaggggcgacaacacccgaggccgcgcccctccagctcggccctgccacctcattgtcttgcctacttcttgggccgccctgtggcgccgctgtggtctcggggttgggggtggggggccagaaccaccccagagagtccacgttgtcttcccggagggctcggtcctgccctgctgagtggatccatcctggcggccactggtcatgaggagttgggggcagagcccttgctgagcggagggagccgggggctgcctctctgtcccccatctccagactcgcgatcctgcgggtgttgtatgtgctggtgtcggcgtgtgcgtgagaagtcaggggtagtgtgggtgtgcggggtggttgcattgtgtgtgcgtattcgtgggcctggagacaggtgggaggcgggaggggttccagtcccgctgctcagagtaggctgggcggaagccaggcctgtctgctgctgcgtcctggtcacaggcccatccactatccaggatcctgcagggccccttaatgtaagtgacacaaaggtacacacccatatgtggcaagggctaccaggtcgcacccacttggccacagcactgggttgctgatttagccatacacatgggcacatggtgtgggatagatcggtacccaatatgtggtggtggatactggggagctggagggccttcccggatgtctcctccattccttctccaggcaagctctccttagtctagacgaggagcttctcttccccaaacctcaggaagtgggtcccagcagattcagccctataggatccaggtaggactgagcggtcctatcctttgagtctcaggccctctctgaatttctggatgaagcaggatcaactagggagtctctgggcccatatcccctattccctcgctgaacccaccagggtagcattccacccagttcctgatcaggagagggctggacactgacccttgaggaaagagtgcgagcatggtcactgcagaaagtcctcctgccttggggctttaggatgttgggttcctgaactctagtttaaaagcctggtggtgagcctcccactggccagtacatctctccagcctggttctggccaagatggagctagaaggcacgtctcccctatcctccctaccatccctggactcagaccaggtgtttggcaacgtctttgagacagggtggtttccaacctgtcttccatcctgagctgtatctga

SEQ ID NO: 6726 - DNA, 929 bp, Artificial sequence
  DNA replication origin
gccttatccccagccgagggcggcgcgtcctgacgggtggcggcgcgggccggcgcgaggagtaacaggcccacggtggcctcgcgcggtcggtgtcgggagcaggcccgcgccgccacttcgagccgcttggccggggccgcagcaggcccgcggttgggcccggcgttggcgccgctgctcgtgtcgcggcggcggttgggccgggccggtgggggaggggcggccacggtccctacggttaccgccgtgtccgcaccgacccggccatcccggggctcggcggtcctctcgggctcctcgtggctcgtccgggccccgctgctagccaaagggcagagtcggaggagctgccggtgccgggcccggcaagagggcgccggtgagggtaggccgcgaatccccgggctcgggtggaagctcgacccgtcgcccgacctccccgcgacggcggcgcctcggaccggaagggcctagcgcgggttgcctggcccccgggccgtggaggggcccgcgctgcactcctgagtttgattttttcctcctgggaactcgatcctggccttgcagtgcttccggattcacattgtgcacctttggcacttgggttttgtaatggcgaggtttgtgtggtcccgttgttgaggtgacaccgggtttgtttttccgcttgaaaatgaaagcctcctgagggacatacattttcttgcaggttgtgagattttcacactttcggacacaattttcttggtaacaggaatctcttaccctaaacggatgactttctatttcttgtgaagacttggttaaaaaccaagaatcgtttgaggattctctaaagaagacaatgttgtggaaaaccgacacacagttttgcccaatagtaatttttcagtctaggacacctttacatttctcttgaggtctga

SEQ ID NO: 6727 - DNA, 1261 bp, Artificial sequence
  DNA replication origin
cgcacaccccacccgcccctcagcttcgcaggcccggccccttaaagagacacacacgggccaccgatctgccgccagtcggcgtgccttgcagctgttggcttgaccccaggccgggacgggcagagcggaacactgcccggcgggtccaggccgaccgtgcctgtggctctccggaacaataaacccccggccccagtgatgtgggccagaccggacctggagaggcggcaccgcgacccctcccgcaacccgcctggcggccgggggcagcgtgacccggcccgctaccgtgtcacagctggcgactgacaaacagcaggcgacgtcgggagaactccccgagacacccgagacatcagccttctcgctccgcggccctgcaggacctgcccgccgggagccccggagtccgcggcagcgccgagggcccctcccccaggcctctgggctctgaggtaacgcggccgcggctgctcccgggcccctcgtcccactcgcccctctcttttttatttttcctcgccctctctctcccttgcccgttcatctcgaccctttagcaagcatggaagcccagcgaggcgggggattgctcggaggccgagctcccggcagcctcctccgccttccttcccgctgtgccctcggggctcctacctccacctcggcgcggcgctctgcccccacccgaagtctccaaggcggcagctcccctctcctgtgtggttcttggggccttagaggcaatgtcatgaaaaaaagggtattaatcactttcctacagaaatgataagatgagactaagtagaataacttgaaagagctacgagttgttatttttggaaggagagataggaacgcgtaaatccaatagctaaactttctagacgctgaagagtttttggcgatagatcattttgacattgggggttcatagggttagcgttttttgtgttgttgttgctgttgtttttccactagaattttgaatcggattttaccagcaattggtaacggaaaggaaaggatgtgtcttccaattgagaaacagtggttaaaaactgaaagtgggccgggcgcggtggttcacgcctgtaatcccagcactttaggaggccgaggcgggcggagtaactgaggtcaagagttccagaccacactggccaacatggcgaaaccccatctctactaaaaatacaaaatttagccgggcgtggtggcgcacggctgtaattccaggtacgcgggaggctgaagc

SEQ ID NO: 6728 - DNA, 1095 bp, Artificial sequence
  DNA replication origin
atgtttcagagagcacagggttgggggcaaggtcacagatcaacaggatcccaaggcagaagaacttttcttagcacagaacaaaatgaaaggtctcccatgtctacctccttctacacagacatggcaaccatccgacttctcaatcctttccccacccttcccccctttctactccacaaaactgccactgtcatcatggcccgttcccaatgagccgctgggcacacctcccagacggggtggtggccgggcagaggggctcctcacttcccagcaggggcggccgggcagaggcgcccctcccctcccggacagggcggccggccgggcggggggccgacccccccacctccctcccagacggggcggctggcctggcgggggctgacccccacctccctcccggacggggtggctgccgggcggagatgctcctcacttcccagatggggtggctgccgggcggaggggctcctcacttctcagacggggcggttgccaggcagagggtctcctcacttctcagatggggcggccgggcagagatgctcctcacttcctagatgggatggcggccgggcagagacgctcctcactttccagactgggcagccaggcagaggggctcctcacatcccagacgatgggcggccacgcagagacgctcctcacttcccagacggggtggcggccaagcagaggctgcaatctcggccttttgggaggccaaggcaggcggctgggaggtggaagttgtagcgagccgagatcacgccactgcactccagcctgggcaccattgagcactgagtgaacgagactccgtctgcaatcccggcacctcgggaggccggggctggcggatcactcgcggttaggagctggagaccagcccggccaacacagcgaaaccccgtctccaccaaaaaaataggaaaaccagtcaggtgtggtggcgcgcgcccgcaatcacaggcactcggcaggctgaggcaggagaatcaggcagggaggttgcagtgagccgagatggcagcagtacagtccagcttcggctcggcatcagagggagaccgtggaaagagagggaga

SEQ ID NO: 6729 - DNA, 856 bp, Artificial sequence
  DNA replication origin
cgccaccccgtctgggaagtgaggagcgtctctgcgtggccgcccatcgtctgggatgtgaggagcccctctgcctggctgcccagtctggaaagtgaggagcgtctctgcccggccgccatcccatctaggaagtgaggagcatctctgcccggccgccccatctgagaagtgaggagaccctctgcctggcaaccgccccgtctgagaagtgaggagcccctccgcccggcagccaccccatctgggaagtgaggagcatctccgcccggcagccaccccgtccgggagggaggtgggggtcagcccccgccaggccagccgccccgtctgggagggaggtgggggggtcggccccccgcccggccggccgccctgtccgggaggggaggggcgcctctgcccggccgcccctgctgggaagtgaggagcccctctgcccggccaccaccccgtctgggaggtgtgcccagcggctcattgggaacgggccatgatgacagtggcagttttgtggagtagaaaggggggaagggtggggaaaggattgagaagtcggatggttgccatgtctgtgtagaaggaggtagacatgggagacctttcattttgttctgtgctaagaaaagttcttctgccttgggatcctgttgatctgtgaccttgcccccaaccctgtgctctctgaaacatgtgctgtgtccactcagggttaaatggattaagggcggtgcaagatgtgctttgttaaacagatgcttgaaggcagcatgctctttaagagtcatcaccactccctaatctcaagtacccggagacacaaacactgcggaaggccagagggtcctctgcctag

SEQ ID NO: 6730 - DNA, 1029 bp, Artificial sequence
  DNA replication origin
tcccgggacgcgactgccgcaaccgaaaccacctgcactccccacgcggggctgcctggctgtgtacatagtcgccatggcaacgggtcgcttccggggattccggaagtgtcggggtggcggaaatgaagtccgaggtcctacgtcgaggatacgggtgaggtcatggccgaatcgggaagacgagagatggggccgattgatctagaaagacttcggcggatgcacatgcgaagtcaaggtcgagatagcgagggaacgaaggccgcacatgaaccaggaagcggagtggcggggcttccggcgccgaggagattcaactacggcggccgcggaggcccgtccgattgctgctccgcgctccgagcggctgtcggcgtgcgctatcgccccgccctggttagtgtctagccggccggcgaggcctgcgcagttgcagcggccggggaagatggtggaggacggcgcggaggagctggaggatctggtgcacttctccgtgtctgagttgcctagtcgcggctacggcgtcatggaggagatccggcggcagggcaagctgtgcgacgtgaccctcaaggtaccgcggactgggcggcagcgggctgagggaaaaggggtcgagcggggagtaaaaaggggcgggggacagagaaagagaggtctagcagggagaggggtggggagaagaggtgtgaggggggccgagtagtggggagagaggtgccgagcaaaaggggatcggggccgagtggggagaggaagaggacaacctttcagcccttgaaaggaaaggttgagaggtgcgccgcttaggcccttggagtgggagacacgggtgacagcctcctttttctgtcatgcagacaagagaaaatggacttaccttctatggaggcaggggcggtggccggctccacatgctgatgggcaccactgaagaaccttctcttgtcactacagatatttctttgtgcctgtcgaacttggctgtgctgttctagaagagaaggcttctccttaggaatc

SEQ ID NO: 6731 - DNA, 849 bp, Artificial sequence
  DNA replication origin
gtgcagtggcgtgatctcggctagctacaacctccacctcccagccgcctgccttggcctcccaaagtgccgagattgcagcctctgcccggccgccaacccgtctgggaagtgaggagcgtctctgcctggctgcccatcatctgggacgtgaggagcccctctgcccggctgcccagtctgggaagtgaggagcatctctcgtctgagctgtggggagcgcctctgccctgccgccccgtctgggatgtgaggagcgcctctgcccggccgcgaccccatctggaaggtgaggagcatctctgcccggccgccccgtctgagaagtgaggagcccctccgcccggcagctgccccttctgggaagtgaggagcccctctgcccggccgccgccccgtctgggaggtgtacccaacagctcattgagaacgggccatgatgacgatggcggttttgtcgaatagaaaagggggaaatgtggggaaaagatagagaaatcagattgttgctgtgtctgtgtagaaagaagtagacataggagactccattttgttctgtactaagaaaaattcttctgcctcgggatgctgttgatctatgagcttacccccaacccggtgctctctgaaatatgtgctgtgtccactcagggttaaatggattaagggtggtgcaagatgtgctttgttaaacagatgcttgaaggcagcatgctccttaagagtcatcaccactccctaatctcaagtacccagggatacaaacactgcggaaggccccagggtcctctgcctagaaaaaccagagacctttgttcacttgtttgtctgctgaccttccctccactg

SEQ ID NO: 6732 - DNA, 770 bp, Artificial sequence
  DNA replication origin
atatttcagagagcaccgggttgggggtaagctcatagatcaacagcatcccgaggcagaagaatttttcttagtacagaacaaaatggagtctcctatgtctacttctttctacacagacacagcaacaatctgatttctctatcttttccccacatttcccccttttctattcgacaaaaccgccatcgtcatcatggcccgttctcaatgagctgttgggtacacctcccagacggggcggcggccgggcagaggggctcctcacttcccagaaggggcagctgccgggcggaggggctcctcacttctcagacggggcggccgggcagagatgctcctcaccttccagatggggtcgcggccgggcagaggcgctcctcacatcccagacggggcggcagggcagaggcgctccccacagctcagacgagagatgctcctcacttcccagactgggcagccgggcagaggggctcctcacgtcccagatgatgggcagccaggcagagacgctcctcacttcccagacgggttggcggccgggcagaggctgcaatctcggcactttgggaggccaaggcaggcggctgggaggtggaggttgtagctagccgagatcacgccactgcactccagcctgggcaacattgagcactgagtgaacgagactccatctgcaatcccggcacctcgggaggccgaggctggcggatcactcgcggttaggagctggagaccagcccggccaacacagcgaaaccccgtct

SEQ ID NO: 6733 - DNA, 1568 bp, Artificial sequence
  DNA replication origin
gggcatgacatcctggtgccggttcttcagtgagtagcagcgggcaatggcgatggaacggcctcgggcatcatgttcctgcgcatcttgcagctctcgccagacagtgtccagagctcccacatcccccagctgaccccgaaaggcctccagctcctgctgcaactgccgcagcctctcaggatgctcataggggtcccgctcaatcagccgcagggcctgcggccgacgaccctcagctgcatccaccttggtgggctgcagcaggggctgcccacccccaggagactgagtgccgccatgctggctctccgggctggaggagagcaggtctgcagctgcggcgcctcggcgcaggcaagggggtggttctgctgctggggggcgagggggtaccggaccaggccctggagatggggcaggtgaaggcaccaggtggggactaggggtggactggccagcagacgagggccctcgaatggtaagaggggctgcctgggggcccatgggtctggtagaaggggcaggaccatatgccagtgggggatggggaggctgagggggcccagggctggggaaaggcagagcccctgagtgggctggcagagggtcttgagcgggacctgggtagagctgggtgtgtagggggggtggcggctgccccaggaccccaggctgaggggcataggggtagggggattgtgggggtaggagtcctggggcctggggtgggaagagatgtggatgctggagtggaaggggctgctgtgggggctgaggcccaaacgcttgtgaaggatggggctgaggatggggctggggctggggcccaatccttggggctggaaaacctgcggggatcccagaagagaagtggtgctgtgccgggatgggttgcttagcccctgcagggtaggtgtaaggcgtgggcagtggctgcggtgggggcacagggaagcagggcgggggaggagcaggggtggggtttggccgtggggctgtgtggctggggatgggcgcctggatgctatctactgtggtggtggctggccgaaccgccatggccaactcggggcctgagaattgaggaggtggggccgaggggagacctgcaactggtggggccggccctacccccacatagggactgctcaccacgccatgctgtggggaggatcggggcacaaggcccagctccggtgtgtaggcaggggctgggtagagggcaggcccaggtgctacgggcattgcatggggccctggggccctgggctgtatcagctgggtggggcccgagtaggtaccagggggcaaggggcctgagagatagtggggtcctgggcctgtggagctggggaaggggctgggaggaaagtggagcggggtggcacttcccaggaaggtgtcaggcagtcgtgggccagccaccatgtcaggggggaggctgcgcagctcctcaggggggtctcctgcttccactgcctcactctcctccctgcggggcagcagcggctttggggctgtgggccgtggcggcggcttcttcttcagctccctgtgcgacaggc

SEQ ID NO: 6734 - DNA, 868 bp, Artificial sequence
  DNA replication origin
tcaaagcagatggggttcaaaatcttactgcagggaaaggcaatgcatgtctgcctacaacctctgcccatgaatttgaagggcctgcaccagagctggggaagccagttttatgattggaagtgggtggacaaggagagaccacagtcaccaggaaccctgatggtcaggttgagacatcggggctttccttaaagctaaaacaagcagcaaaggagaatttccaagaagcatggaggggcctggtgaaattggccaggctggaggggaggatgtcagccaaagcccatgcagaacctgtggtgacaggaatgacggcagcagcccactggcagaaatcaacatcactaagggcaagggacgccccctccccaaggaaaaagactccagctctaggtcagatggtgctgccaccaacagtcaaggagccttggaggaggagccagtgtgggacaggcaggcaaaggcgtccggcagaaggcacctggccactgggtggagacccaggttcaccagcttggaggtggggccagaacccaggtggctgagactccccaaggagtgtgcatgcagacggagtactggggacgcccacagccaacaggcttgctgaggaggccaagcacgacagaggcagggagagcagagaacagctgccagcggccaaggagaagagagggttctgcaagcgcactctgtaactaaaaatgcaaccaagataccccaaaggctcaatattgacaagctaatcagagaaactggcttcattgagaagggcgagaaaggataggagtatatcactccccactgtcactgcttaaggccctgggaggtcaccatgtgccatgccctattccaagcacgtcac

SEQ ID NO: 6735 - DNA, 931 bp, Artificial sequence
  DNA replication origin
tctcactccgccctcctggcccccagcaggcagcgccgggacagtggcgtgggcagcgggcttgaggctcaggagagctgggaacgactttcagatggtgggaaggctggtccagaggagcctggggacagccctcccctgagacaccgcccccggggccctccgccgccttccctcttcggggaccagcctgacctcacctgcttaattgacaccaacttttcagcgcagcctcggtcctcacagcccactcagcccgagccccggcaccgggcggtctgtggccgctctcgggactccccaggctatgacttcagctgcctggtgcagcgggtgtaccaggaggaggggctggcggccgtctgcacaccagccctgcgcccaccctcgcctgggccggtgctgtcccaggcccctgaggacgagggtggctcccccgagaaaggctccccttccctcgcctgggcccccagtgccgagggttccatctggagcttggagctgcagggcaacctcatcgtggtggggcggagcagcggccggctggaggtgggcagaggggctaaaggtgggcagagcggctgtccgccccggggattgtgggcctttctggctggcaggtgctcacagcctctggactcgtaggtgtgggacgccattgaaggggtgctgtgctgcagcagcgaggaggtctcctcaggcattaccgctctggtgttcttggacaaaaggtgagcgtggcctgcctcagccccagatgtccccagcctttgttggctaggccatactctcttgagtcttgagttctggttctcttcaactgctgtactgtatgattcgattgaccttcttggtgcccagctccacacctgtgagcagagggcagtccacttggatgggaaggtaacaattaaaagcgttaggggtggcc

SEQ ID NO: 6736 - DNA, 1353 bp, Artificial sequence
  DNA replication origin
ggcagcagtgcctcttccagggagctgaactgagatgggaggaaggctgaggccccctgggactaggacctctgggggactctggagcaggtcaggttgctggccctctgaccgtaggaatggtagcagctttctggctccagctgaggtggagcttaggggtggggacattctgtgtcaaacctcagggtgcttcagtgtatttccaggccaagaaactcagcccctaactgtggaaaggcaagcaggcccctccagcagcaagtgttggcaggtgttagcaggaggacttggagaggcaggagaaaaggacgcagtggggcctgtgtcctctctccatccccaggcctgaggtccctgtgctgcttcctctcagcatgagggctgaagctgctgggggttggggcccattcctcccactgagtaccccctgccccactgcaggctggcaccgttgtctggattggcatcctggtatacacagacccagcagggctgcgcaactacctcgctgcccaggtgacggaacagagcccattgggtgagggagccctggctcccatgcccgtgcctagtggcatgctgccccccagccacccggaccctgccttctccatcttcccacctgatgcccctaagctacctgagaaccagacgtcgccaggcgagtcacctgagcgtggaggtccagcagaggttgtccatgacagcccagtcccagaggtaacctgggggcctgaggatgaggaactttggaggaaattgtccttccgccactggccgacgctcttcagctattacaacatcacactggccaagaggtgagctgggccgtgccaggtgccacctcactcgatggtgtcaactcaccatcccctttccccaatgcaggaggcccacaggtttgaattatgcaaataattaaaacagttcataaggttgtgaggtgggaactggtggtttaggcagctataacccaagagaggagtcccaggttgctctgaggagtcactggtggctgccagccctcaccagaatgagacccacccacctgtgccaggagtggggagggagataccccacacggccaccagggctgtttgggtgctggtatctgggacagcaagttggctgctaagctgggctggggagggacctacctctgtccccaaccccccatgctgggagagtctggccggtggagctgaggcctgcctggggaggagggagaggactggctggcgagcacagcaggaggaagccctgggaggccccccgctgaggctgcccactgtccgaatccaggtacatcagcctgctgcccgtcatcccagtcacgctccgcctgaaccc

SEQ ID NO: 6737 - DNA, 865 bp, Artificial sequence
  DNA replication origin
gcctggcacagcgcctcatcatggtacctgccacccctgccctgccctgccctcttctggagggccggtgctccaggccccttgtggtgctgcacttggccttagagtggcaaagggtattcctcaggccctggtggcccctggaagcctggctctggggagttgcccgttgtgtcctccctgcccagaccctagtggcttctgaggagataagcctgtgggagaagcagctccagggttctcaggtacaggagccatcctctccccagagtggcccaggacaggagcctgttagttgagtgctctgggatggacccacttgtggccaccacattgccctgggtcgggttcatcggccgctgcatggtgtgcagacactggaaagtgctgggcaaaatcattcaccagccgggctgggctggccttggggcagcagtgcctcttccagggagctgaactgagatgggaggaaggctgaggccccctgggactaggacctctgggggactctggagcaggtcaggttgctggccctctgaccgtaggaatggtagcagctttctggctccagctgaggtggagcttaggggtggggacattctgtgtcaaacctcagggtgcttcagtgtatttccaggccaagaaactcagcccctaactgtggaaaggcaagcaggcccctccagcagcaagtgttggcaggtgttagcaggaggacttggagaggcaggagaaaaggacgcagtggggcctgtgtcctctctccatccccaggcctgaggtccctgtgctgcttcctctcagcatgagggctgaagctgctgggggttggggcccattcctcccactgagtaccccctgcccc

SEQ ID NO: 6738 - DNA, 1024 bp, Artificial sequence
  DNA replication origin
cgcacgtgcggagggcggcggggcgggagggtaaaggtaggaggtgagaggtgaaggggcgggcacccggcggccaggagagagagggagggcgccacgcaccggactgcgggccgagagcgcgcacgccgcgctccgcccctgctgccgcccccgtcgccgccgccgccgccgccgcagcttgggaggtgctgccaccacaggtaccgtcacgcgggtgctcagggcgcctgcccgcgggccccagctcgaccccagccgcgtggagctgggagttccggaatgggggccgctaggttcgggggtgcgtgggcatggcgctgtccagcagccgtgcgggccggccctggagaccgcaggccggcaaggaggcagggccgcgcgtccccacccccaacccggccgtgtccctgcaccggccggcccctggagctccgcgtccccaccagacctccgcgggcccctggtgtgacggggggagatgcgcggcgtcgcatcccctggcctagttgctccgggaagctgttgtagaacctgctttggtgctgtttgggttttccggagtgcgggggagagcaggttctccactttgcctcttttggaagatcttattgagagacaacgctagttgctttgctggttttgcttggtttctagttttccgtattgcttaaacctcaactttgctcactaatgttgcttctgtttacttctgagtgggtttatgacctcagtatttaaccggcttataatgtcacgatagcgttagttgcagggagccctggctccggactgtttgaatcacagaaagttgtgcagatgggaatgcggaggggggggcagtgagtcgctgtgggggctctggcaggggtcagcccctggttcgggtcactcactgctccaccttgtatggcgacagtcggagctaggtgaataaactctttctggggattttgtaatacttatcgtgaagcggccatagaaaaggtttaatgttagcgttgcgtgtgtttcttttatttgg

SEQ ID NO: 6739 - DNA, 1261 bp, Artificial sequence
  DNA replication origin
cggggccggggcggggcctgagggtgagacttcggggcgggacctggagctgagggcgggagccagtggacgcggctcagggtgggttcccgagggtgagacttatgggtgggccgagctgggggccgccctggcctggctcttcagacggcggggcaggtcgggcggggccgagccgcgaggcgttgggcggggtgtgatcctcgtcttgggggcagactccgggacggggcttagaggtaccgggtggctggggtcacactggggcggtggggtctgagggtggcgaggtctgggttgaccaggtctaggcgagcgggcctgaccggggcgggccggggctccagggctcctcagcgcgccgccctgacgtcccgccccttgccctcccgcccgcagcgcgtgaggcgggcagcgcggttgaggccgaagagctggtgaagggcagcccggcgtgggagccgcctgccaacgacacgcgggaagaagccggcccaccagcggctggggaagatgaggcgtcgtggacggcgcccggtggcgagctggccgggccagaagaggtgctgcaggagtcggctgcggtgaccggcaccgcctggctggaagctgacagcccaggcctgggaggagtgaccgcagaggcgggcagcggcgatgcccaggcccttccagctacgctccaggctccccacgaggtcctcgggcagtcaatcatgccccctgccattcctgaggctacagaggccagcgggccaccctcccccacccccggcgacaagctgagcccagcttctgaactccccaaggagagccccttggaggtttggctgaacctggggggcagcacacccgaccctcaagggccagagctgacttacccatttcagggcaccctggagccccaaccggcatcagatatcattgacatcgactacttcgaaggactggatggtgagggtcgtggcgcagatctggggagcttcccagggtcaccaggaacctcagagaaccaccctgatactgagggagagaccccttcctggagcctgcttgacttatacgatgatttcacccccttcgatgaatctgatttctaccccaccacatccttttatgatgacttggatgaagaggaggaggaagaggaggatgacaaagatgcagtaggaggtggagacctagaagatgaaaatgagcttctagtgcccactgggaagcctggtctggggcccgggacaggccagcccaccagtcggtg

SEQ ID NO: 6740 - DNA, 1939 bp, Artificial sequence
  DNA replication origin
aatcccagcactttgggaggccaaggcgggcggatcacctgaggcctggagttcgagaccagcctgagccaacatggagaaaccccgtctctacaaaaaataccaaattagccgggcgtggcatgcctgtaatcccagctactcgggaggctgaggcagagaatcacttgaacccaggaggcagaggttgcagtgagtcaatatcacaccattgcactctagtctgggtgacagagtgagactctgtctcaacaaaaaaaaaaaattccaaattgaaggaagcgttagcagacttcatctccaggaaagggaagaagaagatacttaaataattaacaaaatatatttaaaatgagtgggagaacttcctccattaaaccctgttgaaaatgtgtgagtggttgtcatgccccagacatcaaggaacccatccatgaggtcttcccacacagactggcctcaggaagggaaggaggaggtaggccgctctgacagccacaacccgagttgaggaaacaagcaaaggaacacagagagtctacatacagtaaaaggtgacaggagttaagctgcacacaagggaagcagagatgggttggaggcagttaagggtgcgttgctgcctctgtggctgaggtgagtgcaaagccctacatggtcccctgtttagagaaggctattgtttcaaacatattttacttggtccccggaggcagcatgaaactatgaaagaaagagccttaccccttttttcaaggctctccagaccacagttctgggatgggtgtgggtggttgccattcgttcatttatgcctgtctgatatggagcctccctctgttaccagccctgtgcactcaagtgccttgcagtccagtgaggaataactgtagataagatgagatgatgggcattaagtgtaactgctgagaagccttcatagagggaaaggtgataagaactgagtttttctggcatgaggagtttaccaggcaggagaggtggagacgctaggctaggcaaataggctgcagccatagttctgctgagaaacaggttttgaaccaaggcaactccatctggagatatgtatcagaaagattaggagatagaatctccatcttggtcacttatttggtcttctaagacagcaatgggaccgtctcttaaatactggagttgtcctatctccttgggctgataccctgaactgtcatttgggtgagtaacacattaaggggtagacggtcggtttgggggaataaactaagtaactaggttgcggttcctcctgccgactaagcagacctcctggtgcgtggtcttgggttgccctgtgagccctgaagctgtgaatgggccccacagatcactctaaagccaagcatccatgtgtgcccggctggggatctagacccccctggtctacccaggaacctgagttttggtggtctgagacacctgggggacgacgtatcccggagaagggaccaggattaaaggccgctccccaggctgcccggagactagaaggaaggcgaggtagccgcagtcccagggagggtcttaccccttgctcccgggatgcgttatggcgggcctggctgtgcgagatctaggctagtggctttggctgcgaacggattagatctgatccgattagagcctgggcggtcggcttcgcccccttgccaggctctgccaacgcccgcccctccctcgtggagacccggagacctccctgagagccttcccgcccggaacacgggattggtgcagaatccgagaggctccatgcgccccgggcctggcttgtttccacagtgggggctcgtgcttccgccccctgcggctcttctggaccccgccccgaccctgcgggtaactgggcccgcgacgtccccgcctccgtgcttgccgcgtggcgggtgggttcctc

SEQ ID NO: 6741 - DNA, 1216 bp, Artificial sequence
  DNA replication origin
atgccctcgcctaggcttgggcttcgggtccgcccggcccgcagggggcgcgcggcgctcgggccggccgctcccgttctcttcgcccggtccctgccgcgcacaggcctcggggtcggcgggagcacgatggcggccgctaggagactcatggcgctggccgccggcatctctccgcgcctgcagccgctgggtccccgcgctgctgggcgacagggtcgctcgcgcggcttctcttcaagctgcgcccaccccgaccacaccaaggaagccgccgaggccgagtcagggatggcccccggcgggcctggggaaggcgacggaagcttggtgaacggtgagggcatcggcgggggcgggcggtccgcagcgcccttgactcctgggatggcagagctaggggcgcgggccgaaatcgggcctggcggccgggggtcctctcttccatagtggccaagttcgccatccgtcggcgggcagcggccttgctgtttgtaaagcttagcgtggcacaggcccgaatggacccttagagtacctgctcccggcaagaataggtgagaggtgcgagacctcgagggagtggggaaaacgagtaaaagtccaactcctgccaggatgagtggccaagggctagagcttctagggacaagcatgccctcaccagtgtgagaaatagcccaaagtaactcctgggacatcaggatctcaaatagagacagaatgactgttctggtggattccagctttgtgcctcccaaatagtgcagaggataaaactgttgaaagcatcaaggatgggtagagagcgccagcctccaccaaccttatagagctgaaggtgggggcggggtggtggtctcagtgcagctctattgttaaaccagtgggtgtaatgggctactcgaagttgggtccctctgtgacgaaaccccccccgccccggccaagtccacttagatatggtttcttaactgcttaactgcttgactcttagttgctttacaagttaccgcttagagggagacaggatcaggtgtcctccatcctggccacttgacacaggagtctgtcccaaggaaacagtctcaaaccaggcagcagagttacatcagaacgcttggaagcactttttgaaaatatagagtcgcctccaacatcgctcccattctcaggtcccctgtggggagctggatgtccatgcggtgaaaaagct

SEQ ID NO: 6742 - DNA, 801 bp, Artificial sequence
  DNA replication origin
acaccctctgcagccactggcccgggtgctaagtcccccattgcccggggccagcagggctggctggctgctccaagtgcggggcccaccaagcccacgcccacccggaactccagctgacccgcaagtgctgcgcgcagccccggttcctgctcgcgcctctccttccacacctccctgcaagctgagggagctggctctggccttggccagcccagaaagggggtcccacagtgcagcggcgggccaaagggcccctcaagtgccgccaaagtgggaacccaggcagaggaggcgccgagagcaagcgagggctctgaggactgccagcacgctgtcacctctcactaccatgttctgaaactgtggtgactgcctatgatagcagataaagtagctccaggtcagctttaggaagatttacttgttctcagtaagtgtgatgaactggaagacaaagagttgaaagcaaacaatcctgttagaaatttgattcaggtagtggcagatgaaacgctgaggatatgagaggggaaatataacaggtgaagataaagtgaaactggaatttggaaggtgtgtgagaaaaaggaattgaaggtcatgctgtgatgtgaggctggttttcccagccagtggtagtataggtaatggaaagacccaacagaagagcacagttcattgaaggagttagtaagttccacatcagacattgcttttgtgaaactctggggatatgtgggtggtggtctctagaaattgcctgatagctgggcttggtggctcatgcctgtaatctca

SEQ ID NO: 6743 - DNA, 1086 bp, Artificial sequence
  DNA replication origin
caaaaccgccattgtcatcatggcccgttctcaatgagctgttgggtacacctcccagactgggtggtggccgggcagaggggctcctcacttcccagtaggggcggccgggcagaggcgcccctcacctccctcccggatggggcggctggccgggcgggggggctgacccccccacctccctcccggacggggcggctgccgggtggagatgctcctcacttcccagacggggtggctgctgggcggaggggctcctcacttcccagacggggtggctgccgggcggaggggctcctcacttctcagacggggcagctgccgggcggagggtctcctcacttctcagacggggcggccgggcagagacgctcctcacctcccagacggggtcgcggccgggcagaggcgctcctcacatcccagacggggtggcggggcagaggcgctccccacatctcagacagtgggcggccgggcagagacgctccacacttcctagttgggatggcggccgggaagaggcgctcctcacttcctagatgggatggcgggcgggcagagacgctcctcactttccagactgggcagccaggcagaggggctcctcacatcccagacgatgggcggccaggcagagacgctcctcacttcccagacggggtggctgccgggcagaggctgcaatctcggcactttgggaggccaaggcaggtggctgggaggtggaggttgtagcgagccgagatcacgccactgcactccagcctgggcaacattgagcactgagtgaacgagactccgtctgcaatcccggcacctcgggaggccaaggctggcggatcactcgcggttaggagctggagaccagcccggccaacacagcgaaaccctgtctccaccaaaaaaatacgaaaaccagtcaggcgtggcggcgcgcgtctgcaatcgcaggcactaggcaggctgagacaggagaatcaggcagggaggttgcagtgagccgagatggcagcagtacagcccagcttcggctcggcatcagagggagaccgtggaaagagagggagagggagaccgtgggga

SEQ ID NO: 6744 - DNA, 1698 bp, Artificial sequence
  DNA replication origin
aggggcggccgggcagaggcgcccctcacctcccagacggggcggctggccggggggagggctgaccccccccacctccctcccggacggggcggctggccaggcggggggctgacccccccacctccctcccggacggggcggctggccgggtgggggggctgacccccccatctccctcccggacggggtggctggccgggctgaggggctcctcacttcccagtaggggcggccgggcagaggcgcccctcacctcccggacggggcggctggccgggcggggggctgacccccccacctccctcccggacggcacggctggccaggcggggggctgacccccccacctccctcccggacggcatggctggcggggcgggggggctgaccccccacctccctcccggatggggcggctggccgggcggggggctgacccccccccacctccctcccggacggggtggctgccgggcggagacgctcctcacttcccagatggggtggctgctgggcggagaggctcctcacttctcagacggggcagctgccgggcggaggggctcctcacttctcagacggggtggttgccaggcagagggtctcctcacttctcagacggggcggccgggcagagacgctcctcacctcccagacggggtctcggccgggcagaggcgctcctcacatcccagatggggcggcggggcagaggcgctccccacgtctcagactatgggcggccgggcagagacgctcctcacttcctagatgtgatggcggctgggaagaggcgctcctcacttcctagatgggatggcggccgggcggagacgctcctcactttccagactgggcagccaggcagaggggctcctcacatcccagacgatgggcggccaggcagagacactcctcacttcccagacggggtggcggccgggcagaggctgcaatctcggcactttgggaggccaaggcaggcggctgggaggtgtaggttgtagtgagccgagatcacgccactgcactccagcctgggcaccattgagcactgagtgaacgagactccgtctgcaatcccggcacctcgggaggccgaggttggcggatcactcgcggttaggggctggagaccggcccggccaacacagcgaaaccccgtctccaccaaaaccaatcaggcgtggcggcgcgggcctgcaatcgcaggcattcggcagactgaggcaggagaatcaggcagggaggttgcagtgagccgagatggcagcagtacagtccagcttcggctccgcatgagagggagaccatggggagacggagacggagacggagacggagacggagacggagacggagagggagagggagagggagactttttaaagaaactgccatttgtattgatataatatggtggaggcccaggttccccacgtggtccccgctgatcttgttactggtctgcagggatgaaattcctggataccctacttggctttctgtctccaccttggaaggggtattgagtgcttaattacagctttgagaggttggaaatctaggctccccacttggcctttgctagaacgggtaggttttaaaccacagtattttcttggtgtttggctggggtagattggttattgtctaaaacttttctgtcttgctagactgctactttcttggtct

SEQ ID NO: 6745 - DNA, 968 bp, Artificial sequence
  DNA replication origin
tccgggagggaggtgggggggtcagccccccgcccggccagccgccctgtctgggagggaggtgggggggtcagccctccgcccggccagccgccccgtctgggaggtgaggggcgcctctgcccggccgcccctactgggaagtgaggagcccctctgcccggccagccgccccgtccgggagggaggtgggggggtcagccccccgcccggccagccgacccgtccgggagggaggtggggggggggtcagcccccctgcccggccagccaccccgtccgggaggtgaggggcgcctctgcccggccagccgccccgtccgggagggaggtggggggttcagccccccgcccggccagccgccccgtccgggagggaggtggggggggtcagcccccctgcccggccagccgccccgtccgggaggtgaggggcgcctctgcccggccgcccctactgggaagtgaggagcccctctgcccggccaccaccccgtctgggaggtgtgcccactagctcattgagaacgggccaggatgacaatggcggctttgtggaatagaaaggcgggaaaggtggggaaaagattgagagatcggatggttgccgtgtctgtgtggaaggaagtagacatgggagacttttcattttgttctgcactaagaaaaattcctctgccttgggatcctgttgatctgtgaccttacccccaaccctgtgctctctgaaacatgtgctgtgtccactcagagttaaatggattaagggcggtgcaagatgtgctttgttaaacagatgcttgaaggcagcatgctcgttaagagtcatcaccaatccctaatctcaagtaaccagggacacaaacactgcggaaggccgcagggtcctctgcctaggaaaaccagagacctttgttcacttgtttatctgctgaccttccctccactattgtcccatgaccctgcca

SEQ ID NO: 6746 - DNA, 970 bp, Artificial sequence
  DNA replication origin
ttagtacagaacaaaatggagtctcctatgcccacttctctccacacagacacagcaacaatctgatttctccatcttctccccacatttcccccctttctactcgacaaaaccgccatcctcatcatggcccgttcccagtgagctgttgggtacacctcccagacggggtggcggtcaggcagaggggctcctcacttcccagaaggggcggctgggcagaggtgccccccacctcccggacggggtggcggccgggcggaggcgccccccacctcccggacggggtggctggccgggcgggggctgccccccacctccctcccggatggggcggctggccgggtgggggctgccccccacctccctcccggacggggcggctggccgggcgggggctgccccccacctcccggactgggcggctgccgggtggagacgctcctcacttcccagacggggcggctgccgggcagaggggctcctcacatcccagacgatgggcggccaggcagagacgctcctcacttcccagacggggtggcggccgggcagaggctgcaatcttggcactttgggaggccaaggcaggcggctgggaggtggaggttgtagctagctgagatcacgccactgcactccagcctgggcaacattgagcactgagtgaacgagactccatctgcaatcccggcacctcaggaggcctaggctggcagatcactcgcagttaggagctggagaccagcccggccaacaggcgaaaccccgtctccaccaaaaaaatacgaaaaccggtcaggcgtggcggcgcgtgcctgcaatcgcaggcactcggcaggctgagggaggagaatcaggcagggaggttgcagtgagcagagatggcagcagtacagtccagcttcggctcggcatcagagggagaccgtggaaagagagggagagggagagggggagggggaggggg

SEQ ID NO: 6747 - DNA, 863 bp, Artificial sequence
  DNA replication origin
cactcagtgctcaatgttgcccaggctggagtgcagtggcgtgatctcagctagctacaacctccacctcccagccgcctgccttggcctcccaaagtgccaagattgcagcctctgcccggccgccaccccgtctgggaagtgaggagcgtctctgcctggccgcccatcgtctgggatgtgaggagcccctctgcccggcagccgccccgtctgggaagtgaggagcgtctccacccggcagccgcccagtccgggaggtggggggcagcccccgcccggccagccgccccgtccgggagggaggtggggggcagcccccacccggccagccgccccatccgggagggaggtggggggcagcccccgcccggccagccaccccgtccgggaggtggggggcgcctccgcccggccgccaccccgtccgggaggtggggggcacctctgcccagccgccccttctgggaagtgaggagcccctctgcctgaccgccaccccgtctgggaggtgtacccaacagctcactgggaacgggccatgatgaggatggcggttttgtcgagtagaaaggggggaaatgtggggagaagatggagaaatcagattgttgctgtgtctgtgtggagagaagtgggcataggagactccattttgttctgtactaagaaaaattcttctgccttgggatgctgttgatctatgaccttacccccaacccggtgctctctgaaacatgtgctgtgtccactcagggttaaatggattaagggcggagcaagatgtgctttgttaaacagatgcttgaaggcagcatgctccttaagagtcatcaccactccctaatctcaagtacccaggg

SEQ ID NO: 6748 - DNA, 1705 bp, Artificial sequence
  DNA replication origin
ctccccctcgccacgcttattggccggagcggcggcgctcgccgggtaggcggtggcggcgtccctcccttgcgccggccctcaagaggcgacgaggaagcggccgcctccctgcgccccgcccctccggctagctcgctggctcccggctcctcccgacgtctcctacctcctcacggctcttcccggcgctctcctggctcccttctgccccagctccgtctcggcggcggcgggtaggtgcagccgcaggcggggtccgattggaggggcggcctcctcactgtcccggggctgcccgagccttgccctgcggcagctgggtaccccacggggcccgcccgaggcgtggaagggcggtggccgccggcctgcgagacgcgggggcgtccgagggagggggccaggcggggggctggcggctttgaccttcggagtctttgaggcgcgatctaggggggtctttggagtgaggggggctgagaggtccagcttttgagggtcggggcggtggggccgagcgacatgccttgggctctggatggggctgagccgcggagcgagggtcggccgcagtctggggccctgggtggggttcggaggtgtaggagaactcaggggtcgttttctgaggctttgtgggggtcagttgatgtgaggctgaggtgagccttagtatgtccagtcagggattatgggtggggctgaggggtggtctggagaaccgggccctaggcggggctcttcccccttgcaaaggccccgacactgtgtggggactaaagcgtgtgtctggcagtgggagtgcgaaagggtcacattagggtgggggtggggagggtacagggactaggagaggcagttggaaacattacccagaacagagattgtgatttagcacatggaacaagttctccgccggtgtgagttagatccctttggtgaaattgtcctgtggaggagttgtgagggttttgctcacttccaggaacgggtaaattaaatgcatttgctgctttggggaagaggcagtgattgattacctttaggtttgtgctttaggacccaagctcggatgaaatacgtgttcctcgcgaaggttagtgttacccagctttctactggaaacccccttttctcctttgccttctctggtcctgttacagtattgctccccagggcctctcgattctctctccctggttgcatagcattgcagtgtttcttgcagtgtgtgtgtgtgtgtgtgtgtgtgtgtgtgtgcgcgtgcgtgtgtgtgcgcgtgcgtgtgtatgtgtgtgtgcgcgcgcgcgcgtctcccgcccatttccctgctgctgtgcttttggcaactgcctctgctctttcccagggatggttgtggcattgcatcaggggatatttgtgcttgtaatttgctcactcagcccaggaggagggtgaatagtatgctgtagagatggggggcgggggcagggtgccgtcagcttggctgggtagacagagaaatgggtgtggtgagggaatacagctgctctaggcctttggggtaacactgcccagtcatcagcccaaagagattcaaagagcaccaccagcagctatttttataaatcaatcctgaatccaagctgagcacatggatttagagtgaacagttgtcatgctctattacaagctgggtgtttggtagacaacattaaag

SEQ ID NO: 6749 - DNA, 1285 bp, Artificial sequence
  DNA replication origin
agcgggtgggagaacagcgaagacagcgtgagcctgggccgttgcctcgaggctctcgcccggcttctcttgccgacccgccacgtttgtttggatttaatcttcaggttgccggcgcccgcccgcccgctggcctcgcggtgtgagagggaagcacccgtgcctgtggctggtggctggcgcctggagggtccgcacacccgcccggccgcgccgcttgcccgcggcagccgcgtccctgaaccgcggagtcgtgtttgtgtttgacccgcgggcgccggtggcgcgcggccgaggccggtgtcggcggggcggggcggtcgcggcggaggcagaggaagagggagcgggagctctgcgaggccgggcgccgccatggaactgggcccggagcccccgcaccgccgccgcctgctcttcgcctgcagcccccctcccgcgtcgcagcccgtcgtgaaggcgctatttggcgcttcagccgccgggggactgtcgcctgtcaccaacctgaccgtcactatggaccagctgcagggtctgggcaggtaaggagagaccggcgggcggtgctccgggcccctggcctcggtgtcggcctcggagagatcaggccaggaaacggaccgggagaagggcgagacccgtccgtccgggttcgccgctcggggacagccgggctagggcctgccatgtgcacccccgcccgggcggaatgttgggcgggagaggccgtcgggaccttccaggggaagaggtggagatccttgggcctaagcccgagccaggcccaccttcacccctttcggattgctccgtactctccttctatctctatccctggaagctctttggaatctacccccgcggggaaaatcaggctcttctaggcactcactttcaccctttgctaaaccatcctcaggatcttcgtttgctgtgatctttgttccttctcaacaaaggaccatggcattttctttcctggcgtttatgtaaaatcatctcagtccctcgccctgtgcacattcctgatgtccactctgctgctttcctaaggccaggtctttttacccaactttcagaaagcttcctgggcttttcctgatagcaaaaaatgcatcccacggtgtttcccgcggaagagctactttcccttcaatctctggcatcccgtttgctaagcacatgtcttgtgcgtttcccaacttctgaaaagcagaaagtgtcctgttcaactttcatcccgactctgtctcagtacttagaacacatgcttttattttag

SEQ ID NO: 6750 - DNA, 1426 bp, Artificial sequence
  DNA replication origin
aaaaaattaccgggcgtggtggcgggcgcctgtagtcccagctactcgggaggctgaggcagaagaatggctgaactcgggaggcggagcttgcagtgagccaagaccgagccactgcactccagcctgggcaacagagcgagactccgtctcaaaaaacaaaaacaaaacttggctcaacattcctgttactgcattcattcattcaacatatgtttatttaaggattactagaacaaattcagtgcttgaaataataccacaatccctgctctcagggagctctggtccgctgagcataaagctccttctaataatggaattattaccatgacaatagctgtggtttgtggagggatggtgggcacctagaggaggggcggggactggggaaggcagtacggtggggggcacgtcctaaaggagattaaaactaaaggtcaaggttgctggagaaggggagcttggggctggtgggaagtgctttctaaggaaacggccctcggcagccaggaggtgaggaggaacgccgtacttgccgggagctactcctgagttgatccagtcggttctagaatgggcacatgggactggctgtgagggacagttcttgaaaggattggagtttgctgaagagtttggccttatcctgtggacagtggagggtgtgtgataaccggatcagatttgctttagggtggatcagtggaggagagtggggaggcctgaggaaaaaggaggtggctgtctcaaaagtctgggagattctgaagcaaggtgggggccttggagacaaaggaagggaatgattctgtgagccctgaaggaggtagatctcatcagattttgataattgagagttaagattgtagggggctagagggaagggaggaggctagaatgattcttaggtaatgattcaagtacctgggtggatgtaacatttcaacaattggaggcatacttcttggaggaatttgatgagctcagttttgtgctggtggactggctggggggtgtagtcaggaggcagatttggtgttgattagcatgaagatggtaatgcccattgaggatgtacaaagggtttttaggaccctggatctggggagcaccagcattgaggacttgatgtagtgagacaggaccgcaaagctggggctgagatagaaaccacaagggagtagccgagtccatagttcagaggtgcacccaggagagtcactgaaggtggccagaatgaggtcacaggcaactatggaaatcatgtaggaaggcgaggaggtggccacagaaggccatgggaagggaaaagttggcacagaagctacaatacagttcaagtgtgccaaaatgcatgtacacaaatattcatggccatgttaatcattttagctccaaacagaaagcaaccctaatgcccatc

SEQ ID NO: 6751 - DNA, 1020 bp, Artificial sequence
  DNA replication origin
gctcaggccgttcccctggccctgttactctcccttccatctcaagtctgccttcttcccagattcctcccctgacactgtggcctctgccacctccccttatgccttctcctgcagtaggggcagcagcagtcttgcctgaactagattggtgttgccaccacagctgcaccatgacctcagggctgagtatctgcatgagcagccctgagagctccaattcttttatttatttatttattttttttttttttttgagatggagttttgctcctgttgcccaggctggagtgcagtggagcgatctcagctcactgcaacctccgccttctgggttcaagcgattctcctgcctcagcctcctgagtagatgggattacaggtgcccaccaccatgcccagctaactttttgtatttttagtagagacagggtttcatcatgttggccaggctggtctcaaactcctgacctcaggtgattcactcacctcggcctctcaaagtgtagggattacaggtgtgagccaccgtgcccggccgagagcaccaattctaagtccacttgtgacctgagtgatgtgacctggctgttggttggcatcttaccctggcagtaacaaaaaggatggctggagagtggggacctgggacataaagggagatggggaaggctggtctggggtacaggcaaggtgccaggagaggcagcatgcagttctggcctcctgcaggggttctgccactggggagcacaagggaaagaaggaaactgaccagattctgagctggaatttttactgggctgggcagagatgtccacagtggatagtttggaaaaggctgagatgggggactgcaggagaggggtggtcatgagagcttggagtagttggagccgtcttagaaagtcttaggcacgcccagctactcaggaggctgaggctgaggcaggaaaatcgcttcaacctgggaggcagaggttgcagtgagccgagattgcaccactgcactccacccag

SEQ ID NO: 6752 - DNA, 939 bp, Artificial sequence
  DNA replication origin
ccgtccgggagggaggtgggggggtcggccccccgcccggccagccgccccgtccgggagggaggtgggggggtcggccccccgcccggccagccgccccgtccgggagggaggtgggggggtcggccccccgtccggccagccgccccgtccggccagccgccccgtccgggaggtgaggggcgcctctgcccggccgcccctactgggaagtgaggagcccctctgcccggccagccgccccgtccgggagggaggtgggggggtcagccccccgcccggccagccgccccgtccgggagggaggttggggggtcagccccccgcccggccagccgccccgtccaggagggaggtgggggggtcagcccccctgcccggccagccgccccgtccgggaggtgaggggcgcctctgcccggccgcccctactgggaagtgaggagcccctctgcccggccaccaccccgtctgggaggtgtgcccaacagctcattgagaacgggccaggatgacaatggcggctttgtggaatagaaaggcgggaaaggtggggaaaagattgagaaatcggatggttgccgtgtctgtgtagaaagaagtagacatgggagacttttcattttgttctgcactaagaaaaattcctctgccttgggatcctgttgatctgtgaccttacccccaaccctgtgctctctgaaacatgtgctgtgtccactcagggttaaatggattaagggcggtgcaagatgtgctttgttaaacagatgcttgaaggcagcatgctcgttaagagtcatcaccaatccctaatctcaagtaatcagggacacaaacactgcggaaggccgcagggtcctctgcctaggaaaaccagagacctttgttcacttgtttatctgctgaccttccctccactattgtcccatgaccctg

SEQ ID NO: 6753 - DNA, 971 bp, Artificial sequence
  DNA replication origin
cagggccacatggccagtccacagaggagctgggaccggaatttgcctcatggacgctggacccctctatcactttggccctttatctctcctggctgtgatctctccctctcccaacaccagccacccatcccagcttggtgtctcagctagagcaccaaacagggagtaatttgaggtcgaatcaggagagacttcctggaagatgtaggggcaaagaggagattgctgtgcctggttggaggtcagggaaagcttcatgaggtgaaagggcaggccaaacagaaggatcggggcagagctgggagaaagagcaggaggctcagatgagcctatgtgatgggggcatacgtgacagtctggcacttgcagtgtgcagggctggggtgagggcagtgggaaccaaaaggccacaggccctgatgccagcctagggggtgtgtgggctcctgaaggtagagggttgaaatggccaaattggtggtttaaaggaacccctggacaacggtgtggagggtggactgtggtctggggagagcctgaaacctagagaaggtggagtctggaggctggggcagcattgcatgggagagaagatggcggcaggagccaggcaggggtggaaggagaggccagaggggagtgctttcgggaggaaggagccaaaggtgcttcagggctcatgcagtgggcactcagcagaagagcagtcaaggaggcccagtggggacaaccgggacgttcatgggagtctcgaactcagagatacagactgggtggtgtctgcctattataactggtgtcctgggagagggcgtccccagggaaacccgaggccagggaagagaagcagcccaggaggtgaccccacacgctctcaatattaagaagacagcccttaggggagaccaagaaggagccaccagggaggcaggagggacagcaggagagtggcatcaggggagaccggg

SEQ ID NO: 6754 - DNA, 840 bp, Artificial sequence
  DNA replication origin
gtgagcgagtctgggatggacacggggggatgggtgagggtggacagtgctgtgtgtgcactcagattccaggcttttctgagaacttcaaggagggcttaggggagacctctgacctcccaagccaaggcttcatcccggggccacctcagttttaagggatgagcaagaggaggggacactgtgtgccaattcacaggtgaagttgtgtgcagcaagtacagcctggtgtggctggggcatagaatgctggccaggcgtggcagtaggccagggccagttggtcaggactcactcctggggcagtgggagccacagaaggtctgggaacagggaagttatgtgaccagacctgagagtttggtggaacattgtggctgctgtgcatggatgagctgagtgagggagtcccaagagggcgctgtgctgtcctgacaagcagtggctgggttcaagccgggtgggagggtgcagggcaggcaaaagctgaaggttggatgtgggggatgaggaagaaggaggggagtcacacatgatccctgggcctctggctgtggtaagcttagacttggagaaggtgagtctggtgtttgtggggtttccagatagagacatggattgttcaatcccagagcagctctgggctgctgattgggtttaattccttagggtggtggaggtgtctgcctgccagtagggaagtagggaagagagttcatggagtgtcacagtttgagggatgtgtgaggaggggagctgggaagcacaggagactgagtagttggagccgtccgggagcacagaggttgggagtctattgtcatagcagtcaaagccgag

SEQ ID NO: 6755 - DNA, 1083 bp, Artificial sequence
  DNA replication origin
cctgaggcctccttcctgggctgggcctcaccagctcccagagcccgggggtgtcatactggtagtcgaggctggacgggaggatgaggggggcgggagggccctcaagctctgctgagtctccatcacctgagaggagggtggaagtggagaaggcgggtgcgtcaccccccgtccactcgtccgcctcgggcagctcgccgccttctctcgtgagccagtccagggcgggcttcacggagcccatggcccctgggaaagtggtggcaggaacagtggcagggggcaggtccaggggcactgtgggatgaagagcctcggggccagggtctgcagggggcactgctgctacctctgagggtgacagcggggaggccaagaggtcctcaggtgtggctgagggtctgaagtcagtgggggcagggacagcggttccaggtccattttgggggctgggaggggagggctcctcatggagaggcgaccctgtggagccaggggaagatatggagccagaacctgcccatggcccccaggggctgagcagggaaggactagccccaggtgagatgtccgaagctgtggctgtggagggagccccaggctccacgggaagggtgtcaggagcaggggtggccagggctttgggggctgtgggtggggaggggctgggtccacctcttgcaggagggtctggggagacaagcgggctctgaagggggaggcagaggaagacaggaagggccactcagcaggcaggcgcgggacaggaggcaggcaggcacagtgtatgttaagaggaaaggagaccaaggaaaagagaaataaaaacagcccattaattctccactggagaaaactgcgggggaaggctccaggggtgtctgtgccgaggtggggcatgaaggccagacatcccctgcctctcagctacaaatgccctctcccaaaacaggcgggatgtatcggcggctgttctccagggagtccgtcacatacagcggctctggtgctcaggacagagcctcacataggcagacagaccccgggccatgagaaaaactctcacactgggacccccaa

SEQ ID NO: 6756 - DNA, 858 bp, Artificial sequence
  DNA replication origin
gggaccagcactactactcctatgtggagttgcctctggcctgcgaaggtggccgctacgggctgatccaggctgcagctgtggccacgtccagggaggtggcgcatggggaggtgctctttgcagctttctcctcggctgcaccccccactgtgggccggcccccatcggcggctgctggggcatctggagcctctgccctctgtgccttccccctggatgaggtggaccggcttgctaatcgcacgcgagatgcctgctacacccgggagggtcgtgctgaggatgggaccgaggtggcctacatcgagtatgatgtcaattctgactgtgcacagctgccagtggtgagttccagtattgccccacttttccgcctctctgaggccactggccaagcatttgcagccaaggagctgcccagagagtccgagggcagctggtggtagcacgaggatgatcagatcagcaaatattaagtgcttcctatgttgcctgggcagtggaagggtaccttaccacaaatctggcatgcgggtggcagcagtgtctggatgggcttggaccaggatgctggaggggtggcacttgtgtcggtggattgggagggtgtttgggggttcttgggtagggacagggacctagaatggaatgagacctttggttcttgagcaggagaggaaggtgaggtcgggattgatgagctgtagcctcaggatggataaaaaagggaagagagactgggggcggggatgagattgtcccaggagggccagcagagaaaacacagttgtacagggagagctaccagagcggctgggggagggaatgaggttgtccagggacgatgcggccgag

SEQ ID NO: 6757 - DNA, 1292 bp, Artificial sequence
  DNA replication origin
ccgacgcccgcctcggcgcgcacatcccgcggggcccggccgggtggtgagtgcggggctcggggccagggcggcgaggaacggggctcccgaggtggaacgggccggggccccgatcccgccgggcaggggcggcctgggtgagtggtgggcggctttggttttgagagttgggaccacacttctccgcgcgaagggaaactctggcgactccgcctggaacgcgattgggagactgaggaggtggagctgctcctccgcgccccctcctcgccgtcgccgccggggaccggccggccccttccccgccctcccagggccagtgatggggtcctcgcctcggggtctgggggttggggagggtcaaggacgagccgagtggggaggtcggggcttcccctcagtagtaacagccctttctggctgctcccggtgggactgacaaaggcggacctcgagcctcctgacccccgggcgggtgggggggaccctcctctccacacacagacatattaagtgggtgatcgatgagcgccttgggtcatcgcaggtgcctggtaaatggtggatctccccacccctcctcaacacacagaaaacagggcgggcagcgggcaccactgcactgtcaatgaataactcacctctgtagtgaaccctgggagctgagcaggagggtgaaacgggaaggccggtttcccactaactggcaggcaaggcaaatgtgggctgtcctatggcccctctgcaggtgcggaatggcggggtttgtgagccccttttgttgtcgaggacagctccacgggggtccgggaggtgcttgctctacagacagaagttgggcagtcttgcgccccctgaaaaggttcagagtagggtggccccagaagagactccagggcatgtgtgggggagcactgggcacaggcagagttaggctttggctgtgagtctgagcagggcctcagatattgggaatgggcaggagatcctggctgtgtaagttggggatgtgaggtctggttctagatcagccttttcagtctgccctggcctggtcattaataaaagtggggccaatgtgttccctttgagagaccaagtggcttggagggattgtgggccccctatctcccctacttgttgggttttcttgggtgtgaaatgggggttcgttcaccatacagggagcatctggtctgtgctgaagtctgtgtaagttgctggggcctctgaatcagaagccatactccctgccttcaaggagcttcaagtccagagtaggagggtgg

SEQ ID NO: 6758 - DNA, 1044 bp, Artificial sequence
  DNA replication origin
agaggctaagggtgagggatccagggagggattgctatgctggtgcagacaaggtgctaagcacctggactcaggtgctggaagtgggagtggaggaaaaggggtgacctgacaggagacccttgatagctggtgggaggtgggaagagggtgtctctagctctagggcagtagccagtgtggatgacctgaacctcctgattgaggctcccctagcctgtggaggccttggaggctttcagatgatgcctgtgacgtttttgcctcccaggaagctgtgccaatggctttgagccaaagtcctccaaaagtcctaataggatgggccaggttctggtcctgagttagccgtgggcatgccagggtgtgaagggccctgcacagggtacaaatggtccccaggagagaacctttctgccagcgtttcctcccgcagaaggcccaggtgtttgccagtgagggagcccagacttgcccaacgcttctcagcttggggtgggtccaggtctgggtcctgggctgggaagaaaggaaggaagtgagcccttgcttgtgcgcctctgcagcccaggttccctgccttcacagccccgctagaggtgggatcacccccacttactggtgagcaaataggctggggggggttggtgtcaggttacatggtttagttgatggcgcaagcccaggtccaaagcccatgctcttctcaaacagccagaggtgggggccggaaggagggattggctgttggggagtagtgggagcaggggcggtgagcaggggcggtgggcagggccaggtgcgcaggggagaaacaaggcgccttggagttcaggtaaagaaagttggggaggatgaccaccggagccgggtaaggaagggaaagggagctccgggcgcggggcgaggccgggcgctggcagaagaacgggtcgggctggtgagggactcgggtgctacccggctctggacgggcgggaagaggccgggacgctgttccaccagcacctgcgggtgcggagcgcgaccccccgcctcggctcc

SEQ ID NO: 6759 - DNA, 1560 bp, Artificial sequence
  DNA replication origin
attttggatttcctccagttacctgactgtccggtgtcagatggcctgggagttccagtgagtggaacctagcctgctgcctactcatttcgtgaccatggttgcttcccatctcctggatcactttctctaccatgtgggggagaacttcctggttctagtactggaggagtgatcagaggagagcagggaagggagattgggagaatggttgataaatgttgctggggacataagtatagggattggtggccagtctggatccctggtacagagattgctttgggcagcagtggtgtgccacgggggctgggtgcacacccccacacagcccggggatatcttccacaggcataggcagagctcaggacaccgggagtgtgcatggagaggcagtgatagggaggggggggtctcccacaggtgggaggtgcagtggggcatatgtatgatctcttttcagaggggaacagtgacccttgaccttgactaaatggccatgggtggccttgtgtgccctgagtaaacaggagctttgggctggtattcagtcctggtgttggagtattggaagtcaggcacattccagagaacccactcccctttgagagcgcagggtagctatatgcaggggggccgcaggtggggactcgttcactggtgcctgtgcagagctctcagagcctgtggagtcaggagtgtttcccataaggcatactttcttcttggagcctgtgttcagtcttgggcagtgagcatggcccaaatgccccccaccccaggttctcagcacctggtccctcagtcaatctatccttggcgagtaatggctccccagaatggcatgggatggaaagacccctgtgcttagagtgttcacattccttgtagggcaggaggtagcgtatctgtgtacagatgaaaggggttgtggggtttggaagtcccagtttcctctggggtgagataggtcctgaagtgtgtgcttggatgaatggatttggggagggagggattctgtgcatgtggagggggctgctacaagctacataggcaggaaagccaaagtgggtgagggactggggcagactgtcctggctggggtggtgatgggtgtgggggagttgtgcagaatgatgtcacaggcccggggtgccaggttggcagtctgaggtcagaggctaagggtgagggatccagggagggattgctatgctggtgcagacaaggtgctaagcacctggactcaggtgctggaagtgggagtggaggaaaaggggtgacctgacaggagacccttgatagctggtgggaggtgggaagagggtgtctctagctctagggcagtagccagtgtggatgacctgaacctcctgattgaggctcccctagcctgtggaggccttggaggctttcagatgatgcctgtgacgtttttgcctcccaggaagctgtgccaatggctttgagccaaagtcctccaaaagtcctaataggatgggccaggttctggtcctgagttagccgtgggcatgccagggtgtgaagggccctgcacag

SEQ ID NO: 6760 - DNA, 1293 bp, Artificial sequence
  DNA replication origin
cgggtcgtcagggtccggggcagcggctgcggagaagccccgggcccgcttgctcggggggtgcccggtgcccggcggcgggccggggcgaggcgccgggggctcgctccgcctcttgctgcctggcgcggaggtccccgccatgctttccgctcaccccaagtatccgacagcgccgagctagacttgcctgccgccaggccggagaactggaccaaccgtccgcgcgccgccgcttgcctccgccgcgagtgccccgcccctggcccaggggccaatcagctggcaggcggagggcgcggaggaatgacgaacgtccgagcgcgccgccacacccggccccgcccggtgtttagaggtccacgggcgggattcggcaggtttgctgcaaggactcagtgcggcgcgacccgttaccggagaggcgggccggaggcgcaccagctccgccgcgctggtggctttgcgctccctccctggcattccgtggaggagggccgcgcaggagcagcctgccctagcattcacgcgtgttgcgtttgagtcgagccaggcatcattcagggatgtggtctccgtgacctcgctttccttctgccgccagacccacctcccacaaacccctaggctttcttgaggagagtggaatttgttgggtgaggagtatgaatagagctgtcgtgtgcagacatcttcgggtttagtgaatgtttcacatgtgtacatttgaggtaggcccagggaggaggaaagtccaaggaggaatgatgtttggagctgttcttgtgtgggagggggtgggagctgctcaggctgttaacatccattcctctgagtgctggactgtttttttttcctaagctctggttgtatagaatagggctcaggaggtcaaggaagtccccctgtaaatggcacctgcgctgtcctacaagttgagtcaagttagcaggatagaggggtaggaggctggcacataagactaacacgagaattctacattgaaagggaggccacacaaaggccaggtaagagttaccggtggcgaacagaggtaaagcttcacaaaggagcagcaatttgaggtgggcttgcgtgcctgacagattttattgggcagctgtggtgtgcagaagttagccgcaatagagaatttggcaatggagagtaacaggagcaagactctttcagccttacctgctcagtgccaaacttcacctgtgagtgtcctaggaatatttgtgaaagcattaaatgaaaagagtaaatgaaaaagagagtgctatcagggcc

SEQ ID NO: 6761 - DNA, 1558 bp, Artificial sequence
  DNA replication origin
gaagaaataagaaattattaaagggctttcattaggggtgttcatggctgggtgcggatggctcatacctgtaatctcagcactttgggagaccaaggcgggtggatcacctgaggtcagcagtttgagaccagcctggccaacatggcgaaaccccgtctctactaaaaatacaaaaattagccaggcatggtggcgggcacaagtaatcccagctacttgggaggctgaggctactcgggaggttgaggcaagagaatctcttgaacctgggaggtagaggctgtggtgagccaagatggcatcactgcacttcagcctgggtgacagagtgagactccgtcaaaaaaaaaaaaaaaaaaaagggtgttcacgtatatctgtgtaagacacagccagatttgagttttgaaaagatcactcagaatgtgatgtgaagcctcacttgtagggagtcaagactggaaatgggaaaccaatttagcagaccattgttcaagagaggactcatggtaacacagatcaggcagctggtagaagcaatgtgaataggatagactccagagaaggattaagaaggtaagcttgacatgctttccaaataaattagatgtagagtcaaggaaaggggaagagtcgctttgtgccactggatggagagtcgtgctagttacttccttgtggaacatctggtcatcattctctgaatgtctgctttgccggcaccatgctagaagtgctggaggaggactgggtttccaggaaatgatcgtgttgagtttaaggtgccttgagacacccaagtacagatgcaaggtgcactcaaaacatttctctttctgggagtcctcaagacttcactcactcctcaactagaatgtaagctccatgaaggacagtttttgtattttgttcattgtaaggtcagctgcagttcctcacgtttgggcacctagcacagtttactggttgtataaaagaataaatttatttcatctcttgcctgtgtctggctcctcccatgctcacactgcccaagggagacagtgggcttcataagatctaaagccgctcaaacttgtcacaagaatgggtccccatgcatgggtagtgatggttctgatggtggtggtaggtgtgttccaaggatctctgcttagaaccaagaaccaagtggcctaaactttagaaaataacgtaaaatgtcaacttagccttctgtgtttcaaatcggctgtttgacctggctaatgcatttccccctaaaatcaaaggaccttctggaagacaaccgctgcttaaatcagggtgttcccatattttaaaaaggcgaaaaggcagtgctggccgcgaggttccgaagccacagccatcaaggggatctggcgcggttgacaactccctccgagcaaaaggccgcgaggagcactcactggacacgtcccgagccgcggccggacattggctcagggcctgtgacgcgagggtgtcaagctcctccaggtcgtcggcagtgaagtccccatgcgcgccgaacgggtcgtcagggtccggggca

SEQ ID NO: 6762 - DNA, 1438 bp, Artificial sequence
  DNA replication origin
agactccatctcaaaaacaaaaaaaaattataataaactttgtggcaatgtggttactgatttgtaacttcatcctgttgtggtcagagaagatcctttgtatggtatctgtcttctaaaatctgctgagacttgttttgtggcctaacatatgttctctcctggagacagtctggtggacacctgagaggatgtgtggctttgtgctatgagatcccggtgtgggcagagtccacctctggaaggccattgaagccaccggttcatagtagcttctgtgcacgttttgtggtgccctaaggtagtgtttgtgctggcgctcggtggggcttcattgtgctaatcacaaggtttcctgtttgcagcgtgcctgccagtgtagagccggtggagcagctgggctcggcgctgaggtttcgccctggctacaacgaccccatgtcagggtaagtaaagcctgctggctgggtgcatcttcctggcaaaggtgacaagagggctcaggggggccagtgtgcatctgggggactgggatgattcggtcattggggtggagcccaagaaactgtcaccatatctgaccactaggacacttgctccttatgctgtgaaggtgtcttcattagtgtgctggggtggtggggacgtgggtgactgtggtcgggggttgacaattgaagggccaggggtccggggtacattgacctagatgctgggttgagtcagcagatgactgatgggtcccgatgggggcaggagtgacagagaaggggctgtagtgggcatgcgatgatggtagatgggggcgggtatattgtgattgggcattggtgacaatggtgatggtgatggggtgatggtggtgctggcaagcacatggtattggggtgataacggtggggagaggtcctgggacaaccaatgatgccacagttcctgtgtgaagctttgtgggtcatggttactgtgtcaggactctcctctcagggaaccaaggagcaaccccagcccccaaaccccagtccccttggctgggctccggcctgtgttattgccaccgtaacaggagttgtgacatcttcctggaggtggaatgggtgtgcagccactagggcgggctttcctgcctgggtctgttccacttgctgtctcccctcttccctggtggatctagaagccgcttaaagaaaaggtctgcccaggagggcagggtttcccctttggaggaagagaccttgggctctgggcctgagtggggggcttgggttcttgttttgccccatcccatcctgtaggcccaggcaggtgtggggcctcactggctacagcagaatcagggcagggctcctgtgcgtggaggaggggaagaagtgcagctgtgcccctcctcaacacctcagggctggttggagcctgagatctctacaggccttcccct

SEQ ID NO: 6763 - DNA, 1803 bp, Artificial sequence
  DNA replication origin
ccccagcccacacagtaggcgctcagtgtcagggtgcatattcccggggacgccctccaggcctgagagctgggggccgccgccgccccccatgcatccggtgagcagaaggaaactccgtgcgtcgcccggcgcctgtccgagtctgggaaccggtaccaagttttcgcgcagaccccgggcgcgaagctggccccgaggctgggaagtcgtccgcttccttccttcctcctccttccaccttcctccctcctccctcctccctcctcctccctcctcctcctcctgctcccccggacagaggttccgggaaccagccgggccggggcggggcggggcgagggagaggggcggccgcgcggatcactgaggctgtggcggcactgcgcccggcgctcgcgtccgtccgcccgtccgcccgcccagccatgactgcgccggtccccgcgccgcggatcctgttgccgttgctgttgctgctgctgctaacgccgcctccgggtggtgagccgggggtgggggcggcccgtcctgccctgggaccgggcagacacttccccgcgctgcctctccaacgagccgggcagcaccagccccactatgccccccactgacccctgattgccccgaggccgtcagcgaacccccacgactgcggacccctcctccaccccagcaccctccttgcctgaacaaccctgcctagacaccaggcagctgccacctttgtctgtcctggaacggtggggaggggtctgccctcccgcccatgttccaggggatggagtccccagaggctagggtagggttccctgcctggctttagtctggcgggtggctgcagggcgagctggcccctccatcagaggccttccctctttgcctctgtttaatgtctgggagcccccaccgctgcctccgttggcccttgtgttcctgtagagcccggcgctgaggctggcctctggggtggagacaccactgtgtgtgttggttgcagataggtgattcacagagtctggaaggctggctgggggcgggtcctttaaagggttaggaattggaacaatcccctgcccacccatgggaagccaaagacccttttggggtgggtggcttcgtggaggggaaggctgtatttcctgggggctgggatgaatccagaggacctgggctagagaaatgagaaaggggagacttgtgcccagaatccgcccactcctggagtgagcctgtaggagggtcggtcactgattcagtgaggtctgggggtcagagagcatttgtgccatggactcagcctaaacagcctcaccggtgtgtcttcagccctagctcagaggctcagattgggctgtgaagaccttgctgcatatgggttcacctgagccaccaggcacgggccatgctgatgataccagctttcaggtgggcagctggccaaactgggcttgtcaatggtccaatcctctgctccatggctttgcccagagcagggttctgcctggagctgccaagaagtgcagttccccccaactccccactaaagttccctcttcccaaggaggtcacttggtgtctctgtctctgggcttcactctactgacagcctcggggtgtgtggtgtcctgatcaggcccgggcaccagatgctgcacatggccaggtgcctggcctggctgggtctccagaggccacgtgctatggcagactgtttccaggccgatgtagttatgcctcagggctatcatcagacctgtcccctgcctactgcggacttgtgggccttgctggactaggtat

SEQ ID NO: 6764 - DNA, 1596 bp, Artificial sequence
  DNA replication origin
tcaccacaacctctgcctcccgagttcaagcgattctcctgcctcagcctcctgagtggctggtattacaggcatgcaccaccacacctggctaattttgtatttttagtagagacggggctctactgaacatggagatgttggtccatgtctatccaacatggagatgttggtcaggctggtctcaaactcccaacctcaggtgatctgcctgcctctgcctcccaaagtgctgggattacaggtgtgagccactgcaccaggccttgtttttctatttttgagacagggtcttgctctgttgcccagactggagtgcagtggcacaatcataactgcaaccttcatctcctgggctcaaatgatcctcccacctcagcctcccaagtagctgagaccacaggtgcttgctaccatacccagctaattttaaaattttctgtagatatggggtctccttatgttgcccaggcttagaacaactcttaggagcttggctggggggcagggactggaaaaccaaggaacaagaaaccaagcttgtggatggtgcagagtggaatgagcaacctttagggaggcagagggctgggcacccagggtgtggaacacaggatggctctagagctggacatgaggagcatacactggccattctgcagaagggggacctaggctgcacccagctttggagagtggcgctcaggaggcagaggtgggataaccaggctgggctgtcagggaggatgtgactccagtccctcactaagaccctcccagagggcatcctgcctgggaactgtcatatccctgccccccacatgtgtattgagcacggtgagtcttaagcccttcttggccaggaggtgatgggggcttattggagacccaggccttcctctccctgttctaacaccctagcctgggaaactactgggaacatcccagattgtccccttgggtttctctttgtccacagcgatgcccccacctttaggtgagaaatatatggtggcacacagggtgcacaacccagcctgggtgccccactagtgtgacatttcacgttttctgtcttgagtgaaatgttctgattgtgctaggtgcagagtgggggtgggtcaggaactctgggcataaaaggaagaatgactcaacatccctgattctgcctggacccctgccccgaagtgagggggcggagccctgtgtgggaagttggcctggctgtgtgccctgggagctgccagtttctagctcagtcctggcccactgcgccagcgctgagcctgccagggctggggctggggatcaccttgggatgatggtgtcagtcccagggggcaggagatcgagtgtcctctgagctggcgactgggcctgtagaagggaaccggcatttgtggagtgtctactgagtgccaaggtctgcgctgggcactgtcctcgcaccgcctcacctagtcctcacgtagccctcgggcaagtgaggatccgccgggactgcggctgggagggatggctgtggctgtcccccagcccacacagtaggcgctcagtgtcagggtgcatattcccggggacgccctccaggcc

SEQ ID NO: 6765 - DNA, 708 bp, Artificial sequence
  DNA replication origin
tccgggccttgaactggggcgggaccagtacaatccggagttgagcatgcgcattctcgatcctggcctgaagaactgggcccacttgttccaaaacgggcgggtaggtgagttgggcatgcgtggtcggaggccgggcccctttcagctggggcggagcctactcactctggggcgggacctgcgggaagatagacatgggctgtcgcggcttgaggaggggcggggcccaaggggcgggacctcgggtggcccgaggtggcccggctgctgggttggaagcggcgcagtccgactcatcccggccccgggatggcgtccccacgggaattgacacagaaccccctgaagaagatctggatgccatacagcaatgggcggcccgctctgcacgcttgccagcgcggtggtgaggcggggtcctctgggaggaggtgggaggtgcaccgggatgggtgggtagggcggcctgggcgggggtctcgcatggagaaggggcgggagacagatggggaaccggggacaggtgaggttgccgtgactggggaggctgctggggacaggtgaggcggtcgtgacagtggtgggccagagacaggtgtggcagagcagggggcggggacaggtgtgtgggggcatatcggcttggcggtggctaggtctggccaccatcacctcggggagggctctggccccctcgcttccctc

SEQ ID NO: 6766 - DNA, 687 bp, Artificial sequence
  DNA replication origin
gctgcaggagccgcaggagtcgcttctctctcttcagagtgctaggcggggttaccccactctggagctgcagggggcagtggccctggccagtttggttgcaggatggacagaggctcgttaggaggcagctccctgaccgacctggggccggggagcagcaggcggggtaggcacgggacagcgtggggagggtggagggttagggaaagacctggatgaagtcagggtggtgctggaggggtgcgagagtgttggggggtctctcctggtttaggggtgctctgagggccattcatctgtcagtggcccgaaggagggggaaaactgtcgccctgcaagggagagggggctgggccaagggggaactataaatagtgtcttcctccagcccagggggagggaccgccagctggcgctgcccaggccctcctgctctgctctttgctggcctccaagggatcatgtttgtccaggtttcctcttggggtcacaccagtttggggaagtctagaggctcatttaggatgggtttcacatgatgtggctttagcccttaaaccagcacttctagggtgtctgctgtgtgccctgtgccagtcctgagcttctctgaacacctgctgtgtactcagtttggtcatgaacctctctgaaccctttctgtgtgcccttgctggtcctgaa

SEQ ID NO: 6767 - DNA, 980 bp, Artificial sequence
  DNA replication origin
tgacccaacttagcaatgtccaatgtccaggctgtccagacacactgtgactctgtggggcactcagatctgatatgacctgcatgacagtggctccatgtggcagtgtccagacactgtatgcccagatgtggcagcgtccagacactgtatgcccagatgtggcagcatccgtccagctgtgtggctgccctccaggtcttcccatccagggtggccctatcactgtgaccccctctctcaggctcagcagtggccgacacgggccaggatgcgggcgttggtggtggcctgctccctggcagccctggcccgggcttgctccagtaagatctgcaagaggccgatggggacatccagcgataggacaatgcgcgagccagggtggcgggtggggctgcagtggctctgggcagcccacggccatgtgggagcagctgaggggctctctgaggccgcaggtcggggagtggtctggggagaattctgagggcggagctggaaggttgggataggggtcactgggacaaccaggactctgcccaacatcaggaccatcagcaacagcagagcacacctggtcatcgtgaggtcaggctgcaaggagaaaatgggctcagggcaggggctctggtcaactggggtccatggacagagacagatggcaagggcagagtgacagagcgggggatggagagagaggaagacaccgagaaaggggttagagaggccaggccaggccagagacagagaaggggagacaagaggagagccagaatgagacaaagaggcagaaagcaagacagaaaaaaagaaacaaagaaatccagagacagagggacagcaagagagggagatgaaggagatggaggcagagcaaaatggagactagaagaaaaagacagacagaaaccatcccagagacagacagcatgatggaaagaaagattcagacagaaacacagagtccacaggagggc

SEQ ID NO: 6768 - DNA, 787 bp, Artificial sequence
  DNA replication origin
cctggtactcctccacagaatactcggagtattcagagtactcatcatcctcagggggtacccgctctgcaggtagggcagggtgtgctgggagcagtggctgctggccccggggcaaggtgggcagcactgatttccactgtgtgcacacagtgcccatgcgtgtgccctgcatgcagaccctacgtgcttggcgtgtgccctgcattcatggacacccatgtgcgtgtctcggccccacccatagctgccccacgggttcagctgtcctcaccttcctcctctgcatgagagacgcggagcacaggcacagcatggagctgggagccggcagtgtctgcagcataactagggaggggtcctggagccaagagcaggggcctcagggccctgaagtcaccatgggcagccatcccagccaacccccctgagaggaccccagttgataggcagggcagggcctggggtgaagaaagttctgggagtagaaaactactcacgtgatccagatgcgatgaactggccctggcaggctagagggggcagagagggatagagagacaatgacagagagaaggatgggaagatggagagacagacagagacacacaggcagaggggtagagatacacaaagagatagcaggagagggtaacaggagagagaggaagagagagggtgggaggtagatagagagatggaaaaagagaagaaggcagaggagagggaagttgggaacaggccaacaaaaggcaagagacagaagcaggccagacacagaaacagg

SEQ ID NO: 6769 - DNA, 1042 bp, Artificial sequence
  DNA replication origin
ggaaagaaacaagattggtttttttctggtcaggaaggcctaatgttgaagggcgagggacctggggtcagatattagggcactgggtcagaggttggagtagctgaggcctgtttggagagttagtttcagggtgaagggggtcacagagtgaggtgtctgggaatcacttcttcatctgcttttctccctcagggtgaacggggagtgaagggagcctgtggccttgatggagagaagggagacaaggtacagaggggatgggggctggggggctacgtggcctggggcctaaggctcaccccactgcctgatgcctgcagggagaagctggtcccccaggccgccccgggctggcaggacacaaaggagagatggtgagtgtgggcacgctcagaatgagggggccacgggtggacgggggccaagttcatgtctttttttctccagggggagcctggtgtgccgggccagtcgggggcccctggcaaggagggcctgatcggtcccaaggtacagggtctgtggacagtggacatgacagggagtcaggatggggcagggaagctcatggtcgggtcatgggggtgtagggacaaggaaggctgtagagggttgggactttgggggctgaagtggggctggtctcgaggtgtcaaggtgggttggggtcacagtggagttaggatgaaagcatgggaggtggagggggcatgtgcatcagggcagggggctatagtggagttggagtcatggggatcacatctggttggctcacaggtgcttgggttacagaaggtttgggcattaggccagggagctcatgggagttcagggaggttccagagctgagggaggtcagggcagaaggtctctcatgcttcttctgttcccagggtgaccgaggctttgacgggcagccaggccccaagggtgaccagggcgagaaaggggagcgggtgagttgaagccatggtcatggtgaattgaggggagcgtgcactttgggagagggtccatctctggggcctctgattactga

SEQ ID NO: 6770 - DNA, 857 bp, Artificial sequence
  DNA replication origin
ctcacacaggggccccctggcagcaggggagagcgtggggagaaggtaggaacgtggggaaggtcctggcatgagtgggggggtgagtggatcttgtatgatattagaattcaggtgcggggcctccccagtttgggcgggactcacactcttttgcccaatagggtgatgttgggagtgcaggactaaagggtgacaaggtgagtgtgggcatggggagggcagggcaggggccagggtgctcccgactcctctgattcctgcctgccccctcagggagactcagctgtgatcctggggcctccaggcccacggggtgccaagggggacatggtgagtgggcccacgtgtggactgggtctcccctgggtgcgagagggaccccgtggggctggcccagggcatctgagagctcaaactcccagagggtgagggaccttcagccccttaccgtgacttcttacccaaaccaacccagggtgaacgagggcctcggggcttggatggtgacaaaggacctcggggagacaatggggaccctggtgacaaggtacagggaagagggtggtgtactctctgtggggtcctgtggctgtggtggttccacagcatctgtgagggcaggaggggaggacaggaggaggctttctggggtttagggggaaggggttctgtggctgactatggagtggccgagaggaggggctctagggagggctcaaggccttggtgtgaggttaggagagctctgtggactggccctatgaaggggccctatagggacaggaaaggggctccttgggtgtccccatctgaaggtgcttcagatgggatgaggaacccagtgataagagggc

SEQ ID NO: 6771 - DNA, 843 bp, Artificial sequence
  DNA replication origin
aatcagctcggggccaccctctgccatggcactagggactgacttgacatctcatccccacagggggagccgggcagcaatggtgaccaaggtcccaaaggagacagggtgaggcctctctccacccttccatagagtccccctcctttctgggggcacactagaggtggtgtgcatatgcacctgggcacgtggcagggactgggggctcagggcacgacactctgccttcagggtgtgccaggcatcaaaggagaccggggagagcctggaccgaggggtcaggacggcaacccggtaagtccttgcccaacagccacacatgtgcaagaaggtggctctcacatgtattgtcctgtgtgcagggctggggtctgtactgcctgggactgtctgggtcctgactctgtctagggggatggtgggtggaggggaagttggaactgggaaactaaggccttaaacctattctctgcagggtctaccaggagagcgtggtatggctgggcctgaagggaagccggtgagtggtggctgaagcacctggccccaggctccggaccctccgctaggtgctgctgctgctgtgtgtgtgcatgtctgtgtgtgtgtgtttgtgtgtacctgtgtctgtgtgcctctctgtgtgtgcctgcttgtgtgtgcctgtgtctgtgtgtgcctgtgtgtgcctgtgtctgtgtgtggttgtatgtggatgtgtgtgtgcaggcccgtgtgtgctatctatgagaggcagtccatgggtaggtattatctgtgactggaaagggtgaggtatggaaattgacccccaaggaaaaagcccccagaggttgggaa

SEQ ID NO: 6772 - DNA, 903 bp, Artificial sequence
  DNA replication origin
acagtcactgagcaggggggtggaggcagctgggcaatcaggaacacacagcagggcagggtagctaatgcggtgtggctagtagctggccagggtccactcaccagtcctcacaaccacagaggcagggggcccatccacgccagccacatgggccctcacatgcaccgtatactcagtatctggctccagtccatccagctcagccaccgtggcctccccagaaaccaactgggatttctctgggcctgggaacagggatggaggcagctccagggctagcaaactctgtgccccagagccccacctggacccccaataaacccccagcccccattccaccctgacctgccccctcccaaaccccagtccccaccgtgggctgagtgccaggaaaccctgtatcctgtggcgccaggaaccctggtccaggtaatggtgacagatgagctgctggcctgagtcacatggaccgtcctcactgggcccagtgggtctagtggggagaggcaatggggagtctgctggaacaggcaggaaggagtggggctatctgataggggaagatgatgggagtctaacaggagacgggaatttgatagaggagatggtgaataggtccagtggaggagtggggaggtggaggttttaggaagcagtgagcaggtctgatggaggagaaagtgtaaatctcagaggagatttgggtccagcaaaaaagggatgggggtctgagggttgaagtggtggatatttgagggcaaaggctgtgggagtcttaggagagaagcggaggaatctgaatacggggagggcttaaggggagacagctgaaactgaagaggaagcagcgtctctgagggaggagggagtgggattctgaagggggaggcaggagttctg

SEQ ID NO: 6773 - DNA, 875 bp, Artificial sequence
  DNA replication origin
cagccctggaacagcaagtggagtttccggctctaggagttacagacagaagtcagaagtcagaaccaggaccagagtgaggcaggcagctgtcctccacaagcctcctgcagtactcaccccggcggacagtgaggacactggcactgccctcacggggacccactcgagcagacacccgcacagtgtagctaagcccagcctgaacgtcatccaagtcgaatgctgtctgactcccaggaagcaccagggtccgctcaacccctaagagagaagtcagggtaggtgggcaggggtcagaaagagacagggatgtgggacgatggcagtgatggacagggacgcagagtgagaagggccatgggggtggggatgtggggtggtggggaccagagagctgggatatggctgaaaaaagtgagtgcaagacaaggacataggatgaaaggggccagtgatggtcagggacactggaggacaggagtctgtgggatcttagcatgtaggatgacaggagtcagtggactgcagtgagaactgatgagccattgacagacactgatgtgggatggcagaggtcagtgctggatggggacatgcaatgagaggttggtgtacagtggtcaccactagggtaacagaaagacaggtgattgagcttgtggctgtgcagaggtgaaagccgtggatggggtgtggggcagggaggagattggttggggtagggtaggggcagacacaccctgttgacagttcagggctcagtgccatcttgggaagcagatggataacgagacagggaggagactatagggacccaggtgtggaaggagagggctggaggtacactcagacccctcaggctggaacttcag

SEQ ID NO: 6774 - DNA, 808 bp, Artificial sequence
  DNA replication origin
ttcaccccaggggactctgctcccaccctaaccttgaggggaatgaccttcctcctgtgctctctgaggtgggataggattctaccctgccgccaccactgggactggttacacaggatgctgtccctctggtacaggtctgtcttagccccacctggttctaggatactgagttcatgggctggtaggggatgtaagctcctggccttgttccttgtggccttgcccttgggagagccagccattagttgtgtgttgatgcatgcctgataacaaaccaagaagtgccttgaaaggaaggcacagaagggtggggaagatttcactggggactcagagttggagtttgggggaggggctttttaaagcacctgtagtttgaacagaagcctgaaaggtggtgagtgttatttaggtggggtgtggggagctgagcgcaggggaagagcagtgtcatggtctaaggtttgctctgctgctgtgtggggtcacagtgcaggtaggctggctagagaggggctgtggcagggactgggcaggagatggcaggagcaagggggagcagtagatggactccaggtggttttatagatggaacctggttggggtctggacatgggtaaggaactgaggtcaaggtgcttcccatcttggctggtcgtggtggctcacgcctgtaatcctagcactttggaaggccgaggtgggtgaatcacctgaggtaaggagttcgagaccagcccagccaacgtgacaaaaccccgtctctggtaaaaatacaaaaattagccaggcttggtggcagttg

SEQ ID NO: 6775 - DNA, 1164 bp, Artificial sequence
  DNA replication origin
gcgtcgcaagcggagaatgcctgctccagcgaggcgtcgcaagcggagaatgcctgctccagcgaggcgctcgcgcggggccaccgggaatgtgcgctgaactcaccccgacgcatccgccagccccatggctcgcaagttgtccggtgcgggctgctcctgctgctcgagctagaggccgctacgctccggaaggcggcgccgggaccgggtgaggccagctgcgctctcccgggggctaatcccggggcaggacggggaggcttgggccaatcagcgcgctggggcggggcctaagtggcgcgcgccgggcggggagagactggagaaggaggatttaaccgcttcctccccggcgacctggcctatgaggcctctcgctgctcgcccggccctctgcccggagctggatgggactgcagaactggaactaagcacccgcgccgggctggccgcagtcgcgcccccaggccctgagtaggttggagctgatcccaggtcctggctcggcggaaggtgctcacggagtgggaaaaggaaactccactggccggtgaccccagccttaactcgtaggggatccaggtctgtggggcctctcttgccttcagctgagagcgccacccgcaggctttctgcgactacgcatctctttgagacccggagccaacggtccccaagtcctcccctttaactctggccacccaggccagaaatggttggaggatcccctccgctgcactaagcacagcccggacgtagctcccagaaggttactgcgcgggccgccgaggagaatggtgggggtcagtgctgttgggtgggcgtcagtgctgttgggtgggcaaggcaggaactgcaagagcagttcctcaggttggtttcaccgcaggtgagggcaaaaaatgccgggtcagggctgcagaccctgaagaattaggaagtcctgttgccgttgccttgaccagcggggaggttttccttagcaccttattttcagcacctgtgctccaacatcaggccccaattacaaagtgaggggccagatttcaaggtgaaagagatctgccatgaaatgggctaaaaatagctggatattcttgggaggggctcagattcctcccaaaggtcagtctggcttgaatcattcacagcttccatcct

SEQ ID NO: 6776 - DNA, 826 bp, Artificial sequence
  DNA replication origin
aatgggagggcaggagctgaggcctagaagtgggagatgacctggaatatgcaaggggcagggaggagagcaggaggccttgcttgggaaggttcgcctagggggtcatataggacaaggagaggctggaagtggtgccaggatataccaggctgaagggcttgctttgttgaggataaatcattcattcatcgatgtattcagtcaacattgagttcctcctgtctgtggacactttggggtggggctcacaggaactgagttggaacctggttcatctcgggtatgtgtgaagcatctgtggggaaggggatggcggacagacccaggaaatagctggatacacaggagtccgagagggactggtgggagtggggaggaaccaggagcttccaggtctcttgtaagccaagaggagagttgagtttcaaggaggagaaacagctgggtcaggctctgggggtttgtggggtaagagatggcttggggaggaagggggccctaggggtggggcaggggatcgacagaactgagcaggacccagggcagagagaggacaaaggaaggaggaaagagcaggggtttggggatcctggggcttgggcactgagggctgctgggggtggggaccagagggagctaacccacggcctgggtccccctgcagtctagctttggggtctggctgtttgggaggtagactagggactgagcaggggtccaggctctggagtcgcacaggtttgagtttgagctctgtgtcttaccttactagctgcgtgaccttaggcagaggcaagcttttctgggcctcagtttcctcatc

SEQ ID NO: 6777 - DNA, 1153 bp, Artificial sequence
  DNA replication origin
ggggagacaggggcagaggtgggggctgtgggtcaaggtcccgggtgcggcggggcggaggcagcgtgctcaaccactctcgaggtgcccctaagtcgagcgcatcccgtgacccgaagcggccagccatggcgccagggtagtcccgaggtggctgcctccgtggcagggtgctgccccgatctttgggctccagtcggcctggtgcagcatccatgcattcctgggaccctggccggctcaggggacgtagaacaggggcaggggcttcctctagtcgctcacggctcagttgccgccggaggagcaggtccagctgttctctagaagagtagcggctggctggctgtgaaaggctgcccgtgcccccgccagcatagatgcgaccgtaagaggcagctggcacagcacggtggcccaaggtggctgcacggcaccaggacagctcaggggcacctcgggtctgtggcaccagtgggtattgcaaccggttcttcaggatgcctgtgagaggaagaaaatggggggcagggtttgtgtgggagggggagggcaggcaggaattgctgagtctaggggtgtggcagcccttgggatccttccaacacagggatgggagcaggaaccccttggggagcagcagaggcaaccctggtggtcccagagaggcagcaggacaggggtcagagtggaagggcagtcatcttccagttgtggtcccggggcagggggagggcgggcaggtctcatggtgcaggggatggggcaaactccctgaggtcagaagaggggcagccctcaggtcctgacaatgcaggcctggctgaaatgcaggaaccccccgggttggacaggagcagtccccaggtccctgtgatgcaagggtgagggcagaaacctcttctccgggtccccataaaagcagagtagggggcagaaatcttccagatcagagcacgggctctgggatctgggtggggggcagggggaagcagctcctagggtctctgaaaaacagatgggctggggcaggagtggtcgcctgtggtccccctgtggtgctggccagggtagagggggacagagaattcccaggtcaggacaggagcagtccctgaggaccgtgaagcaggctagagaagcagaagcgccc

SEQ ID NO: 6778 - DNA, 1190 bp, Artificial sequence
  DNA replication origin
ggaggggagatgtgggagggtggaggggagatgtgggagggtggagggtggaggggagatgtgggagggtggagggtggaggggagatgtgggagggtcgagggtggagggtggaggggagatgtgggagggagggtggagggtggaggggagatgtgagaggcagggtggtgggtggaggggagatgtgggagggtggagggtggaagggagatgtgggagggagggtggaagggagatgtgggagggagggtggaggggagatgtgggagggtggagggtggaggggagatgtgggagggtggagggtggaggggagatgtgggagggagggtggaggggagatgtgggagggagggtggaggggagatgtgggagggagggtggaggggagatgtgggagggtggagggtggaggggagatgtgggagggagggtggaggggagatgtgggagggagggtggaggggagatgtgggagggtggaggggagatgtgggagggagggtggaggggaaatatgggagggagggtggaggggagatgtgggagggtctgacactggggaggtctagaaaggggaaaattggcaggagggcaacatagtatctggttggggggacagagagacaggacttggcccaggggtcccctaggggctctcaccttcagatggggatggccgtggggactgggaaggcagcagcacatgggtgtgaggatcccaggcatcctggcctcgaaagaggttgctatggtagcgagggtagcgacgggccccccggggagaactggggtgctccatgcggtcaatgctgagcactacccaggagaaagaaaggggaggcccatcatggacctcttccccctgccaagggttctactccctcttactcgcatcccgcacctgagtcccacaatctgttttctgtgctaccagctcggagcctgtccctacaaaacgctgagggcggtggctgagtctcctgccattaacattggcattgatagccacagcccctcagaccttcaggtacctgccctttcatggcccccctgctgtgccccgccctaccccacccacaacgcactgatattaggcgtcaccagccccatgggattcaggtatgtgagttccatattccttgcgagtgtggctgcatactcctccaggtgcctcaccagtcccg

SEQ ID NO: 6779 - DNA, 981 bp, Artificial sequence
  DNA replication origin
gacgggccccccggggagaactggggtgctccatgcggtcaatgctgagcactacccaggagaaagaaaggggaggcccatcatggacctcttccccctgccaagggttctactccctcttactcgcatcccgcacctgagtcccacaatctgttttctgtgctaccagctcggagcctgtccctacaaaacgctgagggcggtggctgagtctcctgccattaacattggcattgatagccacagcccctcagaccttcaggtacctgccctttcatggcccccctgctgtgccccgccctaccccacccacaacgcactgatattaggcgtcaccagccccatgggattcaggtatgtgagttccatattccttgcgagtgtggctgcatactcctccaggtgcctcaccagtcccgcgctgcctggggagcccccaggggcccgctgccccagcgccgcccacaagtcccctgtctctggggcaagcagtgcagagccggcccacagcagattctgggaagacagagatagaattgggttcagccaggtggtgaggatgtatgaggggatagggcaggcatgagaggtctggacaggtgctcagaggggctccaacaggcaagggggcggggctggagaggacaaggacagagggagagcccaggaccttcacttcccaagagaacagcaggagcctgagctggggatccaggggcaggaggctgggagctggggggccaaggcactgagaacatagggcacagccccacctcattgaagtgggcatcctgtgtggctgtcagcccgaagccctgctgatggctctcgaaggccagcaggtgggccagcaggcgggcagtgactcgaacatcttggctaaaatagtggtcagtgtggccagtcacctcccgtagccgctgagccagcttcttggcctccatggtatccagtgccgtcttgttcagctctaggccatcc

SEQ ID NO: 6780 - DNA, 1736 bp, Artificial sequence
  DNA replication origin
aagtgctggacaggactttagtgtccagaggggctgaaagagaccaagatctcagccccatttcccattttctttcgatgagtggggttggtaagagtcaggccctaaaatctgggctgtagcatggtgcttgccaccaaaggagactggcttgaagtcaggtatggagtcctccacttcctccctatgatggggacagggccatgggctaggctggtggaagcttcaggcctacctgccatggtgccattatttgcgacaaaagccgccatgtccactcggcggccatcaatgtgcaggtcccgcatacagccgatgaagtccttatgggatacggggaagttctcggggaggttggggacacctcccagaagaagagggcccgtcaggtccagggacctggggatcaggggtctgggtcattggtgggactggggccagagtagagttgctcctggggggccacaggaagcaggggggtaggacccagagggtagggtgattgagggaggaaaataaggccgagctgtggaaggagttaggatcttacttcagttggggtgcaaaggggcacccgtgatgggccgatggtctggggaaaggtaggtgaatgggggttgagagctatgatgaaagaatgaggcatctggctggctggggaggggatggagacgtgaagactctgggggactggacatgagatgaagggactcggaggggatgtgggacattagtgagactggggtggggaggtggaggctttggaggactgcctggggactgtgtgtgggaggagggagtatggggtggaatacaggattgggggctagggtgagtaggctttcagggtctttgagaggagaggggaatcttggtggtttgggggaaagatgggagagtttggcaggatgggatgaggaatgggatgtgaagggttggagtgggctttggtaggcaggggacaaggggactagggggcaggggcctcacttcttggagcttgtttgcacaccagcagccgcgcatgagtagttgccaatctcagcaccaaactgcagagccacggccacatcacaatcatccacgcttagcacagccaccttgtccttggaggggccctgtgcaccccctagggcatctgtccggggctgaagacgcaggcacaccagtcaacagtgcccccagtaacccctgaggagcagaagtcagcatcccaactcccctcatacccgatgccagggatggcccccaccttgttgtagtatctcagatgcactgtatgccattgcccgtcactcaagccccctggaactgtggggctgaccacggtgttggattcacctggaggggagatgcatgtggaatcatcaggagcagcggagtcgccccatcccacccgtcatataagcacaaccattcccagggccaccctggatgcatcagatcagtccccccactggtgaccacaatggctggctcagagtgcctttgaacagacaggagaaacagacttcttggagggagggaccttcccacagggaatggccaaggagctaggtcttcagggcttgcatggcgtggagtgtgtgctcaggtgcacagtgaagcaaacctgaggggacttgggccctgcgtcctccagcacacacgcaccctttcgccgtcacatccggggcacccacccgtggaatatgtgagccgcacttggccagccacgagttccagggccaggaagt

SEQ ID NO: 6781 - DNA, 1638 bp, Artificial sequence
  DNA replication origin
cctttgagcgtggcaatgagctgcagctgctggtagtcaaccagaccagtggggagctgcgactcagccgaaagctagacaataaccgcccactggtggcctccatgttggtgactgtcacaggtgaggggcagggggcaggcaagtgacccagtgacaccaacctgttgggcctcagggactccacagggcacctcaaaccaaagagggatttctaagccttccaagaaccccttaagggtagggttcctgcaccctacaagatctgccacagacctcacaaggactctgcttaggttcctggataatctccacagaatcccagtgattccaaggcatctagcagaccccataaagcctgtaaagaactgtctgctacctagggatatctcccctcctgataaaaggtcagaggtcctggggtaatcctctggaggtcctaggcaaagccagtatgggccagtcagtccacactatgcccatgttcagacgaagggttactttgggtccagtctgacgcttaccctatctgtgcaggaaatgaccaatacttgagtggtcaggaacagcagcttactatggaagcttcaggtggacagtggcttcgtagggcctgagaccctgacctttgggaaaatgtccagaggtccacttgcctctttcctgccccatctgctccagtctttcagaaacccctccataataggagagtgcaggtgggagaggctcttgaagttctgcctactggaggctgcagaggttgggaaataggcttcactggtgctcattcctcagttctggagcagggactcctggcactgcctgagaaggcacaaccttcatttatccctcaactcactcaacagtctatccttattgaccacccagtatgtgctagggtgtggggacaagacgaacaaggcagctaagcacctcaccttcatctctggggtggtcactgtgaaaccacaggacccaggtctggagtggcgagcaggctgctaactcaagaatgctggtgtgtgtgtgtgtgtgtgtatgtcagggttcaagacccccctggagcttgataacccaggattctggaggatggcattgagtcttcactgggccagggccccttctagtgtcatggaagagcaatttgctgaccaaaaataggagataggtgatccctgatctggaacccttcttttctggagggggatgttttgctggttctgctatgctggaggaggggagaagggaaaggtggctgggaatgagtggccagtggccctagctcctctctgtgtcctgagttggggtggcctgctgaccatgataacttggggaagtgtgggttactgagtacttagggtacttgagtgctgttgcgggagtgacttgctaacccatgggcactgtgtggggttgcttgatccttggcccagacccctccgtgtattggggattgggggaggaagcagcagctttttgacaccttgatgctgggggagctggtggtcactagccccagactcccttgtgtcctggtggggtcagcctgctgacttagaggttctgggggcctaggctatcgctggccccagccctcttgtgtcccagggaggggtggccactgtccccaggatgacc

SEQ ID NO: 6782 - DNA, 1543 bp, Artificial sequence
  DNA replication origin
ctgagcccacaatgctattctctttcacccgcacctcaaactcctcagctgggaagacaggtgcattgtcgttcacatcctgcaccatcacctggatactgactggagtccggagtgggggcacacctctgtccactgcgtaggcagtcaactcatacactgatactgcctcccggtctagccgccttactgtacggacaattccagaggtgggctcaatggtaaaatctccatccccatcttcaccattctggaaagtgtactggacccggccattggcatgagcatcccggtcagtggctgagatctgcaggacactggtgaaaggtggggcatcctcagagaccagccctgtatagtgggaggccacaaattgtggagcattgtcattcacgtcattgaccatcacctccacataagtagtgtctgccttctgtgggatgccattgtcccgagctgtgatagccagggtgtaggtcacctggtcctcatagtctaatggggcctgtaatgtaatggctcctgagtctgcatcaatgcggaactggggcaggttgtcctccaggagataggtgatacgagcattctcacccacgtcatcatcagaggcactgatgaccactatggtgctacccattggccgatcttcattcacactcactgagtagtgggcactttgaaagaccggccgatgagtgttggcatctgtgatgttgatgtgcacatagcagtgatcatgaagggcacggtcagatgcagttagtaccagcttgaagtagcgttcctgcttgtagtccagtggcagagccagagtcaccagacccacacccccctgggtgctgatggcaaagcgattccgggtgttgccgcctgtgatctggtagctgatggcactgttggcatcacggtctactgcggtcacgctgaccacactggtgcccacagctgcatcctcattcagtcgtaggtggtactccttcattgtgaactcaggccgattgtcattaacgtccagcacagtcacggtgacactggctgaggcagagagtgggggtgagccatggtctcgagcctccacaccaaagaagtaatgctccacagactcacggtccaggggaccactcacagagacccagccagtggcgctgtttatcacaaaaggagtatcaggtgccacaccagttagggagtactccaatctggcattctccccatggtctgcatcgactgcctgaatgtggatgactgagtgacccaagggagcattttccaagacagaaacttggaagggcgtgctgacaaaaataggaatgtggtcattgatgtccaccacctggatgctggccaggcccgtgttgttggacagcggtggccggccagcatcctgcgccctgatgcgcaaggcatactctctctctgcctcgaagtccagaggtgccaccacctggatctcgccagtgaggctgtcgatggcaaagtgtccacggctattgccactgatgatgttgtagtgcaccaatccgttggcgtccttgtcccggtc

SEQ ID NO: 6783 - DNA, 1295 bp, Artificial sequence
  DNA replication origin
ggggagggcggacccaacgacggcgaaccttcgcgctctgttcagcaccaggagcaacgctcacgtcctcaataaagatggcggcaacatcttcggtcctcagagctgccatgcgcgatgggttgtaccaccgtgtttcgggcgccggggcagaggtggagcgaaccatcggggcggccgggagccatgttggagcggcgggaggcggcagcagcgtcggggatgctgtggtgggggcggaaaaagccagggccgcacgccggaggggctccggccgcggagtagatggtgcccagagggcggcgggggtgcggagagacaggcggaggggcgggggcccggggcggcggcaggggcccgggagggggcccgagcggcggggccagcccaaggcccggaccggggcggggggcggtggaggccgtgcagggaggcgggggatgatggcgaggcggccgccgtggcggggcctcgggggacggtcgacccccatactcctgctccttctcctctctttgttccccctcagccaggaggagctggggggcggtgggcaccagggctgggacccaggcttagctgccactacggggccaagggcgcatatcggtggcggagccttagctctttgtccggagtcttccggggtccgggaggatggggggcctggcctgggggtcagggagcctatcttcgtggggctccgagggagaaggcaaagcgcccggaatagtcgagggccccctgagcagccgaatgaggagctggggattgaacacggcgtccagccattgggcagccgcgaacgagagacaggacagggaccagggtctgtgttatactggcgcccagaggtctcctcttgcgggcggacaggacctttgcaaagaggtagtctgtcaccaggggctctgtcctcaggggtcccgggctcggggaacagctcgcccctcccttcagactttttgattcggcaccacggtcccaagccggtgtcctcccagcggaacgctgggacaggctcccgcaaaagagtgggcaccgcgcgctgctgtggggaattatgggcaacagggagcaagggtcagggcgagagagccacgacatccggagcagaaaggacagccccccggcggaactgtcttccaggggcctcgggatctggccccgagctggattcagcaccacgcacggcgaggacagctcctgcatcaggttcagcaccccgcgagtctcggacagctcccgagccggcgcccaagcgcatgcgctcccggggtctcttccgctgccgc

SEQ ID NO: 6784 - DNA, 1445 bp, Artificial sequence
  DNA replication origin
caaggggcgctcgggaggtggaacccgcagaagccccgcctcccggaagcggagcagtcaaggggcgaaaggatgcgccgactgattggttgatggtgatgtcatagggaccgttcggggcgggccagaggccttggccaggagttcctcgcctgttagaaccaggatccaccccatcgcgggagccgcaccctgtggagcgttctggggtcccggccctgacctcttcctgggcttcgggatgcccgcgtcctctgcacccggcgctgcagctcgttatcgattccgcctttggaggccggtccgtatagtgtacctcccggactctctcacggttagccggcaacccgcggagccccctcccccatgcgatgagtccgccgtgaggggcggggcctcccattgtgccaatagaaacaatgactgaccgattggagtgctccgcgttcacccctcgcctccgctcctctcgtgacgtctgttgcgccaggtccacccattggcctggcgagaccggcgcgtgccaggagttacgcagggagagctggaatgcaccgagggtggggggaggactgagtttctgtgtcagtcccttcaaggggttaaggcatgcggtcgtgacggacgaggggcggggacccgaagaagcggggcccgcagccatggggcaacgccgggctccacgtggcatcccagagcactcgggactcgcagcctgggagggggtgcagcctccagtgaaggggccccgagcccgggagactgctggggaccagcaaggcagggaagaatttggcctctgctcccgcctcgggagggtcatctctggtccctgctccgcaggggcgatccaaacaagcaggtggtcgcgacatgtttcataaaactagctgatgggatagttaaagctattgttcggggtgctggcaccccagacccctctccagccatcgtcccctctaccccaggatttcacacagtaccccctcccagagctatgagaacgctcatgggcaccaaaatttcagaccaaaatccgggacacggttcagaactagtggtcaggaagggggaacaagagatctggaaggacagaaaaaggctgggagacggagctgggacagcgccctagaaggagggaggtgggtgaaggcggcgaccgaaagtggggagggcggacccaacgacggcgaaccttcgcgctctgttcagcaccaggagcaacgctcacgtcctcaataaagatggcggcaacatcttcggtcctcagagctgccatgcgcgatgggttgtaccaccgtgtttcgggcgccggggcagaggtggagcgaaccatcggggcggccgggagccatgttggagcggcgggaggcggcagcagcgtcggggatgctgtggtgggggcggaaaaagccagggccgcacgccggaggggctccggccgc

SEQ ID NO: 6785 - DNA, 769 bp, Artificial sequence
  DNA replication origin
ggaatctgcgcgggtaccacttccatgccctgtgactccatgacccctgcaatgactcccgtaaccccctggggtgactctgggatccccacaaggtccaccctgaccgctatgacccctgcctcctagatgaccctgtgcgcatcttcaaacatgagccacagccaccacactctgtcctcaagttcctgcaggacgtgtttggcagcccggccacagctgccatcttctaccacacagacatgatggctctcattgacatcactgtgcggcacatcgcagacctgtcaccaggagacaaggtgcctggaggtggctgcagcagcgggggtcactgtgtggaaactgaaacaaaatggtggggggcatgacattgagtggagatgagggggcaaggccactgctggagccaggtaagtgtaggaggccatgataggtgcaccaagacccaaaggagccagccatgaggtgatctggaggtggtggggctggaggaggctggagaggagggagtggagggagatgaggcatggaggatggagtttacacaaagcctcggaggctgctgcaagaggttgtgatctcaggaccggggaatgtgatgtgattaacatcccacatggaatcaactgcatgccagcagagtggaagccagccagggaggaagcagcctcagtggtccaggtggcatggatggggtggggatgggataggtcgtggcagtggcagtggcgagaagaggccagctgtggagtgtttagtaagtgga

SEQ ID NO: 6786 - DNA, 916 bp, Artificial sequence
  DNA replication origin
cagacagaaagagacacgcagaaagaaacagacagtgacagagaagatggtagcctctctgccctccccaaacaccttgccccactggtcctggctggcggcaggggactcacaggcccttgacctatgcccagtaggggaagagacaggacttttcctcagaggccttcaatgagaccccattcccaaaaaggttgggtctgacacacagcagccatggtgtccacggcccccactcccacccctggcactcctagatgggatcacgccaagggtctatgaggaagcccctaggcccccagggcccatccttcctggtaagaccagatgacacttccaaatttatcccgttatttctgtcctgaactgggctgggacaggatgtttcctaaaggataaggactaggacggggcgggggtgtctggcacaggcccggcagctctgggcccttcttccccctgtggtcagaatagaccagctggagatacgcaccccaacccccgcagcagggctactcttagggaaacaggaactgggactgcagcttccactggaaggaaatggggccacgatcagaccaggagaagctataagaactcacttcatcacaatgtgagcagtccccactccaggctgggaacaagtagggatggaacccattttcaaagcaagaaagtttgagaagtcagggttggggagtggagcagacagtgtcagcaggggcatgggtccttggttcaaataaggttggtagagacttaagaagagcttagagggtggctgaacacaggctagtgaaagacactgaagtaccaaagcttgggtgttacataggggatggaggtgtctatggctctagggtccaagttggggggttgaggacctggagaatggctagggaaacaggtggtgtcc

SEQ ID NO: 6787 - DNA, 812 bp, Artificial sequence
  DNA replication origin
ttccactggaaggaaatggggccacgatcagaccaggagaagctataagaactcacttcatcacaatgtgagcagtccccactccaggctgggaacaagtagggatggaacccattttcaaagcaagaaagtttgagaagtcagggttggggagtggagcagacagtgtcagcaggggcatgggtccttggttcaaataaggttggtagagacttaagaagagcttagagggtggctgaacacaggctagtgaaagacactgaagtaccaaagcttgggtgttacataggggatggaggtgtctatggctctagggtccaagttggggggttgaggacctggagaatggctagggaaacaggtggtgtccaaggtggtccaggtctcagtggtggctccaacggggggcaaggcgcggggttgggggaagaaggaagggagggagggagggagggagggagggagggagggaggttggttgtggggtcctaggaatccagagaaggggcatattaaggatctggggtctcagggatttgaataattggccaggattcggtggggctcagggtcgccattcagatggcggactcgatactgaagggtctggggtcctgaggagtctcagtcccagagttaggcttttggtcgatcgggagttggtctgtcaagggcctggtcttttgtgggtgatgctgacacttggggtctcagtccccgtgggtccgggggtctcagggtcaggttctcaaactccctgtctgatagaggtcctggcctcgggtcccggagagggtggggtccctgggtcg

SEQ ID NO: 6788 - DNA, 1002 bp, Artificial sequence
  DNA replication origin
gagcggaacgcgtacagcgcgcggtacatgaggccgggcagggcaggtgcagggaaggtggcaagggctgcggcgccacaacgccaggccgggagcgccgagccgcgccgcggttgtcccgccccgtgacacactacgcaggcgcgcgcgcgcccgcccgccgaagccccgccccgggctgtatcgttccacgcatcggagagcagcgcccccgcgcggccccaagaggtgcggcggggctggggtcgacagctcgctgtctcctctggtccctcccggctccaggcccctcatccccggacaccgcaccctcactcctcaccccggcctcagtttcacccgtccagccctctgctccctttccccgcttaagtccgagcgctgcgtcccgtcctacctcccggtgaaagcgcgctccgctcgtagcgggtgcgcccctaccgccctggggcagtgggtcccatctactaattgcaaggacggcgacctcgaaaggatgatcttgctgatccgacacttggaagcccccgcggggcccggctctcggtgtgtctaggcctcaccacctgtcttcaccgagtgccggtggtggccagtggggagcaagtgtggggagaagggggccacaaaagcagaaaccaggcggggctattccctgtctaaagccctcccatctttgctccccacccctactcctcctctctcttcagctatggctggttttctctatattgggcctttgcatattctgttccctctacctgggacaattttcccttccctctcctatagtatttgtccgtcaagctcccacccccatcaatcgctatcatcttgctgtgttttattgtctttataggacttaagatttgcgatgcccctttctgagagcatagaggagggctgaaagagggagtggggtaccacggtggccttaagagcctatttgatccacccagctttccagtcagcccagatctccagatatatgaaatccgtgta

SEQ ID NO: 6789 - DNA, 1337 bp, Artificial sequence
  DNA replication origin
cctcacctcccagacggggcggctggccgggcgggggggctcctcacttcccagtaggggcggccgggcagaggcgcccctcacctcccagacggggcggctggccaggcggggggctgacccccccacctccctcccagatggggcggctggccgggcagggggctgacccccccacctccctccaggatggggcggctggccgggcggggggttgacccccccacctccctcccggacggggtggctggccgggcagaggggctcctcacttcccagtaggggcggctgggcagaggcgcccctcacctcccggatggggcggctggccgggcggggggctgacccccccacctccctcccagacggggcggctggcctggcgggggctgacccccacctccctcccggacggggcggctggccgggcggggggctgacccccccacctccctcccggacggggtggctgctgggcggagacactcctcacttcccagacggggtggctgccgggcggagaggctcctcacttctcagacggggcggctgccaggcggaggggctcctcacttctcagacggggcggttgccaggcggagggtctcctcacttctcagacggggcggccggacagagacgctcctcacctcccagacggggtcacggccaggcagaggcgctcctcacatcccagacggggcggcggggcagagacgctccccacatctcagacgatgggcggccgggcagagacgctcctcacttcctagatgggatggcggccgggaagaggcgctcctcacttcctagatgggatggcggccaggcagagacactcctcactttccagactgggcagccgggcagaggggctcctcacctcccagacgatgggcggccaggcagagacgctcctcacttcccagacggggtggcggccaggcagaggctgtaatctgggcactttgggaggccaaggcaggcggctgggaggtggaggttgtggcgagccgagatcacgccactgcactccagcctgggcaccattgagcactgagtgaaccagactccgtctgcaatcccggcacctcgggaggccgaggctggcggatcactcgtggttaggagctggagaccagcccagccaacacagcgaaacccagtctccaccaaaaaaatacgaaaaccagtcaggcgtggcggcgcgcgcctgcaatcgcaggcactgggcaggctgaggcaggagaatcaggcagggaggttgcagtgagccgagatggcagcagtacagtccagctttggcttggcatcagagggagaccgtggaaagagag

SEQ ID NO: 6790 - DNA, 1372 bp, Artificial sequence
  DNA replication origin
ccgggagggaggtgggggtcagcccccgccaggccagccgccccgtctgggagggaggtgggggggtcagccccccgcccggccagccgccccatccgggaggtgaggggcgcctctgcccagccgcccctactgggaagtgaggagcccctctgcccggccagccaccccgtccgggagggaggtgggggggtcaaccccccgcccggccagccgccccatcctggagggaggtgggggggtcagccccctgcccggccagccgccccatctgggagggaggtgggggggtcagccccccgcctggccagccgccccgtctgggaggtgaggggcgcctctgcccggccgcccctactgggaagtgaggagcccccccgcccggccagccgccccgtctgggaggtgaggggcgcctctgcccggccaccccttctgggaagtgaggagcccctctgcccggccaccaccccgtctgggaggtgtgcccgacagctcattgagaacgggccatgatgacaatggcggttttgtggaatagaaaggggggaaaggtggggaaaagattgagaaatcggatggttgccgtgtctgtgtagaaagaagtagacatgggagacttttcattttgttctgtactaagaaaagttcttctgccttgggatcctgtagatctgtgaccttacccccaaccctgtgctctctgaaacatgtgctgtgtccactcagggttaaatggattaagggcggtgcaagatgtgctttgttaaacagatgcttggagacagcatgctcgttaagagtcatcaccactccctagtctcaagtaggcagggacacaaacactgcggaaggccgcagggtcctctgcctaggaaaaccagagacctttgttcacttgtttatctgctgaccttccctccactattgtcctatgaccctgccaaatccccctctgcgagaaacacccaagaatgatcaataaaaaaaaaaaaaaagaaagaaaacagctttgttgaagaggcggtgttagggctctgtgactgctcctgcagagcagggctatcccttgggcagagagtagcagctcagggcagttttgcagtcatatttatatccacttttaattgcatgcagattaaggagctgtttaagcagaaatctctagggaagaggtagtaacttttgggtcattggatcattgccacggaaagaggcagtaagtcctgggtgttgccatggcaatggtaaattgaaagcacgttggtgggtatgtctgattgaaagcctcttcctccccaggccctgttttagctagtcctcaatctagtgcagcgtccgagccccacctctggagtcaagtacccacctc

SEQ ID NO: 6791 - DNA, 1478 bp, Artificial sequence
  DNA replication origin
acttgggaggctgagacaggagaatcgcttgaacctgggaggcagagcttgcagtgagcagaggtcatgccattgcactccagcctgggcgacagagtgagactcctctcaaaaaaaaataggggcctggcagaacggtcgccctcattccttccagatgccttttgaatgctctgctggatgggtggttggctgagccgtggggcatctgagaacaagtcagtagaccttctccaagagtatgcaataaggactgagcaggaaaaaagttggagactgcctgtcccctcacaaagttgatggtctaacattcttctcagggtcaagaaacttgtccagggagacactgctgtttataatcacaggcctgcttagcctagaacctgggctggcctcttcatcagtggggatgagggctccttgctcccagctgctcagctcccagcagcattgagctcctgggtgtgtgccaagcctgtatgggaggtgatagggaggattttaattaatactgagtaattaccaggcggtgtttaagcatcccaaatgccctcaggttcccaaacctacagctactctcttcctggctaggcctgtaaggagagggggactctgctctatgcccagtgggcctttggttagcacgtaggctgtagactggacatcccaggaaggtctccacctttttcaatacccttccagtttggtaggaggaggagggcaatttgggaaatagtctggcctctacagttcacctataccatcttcccaggggcaaaggataacaatgcctgtggtctgctcaacttcatcaagcagtgttgacctagggcccagtgtagaatgtggggagaggaatgggcagacctagatctggggaccctggtgaaagtgctccaggaggaacaggcacagaggtctttgctgcttttggccttatttccctttctcactgtacacatttggctgagtgaactctttcaaatttatttttctgtctgtggctctcaaattatgatctcattcaaacgcctacttcctacaaggccttacccgtttgacatctcagagacctgacagactcctgagttattccaccattccacctggcagccaaggtggtcttgactccaccaggcctttgctcttgttgtatgttcagatggctttcctccagatcttcccctgggcgggtcctgctcaggcctcggggctagcttgaatgtcacgccggaaagtgagccctctcttgcccttcatcacagcagaatcacactgatgtgctcgtatgcttctgcttctcgctgtgtctctggtgcttagtaagtgctggccaaaaagaggctcttggcatcagctgaaagaataatttaaaggtcttcaggaccaggcgagaggcactaatcggtccccttcatgggtagaccgttcattacctaattccctggattccctccgtgagctggcatcaggaacac

SEQ ID NO: 6792 - DNA, 1243 bp, Artificial sequence
  DNA replication origin
tgagccccgaggcggcgcgtttccccgccgcgccagacagggagagagggcctagatgtgccggcgccggttggtcagaggcggtggcctctgacctttccgagagctgagaaggcggcgggaggaaaaaaggcagacacacgctgggcgcccggccgctgacggcgggtaatgctcggacaacgtgccggcgacggggagcgcccgggcctcccgggcgacggcgaaggcggagtcccggcccggccagggaggcgcgcggagaggcccccccagcggccagccaaggtaaacaaggccgtgacgtgcgccgcgcacttaccgggagctgcggcctcgcggccgctgagcccgaacaagccagaccgggtcaggccgggccagagggaccggattggggcgaagcggcagcggaggcggcgggccgacgccggtcaagcccgcgctgcttcctccagaagagtcgtccccacagctccggaagtgcttggcgccgttgcgtcacttccggatcggggtcgacccacggtcgctcgggtcgcgacaggctcccggctagagggcctgtttagcgccgcctccttgaaacttagcgctctgacccagagtctgaccagggtacggcaggcgccgaccgcgtctggagccactattcgcctaccagcgtctcccgtcgagatgtttttaaccagcgcgtttctcaccggcttctcatttcactgtttgtactccgggatcgggcacggagaagacatcctggcgtcagtggagcagataaccattgtttctcggccgctatctggtcagaggggagctgggccgggaaattctgcctacaccccgaggcggtcgcagggtggccccagagccgcaaccacaccaggctttcgcttcccctgccgaggcctcgttcgccgcgcagttctccgacttacggtcaccgtgcaagattgcatcttaactgccttgcttgcagtttcttttcacagtataggagttgtcatcatgacttccagttaccttctgggaccggttgtcaaatgatgtggctagagacggaggctcactcagattgttgctgcaccacaatggaaatgccagtatgaagccgctgatgttaggaaggctccaggttgtgcaattccatagacaacaaatcaaatcatttccaaccatactggagtcgcgtatatacatattcaagacacctgtgcaggccgggcgcggtggctcaagcctgtaa

SEQ ID NO: 6793 - DNA, 1394 bp, Artificial sequence
  DNA replication origin
cccgggatcgctgctttcgtcgccgttgctgtagtgcacgaagagcagcagcgccagcacgttacccaggtacaggtgcacgaacaccatcagcaccaggaagtaggcgcgcgagcagatgccgcggggcttgcacagcggacgcaccggtgcgtcctcgccgtcgcccagcccggccgccgcctgagcctggcagtggtctggcggcgcccactgcggcctcgaggcctcctcggccgccgcggtctcaggccgctggcctgtcaccgccgctgccgccatggcacccaggtcgcgcgcgcgcccaggggaggggccgcgggggtgcccgcgctgcgcagtcgcccggacaacggccgccaggcccgcgagcgccgcggtcactaggagacggtgcctgggggtgctgagcccgcccggagccgcctgcgtccgcgccgggctcggccttcctgcgccttgagccccagcccacgctggggcttctcttcccaagctgggttgccgtcgggcagagctgtacactctccaagtcagaagccaaggtcccaagcgtagacgcggacaagagcggcaccattaaggcatacactagtgggagcttctcggtgcctgcgtgaagacgccctcttgcctccgggaaaagtatcgtctgcatcttcttgctccaggagcgggggtggggagcgcagcgcggaggaggcagcgctgagatgactcaacagtgcggcatttgggggcgccgcggaggctgggactgcgtaagcggcgatagggtaggacccacagcctcctcgcaggcattcttggagctcggttccgcggtcggtccggatctcccgggaagtctcgccggagtcaggcaggccttaggaagaagctgcctgatgtgcaaggtttcataggccgtcagagggggcatcctggaggagccctggcatcaggaaagtgagccccccatggcagcccgcaggaatgaaccagtgctcaggtatatggaacactccttgcatcaaagctggcacgtgtgaagaggcgggaagggactcttccataactgagacaccattacctcagagaaaaattaaacagattatcaccaaaaacgggggtggggggaggacatacctaccagtggtcaagtgccaaggcatccctgctcttctagagctggttatcctcaggaagagattactacacgccctcagggcagaagctgacccccctccccgaggtggacttgcaggcaagagcaacacttttaaggcaggtcacactggtggtttctccctaccctggttaagacccccactacctctactcccatctcctctcccttccccatagcaaagcatagtctgcattttctagtcccctcaagtcaaggcaggcca

SEQ ID NO: 6794 - DNA, 1446 bp, Artificial sequence
  DNA replication origin
cctcgaggccgcagtgggcgccgccagaccactgccaggctcaggcggcggccgggctgggcgacggcgaggacgcaccggtgcgtccgctgtgcaagccccgcggcatctgctcgcgcgcctacttcctggtgctgatggtgttcgtgcacctgtacctgggtaacgtgctggcgctgctgctcttcgtgcactacagcaacggcgacgaaagcagcgatcccgggccccaacaccgtgcccagggccccgggcccgagcccaccttaggtcccctcacccggctggagggcatcaaggtgaggacctccctgccccgccgcgctccaggccctgcacggctgagcccgagaggaccggcgctcagcccgggtccccacgctgcccccggcgctgctctgcgtcggtcccgcgcgctcccactcactcgcctgctgtcgctctccgggccggggcgacttggcccttcttgggcagcgcggtctggcgccccagctgcccgctgtgcgccttttccttaggtggggcacgagcgtaaggtccagctggtcaccgacagggatcacttcatccgaaccctcagcctcaagccgctgctcttcggtaagtccgccagatactcctgggaagggccaggggctgcggtttggtggccaccttgaggctcgttgtgaccacgtgacctctattttgaaaatggctgcttcagagcagcccttccagaggattaccaaagtgaaggaccttccccgtcctcgaaatagggtaacactccctcttatcccaactccctgcagtccattcttccatcacagggctggcagggtgagcctgaggctggtgtctaaacgtttcattgcacctgtcttccgtgccaccattaattctgtcaccttctagaactgggaggaaggtgggagactgataaccagctttctgccgacctcaggacctctggggaaaatcccactgccgaagtgggccttgtggtctgatgagaagcaggccgtccaaatgtagataaactggtacccccccagcctcctccactggagtaccagtcagaggctcagcttttgctgccagcactctgagattcttcttaaggtgaagtctttgttcagccatcatgggcaaagctttctagggtgactccagttggagccacaacatagctcatcgtttctgagctctagttatgtgcttgccttcatatgattatttcatttaattcctgcaacccctctgtgaagtgggtgtagatcctactcaggccagtgagggggaaagttagggacagagagctgctgtggcttggccaggctgacacggttacttcagtggtgaagctaggattagaacccacatagcctgcctctaaggcctatgcagtaaagccacagtgcgagctgtgaagaccccagagtccttcaaagaccaccagtg

SEQ ID NO: 6795 - DNA, 1424 bp, Artificial sequence
  DNA replication origin
acgggtctggagtgcgtgggggaccggctgttggcgggtgaggcttggcttgaggcacgcctggtggaaagggggaaagaaacagcgcctcccaggggcggtgccacagggacaaaaggggtgccctgaggagaaggacgggcagcaggttgaggccgatcggaggtgggaagggagccccggagatggcggggacgagggccaacctgaagagggcggggcccgagagacaaagctgatgtggccgccgcggcgcttcataaacttcagcccgcgtggaaagggcgggtggaaccgcgggagggtgcaggggaacgcggccgcgcggaggcggaggcggaggcccgggagctgagggttgagggggtgtgctcccttctaggagatgggcgggggcttggcctctccgaaggagacggggccgagctggggggggcggagggaggaggaggaggaggaggcggaggcggccccggcccctcagggggtgtggcctcttggggaaggcggggccgggagagggcaagggtgtggcctctcgagggcgggatgagtctcttccccctaaggtgggggtgaagatcctctgaggagggtggcgtcgcggaaaacggcggataagacctttccgagtagggggcggtgcccggggaagcaggggctgagaccccctcctgagatggttgaggtccaggaaatcaggtgtggaggtccctccaaggagaaccgggtcgcaaaggacaggcgaggcctgggacctgaggtgtcagagtccaggctggtctcgaacagtcattacatgaagccactaatgacccatgttggtgctgctgagttgtataagggtcctgaggcagggccttggcggtcaggccttgagtgagttgccaccagtcctaagagggtgtgtgtatggggtggggatgatccagttttgatctggtgtgggggttcttggagcgcggagttcctaccgcgagctaaactcctaaggctccttgagggggaacaacgaagcagaaactcaaagaaccacaagagtgaactaggaaaaggggtgagttcctggcaagagggtaagcatgccaaaggccttgaggctggaagaatctgtcattttgggggaaggagggaattcttgtgaagttagagcaggaatggagtctgggaggaaaggaagctggacaagcgagcagaggccacattgtttcaggccttgatctgactttatccctaagggcagtggggagaacctattgaagggttttaaggtggggaataacttgggaaatgcagtttaagaagctctgcaagtgaattcacctacttctgtggcttccaaagtgacttttatatagctacaattctgtgtgtgtgtgttttttgtttgtttgtttgtttgtttttgagacagtcttcctctg

SEQ ID NO: 6796 - DNA, 1673 bp, Artificial sequence
  DNA replication origin
gccgggcggggccgtgcggccgggagatgggccccgtgccgtggctcttttacacgcccgttctcccgcaggttccggagcatttgctccatgccctcgcctgcctgcagggccccggtgtggccccggtgctgcgctgcgcgccgacccccgcgggtctgtctctccaactgcagcggtccgccgtcttcgagcgcgtcctcagcgccgtggccgcctatgccacgcccgcctcgcctgcctcgctgggccagcgcgtcttactacactgcccagcactgcgcagctccccctgcgcactccgcttgagccagctgcgtacggtgctcgtggccgatcacctggcgcgagccctgcgcgctcacgggtgagcggggccgcggggccggaatggagaaagtgggactgccgggtacctagaaagcgagcggcgccgcccgtggggactgcggctggaggtgggaagtcgtggcgagctggaccaggtgctcagactgaggcggccgccctcccttcgcagggtgtgcgtgcgcctagtgccagctgtgcgggatccgcacatgctgaccttcctgcagcaactgcgggtggactggcccgctgcctcggagagagcttcctcccacaccctgaggagccacgcccttgaagaacttacctctgctaatgacgggaggacactgtcccctggcatcctaggcagactgtgtctgaaggagctggtggaagaacagggccgcacagctggctatgaccccaacctggacaactgtctgggtaggacctgaagcctagcagggccagaaaaggcaggagggggttaggggcacatctctgcttcttgtcagtctcagcacctgtctgttctcttttcagtgactgaggatctcctctctgtgctggctgagctgcaagaggctctatggcattggcccgaggacagccacccaggcctggttagtgactcccagccctgtaggttctcccaaaccaagtatactgtacttccacagttatgattgtcctcccttaggctggggcctcagatactggtacaggcggctgcctggttgtacatgttgttagctgtgaggaggagttccagcaacagaagttggacctgctttggcagaagttggttgacaaggctccactcagacaggtaggttaataatgatggtggagctccccaccacctaacccccaacctcagagggcccttgaaaacccaccgaggggcttgttagctgacagaaaccaacacttgaccttgggggagttgctggacttgagagggcatgtacagcaggtgcagaggctctggggaaggggggtctgtagacacatcccaagaacactgaagaccaggttgagaaggatgaaccatgcgtagcctgagtggctgggtagacggaggcactcaacctggcagttccaatttgagggagtctgggctgagtagaggcaccagatttgggctcctcaagggacttcctggagagtagcgccaactaggctgagcccctgacatctttctgacagaagcacctcatctgtggccctgtgaaagtagctggtgcacctggcactctgatgactgcccctgagtactacgagtgagtgaggctgggaggaacaccaacctaagccagggtaatgaggggggactcttt

SEQ ID NO: 6797 - DNA, 1448 bp, Artificial sequence
  DNA replication origin
ttacttcctctccggccccacgggcgcgcttccctcctgacggattccgaagcccgccccaccaccgtcaccgcaccagtggcccaggcttcgtgggaccaacagggctaatcctgccccacggatctaatccggatcgggacccggtcccaggggaggcccccacctccccttctattgttctgtggcccaggtgagcgtcttgttccctctagactccgtttcacaacctactcccgggtcttcctcctgggactggggatgggcgggttctgatgtggccccagggcgagtgacctgggggcaggagctcccccgccccccgccaacggctggacagcgggcaacggaatcccaaaagcagctgttgtctccagagcattccagctgcgcttggatttcgtcccctgctctcctgcctgagcagcgccctggcccagatggggtgcccctgacccccagacatactttactgagctgcttgggtctcagttcctctcagttgcgccctcaggctggaggtgatgggtgtagacgtgggagagccgaggctggtggccatctctggaaccctggggaggattggcgagggagggtggacccaggacctctgggtagggctgcaatggtagtgactcccccagggctgcctcagcccgcatctcgctaaagatagccctcttacttcctggggaaaaaccaccccaaccgtcttcgtggatgagagtatctgaagtcctcagtttgactgagggttcccaaccctgctaagcagttgtctccaggtcatgcaccttcagaatggaaagcgctttggaatgacacgatcactcccgttgagtgggcacccgagaagccatcgggaatgtcgtgtccgcccagtgctctttcggcgcctcccagcagggcctcagccctggcccagaaaggggccttgccaagcttttcctgcccctgggtttccctgctctccggatttcccaactctctctactgagttagcttctctattaaaaggaatgggggtggggtggggggtgagtaagttacagtgaaatgaagacatttgggaacctttgtgggagaaagaaaaagacctttcctattggtagaggagcaagatactccaactgaggcctattttctattatggtcgcattatttggttggcccgtaaatggctgttgcctaaaacaggaagctttaaggatcgttgttaaagcacaccaggttaaaggagtcacattaaaagctggtcattctgagccgggcgcggtggctcacgcctgtaatcccagcactttgggaggccgaggcaggcggatcacctgaggtcgggagttcgaggcttgacaaacatggagaaaccccgtctctattaaaaatacaaaagtagccgggcgtggtggcgcgtgcctgtaatcccagctacttgggagactgaggca

SEQ ID NO: 6798 - DNA, 787 bp, Artificial sequence
  DNA replication origin
tgaaacggagtctagagggaacaagacgctcacctgggccacagaacaatagaaggggaggtgggggcctcccctgggaccgggtcccgatccggattagatccgtggggcaggattagccctgttggtcccacgaagcctgggccactggtgcggtgacggtggtggggcgggcttcggaatccgtcaggagggaagcgcgcccgtggggccggagaggaagtaaacccgcgcgtccacctcggggacacccccgcgctcggtggcctttgtccggtgacgctgccagcgcccggagcaccaggggccgaaggggtccacagagcagccgcgggacccccggaaacccattgcgaccggccccaggagacccaccaccaggctcccactgtgccgagcttcccgctcgcccggccccgcgggtagcgaaagcgacaatgttcccctgaggccacgacagagccggcgtgccgagatgcccaaaccccgcgcgggggccagcgactctcgcgccagtaggcccttgacttggatcaagacgggggacgggggactcccaggacgcgagcagagtgaacgaggacaaggtgatgctccacgcgcttctacttcaagtctggtccggttcggcctggtctgggccagccgaacagccacccaaacactatcacagcttgcccttccgcttgctctggctgcctgcagacttggagccattttaaggagaaaccacctggccacgccccctagagaacccgagaagccaatccacgctcggccacgcccc

SEQ ID NO: 6799 - DNA, 1367 bp, Artificial sequence
  DNA replication origin
atgggcaagggcccggggcggggagggcggcaggtgctgacactggagctgcgccggaggtcggggaactcggcctcctaagactgaggacactcgcctgctgggccggtcgagctgtgcggtgccctccgggacgcagggggcgctgcagccacgctgggtcaggctccgcagggccctcccaacccggggactaacggcgccggtgacgacttcgccgcgcgttggtcagccatggccaccgctctcgcgctacgtagcttgtaccgagcgcgaccctcgctgcgctgtccgcccgttgagcttccctggtgagcttggaccccgcgccctcgaccatccagccccctagggccggcgactgccagcccagcaccttccggcctctcgggctgcccggcccggccccgcgcccctgaccctttccctccgcagggccccgcggcgagggcatcggctctcgccggcggatgacgagctgtatcagcggacgcgcatctctctgctgcaacgcgaggccgctcaggcaatgtacatcgacagctacaacagccgcggcttcatgataaacggaaaccgcgtgctcggcccctgcgctctgctcccgcactcggtggtgcagtggaacgtgagtcctggcccgcagtgtggaaactgaggcccagagtcacaggccctcaccctgcttggtccctgcaaacttggctttcctctgtctcctcctgcagtggatggagatggggagaggctgcgtggatttgtcgtattaaatgtgcctcctccctgcacaggtgggatcccaccaggacatcaccgaagacagcttttccctcttctggttgctggagccccggataggtactggggaaggggagggagaacagaggtgttctgggccccagaaggcgacccccactgcagcctctcaacagaactgtagactagccacacccacccttccctagagatcgtggtggtggggactggagaccggaccgagaggctgcagtcccaggtgcttcaagccatgaggcagcggggcattgctgtggaagtgcaggacacggtgagtcccgggactggggcatgctgcggggagcacaggcctggcgctagacaggctgatgctggccttttctttgcagcccaatgcctgtgccaccttcaacttcctgtgtcatgaaggccgagtaactggagctgctctcatccctccaccaggagggacttcacttacatctttgggccaagctgctcaatgaaccgccaggaactgacctgctgactgcactctgccaggcttcccaatgctttcactcttatctaccctttggcacttatcttgcttatcaacataataatttata

SEQ ID NO: 6800 - DNA, 1177 bp, Artificial sequence
  DNA replication origin
agaaaaccctgtcggtcttggagcgacgacggcagaaccagggtccctggcggtgcggcggggccggcgggtgcagcggaggcggcggcggcggcggcagtgacgtcgccgggtgagggctccagtgcgggtggggatgcggcgaagctgtaggcctgagacggggggcccaccccacacaacggcgggcgggggcgggcgggccactaccgctgggccctggagagttcggggcggctccggagccgaaaacgttcctgggctagcgcaccccgccctgtggatgggggaggggtggcccggggatttgggtgggcgcggcgcgagatggcgcgccggtgcgggcgcgcggctgagcctgtttttacgcgcgcgcgctgtgcggctctcggtgcgcgtggccgccgacgtgcgcgttcccggcccggatatctctgctctaggagctgtggcccgtgggcaaccgcggctttctggagcgcgcgcccgtgacgacccccagttttggggcgcgcgctctgatatcgggtggcggtgctgcctcgagagcgcgcaggaggcttctgctgagcagagggccggccgcggctcgttgcgctgggaaggttgaggattgggtcctttctggtctggtgacgttcccgggcatccgtggcctcggcctggagagaaaccaaccagctttgctgtctggcttgcggttccgctcctctgtgaggggggcgagattgcccgttctcctcgaagaatgccgttacttgaggcccaagtacggtgcgggtgcttgggtagggtgtttctctgcttcggaaaccaagccctcttggtttgagagggcagtgagccccttcggatttcctcaccttgtactgggctttctgccgggcagggaaggttaatattagaaggcccttgagtggtacctgcttatctttcattagaaactaatacgtccataagcgtaattcatacacgtcacctctgtgcgctccggaagggaattcgcttatgtggcccatgtgaactccgagctctaaaatgccagtttaaatccttaaacgcagcttttcttttgcgtaagtgggaggggcttactttattatattaaaggcccacctttgcctcagccaaaaagttggccttaaacaaaatggaacaacctgagaatcagtgcttt

SEQ ID NO: 6801 - DNA, 1187 bp, Artificial sequence
  DNA replication origin
ctaaagtgcaaacccgcaagggcagtctcctgcacctgacactgcccaaaaaggtgcctatgctcacgtggccctccctcctggtgagttctagtagtacagggttgggtagggataccagtgtagtcgacagggcctgactgctgtatctttggcagaagaaacctctagggacccaggagctggtgccggggctgcggtgccaggagaatgggcaggaactgtctcccattgccctggagccaggccctgagccccaccgggctaagcaggaggcccggaaccagaagcgggcccagggccgtggtgaggtaggcgcaggggctggccccggggcccaggcagggcccagcgccaagagggctgtgcatctctgcagagggccagagggggacgggtccagggatgaccctggaccccggggtgatgccccacccttcgtggctgacccagccacccaggtgagagctgggcacctgtttgggtgttaggagatggggggaaagggtgtgcactggagtgggagccacctggcagacccagggctgattctttccacaatcttgccattaataggttgaggctgatgaacagctttgcataccaccgctgaactcccaaacctgcctcctgggctcagaggagaatttagcccctttggcaggagagaaagcagtgcctcccgggaatgacccagtctctccagccatggtccggagcagaaaccctgggaaagatgactgtgccaaggaggagatggcagtggcagcagatgctgcaaccttggtggatggtaaaggtgggggtgggcaggcagagccctaggttgggttgcaaagtttgtaggtggatagagagtagcaataggctggaacctgtcctggttggggctgagccatggtctcaatatagagcccgagtcgatggtgaacctggcgtttgtcaagaatgactcgtatgagaagggcccggattcagtggtggtgcacgtgtacgtgaaggagatctgcagggacacctcaagagtacttttccgtgagcaggacttcacgctcatcttccagaccaggtgggtgggtagatgatggggcaaacaatgcctcaggtgggacagtatgtctcatgctcttcctcttgtccttcctcctatcctgctgtgcctctgcagggatggaaacttcctgagg

SEQ ID NO: 6802 - DNA, 1289 bp, Artificial sequence
  DNA replication origin
agaatctatgttcttaagttcttgctgtgtccctatagaggagggggctgatcctgatagcattgaaatggtggccacacgggtgctagagctctccatcccagcttcagctgagcagatccagcacctggcgggtgcgattgcagagcgagtccggagcctggcagatgtggatgcgatcctggcacgtactgtaggagatgtgcgtcgtgccgagcagctactgcaggatgcacggcgggcaaggtctgaccccatccctggcccctatccctgacacctggttttgatacctccaggttctgattcccccttctccccaggagctgggctgaggatgagaaacagaaggcagagacagtacaggcagcactggaggaggcccagcgggcacagggtattgcccagggtgccatccggggggcagtggctgacacacgggacacagagcagaccctgtaccaggtgaggtcttcctaggacatcagtgggacaaggttatgggcatgaaccgtagatctgtgtaacctttggctcacccatggcaggtacaggagaggatggcaggtgcagagcgggcactgagctctgcaggtgaaagggctcggcagttggatgctctcctggaggctctgaaattgaaacgggcaggaaatagtctggcagcctctacagcagaagaaacggcaggcagtgcccagggtcgtgcccaggaggctgagcaggtgggttgaggcagagccagctggagaaggtaggggtggaagatgggcctccactgagctaccacgctaacctaaccctctacatctgcagctgctacgcggtcctctgggtgatcagtaccagacggtgaaggccctagctgagcgcaaggcccaaggtgtgctggctgcacaggcaagggcagaacaactgcgggatgaggctcgggacctgttgcaagccgctcaggacaagctgcagcggctacagggtaagaaatggggcaccagagacacaagactgcgggaaaccccccctaaactgacacctgcccttcctagaattggaaggcacctatgaggaaaatgagcgggcactggagagtaaggcagcccagttggacgggttggaggccaggatgcgcagcgtgcttcaagccatcaacttgcaggtgcagatctacaacacctgccagtgacccctgcccaaggcctaccccagttcctagcactgccccacatgcatgtctgcctatgcactgaagagctcttggcccggcagggcccccaataaaccagtgtgaa

SEQ ID NO: 6803 - DNA, 1468 bp, Artificial sequence
  DNA replication origin
cgtcagagggcacctctgttcttcagacttctgcacagggccgaacgggtttggagcagtcaccgcggccaccacctccaggcagtcctccttggtacccaatctgctccgcccccagactttgtggggaaatggggtctcaggggtcaagggtcggtagggcgggctgggtcccggaagcggaagcgcagtgcacttccggcgcgcagcgggcggccatgttggagcagcggaggcggcgcagaggcgcgtcttgggtccccgcggcggcgccggtaggttggagccgcgggcctagccgcgccgcggaggggcggcccgcgaggcggcagggcggacgggcaagcggccaactcttcccggacccgcgtcctccgccggcctggccgagaccccccaccccacccccaccccgcgcccagcgaccccaccctggggctgtgcggtcccggtagggctagcaccgttcaccctgtacatttcgctgcctcagtgacccccgcctcacggcttgggccctaaggacgtgcattcccagcctgagggccccgatctgccccctcccccggtctgcctgtgtggcgcctctctcacgccctatcttccgtcaacttctcctgccttccccgggggcacgtgtgaagggaagtcggaggccgggcaggagcctctgtttccgaagcttctcgaaagcccagaaaacccctcccaagagcccagcctaacctgggtggaagagcccccaggtcaccccaaatatttgcgctggggcgcgtgtgagggtgggaaataggtccctctctcttctacagttcacagctctgggaactacatcccttcaaaaaacattaataaagaactaaagtcatgtgcaaggattgtgcttggagaacggtctctggggaggggaagtgcccaagacacctgaggatccaagaatgtttccaaacaaagagccctagggcatttcctccagggtattctgaagacttcatctgctgcattagagcggtgggaagaaactacacagacgggcctcatggcccgagggacctgcctgatcctggctgatcttttaatgctctggtgcagctggggagctgcctcttgcttctgggaaccctcagtgttgggttgggtattagatgttagttatgattgatgtccacagcttctttaaagaagtctgggagtagttaggtgttctcagtcacctccatctgggctgtactgaggtctgtggccctccaagtcttaggtaggacagtgcataccgctaatgtccccttgactcaccatcctacttgcagcctttggctcccattgtccttaaactttgggatcttggtctggcttcctggtccctggtctgcctggttgcctagagagatgtcattggcacctgctactcatcagctttttagtttctgttgaagaaaagtccgactcttgattaggtctccatgcc

SEQ ID NO: 6804 - DNA, 942 bp, Artificial sequence
  DNA replication origin
cacacgtgcccccggggaaggcaggagaagttgacggaagatagggcgtgagagaggcgccacacaggcagaccgggggagggggcagatcggggccctcaggctgggaatgcacgtccttagggcccaagccgtgaggcgggggtcactgaggcagcgaaatgtacagggtgaacggtgctagccctaccgggaccgcacagccccagggtggggtcgctgggcgcggggtgggggtggggtggggggtctcggccaggccggcggaggacgcgggtccgggaagagttggccgcttgcccgtccgccctgccgcctcgcgggccgcccctccgcggcgcggctaggcccgcggctccaacctaccggcgccgccgcggggacccaagacgcgcctctgcgccgcctccgctgctccaacatggccgcccgctgcgcgccggaagtgcactgcgcttccgcttccgggacccagcccgccctaccgacccttgacccctgagaccccatttccccacaaagtctgggggcggagcagattgggtaccaaggaggactgcctggaggtggtggccgcggtgactgctccaaacccgttcggccctgtgcagaagtctgaagaacagaggtgccctctgacgcggccccaggcaaggactcactagagcccggccaagactggattaggggtcatctgacaccttttctgaggggagctagtggtgcattgacatctgggaggggctcctgacaaggttcaggccatcttccaccctctgatctatctttagccactgacaatgcccacttcagtcccagacacctgaccagagggtgaaagaggagtgcctcctgacagggagtctcaggtgatctcctttgttttgcagtaagggtatcttctccgaggacagcaggccttcctctcttcctgagaatagg

SEQ ID NO: 6805 - DNA, 1072 bp, Artificial sequence
  DNA replication origin
gtagatctgcatgccaggtgggccgagggtggccattccggcgtgagtgtgggggtgtgagggaacgttgcatggggtgcacgtgggctgggtgtggcgtgcagcggtgtggcgccaggcaggcagcttggcggggcccacaatcagcgcggttgagaccattagtacggttaaaaccgttagctgcctgtcgcggcgagggcggggccctggggactggacggaatcccagttggtcagaggagaccctgggggcggggccgcgcgagttgccgttaggacagttaaaaccgttagctgcctgtcgtggcggggcggggccctgggacaggacggaatccctattggtcagaagaggacctgggggcggggccgcgcgtgccgttgcagaggcagcgggacgcggccacctcgaagccacgtcagggcagccccaggtcgggcgcgtgccagcagccagaggtggggacaggagggctttgggcagggtgggttggggaaaggcggggggaggggctgaggagccggatggggccgtgggtctgggttcaggataccagcggtcctcccgggctttcccgggacgttggtcttgtagtccctcccctgccctttctttccctatggcgatggccgctctggctcttgaaggaggcttcacttccgcgcttatccttggagagcagttttcatccgattcgcaggggtccgcgacctcctatcccagatccccgcctggagttgaggagtgagaccgggtacgccccgggagccagagtgagcggagacccagagaagcccgctgggatttctctttgattatgagtagggaaaaccctgtgaggcctctggaaagacatcagaaggatttagtctaggagctcagagcgtgtctccaggtggagaagaggcggaaaatgagagaggcggccggccattagtgtttgaggcgggccggtggccacagggggcctgaagtctgagtaagagacctgattttttctgctagaactttctgcagtggaggaacgggaggggcacctggagggcctcacatcgcagcctcaagaat

SEQ ID NO: 6806 - DNA, 1417 bp, Artificial sequence
  DNA replication origin
agctgactcgcctaaggcctccagctgaaagcggaattgcaggggtgagaatgagcagacctaactaccgggcttctcgcacctggcctgcatttatttaggaccacgataacctcgaaggccaggctggggtgcccgatgggtcgtgggcttgctgcctaactccctgagatcggcgggctgaacagagcttcgaagtgtagcgccatcctgagcagaggaaggggcgcccgaaggccgcgtagcgggcggcagggcgggaggaagtagcagctgctgctccccgcccacccctctcgcgtgtgcctttccgctccactgttcgccggtgagctaggtggcgcgagagcggaggggagaaaagacagcggctgcaggagccgaaggccgcggctcgaggtggggcaggggcgggcacgcgagcgtgcgtgcgtgggcgcggtctatagcacgccgcgcgcggggcggatgtccgggccggctgggccggggccgcggaggagatggcggaaggtggaggctgccgtgagcgaccggatgcggagactcagaagtccgagcttggacccttaatgaggaccacactccaacgcggggcgcagtggtgagctcccggctcgctcttcctctatgcagaaccaggggccgagaaaaaggggcctcctttttctcggctagagtaggggctgggcggggatggtatgtagtgaccctggaagagtagcctgacacctgcccctcaggagaataactccaggatcagctctgggaaagcgcaggcggggcctgagtgtcgtctcagttcatttggagccctagggggcgggcccggcgggggccaggaggagggatgtggagaaggggaaggttggtggggaccctaagggtggggagagccctttaccatgaggactcgccgtgtgaccttgggcgaaggtgtcacagacctggattcctcactgttaaaaccaggatagcaatatttggctcaccgacctcagtgggttgaggggaaaatcagaagtagatactttgtaacttgtaaactgccaacagatgtcaaggtcagaagctgaacaaatgtctgagaaccccgattattttggtagcaagtgtcaaaaatatttgcggcagcagtgtcttggagtgggagaggaggatagcctaggtcctggagctagatagaagatgaagggtccagaatttagaagacccaggctgagttattaggcatcttaatagattgtttagtagaggggacaatactttgtactactggagagattcctgggtggtgtaattgtgtaggagtagaaaaactaaggctagactttgcatcgagtatgattgttacccatcttgtttgttttgttttgttttgagatggagtttcactcttgttgcccaagctggagtg

SEQ ID NO: 6807 - DNA, 1202 bp, Artificial sequence
  DNA replication origin
gcccctttttctcggcccctggttctgcatagaggaagagcgagccgggagctcaccactgcgccccgcgttggagtgtggtcctcattaagggtccaagctcggacttctgagtctccgcatccggtcgctcacggcagcctccaccttccgccatctcctccgcggccccggcccagccggcccggacatccgccccgcgcgcggcgtgctatagaccgcgcccacgcacgcacgctcgcgtgcccgcccctgccccacctcgagccgcggccttcggctcctgcagccgctgtcttttctcccctccgctctcgcgccacctagctcaccggcgaacagtggagcggaaaggcacacgcgagaggggtgggcggggagcagcagctgctacttcctcccgccctgccgcccgctacgcggccttcgggcgccccttcctctgctcaggatggcgctacacttcgaagctctgttcagcccgccgatctcagggagttaggcagcaagcccacgacccatcgggcaccccagcctggccttcgaggttatcgtggtcctaaataaatgcaggccaggtgcgagaagcccggtagttaggtctgctcattctcacccctgcaattccgctttcagctggaggccttaggcgagtcagctgcccaaacgtgggatcggggctcctgctccagcggccctacagggatttcgggaagtaccatgtgcaccagcgccttgggaccaagactcaatggtgtgttgtagtcattaacagtcgccttaaacagtcgacgccagagccacctggcccaccgcagaattccgtcagctcttcatactgagctacttgccaagcagccacagaggggcgatagcaacaggggaaggagaggtactccacattagttacccaggcgtgtacttagttcctggaacaagatacaacgtcctgaacactatgttttccagtcgccccgctcacacacacaaccctcctcttggagggagaagtaaacccagaggaaagaggaagtcaggcagttggtctagatgcgtctccatacacttgtctaacagtccttgtcctcagagaaaaataagacctagttcctgccctcatagaatctagtagaaaagaagagatgttacagaaataacctcaatgcctagcagtatgtggtaagtgccattaaagtgtgtga

SEQ ID NO: 6808 - DNA, 1384 bp, Artificial sequence
  DNA replication origin
gactgcgcgggcggggtcgccgcttggggcgcggggcccgggctgggagtcaggtcaagggtcaggggccaggggcggctcggccacgagcagccggtggggcgcggccgcggcggtgcggcggcctgccggccggaagagtaccgggctggcgggcctggggccccgcggcgcctggagggaacccttccgctcacctcaggcaacgaatccgagtccagcctcttcgcgccggggacgccggtccgcgagtcgcaaactcggagacgaaggcgggtagctgaagaccagaccgtggactaacgagagaaccgacggaggaccgcgggcggcgggagggtagcgcgagagagcgagggcgggcggcggcgggagggcggggaacgacgtgcgcgcctccgagtgcccagcgggctcgagccggcacaggtcgcggccccgcgcacgcgcgcgcactcacagctcatccactattgctcaggagcccgtccacgccctaaaagcaaaacccttaaccaatcattgcagccgcgtggggcatcacgggaactccggggctataaaagacctggttgctattttgtactcccggagtcactcatcccttaagcaagcagggtggggttaggtgcgcgtgcgcggttttaatactcctccccgaactgccaactcttcacgcacgcgaagtaggccccaccctggctgggtttacgcgtgcgcactaacgggcctggtcccggaagaccacacgcgtgcgtggtggggactacggtgacagtaccccgggtggggcgagggccagtcatggcggagtcctggtctgggcaggccttgcaggctctgccggccacggtgctgggcgcgctgggcagcgagttcttgcgggagtgggaggcgcaggacatgcgcgtgaccctcttcaagctgctgctgctgtggttggtgttaagtctcctgggcatccagctggcgtgggggttctacgggaatacagtgaccgggttgtatcaccgtccaggtgaggcttcctacgaacctccgtgggctggccgcccccgcccccaccctctcccgactgtaccattgggttccccactatcctgcaagaggctcatcagaacttaacattggttcacggccttactaccctgaacgcatctgacctcggaagctaagccaggtacttggatgggagaacttaacgttgtgccctgactcatgccaccataccattttacgccagaatccccaccagtccacccatcacattgtatctgttcctcagaactctcacctggcaataccattagtcccttaggaccctcaccagacttcaccaaacaataccagtggtctctaacctgacctgggctgatgcctgctc

SEQ ID NO: 6809 - DNA, 1363 bp, Artificial sequence
  DNA replication origin
cccggctattttttgtatttttagtagagacggggtttcacgttgttggtcaggctggtctcaaactcctgacctcaggtgatccacccgccttggcctcccaaagtgctgggattacaggtgtgagccaccgcggctggtcaaaattttttttttttggtactttttttgcagaggcggggtttcgacacgttgcccaggctggtcttgaactcctgagctcaagctatccatccacctgcctcggcctcccatagtgctgggactacaggcgggagcacagcacctagccccttccttttcttgtctctgtgaatgaggtttggagccgagacactgaagtatagataattgcaaaaaggtatgtttttgggagatggggcattcctttcttatctctgcaacttgcatctcccagacgctcctgaggagggagggaaagccagggagccccagagctctccgggatccagggaggaaaccatggctggtggcagccagttctgtgttcagaatgtgcttgctgtcaagagtgcaggcctggaattccagcctggccacaggccaaggagggaatggacccatcctgcgcatggtgtggggatgagaagcagagcccaccacgggtctcattcccagacccatccggtaactgtcagtttcagtaactgtgaagtctggggcttttggggtggggggctgcaggttaagtcctggggagagctagagctaccttaggaccctccccttgaatgttccaggcagcaacccccctctcttatttcttcccccaccaaaagaatgcaggccactaggagtgagtgaccagcgcctgcgagttagagctattttgggcaggagagcaggcgtcggattccagtgttccaggcagggggaggggacgagggttaggcctgaggcgctttccgactccccagcctgctgtgggcgaggctctaggagatgagctagcttcccgctcctcctgtccctggcctcagtctcccatccgtgtaagggccgggcagcaaggctttcatcctttgcaattgagagaacgcttcctgattgttctcatggcttagaaataccccttgatttgcattcgaaggaaataaggagggctgaacgcagtcgacgggtggccagttgctgggccagttcgcagtcctgactgtcccttgattagtcttagaggcccaaaggcctgaagttgggcggggagcccctcccccacactactggttctgaaggctccgagtgaccgggaccgaccgccggggtgtgtcccgggacggacttccctggccgtgggggcgaggcttccataatggggcgtgacttttagggcgggggagtggct

SEQ ID NO: 6810 - DNA, 1706 bp, Artificial sequence
  DNA replication origin
tgctcccgccgcggggagctgtccgccaccggccggtgctgaaggcggctttcctgcgccggggccggggccggggcccgggccggggccggcgccgccgggcggcagcggcccgtcgccagcgccgccctccaggctgacctcgttgcccatggcgggcaggcgggcgggcggggtcggggtcgcgctgcgcccgggccggcggctcccgggcggtgctcacactctcggcgccgccgctgccgccgccatctcccagctcggctcgcgccgccgcctgccgctgcgcatgcgcgtctcgcgcccccttccctgcacacgccccccttcccctgtgcgcgctcccgccagcctcggggtcgctgggaaacagccgccggcgcccgcgcatgcgctgtccagggccgacgcggttgtatcatgctgagaaggagccgggcgggggccggcggggctgcgagggccctgtgaggaggggcacctgccactagaagcggcctctgggacgtcgcgctgagccctgctttggagtcagaggggctttccgcctcggtgaactcgagagtagcaactctcctccgggtaaccggagtgccacagcgggcaggcgtcataaggacaggcctcggagaggagaggggctacccgagaatggcctcaaaagtatgcataggagttgggaaggcagaggaacaagtgtattcagagacgcaaggtcgtagagggaaggagagggagggtgctgggtggtcgggccggattgtgagggtctttaaggccagctggggagtggagcctttatccagatggcgatgggaaccatctgggattcacactgaggaactgggagtctcaggaagcgccccgggcacagatggaaggtgtgacagggctgtgtgaagccagctgggaggccacctcagtcagccctgggagagtgaccttggggatggaaaagaggacttgatggttctcaggcctggagctgtctcgatgcggggccgcaggttgcctctgcattaccctgagagctttccaaattacttccccgctccctcacatttacagccggtttctgcccgctactcaggattgtctgccgtggtggcttctcacacaagcctgtactttcctgtgggagaatatttcctaggagcctatattccagttcatctctgacgtcataaatcatgactgtgtagaaaggcgtgagtaacttgaacccattttacaaacccattcaattctcctaatgttgcgaaatatatcacatagggtgttagcagttctaactgaacctagaataatccagggatcccagtgaatgctgatagccagcctgctggacagaccggtggctgtgtcagttcttgtgaggaggggccaggaccctccctgggccttcccctgtgcactccgagctgctcctcccgacctctgggatggagcaagtaagagaaagaggaaatgcagagcccccacttcctgatattttctcctgacttcatacctcccgttttcacgctaaactgcctggcccctctgggatgacctaggatgaagagagcctctcttcctgcagatgatggtccttgctgtgtttcctcctgtgctgcaggatgtttgatacagcttcgtgagtggtgactacatgtgcacatttaggctccaaaagagtctgcacctcagccccgataggacccttg

SEQ ID NO: 6811 - DNA, 1127 bp, Artificial sequence
  DNA replication origin
tggcgggagcgcgcacaggggaaggggggcgtgtgcagggaagggggcgcgagacgcgcatgcgcagcggcaggcggcggcgcgagccgagctgggagatggcggcggcagcggcggcgccgagagtgtgagcaccgcccgggagccgccggcccgggcgcagcgcgaccccgaccccgcccgcccgcctgcccgccatgggcaacgaggtcagcctggagggcggcgctggcgacgggccgctgccgcccggcggcgccggccccggcccgggccccggccccggccccggcgcaggaaagccgccttcagcaccggccggtggcggacagctccccgcggcgggagcagcgcggtcgaccgcggtaccaccggtccctggccccggccccggccccggtcccggccctggcccgggcaggtaagcgcgtgtctcggcgcccggggggcggtgagctgcagcctgaggccgggacccgggcccaggatcccgcgatctagtgtggacagcgaggttcgacgtccggccgcactctgaaccctgccggattggcgtgaactgggtggtcgcgggaagcggcccttcctttccagctgccccgccttggcgtggcaggatgacgagcgcagggtcagtcggggcctgcagaccgtgactccgtcacgaaccccaaattcgcttctccccaacgctcgggcctgactgctcaggaggggcttatgtaaccttaacctggtccctccgcacaggagagcaatgggatggaaaacgtcctccctgtctgctggtgtctgcatgtgtccattgtgctgggccgagaaaacagcacaatgggagtggctgtcagggaagataagtgtcactgcgaggaacagagagatgaaaatagttgaaccatgaacttggtcttgggctttccttgggcatttagtggctgtaatcacctttgggggaaaggaaaattgcccactggacaccaagaggtgcttatttaggcccaacaatactaataggatcatgtgctttcaccaaggtttagggaaacattttggggtgaagcaaaaatgctattgagtcatccagcaccagatatgttctcgttaccttatgatttagatcaaaccag

SEQ ID NO: 6812 - DNA, 1429 bp, Artificial sequence
  DNA replication origin
tggtgacctccgggcccaggcaggcggcgctcagcgcgggctggcggctaaggccccgatacagagccgccgcctcctcgggctcgctcagcagcacctgcgcaggggacacaccagggtcaggcccggcccgggctgcagggaccacggggaccgcgggccgagccctcacctgacgttccatagtctcctctctgccgccggggcgaggcggggcgtgctcgcgcccggaagtgaggcttccgggggcggagcctgggacggcccgggctgtctccgcccctgccctgcggcaatctgtgaggggcggggccttcggctaatgggtgaggaccgttggcagggggcgggccttgacggtgagaggacccggcctgggagcgagaagtcctgggtgggtgagagcaggggtctcgccaggggcggactagccaagtggggggcggggccgtgggctgagtcctgggcctcttaccgaggggcgaggcgttggatctcggaggagagggggcggccctgtggaagcggaacccgggagcccggcttcggggagggtagaagggcctacgagagaaggggttgagggggtgctgcaaggcggaagcagcgcggtcggacgggcatggcccaagcacgcgaagggcggggcccgaggggaatgggaccaatgagtctttgaggatgaagggcaaggcgggcgggtccggattggagccctgcgaggaatgtggagccgggagcctgtgagcgtgagcgtgagcgtgagcgtgagcgtgagcgtgagggtgagggttgggcggggcggagccggccgcagcgtggatctcccgcggctctggggctgactgtagggttccttcgggtccaccacgaggccgacattcactacacagtgccaggccctgccctggagggagttccacgcagacgaagaagagaagggccagggtccgggcggagggcgcgaagcaaagccctggggtgcggggcagaggggcgggtgccaactcttagggtgctgcccggacttatcagtcgccaggcctgccgcaagagctatctatccccgcagcctttacccagccttctcagtggcaccttgttggggaccgtgagctggtgggtccctgccttcctccccaggcctcaccctgagctcttgggtgtgaaaggcctggtgggctcagactccacccaggaccagggagcttcctgtggaaaaaacctaggcaggcaggttccctgtgcacgtggtacaggattggctgggctaaggtgccaacagagatcaggagaggctggacagtaaggatgttccctccatatacctgagtctggctggtcttccacattcagggccctggctccctgctccatggcgtgcttgtgattgagagtccacttgtctggcctgtagcttcccctttcc

SEQ ID NO: 6813 - DNA, 1745 bp, Artificial sequence
  DNA replication origin
ccaggacttctcgctcccaggccgggtcctctcaccgtcaaggcccgccccctgccaacggtcctcacccattagccgaaggccccgcccctcacagattgccgcagggcaggggcggagacagcccgggccgtcccaggctccgcccccggaagcctcacttccgggcgcgagcacgccccgcctcgccccggcggcagagaggagactatggaacgtcaggtgagggctcggcccgcggtccccgtggtccctgcagcccgggccgggcctgaccctggtgtgtcccctgcgcaggtgctgctgagcgagcccgaggaggcggcggctctgtatcggggccttagccgccagcccgcgctgagcgccgcctgcctgggcccggaggtcaccacgcagtacggcggccaataccggacggtgcacactggtgtgtgtgcgaaggggaactggctggcgacggggtcgcgcactggggtgggaaggaagggggtgtggagggctcgctgcttgacagtgcgtaagggtatatagggagccggcctggacttggaggttacactcccacaggtccctgcacacaggtgtgtggagggggggagggggcgtgcggggcgttatcgaatggcggccatgagtgcacgagatgacggcgtaggggtagaagtcaaacctgggctcagggcgtggaccttgtagggctctccaccaacacgccatcccatacacatgccaggctgccctcaagattccagggtggatgctggggttactagggggttctctcaaagaggctgtcagctcaggctctggaggcctggactagggttgtggccaagtgttgtccagcctgcagccagggtgtcagtgtctggagacagattgagagattggggaagatagatctaggccttcctgggtcaggtggggctgggggcagtagccaggagtagccaagacaaggtgagcagtctcatgcctcccctcacagagtggacccagagggacctggaacgcatggagaacattcgattctgccgccaatacctggtgttccatgacggggactcagtggtgtttgcaggacctgcaggcaacagtgtggagacccggggggagtaagtttgagggaggaagcttgtgggcaaggccacagccgtccgcaatgcaagccttttatgaatgctcaccatgtgcctagaagggaggccagcagccaggttcttgcccccttgggagctcattcagtttctggtgacatggcctgataagcactggaagcttgctccaaactcagcctggactagagcccatggtggcctggggagttgcagagagtagagtctctgcctcagggaggaaaggcaaggtggggctagaggtgctccagaagctggtgtggggccagagcctcaagaatctctcctaagaggtgtgcccagtagggagcaggaaggggttattgcaagataatcctgacctgtgctaccccatgtccacagactgctgagcagagagtctccttcaggcaccatgaaagctgtgctgcgcaaggctggaggcacgggccctggggaagagaagcagttcctggaggtgagtctgcatgggaccaggtagtgggtgacaagagagaggctctgccccacagataaggctctgttagcgggcaaacagcctaatgcccagatgtcctcaggtctgggagaagaaccggaagctcaagagcttcaacctgtcagcgc

SEQ ID NO: 6814 - DNA, 1517 bp, Artificial sequence
  DNA replication origin
tgggacgcgcaaatcccgcatcagcaccgatttacgccagaaaaatacgcgtgcaagtgaggtggggggggggggcgggcgttgggacgtgctgctgcgggtgagacgggaggaaggtagtcacgggctcaaggctggaggctggcgggctagggctgagtggagcgcctgcttagagaccttcgggagaacttctgccggaaccccgacggctcagaggcgccctggtgcttcacactgcggcccggcatgcgcgcggccttttgctaccagatccggcgttgtacagacgacgtgcggccccagggtgaggcccaagcttgggggctacagagccgggctggaagcctggaaccggagggccggggcgaggtctcggcctgatggctgcccgcacccgccacagactgctaccacggcgcaggggagcagtaccgcggcacggtcagcaagacccgcaagggtgtccagtgccagcgctggtccgctgagacgccgcacaagccgcagtgagtccctggtgctcccggccccgccagggccctaaccctggggcggcatgctttggtgtctgggaccagagcctggaaatggttgagactaccctgccacgattttgctcccgcttccgcctaggttcacgtttacctccgaaccgcatgcacaactggaggagaacttctgccggaacccagatggggatagccatgggccctggtgctacacgatggacccaaggaccccattcgactactgtgccctgcgacgctgcggtgagcactagtgacgcttcccccatgaccctgcctcagcccccacccaaaggctggctcccttaaccccagtgaactttgtctttcagctgatgaccagccgccatcaatcctggaccccccaggttaggagttgggccagttatgggtcaggccctttagcccacgacatccacacagtctgggtttcatccagcccaccccatcctacagaccaggtgcagtttgagaagtgtggcaagagggtggatcggctggatcagcggcgttccaagctgcgcgtggttgggggccatccgggcaactcaccctggacagtcagcttgcggaatcggtgaggcacaactgcctgtctcccacagagaggagctgaggttgtgtcctctgtggttatcccactgggggctgggaatctatccctgcccccagaggtcctagccagaagatggcaggtctagcatctgtcccaggagtctgttacctgtcctaattccccactcctctaggcagggccagcatttctgcggggggtctctagtgaaggagcagtggatactgactgcccggcagtgcttctcctcctggtgagcctcccttgtgtttggggacccagtctcatcccaccttcccccttccccaggcaagctaacaagtgagccttggggcaatggactgagagtcacaaatgacctagcagagcttctctcccagccatatgcctctcacgggctatgaggtatggtt

SEQ ID NO: 6815 - DNA, 1388 bp, Artificial sequence
  DNA replication origin
tcttgctcccagactacgtacggacctgcatcatgaacaatggggttgggtaccggggcaccatggccacgaccgtgggtggcctgccctgccaggcttggagccacaagttcccaaatgatcacaagtgagacaaacaccttccctccgtcccggcctggggccttcccccagcacacactatagtgatgctctgggccctcaggtacacgcccactctccggaatggcctggaagagaacttctgccgtaaccctgatggcgaccccggaggtccttggtgctacacaacagaccctgctgtgcgcttccagagctgcggcatcaaatcctgccgggagggtaagcggcgccgggtcaagctgggagagtggagggacaagcccacgtccatccacgaacccactggctctttgtctccagccgcgtgtgtctggtgcaatggcgaggaataccgcggcgcggtagaccgcacggagtcagggcgcgagtgccagcgctgggatcttcagcacccgcaccagcaccccttcgagccgggcaagtacgcgtaggcggtatcggcgtcctgggggccgggctagggaaggtccaggactccaggggcagggctccgtgtagggcaattgggcggggccagataagccagagtcccagggtcttgttcacgccccattaccgcccccaggttcctcgaccaaggtctggacgacaactattgccggaatcctgacggctccgagcggccatggtgctacactacggatccgcagatcgagcgagagttctgtgacctcccccgctgcggtaggcggcggggaccaggcctgggagggtacctgggaaccttggggaggggcgtggcttggccggggaggtaagaggggctgggcgtgacctgagagcataccccgtggagtaccgtacacctgggaaaggcgggtttggtcccagccccagagggatctcagctctcgctcggggcccgacctatctcggtccatctaagggtccgaggcacagccccgccaagaggccacaactgtcagctgcttccgcgggaagggtgagggctaccggggcacagccaataccaccactgcgggcgtaccttgccagcgttgggacgcgcaaatcccgcatcagcaccgatttacgccagaaaaatacgcgtgcaagtgaggtggggggggggggcgggcgttgggacgtgctgctgcgggtgagacgggaggaaggtagtcacgggctcaaggctggaggctggcgggctagggctgagtggagcgcctgcttagagaccttcgggagaacttctgccggaaccccgacggctcagaggcgccctggtgcttcacactgcggcccggcatgcgcgcggccttttg

SEQ ID NO: 6816 - DNA, 1455 bp, Artificial sequence
  DNA replication origin
ctcacaagacacagtgaaggggatcatggcctgcacccctgcttttcagcagtaaaaagcccgaaaagcctggcgagcatggccgagctgggagggccgagccggaactccacgtccctcgagagcaggagcctcttaagggctggcactggtctcagcctaatggctgaggcggtaccctggcttcatatgcatctcactgctcccactgcaggggggcagggaaggggggtctgggagcccttcatgtgtgggggccgagctgggggcccccatggccatcctggacctcgctgctccagagtttaataaaggtagcacatgcttattgctagagcctttgcagacaatggcggtcctccgtgtgttcagctctcctggcggcctggccctgtccaccacaggacggcacaccctccggagtcctgcctcccatgcctggcctgaggcatggccacaagccagtggctctgtgggccagggccacctgtcctgctggggtcccagattctcctacttagagcagctccgtctgccccctatttaggccgttcacacctcaccaccttccctctgcctcaaaacctgatgctgaggtccattttccagatgaggaaactgaagtaccaggaggccctgtccagcccctcctcaccagacacacccaactcccacaggggcccacggtccccaacactcactctgaggctgggccacgcaccaggagctgcaccaggatgcccgtcactgccaccagaatgggatagtggtccacgctctctaggcctgaggggaaggggaggaaagagatgagccacccacatgctcctgcttcaagggctccaggcctgcccactgccctctctacagaagggtgagccgagactgcagagcaccaagtctggctgtccgggggcagaatgtggaatcaggcctcactgttcctagcagaggaaccgaggcctgtagtgtgttggggtgcagggcatctaggtcctcaccaggcagccgtagggtgaccacacgatcaaacaggttcctctcagctgtcacccggttcagcacctggtttagcagctgtgaggggagcaggagtccattggtggatggggagcgtcatcaatggggcatccccagggtcccacccttgttgcccagatggccacacctgtgcaagacgccgcagcagcatctcagaggtaggccgggtccagtcaaggaatatctcaggcaccagtgtgatagtcatctccaagacacgcagcaggctgaccgagaggtcaaagcaggtggcacataccttgagctgccggctgtccacaaagttccgctccaggcgctcagcagcctgctggatctgagccaccaacacgtgggcatgcagtggtcagcacctggctctagcccaggaccaggcctcatcccttgcaccaccctaacccacgaggccccacc

SEQ ID NO: 6817 - DNA, 1817 bp, Artificial sequence
  DNA replication origin
ctcggggcgaggccggggccgtggggcggggccggcggctgctggaccgcggcgaagcagggaacaaggcctcgcccttggcgccagttccgcctttggatccgccaatggccagctgacccgcgggtcccggcccgggtctccatggcagcccggcgtactcgggcgctcattggctacgtctgtcgcagcgctgcgctccaacgttccgacgccggcggccgtgccacgtacgcggcagccgattggcccgcggtggtcgcgtcactgcccgcgccgggtccggcctgagttcggggccagcagccgtctacccggtgtcgcgttctgtgttgtggcggccctggatccggcgtcagggcgaccgggcggacgaggtggagccagagtctgtcaggcgggttggtgaagggcgcggggccgggcacggcgttgggagtgcgcggcagggaccggccaggcgggctgcaggcacctcagagcccgggacaccccctcaacgtccgcaggcgcgatgaaggcactgatcttagtggggggctatgggacgcggctacggccgctgacgctgagcaccccgaagccactggtggacttctgcaataagcccatcttgctgcaccaagtggaggcgctagccgcggtaagaccctgggtcgggatcagagtcgcgttcggatctggcgggactagggatggccagcgactaggggtcaggggctcccgtaccttctgactgagcccgcccgtcggcctgcgttctgacaggcaggcgtggaccacgtgatcctggccgtgagctacatgtcgcaggtgctggagaaggaaatgaaggcacaggagcagagggtgaggcacagactcttggcccttattctcggtccccgcccaacttcccatcctggtagaacctgactgggggggcctcttccttccagctgggaatccgaatctccatgtcccatgaagaggagcctttggggacaggtcagtagaggcagaaaggtcccttgggggagggtttaaggccaggaaaagggtaagacccagcctggagtgggcctgctgagcctgaatccagggactcagacctccagcaaggtggtgacctgtccccttcccccagctgggcccctggcgctggcccgtgacctactctctgagactgcagaccctttcttcgtcctcaacagtgacgtgatctgcgatttccccttccaagccatggtgcagttccaccggcaccatggccaggagggctccatcctggtaaggcgccaggtcttctctctcttgacactttcaccctccatgcccagcctcccatgccccctagccttcatctgccttcggatgttatggatacagagctgtgcagtatgtatctttaagcacttggggcagagtctcttgagatctggaacggcatgtgtatcaaggcttaggaacactggactaggtccgaggtccccttccttgcattcaggtgaccaaggtggaggaaccctccaagtacggtgtggtggtgtgtgaggctgacacaggccgcattcaccggttcgtggagaagccacaggtgtttgtgtccaataagatcaacgcaggcatgtacatcctgagccctgcagtgctgcagcgcatccaggtgtgtaggagacagctgttggtgggctggggtggggcaggccatcaccgccatgaccctgctcacaagctgcccactcccacagctgcagcctacgtccattgagaaggaggtcttccccattatggccaaggaggggcagctatatgccatggagttacagggtgaggca

SEQ ID NO: 6818 - DNA, 1583 bp, Artificial sequence
  DNA replication origin
agctttgtctgatcagtcctgggtccatcagtttgtccatgtgtccggctgccagcccgtcccttgggatccttcccctggggtgtagccttgttcattagtatatactcattccttcatgctttcctcagcagaacacttccacttctgaggtgagcttttgccccatgcccttcctccacaggtgttgcctttttataaagacctgatagcagaataaattggtgtttccctgttgacccagcaccatttctgtgggcctagaatatggccctcaacccttagagtggggcagtgagggcttgaggagtgacccttcctttctcatggttttagtcattttggctgccagcccttaatggcacagatctgctgcttctaacagatggccaggaggtgacaccgatttcagccattgccaaggttagcaccctctcctttgagcctagggccacactgttcattgtcactttaggcaagtgcctgtttggctttaaaggtaagcctgccagctgtgagaagccttggtaactgatggactcatttcctggtccttaaagatgcagcctcttaagggctccttgatggatgccatctctcctagcccccagccctggtgccactggtgggcaggttcccattctttggggctgggagggacagcttgcctgtttctggtcacaaattacagtcttctctcctgtaccattctgtggcttcagccatgggggcagtagcccttcattagtgtagatagtcattccctggtagggtggagggtaagacatagggtctggaactgtttgggaccttttggggatgtcctgtgcctcccagattcctcgattctgggaggagaggctgccgcattctgctgctcctcacagcgagcaaagctgcacccacttacattcagtattttcctggcactacaaagagtgggaaggcctgggatttgctgctgctcccttagagcagggcccctcttttcagcactttggacacctggagacccagccctgttatttaatggtagtgggcaagtgtgtgtgcatactgtctgccactgctttctccctgccccatgccagagagccctgtccctgccaggcccagccttcttagccccaacttgggaacaaagtgcaacatgggatcatgggttggggtgctcaggtgagccctctctatagtgcttccctgggccaagctgacaccagcccctgagggtggggtgggacgggtggtgcttaaaagaggaaggggaccagtgtagcaacttgccagggaccccacccctccctctctgggcctgtgcagtgagcatggggattcccatcaaggggcctggcacctgtgctagttacgtagccgctgctcacgcgctcactcctgaccacatgcacgttccctagatgcagactgctttgaactttaaagctgtacaatttggttatgtttgtgctgacttaaaatatattttaatgaggaaaaaataatggagaaccctgggaaggacctggttcttttgcttctcggggaactgtaagccctcgcgttctgggaatcgctctctgctgctc

SEQ ID NO: 6819 - DNA, 1390 bp, Artificial sequence
  DNA replication origin
gggaacgaagcgcatgcgccaacccatgccgtcacagtcacgtgccccacgctttcggcagaggccctgagaggcagactctgactgacacgtgagctgacctgtcagcaggaagcacttcccctggcgacgagcaaaaagactgttgattggggatagcaccccctcgggggcgggttctttgcagtcctggttactatgacgcccggcccccgccccctcggctagccgccatcttgttgttgatccgtacccagtgggcagcgccgggagctggaccaagcggccggtgagaggccgctgtagcggtgctcagccacctgtgctgcctgccagggggcgggccgaaacctggaggcccggggggcccagctcccgtagggagccgtgggcgctcggtgcccgggccgggcaggtgagtgacaggagccgggccgatagaccggcctgacgcccgcggggagggcggtggcgggcgcggggttggagtgggcgcgtgtggggtcggggctccggtggggccatcactggaacatcgctcgagcgtcctgaccggccgcccgccgagcctcccagatgctggcaccgaagccggggggacagccggtgtggaggacggagagcgccagtgcctgagggttggccggctagtagcgggaaaccagcttctctgaccgaagctctggactccgctgatccggagcgctaaagtgtgtccggtgccaccctgatgctctcctgggagttatgttgctcctggctgagaaatagacttacctctttcttagatagcgttcctgcgagtgattttcaggacgctggatgctaagactagacgaagcaagccaaagcccccgcgagccaggcaggccggtgtcacggccctatgattatggcaagggggaccctctgcctggctgctgcttcctgagacccgttcggaacctcacgtgtacctcgaagctcaccgttttcctcgcaaagaacctggttaaatgtccataatggctgagttttattttggaacataatttctttggttcttcaccaccactttttggagagtggtaatgtcttcctctttttgctttaggagaaagtgagtattatggtgatgacttgattttatctcctaaagggatgctcgccataggagacaaaggaaacgtaggagtgtcttagaatcggaaaaagaaacttgtttttgttgtggatgatatggaactggcaaattaactgttttttttcttttttttcttttgagacagagtctctcgctctgttgcccaggccggagtgcagtggcgcgatctcggctcaccacagcctccacctcccgggttcaagcgattatcctgcctcagcctcccgagtaggtaggactacagac

SEQ ID NO: 6820 - DNA, 1426 bp, Artificial sequence
  DNA replication origin
cgcgagtccagcggcgacgcgcgaccgtcggcattccctttgccggtaccaggtgcagactgagggtcggtgctgaggctgctctatcaacacaggctaggctcaagggtagtgtagctgcagacagactggacataccagcaacaggaaaataccagggaatgagggccgtgggctagcttggggaaagtcagtctcacaggaggtgacatcaagatgcaatcaagaagaggggcattctggccgggcgcggtggctcacgcctgtaatcccagcagtttgggaggccgaggcgggcggatcacgaggtcaggagatcgagaccatcctggctaacatggtgaaaccccgtctctactaaaaatacaaaaaaaattagccgggcgtggtggcgggcgcctgtagtcccagctactcctgaggctgaggcaggagaatggcgtgaacccgggaggcggagcttgcagtgagcggagatcgcgccactgcactccagcctgggcgacagagtgagactccgtctcaaaaaaaaaagaaaggaagaagaagcaggaggaggagaaggagaagaaggagaaggagaagaaggagaagaagaacattctaggcagaaggagcagccagggaagagaccccgacggacaggagctggacagggccaaacataaagaaggcccaggtgtctgtgattggtggtggtggcaggagggaaaaggtcagcaaaaccaggctctaacggccttagagcagaatgtgggttttgttcttggtgtgatgaggagcaatgggggcctttgagcaggaatgacctgggctagcccttgtttagataatcccagctgctttcagaaaaggattctgcaataagagtggaagtccctgccctcatccaggcaacgaaggggagggcctaggcctgggcagggcaggtgcactgaagggggtcactttggggtatgttttggaactaaaatcaagtcttgctgatgcatggatgtgggcaggaaaagaggcatcaagcatgactcctacatttctggcattaacagctggttggatgaaattgccataaactgatctgggaaagactggagaagagtgggtttggagaggaaaatccaatgatcatttatggacacgtaacccttgagatgcctgttagacatccaagaggagttgcagagtcagctgctaggtgtatgactctggacttcaggagagagatcagcactggagccttggatctgggaggcatagtgagtgaatggatggtatgtaaggccataggcctggataaggtggggtgggaggaaatcagtgtagtcagagggagacagcaatcgggactgtgccctgggacattccatgaggtggaggtaggggagatatgaagcagagctatcaaagaagctgagcaggaacagcc

SEQ ID NO: 6821 - DNA, 801 bp, Artificial sequence
  DNA replication origin
gcgccccgccccggccccgcggccaaagggggcggggctaaagcccggcgtccctcccgactccgccgcggttctgggtgggaagggcggggtcataactggaagccggacggggccggtacggggaccccccgagcccccagactgttgagtggaccctgcgtttgctgcgtgacgcaggacaggtcgcctccgtgcgggggcctcatcctccccgtttgttcaatggtgaaatagcggtccctctcacggggcgccgtgctgcgtccgcacataggcagagcaccccggatggtcggacccagagaggttgtggaccctcggggcctgacccacgggacccattcgtgaggctggccttggcactccctgaacgggatggaagtggggttcagcccgtctgaggactcaagagagggcgggactttgtggcagcgcaccggcggggcctcagccgcgtcccaaccgagctagacgggactgccctctagtggggagtgcttggctagtcgcgagtccagcggcgacgcgcgaccgtcggcattccctttgccggtaccaggtgcagactgagggtcggtgctgaggctgctctatcaacacaggctaggctcaagggtagtgtagctgcagacagactggacataccagcaacaggaaaataccagggaatgagggccgtgggctagcttggggaaagtcagtctcacaggaggtgacatcaagatgcaatcaagaagaggggcattctggccgggcgcggtggctcacgcctgtaatcccagcagtttgggaggccga

SEQ ID NO: 6822 - DNA, 1009 bp, Artificial sequence
  DNA replication origin
acctctctgggtccgaccatccggggtgctctgcctatgtgcggacgcagcacggcgccccgtgagagggaccgctatttcaccattgaacaaacggggaggatgaggcccccgcacggaggcgacctgtcctgcgtcacgcagcaaacgcagggtccactcaacagtctgggggctcggggggtccccgtaccggccccgtccggcttccagttatgaccccgcccttcccacccagaaccgcggcggagtcgggagggacgccgggctttagccccgccccctttggccgcggggccggggcggggcgcggctgccagatgtcggggcggcggcggcgggagctacggagagcgaggagtcgcgcaggcaggcggaggctgagggcgccgctggccggccctcccagccctctccgcgcggctccgccggggttccaagaggagctagtaggttcggtgggggccctggcatggacatgcacagcgctcggcttgacagcttccttagccagctccgctgggaactggtgaggctcgggagcgggtgtggttagtgaggacgcgtgcgggatgccaggctgccgcccggccggaacaacagacgggtgcggggtggctccagcgtgccggtccgaggcggggtgggggcggcgtggcgcatatggctcagatggcccgcgtcgggtttcggacggttgggaactgagctgagcatcagataacagcatccagctggccgtgctgctggaacggcgcgggaggagagagtggaagggggacttctttgggggcggggcatggggcggcaagggactaacgaggtgctggcgctgctgtgaacgccccctacttcaggctggcctatgcctcccttctctacccctcacctagcaagcgctctttctgtgaaagacgctttgggctttgggagctgaatcccccaataggcacgggatgcccctccagtcctgggcaggacctacttccccgttcaggcccgcaaccct

SEQ ID NO: 6823 - DNA, 1089 bp, Artificial sequence
  DNA replication origin
tgcctcacagggctggggctgcctcttagtgcctcaggggtatggagccaggacagtctagaaaaaaggcttttattgtcccaggctggagggcagggtcagaggtagctgacatcattgcagatgatgggctggcggctacgacagctcatgagagctgcaaagcgtgagacatccgcaggcagttcaggttctgggcgaggtgggcatgacagccgctttcctgccatagctgtccgccgagccctggccagccggcgccgaagctgctcagagaggccaagcaggaactgagggggccgagcacgggcacggtgcccacctccgtcacccccttcactccctgtctcaggcagctccatccagttgtgcaccaagtcagcaaagcaattgtcccctagtaccaggggctggcgactgcgacccctgttcagtagggctgctgtccagtcctctgcttccagtccctgccagtgctccaggcaggcgtctggggtggacttgggccgtggatggtggacaggtggtacactggctacaggggccctgctgggcatggggaggccactgactgagaggcactgcctacgaaggggctgtgctgagggtgctgggcgctgggatacaggcagttcttcctctcgccatgtgctgcctgacacctccgagaagccagagtcccagtccagggcatgctccctggggcctcccaaggctgcatccctgtcttctgtcaccactgcttcctcctcctcctcttcctcctcctccacacagcagactgagtcctcttccaaggcacccgaggccctaagctggtggctgggctgcacatctgggccagtttgggaggttggctgcaggggaccaggcattgagggtgagcctgtgtcccgaccacacaactgaggggaagagagggcagaagtcggagaggtatcacttgtcaccaggccagcccagagaacagagggtccaggaaggttagataggcctgctggcctgggcagcagggtgttagtgagcacagggcaggcataggggtgctggcactcgaagctggtgtggttctcatccaccgacctggtg

SEQ ID NO: 6824 - DNA, 1382 bp, Artificial sequence
  DNA replication origin
gggcctgtctaaagccccaagtgggctcacctgaggggcaggtgctgggcctgcttttcaggtgaccatccggccgcatagagcagggctgagccgtgcagcaggatcctcaccctcaacccgtgctgctcctagaggagaaaggtcagacaccagctgggccgggctgggctgagcctgggggttggggtagcaacagggcacacctgaagatgagccagcagcgactccagggtcctctcaggctgcccagctggtaccttcagacggtcccaagaggtccacttcaggtgatggaactgggatgaggtagaggaggagtcagagacttcttacctccccccaacccccatcccagttaccagcagcctttcctaggggaagagctggactagcaggaaacaggagccagggggtggggggtgggggggaggtgggatctgggcccagagtctcagccccctccccgtccaggccggggccagcacaggaaatggggctatggggcccgcacagggaaacagacgatccatcacatgggccagttgtgagagtgggggatgagggggtggtgcttcctgaggaaacccagagcagggcccctgcagcctctgataaagctgcttgttcctcaaagacaaggctgggagctggggggcacatcctgtcccccaatcttgtatgtactgccagtgccttgggctactcattgggacacaggggcaaagggcacagtgaccaccagggccccactgtcccagagaccccagcagggatacaatgcatagaggcttcctcctcctgtcccttccttccttccaagagtcttggggttctgggacctagagctaaggacagaaggatggctggcaggtatctagagaccaggacagggggtgcttatcagcccctgagaaaacacactggggtcaagctgagactaggctagaggtgagatgggggcttctccttcacctgcttcactctgtggacaaaggcagcctgtatgctggttagaggcagggtgcctcacaaaggggctctgtgtgctagtccagagggaccccaggctgctcagcagaaacccagtgctggcccatgacctctgccctctcccctcatgagggcattccttctaccctcatccttgccccaaggaaatgccaactgcagagcctgggcacaaggctggaggcattcacagcgctgcagtcacaggaacacaaatgcccacaagcccaggaacacacacatgtgtgcccacatgcatctccatgcatgcccacattgaggacacaggaagatgggagccctgcactcccatctgatgcacagatgtgcaaacttgctccttccatacccacactccggggatgcccaga

SEQ ID NO: 6825 - DNA, 1939 bp, Artificial sequence
  DNA replication origin
ttccctggctcgaggtgcgggatgcagagtgcgcgggggcgcagcgagggctcgaggtcctggcggggtcagagcgcgcgggctttgcagatttgggggagggagtgcggggtcgggctaaagttccccattacctcggacggcttgggggttctggggggaagcttctgcggctcggaattgtgaaaagattaaccctcgaagattcgtggtcccccgtgaggataggggccgagagctgagccgtccctccccgttcccagagccgcctccagcccctcccaactgtccccgggccccttccctcccgcttagcagtcactaatttccatgacaacggagagttctttatgggcgacaacccggagggggctgggcggggctgccgcggggtgggggaggaagctccaagcccctggggaccagcagccccccagccaaaattcagcttccaagccttcacctgggtgccagctgggggtccagtgcatggacccacgtgcacggtgggggtgggggcgcacatgttcctgctgggaggtgcggggcttggtgctcacacgtgtgctttccgcatgtgtgttgctgtgccagcgggggcgagccagcagcacttgggaaaggggtcagggtggcagcacggtggggagcagggcccctggctggaggtggctgggatagtgacagcatgagcttctgccttccccagcttgtactgtttggcagagaccctgggctcttgagccccagccccctccccgcatagctctgccaaattgcttttgtccgcacctcccaggcagatcctgctccaccaggttccttcctaaggatcagggccctctgtcccacactaaaagctcagagtctgcagtagtccagtccctgtgctgtactccccttacccccaagtccaggctttgagcccccaggactacctttagagacctggtgccctcccccaccctcagagttgattcctggcagctccagcgacttctgagcctcagtttcctcaactggggaactggtgtctccactcagagtcaggttggtttccagggtggggcaagggtctcccttttctaatatttggtgtggacccttcaggtgctctcctaggctggctgttcacatatctctgatggccctactctccagccccatgccctggccaccattcacaggcaggcaagcagtcctctgccctgggagaaggccagattccatggtttccattaggggaaactgaggcatggggaggtgaagggctgtgtggttatcctgtttctgggttgcttgtggtgccgtttctggcactcatggcaggatctgctgttgggggttggtgagaggggattaagcagagctgtaagaggggctctggggacccaaagcctggaaaggatagcagatgggggaggggttggctgggagggtctaagtacagctgggccaactgagaagagggactataaagggaagcagccaggcatccgagcctcatttccatacccctatgcgtctgccttcaacatgttggacctgctttacctaagctgccgtgatggcagagagacgggctgggaactgtcctgactggggggctgcagcagctggcctcttccccaccaacatgctccaaggagctggcctccttttggctgtgcctcctacaccaagttcagtgtatgtttgggggatacaggagggtgcagtctcgaaggtcccagtaccatggatagctcctggcccagggatttagagcacatcgccatggaggccttagggctctgctgggcacccatccgcccccttcagaactcccgtccacctcccctttcctgccctttgtgcctgtgtcccttttactttgtcatctccttgctcctcttccatcacaggttctgtctttgtctgtgtctctgccccattctct

SEQ ID NO: 6826 - DNA, 892 bp, Artificial sequence
  DNA replication origin
aatgactggcaagcgatcctatgcagctccaggactcaggctttcccccaactctccactcaccaccccttacattgggcataggaggcctcctccggccccaggctgagggcctaagggagccattgagaaccttggccagggctaagcaggccagtgctcaccagcaccgctgccatcccgcgcgctcctgctctccagtgggattctgcccttaaggctccgccagggtcggggcggggccggttgggaggccccgcccccagcccgcccccggcccggggtgcgaatccggtgccggcaagcggctggcgatgctggaggttcgctagccgaagcggctgcatctggcgccgcgtctgccccgcgtgctcggagcggattctgcccgccgtccccggagccctcggcgccccgctgagcccgcgatcacttcctccctgtgaccaaccggcgctgcaggtgcggggcgggccgggctgggggcgcttcccgaacgcaggttgtggggccttgggggattgtttccctggctcgaggtgcgggatgcagagtgcgcgggggcgcagcgagggctcgaggtcctggcggggtcagagcgcgcgggctttgcagatttgggggagggagtgcggggtcgggctaaagttccccattacctcggacggcttgggggttctggggggaagcttctgcggctcggaattgtgaaaagattaaccctcgaagattcgtggtcccccgtgaggataggggccgagagctgagccgtccctccccgttcccagagccgcctccagcccctcccaactgtccccgggccccttccctcccgcttagcagtcactaatttccatgacaacggagagttctttatgggcgacaacccgga

SEQ ID NO: 6827 - DNA, 1416 bp, Artificial sequence
  DNA replication origin
gccgcagaagcttccccccagaacccccaagccgtccgaggtaatggggaactttagcccgaccccgcactccctcccccaaatctgcaaagcccgcgcgctctgaccccgccaggacctcgagccctcgctgcgcccccgcgcactctgcatcccgcacctcgagccagggaaacaatcccccaaggccccacaacctgcgttcgggaagcgcccccagcccggcccgccccgcacctgcagcgccggttggtcacagggaggaagtgatcgcgggctcagcggggcgccgagggctccggggacggcgggcagaatccgctccgagcacgcggggcagacgcggcgccagatgcagccgcttcggctagcgaacctccagcatcgccagccgcttgccggcaccggattcgcaccccgggccgggggcgggctgggggcggggcctcccaaccggccccgccccgaccctggcggagccttaagggcagaatcccactggagagcaggagcgcgcgggatggcagcggtgctggtgagcactggcctgcttagccctggccaaggttctcaatggctcccttaggccctcagcctggggccggaggaggcctcctatgcccaatgtaaggggtggtgagtggagagttgggggaaagcctgagtcctggagctgcataggatcgcttgccagtcattagtctctagggaacggggctttgcccagctccccgaacccgacccaaaaggcaggaccaacttagaaaaaccagatgggcagtcgggctagggcaggctcccctagctaggagcagtaaacacacagaggtgtgtgtttgcaggtagtcagtgtggcatcccctagcatcccctagctacgcatcccctagctaggagcagtaaacacacagaggtgtgtgtttgcaggtagtcagtgtgaaaacagtgagggccctagactgtagtagcaaagtctcctatcccaccccatccccaactcctgcaaggccagagtctttcccaaacataagtaccagcaagggtggcagcacagtcagccccttcctgtgtggcaccaaatttcccaaactataaaagtcacctgtgacatggtgtggcctctgctttcttttcagtctaatcactgtcaaacacttcatgagttgtatcactctagtggcctggcctgggatatggggacacaggagaactgtggcaccaaggtatcccacctggcctgggtgctaatcagagggaggaggctcagaaccaccaggaggaagctttaaaggaagtccttggccatttctctgtcccttgtcagtgaggctcacggacccaaagcctgacccacacccctcacaagccctgaggaccatcctaaggccagtatctgaagaccagactcaggcctct

SEQ ID NO: 6828 - DNA, 1114 bp, Artificial sequence
  DNA replication origin
accacgtacttcacgtcaaagtcgcgagaggccgcgtagggggtgcgcgggcactgccagtcctcgcccgccgcgggcttggcaggcaacagcagcagcaacaggaaggactgaggcagcggcgggaggagctccatcgaggcgagctgggaccctagaggatccctaccggcctgggcctggacctgggcgtgggcctggctgggggcccgactcgaggtctggactgggccaaatttaagcagcggtcccgacagccccaagatagcggacccccgccccaggttcctgtgaaacccaaatcccttcccggccctcgggtctgagcacctgacgcctgcggacgcacgacagcaacgccccagccgcctcacctgccgccccagccgccgctgtacactggcgcttagcgctcagccgacccgagggcgccgggctgggcgggcggagtcgggccgtgggggcggggccgcgaggaaggcttggcctagcccaggccctccgcccatccgactcttccggcccttggaggcctggctcctgtaccttcacctggcgtcttggcgcctttttctcagcggcctgtgggtggatgtgcatggtgtggcctggagagaggtgagccagtctgagccgtcccatcccatccccccactaccgactggttcgcagcgagaaggggggcaggacactgggctctttgcttgcggtggaactagtttgcacttagtagcaacaccctcagtggctggtgcccagaggtggcctgggggcccaccatgtggagaacagagaccaggattgtgtggaagaccagaggggagatgtggggcacttacaagagatgttatggggcgccaccctttgtgggaaaggactgtccttttttttttttgagaaggagtcttgctctgtggcccaagctggattgcagtggcgcgatctcggctcactgcaaactccgcctcccaggttcaagcgattctccagcctcaacctcctcctgtctcaacctcctgaatagctgggattacaggcgcgcaccaccacacccggctaattttgtatttttagtagagacaggattcacagtgttggccaggctggtctcaaa

SEQ ID NO: 6829 - DNA, 1327 bp, Artificial sequence
  DNA replication origin
ggcccatacctaggacctccataaagcccagcccatcccagggctgccttacccaggccaggaggttctcgttggggcccgtgtagtaaatggtcttgagtgggcgagaggcattgtgggcacgactgtgcaagtactggtagaggcccagcagccgctcctgctcctcttcactggtgtatggggcctcaatctcagggctgcagacagggtggagggagtgggtttgcaaaggaatgacttccactgtcttctctagagatttagaaacacctattcctatccaggaagactctatcttatgtcctaccctccaggtgctcccttaggacagggcattgtctccccaccatagcaggcaccccaggacagggctgggcccactgagactagagctatgtcccctcttaccccctaagctcatagtgtctttggtgacccctctttggagaggccaggttgagtttagatgtccaagacagagtgacagatctggagtagaggaaaggtgagctaggaatcctgtgggccaaaagggacaaagggaggccatatcttcccagcccctctgctgggggagggggtggaggagggctgtgcttcctgagctggaccaaaatgacccctaaagtagagttgctccagggcaagggaccccggagacctctgttccagtttccttctctgggtatattgggcatttccaggccttctggttaataaagtagagagggtatgctcatggggtgatggagagtctgggtctctggtgccagagtaaaacaggcccagcacactggtctgcttccaaaggtagggacagcttcagggctacatctcagagctcaggaccaaacagcctcccgactccacatgtccctgtcccgctacagcagtgccctcaaggccctccctcacctggtgaagagtcccgagctctttgacttatagaggaagtgacgcaggtcagggatgcccacttgggcaacgctgtagtagggtgtgcgcagtgcctctcgcagggccaggtgggctccgcgcttgcgaaggcgctcctggaagcggcggcggcagtcagagactgcaaagaagtcctcacggtcagtggagacaagcagcaggcagaggtcagtgtcaggctctaggtaagagatgtgtgcgtggaagaagccggctgcgttgaatttgggcaggcacacgggcgtccaggcctcgccctcgcgaaaggacgaggaggaactaatgaggttgaagagcaggtgcaggtcgatggggtgcagaaattggtcctttcggcgcacgagtgccacgagctggttgcgggcca

SEQ ID NO: 6830 - DNA, 1018 bp, Artificial sequence
  DNA replication origin
cagccccccgcccggccagccgccccgtccgggaggtgaggggcgcctctgcccggccgcccctactgggaagtgaggagcccctctgcccggccagccgccccgtccgggagggaggtggggggggtcagccccccgcccggccagccgcccggtccgggaggtgaggggcgcctctgcccggccgcccctactgggaagtgaggagctcctctgcccggccagccgcccctgtccgggagggaggtggaggggtcagccccccgcccggccagccgccccgtccgggagggagggaggtgggggagtcagccccccgcctggccagccgccccttccgggaagtgaggggcgcctctgcccggccgcccctactgggaagtgaggagcccctctgcccggccagccgccccgtccgggagggaggtggggggggtcagccccccgtccggccagccgccccgtccgggaggtgaggggcgcctctgcccggccgcgcctactgggaagtgaggagcccctctgcccggccaccaccctgtctgggaggtgtacccaacagctcattgagaccgggccatgatgacaatggcggttttgtagaatagaaaggggggaaaggtggggaaaagattgagaaatcggatggttgccgtgtctgtgtagaaagaggtagacatgggagacttttcattttgttctgtactaagaaaaattcttctgccttgggatcctgttgatcggtgaccttacccccaaccctgtgctctctgaaacatgtgctgtatccactcagggttgaatggattaagggcggtgcaagatgtgctttgttaaacagatgcttgaaggcagcatgctcattaagagtcatcaccactccctaatctcaagtacccagggacacaaacactgcggaaggccgcagggtcctctgcctaggaaaaccagagacctttgttcacttgtttatctgctgaccttccctccactaattgtcctgtgaccctgccaaatc

SEQ ID NO: 6831 - DNA, 1562 bp, Artificial sequence
  DNA replication origin
ggggggctgaccccccccacctccctcccggacggggcggctggccgggcagaggggctcctcacttcccagtaggggcggccgggcagaggcgcccctcacctcccggacggggcggctggccgggcggggggctgacccccccacctccctcccggacggggcggctggccgggcggggggctgacccccccacctccctcccggacggggcggctggccgggcggggggctgacccccccacctccctcccggagggagcggctggccgggcagagaggctcctcacttcccagtaggggcggccgggcagaggcgcccctcatctgccggacggggcggctggccgggcggggggctgacccccccacctccctcccggacggggcggctggccgggcggggggctgaaccccccacctccctcccggacgaggtggctgccgggaggagacgctcctcacttcccagacggggtggctgctgggcggaggggctcctcacttctcagacggggcggctgcctggcggaggggctcctcacttctcagacggggcggttgccaggcagagggtctcctcacttctcagacggggcggccgggcagagacgctcctcacatcccggacgggcggcagggcagaggtgctccccacatctcagacgatgggcggccgggcagagacgctcctcacttcccagatgtgatggcggccgggaagaggcgctcctcacttcctagatgggatggcggccgggcagagacgctcctcactttccagactgggcagccaggcagaggggctcctcacatcccagacgatgggcggccaggcggagacgctcctcacttcccagacggggtggcggccgggcagaggctgcaatctcggcactttgggaggccaaggcaggctgctgggaggtggaggttgtagcgagccgagatcatgccactgcactccagcctgggcaccattgagcactgagtgaacgagactccgtctgcaatcccggcacctcgggaggccgaggctggcggatcactcacggttaggagctggagaccagcccggccaacacagcgaatccccgtctccaccaaaaaaatacgaaaaccagtcaggcgtggcggtgcgcacctgcaatcgcaggcactcggcaagctgaggcaggagaatcaggcagggaggttgcagtgagccgagatggcagcagtactgtccagcttcggctcggcatcagagggagaccgtggaaagagagagagagggagaccgtggggagagggagagggagagggctagaaaagacaatcttaaaggactatcccttattgaacatatgtggctttatttaaaacaaagagcaactcactctgatgtctttctttttcttacatcagctaccagacaggcctttggcagcagagctctggagctcaacaggccaatgtctaaaagaagatcagctaccagagataatttggaggatggcacttacctatggatgaaatccatctttttttgccagggacctcttcaagtttaagaattattt

SEQ ID NO: 6832 - DNA, 2033 bp, Artificial sequence
  DNA replication origin
atagtctgtcaactctcccctccagccctatgcccctgtctttggccagcctcctccttgatcaaggccttccaggactccctgtttcctgtcaagatctccttcccctgaggctctgaggcacttccggacctgtccagctggtcccagggcagagggtagaatatggatgagcctgtgccatccttgatgttgtcaggacacagttctgggaggggatgagtgaatgtcctggtccccaccaatccccaccccagccccagtcaccacagcctgactagtctgggtctggctgcacaagagttaatctcagggtgtccccccccccaccacgtgtgcacaaattccaggaacactttccattaaggacactctgagcagatttcatttcatttacattaataagaaccagaaaaatctgcagggtgggggtggggccggggccggggccggggcctgggccggggccagggcggggttgggggcggctcgggcacgtgtgctgctcagtttgtctggtagaggctaaggggctggggctcccggccataagaggagaggcccagccaagccggtgccgccgatgtgcttgggggaaggtagatccatccagtcttcagggattcacggtggagggaggaggcagagcccagctgcttctggacactcctaacctgagcagggtggcaggcccaggtcctagggccttccaggcggaggggatggcagagctaataggatgccagcacatggaaatgactggatcggggactggggccctgggtttggatgagatgggtgtggacctcagcttcccagtctgtcagggaaacaggagaggctgctccctctccttcctgtcctcactgcaggtatggctgcaggtgttagaagggaaggtaatgaaccttgagccagtcttagagaccatgatgccccttcctcagtcttcccttcccctctccagctctgccagtgagctgagccatggctggcagacttggacctgttcagtgagctcagaagcctgttctgggtggacacccccaagatccacccacctgaaaaggggaaagcctcagaatgacattgtgtgcacaagggtgtgcctgctgggtggcggcttgtgctctgccacgctgtgaccctgggggctccctctcccttcacagaaggctgccagaccaggtttccttcctcaggggtagcaagaacatctgattcctgccccctcaggagccaggttcacttgcacacttgctcattaatgtgtctggcttgtgtgtgctcttctatatgccagtggctgggtggggttatgcacaagtgtgcatgcttcacacaccaaccagggagggggtctgcaggatctggatgtaatgccacctcaaatgtcaagggtgatggggaagcatgcatgttgcctgctgcagccggatgcctgagggctggcctgcattgcgtgtgggtgcgtacacatggcatgcttatgagtgcagaggatggctcctcagcccaggagttggggagtaagaggaaggagaagaagccccagctctggtgcctctcaggatttgggctcagccctgtcttgctccaggtcttacagattgaggctaggcgcccttaggtggtggtaggctgtgctgggccagggggccctaggctgaacccaaccctgcaggacaggctgggcagggctcccacacctgcacctgaccctgttccaggcccacactaggggatggtggggggaggcttaattacatccatgaatcattctcaaatagctcctgtccagccagactcaggatggtgatgcccgcccagagctgagagccaggggctcctggagcctccgttgcacataaaagcagcagaggacgcgagcaggcaccctagcccctcctctcttggccacctgcctcggcctcccccattggtgtgcagaattcaccccaagatcagaggcctatctcagcacccgtgggtagcgcagaaccaactcctctagacctggcggccccatccca

SEQ ID NO: 6833 - DNA, 1095 bp, Artificial sequence
  DNA replication origin
tccccgatccagtcatttccatgtgctggcatcctattagctctgccatcccctccgcctggaaggccctaggacctgggcctgccaccctgctcaggttaggagtgtccagaagcagctgggctctgcctcctccctccaccgtgaatccctgaagactggatggatctaccttcccccaagcacatcggcggcaccggcttggctgggcctctcctcttatggccgggagccccagccccttagcctctaccagacaaactgagcagcacacgtgcccgagccgcccccaaccccgccctggccccggcccaggccccggccccggccccggccccacccccaccctgcagatttttctggttcttattaatgtaaatgaaatgaaatctgctcagagtgtccttaatggaaagtgttcctggaatttgtgcacacgtggtggggggggggacaccctgagattaactcttgtgcagccagacccagactagtcaggctgtggtgactggggctggggtggggattggtggggaccaggacattcactcatcccctcccagaactgtgtcctgacaacatcaaggatggcacaggctcatccatattctaccctctgccctgggaccagctggacaggtccggaagtgcctcagagcctcaggggaaggagatcttgacaggaaacagggagtcctggaaggccttgatcaaggaggaggctggccaaagacaggggcatagggctggaggggagagttgacagactatgcatcttgtcctcatctggctctaccctgattttgaagggggacccaggcagaccctgcctctctggaccaccctacacagagaaggcccagcctctgagatcccctcccccagcccctgcccaccgcactcctgaaacagatctgccaggatgctcatcttcatgactatgggacaagaagggggagtttgagaccccggagtggatgcccagggccgctggctgcaggggatggggatggaagagactggaccgagctgctgcgtgcccaccccccgtcctgccgctgtgtcctccccacatctggatgcttgttctggcac

SEQ ID NO: 6834 - DNA, 1028 bp, Artificial sequence
  DNA replication origin
tgcctctctggaccaccctacacagagaaggcccagcctctgagatcccctcccccagcccctgcccaccgcactcctgaaacagatctgccaggatgctcatcttcatgactatgggacaagaagggggagtttgagaccccggagtggatgcccagggccgctggctgcaggggatggggatggaagagactggaccgagctgctgcgtgcccaccccccgtcctgccgctgtgtcctccccacatctggatgcttgttctggcacagcccccagcctggcccagcggagccgcagccgcattctgctgcctcgtggccaggacagggatgtctgcttcattggcgggggtagggaagagtctaagatttcaatttctcccaggtgtggctcagtctggagggtgccttggggaggctggctcagaggccggcacctggggcggggggtgtgcagagggggggagggggccaccaagggggtctcagggaggaaaaagggctcagagtgggaggtccgtggaaggagacaggggctctgtgaggggcaggggactcagggaggggggttagagaaacagggggcttagggggcaggagctccaggaggagggctggaggggcaggaggtttggggggttgggagctgagggctcaagaagaggattgaggaacacggggctttgggaagggggttgagggggcaaggggtttgtgggggttggaagcaggggcttggggaggaaggttggagggagaagggactcagaatgcgactgacttcactgggggacaatgggctgccaatccttccacccataccggtcaggtggctgggggaggggcgctgacccacttagctgcctctcccccaggcttccactaatgagcgctctgggctttgggaggcagccttccccgcccaggctgtgcctcaggccatcccttcccccacagcccctcattatctactgggggtgttcattagctcaggcatccccccttatctacagctgcgcttgcctgtg

SEQ ID NO: 6835 - DNA, 1045 bp, Artificial sequence
  DNA replication origin
aggtggctgggggaggggcgctgacccacttagctgcctctcccccaggcttccactaatgagcgctctgggctttgggaggcagccttccccgcccaggctgtgcctcaggccatcccttcccccacagcccctcattatctactgggggtgttcattagctcaggcatccccccttatctacagctgcgcttgcctgtggcagtgaggaggaggccctaggccccaaaatgcaccctctttgcccctagttccactacgcccccaggactggggaaacaaaggctaccagattgctgttgtgcagctcagctctgagcagagctttgattccacctgtgggtcccccagcatgccaatgaggggggtgctgtggcgaagctcacaggagagctagaacccaggtgctggcagacttcccatgggaagtctgctctgctcaccccaggggcttccagtacctgtgatcaggagtcccattcggcaaggaaaggggctcacagagggtgaagtcctggatgtgtggggagcacaactctgagggatgcagagtagggggcagcacagttctggggaggaaggtgtggggtcagaagggatggtgggaagaggggagagggccctatggggcatggcttctcatggacacagctctgcaggaacagacagcgcatctgcaggagcgcagctctgggagggcgatgtagggggagcacagagtgcgggcaccatctgggggaaggatgagggtggggagcacggctctcgaggatgtcctatgggaggacagtccagggagaagcccgcctgtctcccacagccttggcctcttcggactcctcccccacattcctggagtgcatggggaggttggcttgctggattatgcccaagtccctgaggctccctctgattctgtcccgctgtccatctgtcctccctccccaaggagcccaaggcccaggtggcactctcccctcacagtcccctcattagggatgggctttgagatccttcggcagcatctgcccccacccccaccccc

SEQ ID NO: 6836 - DNA, 1015 bp, Artificial sequence
  DNA replication origin
cacaaggtctaagaggaagggtacagtcagagacccctgtgtacccttgggccattgaggagctcacacacagctctacaggcagcaggaccccacaacccaccccctgcgctgtcagaaagtctccatcaggatacagagagcactgaagtcaggcagggagagaggcattgaggtcaacacctcccagcagaggcccagatcccattgtccacagcagccccacactccatagactggggggacaatcatccccacttctcagctgagagagctctgagacctagccaggcttccctccctcctctccccatcacagggccccctaacaaggccaattccagatgtgaggggagtggggaaagaagatatgccagccccttctttctccaggtgggcgagggcaggcacagctgggctgtgtgggcctcagatgggcgcctgagtctaggtcaggccttcagagcctggtaaagccaaggggactggagccagggctggaggagcaggagggagcacagctggtcccaggtggtcaggcatcatccctgagagcacctgtcctggagagtcatggccaggggtgacgatgcttatggtgcacccctggtgtgagagcctgtccttgccataggggtgggggtgggcactgggacactgggaaagacagctcggctcagccggtgtggtggtggggaatgcagggccgtgggaagagtctctgaagggaagcaaaggccagaaaaggagacaggttgtctggggaaggcccaagagaacctcagcctggctgaatgcgggcaggcagtggtcagccatgaggctgggggctcagaggtccatgtggtcatcaggcaagattggggcaatggacagctgcggagctcatgcgagctccagagcagggctgaggggcttcctccctcaccttccccaatcccaccccactgagggccccagccccacggtcacttcaggcagcctgagctgggcagacagtttccaaagaaggagg

SEQ ID NO: 6837 - DNA, 992 bp, Artificial sequence
  DNA replication origin
cctgcagaccctgtcttctcccctctgcccttcagggagccctaccccatcctgaagtactccacctttctgagtcccctctccaacctggggttcagtgtcccagggaccccacccccagcaaacttggctcctttcagctcccctcccttgcgggcagaggcagggcgttcaagcccatttaatcttggcagaatgcaatttcctgcttcagggagctggcgggtttaggaggcttaatgaggggggagggggagacagggaagaagagaggctgagacggggctgggagatggagatggagagtccctgagaggggtggttgaggaagtctcggggatgcgtgtctttgggggtcaccctggggtccttgggatcacacaggggtcagctcttctgtgtcagcctctcactggtaggtcaggggcccctgggcgaacctcccagccccaactctgtggggtgtgaatagggggaggggaaggggcgtcaaagtggctcactgtcatcaagaagagggccgggggtaatgagatacgtgcctgtgtgcacggacaggcagggggacatgcacctctacggccaagggggtgagaggtgcaggtcccagtgcgaaggctggggaggggtcctggggaaaatgtgcagctggaggtgctgggtggactggacactttgggtgggtcccacggcaggacagagggtgtagctgtaactggcagccccaagccccccaggtggtagaatgggcagccaggctggaatttcagccccaaatgggatgcttatctgtatgctgccaccaaggaggcagagacgataaaggacaaaggggcctctgggctgctggaagccccacacctggtgggggcggggtagccaagagccctgcctaacacctggagcacagacagctcctgggggagattggagcccctgcctacaacccacctgaccccctgacggcacccctaccgctctatcccccaaac

SEQ ID NO: 6838 - DNA, 1838 bp, Artificial sequence
  DNA replication origin
caataaagctaacattgtaataaagcaactcacaaatttttttggtttcccagtgcatataaaagtcatgtttacactatactgtagtctgttaagtgtgtgatagcattatgtctaaaaaatgtacatatcttaattaaaaaatactttattgctaaaaaatgctaatgaagtgagcacatgctgttggaaaaatggtgctgatagacttgctcgacacagagttgcaacaaaccttcaacttcagaaaacacaatatctgcaaaacgcaataaaccacaataaaatgaggtctgccgatatgtatatgcacacacacacacaaactataacaacatattatgatgatacaaaatgctcaccccagcactgacacagagcaagggctcagtgtggattcactgctgcaataacaattttttttgtatgattattcagccctctcgaattgcttaggaaggaattggcattccaccccatgtagccaggctcaattctagctctttgccctcttcctggcccccttccctggtctccctgccattgaaggcctctgtgtgctgggcctattctgtgtgtctgagtggagcttcatgaacagatcagttgagcctctttccttcccaacccagtacactggagtctctggcaagtcctgacagctcttccgtggtaaccagcatgatgctaatgatgctggagatagtgatagaagtggccaggctataaggagaccatggaggctgtgagaggatggaagggatggtgttggaagccatagagatggtggcttaagctgtattggtgatggtggtgcagtggtggtgacctcaggggtgaccctcatacagatgagtggggatgaggagagatggattgtcacagtgttttcaatgaggcgtgacaaaggggagaggtgcaggtgctgtcacagcagctccataactccaggatggtgtttgctcacctcaaatgccctgcctgtgcttggagcatgaggcagcactctaagtcctgagtcaggagaccctcagcaggatccctagtgcccagctccaccttgcacttggagtcaaccagtcaatgggtcagagggagagaggtcttttcctggaggtcttgctagccagggagagaagtgggaggaggaagaaggcggagaggaggagtgagaagaaaaagagaaaggaggaagagggtaaagagcaggaagaaggaggaggaagaagagaaggaaatgcatggggtggaggaagagaagggagaggaggagagggcagagaaggaaaaatccaggagaagagaggagaaggaggaaaaggagggagatggaaaagagggagaagaggagagaggaagagggagaagagaggggagaaggaaggagaggcagagggagaagaggagaaaggaaagaggagaaagaggagggcacagaagacagaacaggaagaggatgaaggagaggacaaagggccaacgcccctgggagcctccgcagggtgcccggggcagggctgagaagtggtcctggtggtgaggccatgaccttggaaagttgggttgggcagagggtcccttcctggggtcacggtaggcccttctcagttgctgagccattggctcatcaccaggccatttgaaagcaaatgtccccttgaggagagaaggtgctagctgatctggcctctctaaggtatggaactataaggagagtctgtgggagctgctggcctgaaataagggctggcgattgaggcgatcacggggagtcgttgaatggctggagagagctgtgtggctgggctgcccccgacctggcctaggctggaggctga

SEQ ID NO: 6839 - DNA, 1447 bp, Artificial sequence
  DNA replication origin
aaccgtgcagcccagcgcggccgcccggcccgggtccagcagccaggagagcgcagcgcttcgaagccgagtgcgcgccaccgcccgcgccccgcgctggggaatgcgccctcggcgcgccggccagggggcgcccgcagcccaccccaggggaggcggccccgagcgcccctgagccttcccatggcccgggctggggcccgggccctcggctgctgacgcgcccgaagcccgcggaaccggttaagccgcggccgcggcgccgatcccggctgaggcgcagcggcgagaggtcgcgggcagggccatggccccggggggccgctagcgcggaccggcccaacgggagccgctccgtgccgccgccgccgcccgggcgcccaggccccgccgctgcggaagaggtgagtgcagcgggaaccgggagggagcgggcaggcggccgggccaccccgcgacccctctgggacccgcggcactgcaactccgcagaagtgtccggggagcgggtctcgtcgagccggggggctgcccgcggacataggggcaacaaggctggggtgggattcttacctgtcctggaggcccggaccccttacctacggggcggcgtatggatgtgtggatgatgtggcctgcggggtcacccatgtgcaaagcaactttttcctgcaaggttctgggtgggtgctctcatacacccccaccttcacgcttctggagcgggagttccgatcccccttctgcctcagctctctctcccattaacgcccgaggcagcgctcttccccgtagatgcgcttgccctacctcagtgtctctacttgaggactggccagcccgaagggaagcggtatactggcagtccccacgtggggggtctcccacatcagcagagtgggaggacctccagtcctgaggcatttctcccagcattgtgccagccccttgacccccagctgccaccttgggtttgcttttacagcagagtcctgcctggattaggggcacggctgtatgtagtgtgtaggtgagcttggagagcctgcggtcaatccctagtttgaaccaggggtcccagtggtgaagtgggcaggggacagcgggggcttggcggggttgcccccagcagatgggacaggagggtatcaaagttggcctaggaatgaggcagtgctggcgggagttggctggagctggggctgggggccccactggataaataactcctaatttttgagatagctgtgttttgccaccagaacattactgcttgggagaggtaagggagacgccaaccaaagacaccagtatgtccaccctgaagctgggccaggttggggacctctgtcctcctgaattcacccagatagtctcccagtagttatcctagttgcagagaagggaaaactgcacccaggggttgggagccccatctcagcccagg

SEQ ID NO: 6840 - DNA, 900 bp, Artificial sequence
  DNA replication origin
ctcagtctcaagtccaggtcccctcttggacagcctggcaggtgggggaaagaaggagagggaaggaagaaaaggagaagaaggacagagagggaaagaaagggcaaacccacagtgccttcccctctgccagtcccgagatgcctgtcacccagccccagccccagaaaagcccccaagtcacaccaagcccaggtcagtggacagaggaagaacagccaccgccacctgggagcccaccaggaagaaagcagagaaggagggaaggaaggctggtgggagggagcaagggagggaggcaggcgggagggaggaggagagagggaggagagagggagggacggaggagagacgcttgaacaaagaaacgaggagccggggctggcaaggggtgcagggaagaggcggccagaggaaggagtccggaggcacctgggatgggacagggggccaggtggccaaactgtacagccggatccagaccgcccaggcttggagttgggggtgggggtggacagcctgtctccaggaagggaggttggctcctccgagctgaggactgcctggatggaagggaggcaggaacaggggccgtaggggaacatggggagattatcaacagcaccccacccgctacccagcccctcagattccctcccccacttcaacaagagctctgtctccttcttggctcctcagcttccccatcccccaacacctcaaggaccaggaagcagagccaccccagcatagctgggactgaaaccccccttttgtggccagggtttcccagtcaaggtcacctgagcctggctccatcctccccccaaggtatgctgagcagcgaggggctgaggctgggtgggctgccgccttctctctggcccctgctttctctcc

SEQ ID NO: 6841 - DNA, 1104 bp, Artificial sequence
  DNA replication origin
ccacaaagaggggcccaactaccagtggatgcccttctcagggaagatgccctacccacggccgggcacggtaaggaccccactcatcctgcctctcccctttctcttcttctaagaggcctctgggtcaggctctttgcaacatgggccccaccatcatggccctcccagccagcggaggcggtgagctgtaatgcacacacagacgggccttcacacacagtgtcaagctgtggaggagcccagatgggattctgggacaaagatggtgggttgggcgtggtcggctgctcctcagagggtcctctgtggggctgtttgggagctgaaggttggggggaagcgtcttccctgcaggtgctggaggcaggctggaggttggctcagctgaggaacaggaggcaaagagctggggaggggcagggccaggcctcaggcagggtctcagaggtcacagaggcatgtcactttatcttgatgtgacaccggctgatgtgggagcctaagcaggagagcagcggatctggtccaatgcagttctgactccatgtagtcaggactgggctggagaagctggtctcagtgggggacaggggaagcttccctccagaggtaacctggagtcagaaggatgggccagaggtaagctggccatgacggggggcaggctgagcccaggttcaggggacagcttcaggaaggaggagagtgagcctggtgtgtgacaaggacgtcggggcctgcagtccagctgtgcaggagggagacgggtgagaccctaggaacaaccagagaggaaggagatgacaggggtggggagggggacatggaagggagtggtccgcttggccaaatgctgccacgaggtcatggcacctgaggccagggaggtggctgtggcatttggccacctgggaccttggccagagcaggacctgtagaggtcaggtgcagggcagaaacttggagagcgggtttggggagaggagcaggttgaggtagtggggacagacagtgcagcggcctcttctgaagctaatggctccagcctgccctgcccaggcagcctgggactgacactcgccacctgtccacagtgccctg

SEQ ID NO: 6842 - DNA, 1517 bp, Artificial sequence
  DNA replication origin
tcctgggctagcgtatgggtcgtaccggaagttgagatccttgaaggagaactgcgtctcgatgatgccagtggtcttgactcgcgagcgcagcacgtcctgctcggtgggcacgtagcccggggttaccaggcgctccaggtcggagaggtagctgcgcgagacccggccgtaggtgggtggggaggcgtggagggccccctgcgccccgcgccccgcgccccgcgctgcccgcgcgctcactagcccgccgagtcgttgagctggtactccgaggcgcgctcaaaacaggcctggataccggagtccttccacagccgctggatgatgtccgacatctccttgggcatcgtgccctcctcgatagtgtctgccatgtgcatcagcttccgggcgtcgtcctgggggcagggtgagagtggctggtggcggccagggactcgggcccagccgcgagcctcgagtccccagaggcccgctcagcccgcctcctggcacacctggcgtgcagagtctccgtactggatgttgagtgtggtcatggcgcgtacgatggccaggatggactgcaacgtgttgccgtagatgatggcgataaactcgaggcactcttccagcgagtacccgtcctggtggataatcctgaggccgaggagagcagaatcagcgcctcgtggggaagtggggaaggacccagacccaggggcctcgggacaggcaggggcactcacttcatctgcttgacgatggtgctcttcccggactcaccggcacctgaaagagacgcggcgcctcagagctgcgctgaccagcctgccccctccagcaaggaggccaggaggacggggacctcccgagttggcagggtggacccgcagcgaagaggcctgagcgccagccccgaccccgtagccacacctacccccccatccaaattaagtcctgacatcctgaagtcacaaggtttgcaaatgccaggaaagtgaagaaaggaagccaacgaggggactcaacgacctcaactgttctgggacaggggagtccccaagaccccggcacaggcagcctttattatgctgtgagactgcaatgaagaaatcccggagcgtcatcgccacctcgtgggagcctctggtaccgcaagcactgggttatttgaggcgggtaaaccccttgcatttcacctgaaggggtgcaggtgtctccaggaggctcagagggaattagctcttttgggtaggagggagggcagagttgacatcctttctgagcttgcccctgcgagggcgttgggcacagttaatgagatttccggcttagcctctctgccttgggggaaagtgggactggcttggtccctcacccacctccagctggttgaccagaccctggggagcttgggtggagcccctcttgaagctgctttttccccttgagaggtcaggcagtgaccttgaggcaggcctggatcagccccatctctcctcagtgcccatggtccagtggacgcggcttta

SEQ ID NO: 6843 - DNA, 760 bp, Artificial sequence
  DNA replication origin
tcaggattatccaccaggacgggtactcgctggaagagtgcctcgagtttatcgccatcatctacggcaacacgttgcagtccatcctggccatcgtacgcgccatgaccacactcaacatccagtacggagactctgcacgccaggtgtgccaggaggcgggctgagcgggcctctggggactcgaggctcgcggctgggcccgagtccctggccgccaccagccactctcaccctgcccccaggacgacgcccggaagctgatgcacatggcagacactatcgaggagggcacgatgcccaaggagatgtcggacatcatccagcggctgtggaaggactccggtatccaggcctgttttgagcgcgcctcggagtaccagctcaacgactcggcgggctagtgagcgcgcgggcagcgcggggcgcggggcgcggggcgcagggggccctccacgcctccccacccacctacggccgggtctcgcgcagctacctctccgacctggagcgcctggtaaccccgggctacgtgcccaccgagcaggacgtgctgcgctcgcgagtcaagaccactggcatcatcgagacgcagttctccttcaaggatctcaacttccggtacgacccatacgctagcccaggaggtcactgccccaggccccgtcctgccccggggaccccatccctgcgatagaccctgccccttccctgataccccgccagcagaaagggtggtagtcccggccgagagctcccc

SEQ ID NO: 6844 - DNA, 1553 bp, Artificial sequence
  DNA replication origin
accctgaatggaaggggcaagagaagctgctggtagggacaagagggtcacccaggtttgcttgtaaccccacctgaggtagacccttttgggcacagccagggcctttgtcctatcctgaatcctctgggctgatccaagggagctggactctgtccccagccacccctcaggacagcccagctattggccatagctggtgtcaacagtaccctcccttaaccccttaacacaccatcctgttgtccaaccagcccagggtactgtgtgtgggtggggaagtggtgtgtggatctgctgtccaaggacacagggagcagatcctgctggagaaggctggaggttgctctgagcctagtatttggggaagggtcctgctgtgtctcactctggcacccaagggcccccaggtctgccccctccccactaatttatttatgtgggggccacacaggccagagctagcttggactttggaccctttggaggctgctgggagggacagtcactggctctgggtagacaggtgtcaaacttgtcacatggaggtggcagggtgagcagctggcctgtgtgtgggagggatattccctgtccttgatgaaatactgggagggagggctgtttgctgagcccaggcccaccaggtgagtcgtgggcccccaggggcaggagagctgcgggagattggtcagttgggcactgctgagtcaccgtgagcttcagctgccccaagtcctgcccgttcctagctggggctggctgctgtgagtcctagaggccagtgcagccgggcggtgaagggcagggcttggggttgggggcatgaggcgctgggatactgtgggaggtatgggggagggtccgcgcctcaaggctagcagggctcagagctttggtgaggtggcaggttggggccagggagtcccagggggctgatagggtcctggggtttggggctgcaaggcagctagggctaccaggtctcagggtgactgacacgcatgaattcaggcacctgtgaaaaggaaacccagtcagcatccctgagacccaaaataaatgggtttaggcattgtgtgtggtggggcggccctggaagctgtgacacctgaggtcttggggcggggccaaaagaaattcaatgggtgggacttgtggggtggggcggggcctctgtcggtggggtggagcctgaggagctggggtggggcctggaggcagtaggctccaggatttgggggtgaggctccagggccgtggtgtggggtggggagctggacggggctggggtattgaggcaagagcctggagagggcagcgacctacctcagaagaggccacagtctttgaggttctccttgatgatgatgtcggtgacagcgtcgaagacaaatttgacgttctgcgtgtcggtggcgcacgtcatgtgggaatagatctccttcacgtcgcgccgcatgttgagctcgaggaactgcaccttgatgtagttgccggcgtcctcgtaggtgttgggtcctgcgggggcgggagctctcactctgctcagc

SEQ ID NO: 6845 - DNA, 821 bp, Artificial sequence
  DNA replication origin
gctcctttctccatccacagtgcccttcccctcctgacccttgcttgtgcctttcttacccttcgcagagcaagtctgtgggctgctttgccatcaggctctccttgatttgcgccctccaacctcgcaggcattttcccatctagaccacctggagacagcgcttggagacactagggctggggctgtgtgggtggggtgacaagagcagcaagagcagtaagtgtcggactagctggctcttcacagtgactcaggcagggttctcagaggtgctctatgagggtgatgaaggacaagtaggagtctgccaaggaggtggaacagggtagggaaccttcagccctgggaagcacgagggcagaggcacaggagcatgaaagctagcaagttctgtgaacagcaggaacgtgtgcagcgtggccagccaagcccgggggaggtgaagaggcttgctgggagcaggtgggcggatatgagggaggccagccaggtgtgggggcaggagctgcagggggtctgaggagtcaggggacacagatcctgggctctggaagggctaggttggaggcgaagatggggcattgctgttggagatggtcttggggcactgtgtggatagcatgttagcagaggtggtggcatggtgagaagaggcagcctagctagaggctgagagttcatgactagaaaggaagaaggagagccaagggctattggggccctggaaggaggatctgagcggtcctggagccctgagctctgctgcatgggtctggcagtctttcaggcctgggtttacgttttcagagatggggcag

SEQ ID NO: 6846 - DNA, 1823 bp, Artificial sequence
  DNA replication origin
ccgacctcctgctgtacctcgcagccccgccgagaggccctaaggcgacgacgtgtccctcccggtacccccagggccctgcttaagctcggcgctgagtcccgactggcaggtccccaagaccagcgcctggagcgcgcggggctttggctcgccggaggctggggcgcctgcccgggtcaggacggtagaggagagctgcccagagcccggctacggacaggagggtggacagtagggctcggcccacccgattcccctgtgcgggtgggatgaactcccgaagcggtacctggcctcgcggttgggaacgtgcggcgctccgctcgggccggtgcggttcgctctgctcccggctgaactcggctgcaacagcgacaacagcgacgcgggatgaagggcgcccggccccgcccccggcccgccccccgcccgccaatccctggcggcccgcgggaggaggggctggtcgggggaatggcgggggccggggcaggccgggagcaaaggggcggcctgagcgttagggagcccctaggtgggagagcagagctgccagagggactccgttgagtcttgtggggggaatgcttcagtccaaagcagattctctctgaggtctgtgggtgtcacattaacccctgaaatgctttgcccacaccccccaaagccagaaggggagcttccgccaagaggactggcaatgcatagcctcagtgagagatgcttgaatgggggactttcaggcgacactcaggcaacaaaatacctcttctacctgcctcccccttcccaaccaggggtggggtgggggcgagggtgggagggcttcttatatcaattctgtctccaccccagatattcagaggaggctgaggctggaacacagagggcaggggcagtgaggtcaggcaaggagtaaggcttggcttgcttgagcctcacctggggccccccgaccatgacccccgtccttatttagaaggtgtaggagacagctgtcagcctgtccacaagaagggggctgggacttggtgtcctggggacagacaggggttttaggatggccccgttcttggctgggggctccttatcccacccctgcctgctttccacacaggcccttggtgctcagagacgggtggtgggtgttaaggtcccaggttccaccagtaggaagctgggggagatgctgaccttcggggtgaagtgggggggttctcagaacagctgtgccccttgcttctcagtcactggctctgatccgattaatctcatggcctctgctgttcctattcaagctggtcttctctgtgtcatgcctgccccacttcccagtgcggggggaatgccctgagaggacatacccgaccctcccctgccctgggctgggagtcaggactccaggattttctcctgctgactcacagaaccaccacagccaagccctggcgtaccttggtttccctctgtgacatggaaatggctgtcttttctcctgaggggaatgagtggaggggaagctgtgagaccgggcaggggactcagctctggctggcagggctagagagaaaggcattgggatggtggcaacccctgaaaacctcaagccactcgaacttctgccttgctggtggctggaaaatgggaaagggctgcctttcactcctggtctggggctgatatcatccttagatcagagctcactttgactcccaccctccaaatgggcatggttctgccatgggacagccatatagaagaggtgctgacgagggtctcaggcctgcctcccacccctcaacctcccacttgcagacacc

SEQ ID NO: 6847 - DNA, 1410 bp, Artificial sequence
  DNA replication origin
ggcggcacaccacaggcttcctgaggcagggcccatggggcaggctggagagggcccgaggggaggacccaagaggggcctggagcagtccctggagcgctgccccgacgggcgcctgacaggcagagcagcccggctggcacgatgggaatccgggtatatttatctcggctgctccggacaagggcttgagggcagatcgggccgggccgcctgaggggccgcggggtacatgctggtcccagagccggtgccatttgcagaggagccagcgggcacagcgggcgcagggcgcgagtggctccctgacctgaggccggggcgccgtgcgagctcctccccacctggcgctgggtagggtgtaagttagagcccgcgcagcgcacggcggagagaaggaaccaagacttggtttgcaagagcccgcccccgcccggttggccccttcgattggccacagcaaatgcgtgcgtttgtttacacccaggcagggggaggccaggggagggacctgcggggacccgcccttttccccccacggggacctgagtcctgagtccaggtatgggctctcaaacaggtctgagaaaggctaagtcaaaggctcttgagccctgaggaacaccatggaggacttccccactcatgcccatccttccttcagcctgccaaccctgtcctttcttccatgaccgactctggccacagagctgcccctggaaaaggcccttggacctttcaccccttcctgttctgttctgtaaaaggtctgggatggggctcatttccttctggaaaggaagcacatccctcggggctctcagtctgggggatagaaagctaaagagacccaaagatggttccattttgaatgggggaaattcggcacagccacggtacccttcctgcaagaagcatcactgacgggagggatcaggactggaagaggccaagcctggcacgtctctgagagggctggaatgactgaaaccagaaatgggaatctgatttcttgacattgggagcagggggctgaatctctggggagggtaggagtctgtatctcagaattttgttctgcctgggcccatgggacccatgtcttcgctggcttctcaagccactccttgttgtgtgctggtttttttggcccatgtcacaaatggtccccacaccagtccagggctccaggttgccagatcatgacaactggttgctcctgtccttgtgccactgccctagcaagtagccttgaagccctggacagttggagaaactgaggcacaacaagactggctgggtggttcatggtctctgggttgagtcagagaaggattttaagctgaactggacacaccctggaagtctgggctgggtgtgaggacaagcatccagtttgagagggaaaca

SEQ ID NO: 6848 - DNA, 803 bp, Artificial sequence
  DNA replication origin
ggtgcagtgaggaggggtggggtggggtggggctgggtgagggtgggggggcccaggctgggctggtgggagagacaagacaaagcagacaagaagctggtggagtggggagagttgcccgcagagccagcattcagttcacactcacttgggaagcaccttggagacccccctccagaaggggcttgtggggctaggggcagggtgcagctgaggaagctgggcctctcctcaccccggacccagcctgtgagcgtgggaggctcaggcttagctctaagcgcctgctattcctgaccatggggttgccccccccaaccaagatattaagcccaggtgtcccagttgcctatcactttagccagcattgactgggcatcaaacgtgttttgtgggacagaggggacacagccaggccctgctcttgacagcccagcccgagcaagcagaggggctgggaggctgagagtagctccggcaagagggagagccaggattctgccgctggggccctgggcctttcccaaggagttggcctcagggcttgcctttgaggatggtcctggcccttatccccttgtttctctgtgccccgtatccattcctggtgggtagaggagggggccggatgaggcaaggcccagatgccagaaggaaccgcaaggagcacaggttattgcaagtgccagaaacccccgtggaaaataccacctccctctagaaccaggtccctcttcctcctcccacccacctccatccaaaggctgggcccagacctgtgtatcctgagaaaagcaacagca

SEQ ID NO: 6849 - DNA, 1133 bp, Artificial sequence
  DNA replication origin
gaagacgctaggctggacgaagcagaaaggcgggtgtcactggggacgttctgagggtaagccgatggcggctatcgcggaggagaccctggcgaggtggggccccgcgcggggcaagggggatggggtgccacagagggctagttgcaagaggacgcgtgacggctgcagctctgcggagaccgggcctcgacggccaaggagtggcaggtcggcggaggcgggggccaggcccggaggcagagcgagacaggagagcaggcaaggcgggggccaccgtgagtgggggccgcgaggcgggggctggggcgcggggaggtgctaggtcggcctcggctcccgcgccgcaccccaggcccgccaggaggcgccgctgccccgcgaagccgttccggcctctcccggccaccgaaatcccgcgctccggcctagagaggccccggaagaggcggtgcagcgcaccccgaggccgcttccggcttcggctctgcaggagaggccagaatcgggggaggacgccttgggcggggcgtgggtgagagaacctgggggaggtgaagaactaggaggttgcactgggagtggacaagggggaaaataagaattagggaggggctgcggtgggcagggccaagggcaggtagcaccctgcaaggttgcaccctgcgcagctctcggtccactgctgagcctcctggctttttacctcgcaaaatgccgtcctggtgaggtccctggggagcccaccgctggccaagacccaggacagggcaaggaaggcttcctagaggtagagaggtgcacaaaggcgggaaagcagatacggggacattgggagcccctttagaccgatctttaggtgtctgagccacgcccatttggagggaaggctgaatggggaccagcccgcccaaacctgctggaggaaacaaaaactcactcccgttataattgctccccgccccctcaccagctctcttctccccggagacgggacagccctgtctccacaggcttcactccatttccctcgaatggtgcccacctcctatcctcccatctctcttatcctcaggttctactactcatagcaaccagaaggaactttaaaaatcagatcatgttggccgggc

SEQ ID NO: 6850 - DNA, 900 bp, Artificial sequence
  DNA replication origin
atgtttcctcctggagtcctgacctctgcctgtgctttgggtatgtataaccgttaggcccattttactgataagaaaaccgaggtacagggagtttctggtacttgtccaaagtaacaagtagctggcaagtttgcaaactgctcctcagagtctttgcttccaactgccagcctacagcctccaactgctgcagagtccaaaccagtgtgtgtgggggcttcatctattctcagggcattggggaaccacagaaagtttccgagcaagggggtgatgtgatttctttcagtaggatgcccttggctgccatgtggaggataaattgtagggaaacaggagagccaaggaagacgttagaatcctaggctgggagatagtggggacagagaacaaatacagattggaggggaaattgaggtagggaagaggctgatggcatataggggtaggggagggggtcattgctgtggctggtggggggatcatgaagtggtggagagcctgggaacaggggccagtgggatgggatgtacccagttctggacagtgtggatttgaggtgcctgggtgtctcggggaggcttcagagcagtggtggacatggggctggcaatcaaagaagtcaggctggagaggaccttgtggggttctgagcccccagagtgggaggtgtatgagtggagtggcaagcagaggcctggccatagccctggggaccccatggagatggagaaggagcagctagcagggtggaagcaagggttgctggactccctgggaagagcataggactggaaaggagcagctgactggcgggaagggtgccataaccacaggacctggcctggggctggggaaggccatgccttccagtagccccatcttgccctgcctcca

SEQ ID NO: 6851 - DNA, 1666 bp, Artificial sequence
  DNA replication origin
ccgtcctcccgcaggttcttgtcgatcatcttagagcgctcggccgccgccttgtcctcggcgctcacggtgcagcccatcccgccgtccgccggcccggccgccgcccggcccccacacggcccacggcccggctcggccccgcccgacccactccgctcccaccaccagccctctgcgggaagcactcgggtcggcagttccgagcgactgcgggaggcgccttccctaccgccgcgcaccgacggcggggcgggccgggggtggggcctgggcgaaccaagcctgtgactgggccggggcgggcttgcaggcggggccagaggagattagaggctgttgattggctcgagggcggagcgaagggggaagttaggcgcagcccaggctcgggcctgggctgcaggcggggccacgcggagaaaaggcaataggggtggttccaaaccccgggacccggcactgggcgggctgcaggcgggaccgggctgtgattgggtgcggagcgccgggagctctgttgctggacagccgggagggcggatctgttaacccgagggtggggatccggtgccctcgagggcagagcaggaaccagccctctgagcttctgcgagttgggcgagttaggtggaggaggcgtgtctttgtcatttgttaaagttaatgagtccagtaaacttgttttgggatctacgaactcgggagcctttctggactgcggttttctcagtcttaaggcgggtttaccgccttctccctctgggttgcagctagtcgaaaaaggaaaaaaaaaggccgggcgcagtggctcacgccagtaatcccagcactttaggaggccgaggcgggcagatcacttgaggtcaggagttctagaccagcctggccaacatggtgaaaccccatctctactaaaaatacaaaaattacccgggcgtggtcgtgggcgcctgtaatcccacctgctcaggaggctgaggcgggagaactgcttcaacccgggtggcggaggttgcagtgagccgagatcgcgccattcattgcactccagcttgggcgacagagcaagactccgtctcaaaaaaaaaaaaaaaaattggtttccatctttacacctttgcctaggctgtctcctttagctgggtggcttctcatatccatccttccccaatctaccgggaggcattcttcggcaggcagccatcctggactccaatctgggaccaggcaatcaggacccaagggagaaagggagagaggatgagagggtggagagggaggaagagaggagggcgggcaggcagggtgagggggttgggagggaagaaagaggaagaagttgccactggacttctagaaacaaaagtggccatgatcttatgacctgtctcttccatggcctgtccacgtctggaggtggccatgatcccacatcccaccctcctgtggcctgtccccactgggcaatggctgcaaccctatggccaggcaaaggtggggtggaagcagcagtgtttctagctgaacatttcaagtctttctgatcctgtgctccaggagcagcccagagccccaccctcgattggacatttgaagggtctgccaaaaattaaccacgaaggcattttgtgtgaccccagtgccatgaggctaggaggcccca

SEQ ID NO: 6852 - DNA, 1264 bp, Artificial sequence
  DNA replication origin
cccacccccagctggcccctcaactcctcattcagctagtccaccatcccccttcacagggtcccaagatccaacaagccccccaactctcagaggctacatcccaggccttgcagcccagaaggggtgtgggcagcccagcacctactagcagatctcctgggctcacccgcaggggcagcaatatgtcggctgtctcaccacttccacttccccccactcctctagcagccaccatcttttctggccttggaggcggccacaaccctaactcctccactctctctcctacttcccagactggccttcgaaactggaaaacatagagcctccttgggaagcctgaggcctggccccctcccccagcgtgaccagtggagcctcaatccagccccgtgggggttctgcataaggcagcctaggccctctccaacccagggctcccgcctcctagcccagcccacttggtgcaggaagggtggagggatctggggaaggccagagtgtaagaggacttaggggaggatcagcagagggtttcgggagtgatgcctgcagagaaggatctggagggcaggaagcagggagcagggctcgctgaaggggttccagctggagatggggctcaagagcagtttcccactcgagaggttccttgggtcagagtgcacaggtggaggatacagattccagactagggatggggcacagaaggagaaggagggagtgggtggggggcctggcaggggccccgcgggatgctcatgcccaataggaataaaaggcgcaggtgaggaaaacaagcggagcctgagggttggggaacaagtggcgggcatcctgggggtttgggcaaagtgtagggaaggatggcggggctctgaagttctgtgaagctagttagcaaggggggatggccaagcagggcactggaccgcgggtgttggggcactgttgactggatttggaggtctggggtctgggatgagacaggggtctggtctagagtctgggcaggatcaaaggtctagtccaatctagagttttcaaccctggtcctggcccaggtgtggggtcccagacagcccgggtctgggagtttgaagccctagtctgggaggtcaaagtccttgtctggggattcgagctgggaatcaaggatcccagtgcgggacgcggcctcacccaacagcagcaacttcacctcccgcgccgccttctctccgtcctcccgcaggttcttgtcgatcatcttagagcgctc

SEQ ID NO: 6853 - DNA, 911 bp, Artificial sequence
  DNA replication origin
ctacactttgcccaaacccccaggatgcccgccacttgttccccaaccctcaggctccgcttgttttcctcacctgcgccttttattcctattgggcatgagcatcccgcggggcccctgccaggccccccacccactccctccttctccttctgtgccccatccctagtctggaatctgtatcctccacctgtgcactctgacccaaggaacctctcgagtgggaaactgctcttgagccccatctccagctggaaccccttcagcgagccctgctccctgcttcctgccctccagatccttctctgcaggcatcactcccgaaaccctctgctgatcctcccctaagtcctcttacactctggccttccccagatccctccacccttcctgcaccaagtgggctgggctaggaggcgggagccctgggttggagagggcctaggctgccttatgcagaacccccacggggctggattgaggctccactggtcacgctgggggagggggccaggcctcaggcttcccaaggaggctctatgttttccagtttcgaaggccagtctgggaagtaggagagagagtggaggagttagggttgtggccgcctccaaggccagaaaagatggtggctgctagaggagtggggggaagtggaagtggtgagacagccgacatattgctgcccctgcgggtgagcccaggagatctgctagtaggtgctgggctgcccacaccccttctgggctgcaaggcctgggatgtagcctctgagagttggggggcttgttggatcttgggaccctgtgaagggggatggtggactagctgaatgaggagttgaggggccagctgggggtgggccagggtgcctctgagcatcccagctggccttttgcaaagacggtggg

SEQ ID NO: 6854 - DNA, 805 bp, Artificial sequence
  DNA replication origin
tggtttggggggtgggtgggtgtcacgttactgaaaggccaggaggaatgacaggcaggtggcttatacagtacatctcttccaggccagttgagtctgatctgtcttgacagtcttctaaagaacatttgcggccgggcgtggtggctcacgcctgtaatcccagcactttgggaggctgagacaggcgggtcgtgagatcaggagatcgagaccatcctggctaacacggtgaaaccccgtctctactaaaaatacaaaaaattagccgggcgtggtggagggcgcctgtagtcccagctactcaggaggctgaggcaggagaatggcgtgaacctgggaggtggagcttgcagtgagcggagattgcgccactgcactctagcttgggtgacagagcaagactcagaacatttgctgccacctgttctgtgccaggcttcaaggacacagtgatgagtggagcaaagtccccatgcagtgacaatttagggtgttagtgaaaaggtagaggtggagttggcccagagacaggattgctgagctctgaaggagagtcagccaggggaggagtggatgaggggattccaggcaggggcatagcatgtgcagcatctcggggtggtggggagctggctgtgcttgaacataggctgtggaggctggctggagggggccacaggggaggaagttatctgggaggtgacaggtgtgtgtgtaggtcagagcccctggacctcagctgtgaccctcgctggccctaggctgaggaattacaaggggtcccaggaatcccagaggcatg

SEQ ID NO: 6855 - DNA, 1122 bp, Artificial sequence
  DNA replication origin
gcacaccttagcccaggcctctgcccctgggagagaatacccatcagttctcggtattttttttctttctacattttattatttcaaaccaggtgaacaattccataaaacatgtgaaaaaagcaaggaagtgttcaacgctgaaggccccgggcctgggacaagggcatgaggggcgtggccccccagcaggcagcggcggttcctaggttagcgctagggagctacattttaggttaatagagcctggggccagggccgctggggcagggccctcagtgacgttggcagttgtctggaacagcccttggaacccaattctgtggagggcagggcaggggtgccgctcgcacgggggcggccagcagagggacgggtgtaaacacgcagacacactcaaggcacggagtcacttggaaggggggctgggggggggcttgctggtcaggatctgacagttttaaatagtttttctctaaaaagttttctagatttgcagttttttttttttcctttactttcatttttttaaaaagctacgagaatgagcaggtggactgtggtttccaggaatggtggcgtctcacgcttcttgtgctttttcctttggggcctccgagcggctggggttgggggactgggcaggaggctccctgtaaacatttggacttgggctggggcaggggctggtgttgggcaaagctgggggtccaggctggagaagcaggggcccctccagacgcagccttgggagactcagcatgtgcccccctcccctcatcacagaacaagacaatggttaaaaaccagaacagatgcccagaagggggtaccatggccattaccagcatctcagacaagggcaggcttcaaacagggaggcctgtggcaacccctcccctacgtctggagctgaggggacagggggagctgagaacaaagagaggaaagaggagaaaagcggcgggggaacaggcggggagcgtgatcttcttgcccccatcttcctcaggggttggggggtacaaagtcggcggtggccctggaggtgggggaaagcagagcatggatcgggaagcagccagggcgtgcctctctcccgcctccctagacaatgaccct
